United States Patent Application Publication US 2018/0126003 A1 - sequence listing, part 107

SEQ ID NO: 189531 - DNA, 1803 bp, Artificial Sequence
  derived and/or modified sequence
atggccgacgccaacaaggccgaggtgcccggcgccaccggcggcgacagcccccacctgcagcccgccgagccccccggcgagcccagaagagagccccaccccgccgaggccgagaagcagcagccccagcacagcagcagcagcaacggcgtgaagatggagaacgacgagagcgccaaggaggagaagagcgacctgaaggagaagagcaccggcagcaagaaggccaacagattccacccctacagcaaggacaagaacagcggcgccggcgagaagaagggccccaacagaaacagagtgttcatcagcaacatcccctacgacatgaagtggcaggccatcaaggacctgatgagagagaaggtgggcgaggtgacctacgtggagctgttcaaggacgccgagggcaagagcagaggctgcggcgtggtggagttcaaggacgaggagttcgtgaagaaggccctggagaccatgaacaagtacgacctgagcggcagacccctgaacatcaaggaggaccccgacggcgagaacgccagaagagccctgcagagaaccggcggcagcttccccggcggccacgtgcccgacatgggcagcggcctgatgaacctgccccccagcatcctgaacaaccccaacatcccccccgaggtgatcagcaacctgcaggccggcagactgggcagcaccatcttcgtggccaacctggacttcaaggtgggctggaagaagctgaaggaggtgttcagcatcgccggcaccgtgaagagagccgacatcaaggaggacaaggacggcaagagcagaggcatgggcaccgtgaccttcgagcaggccatcgaggccgtgcaggccatcagcatgttcaacggccagttcctgttcgacagacccatgcacgtgaagatggacgacaagagcgtgccccacgaggagtacagaagccacgacggcaagaccccccagctgcccagaggcctgggcggcatcggcatgggcctgggccccggcggccagcccatcagcgccagccagctgaacatcggcggcgtgatgggcaacctgggccccggcggcatgggcatggacggccccggcttcggcggcatgaacagaatcggcggcggcatcggcttcggcggcctggaggccatgaacagcatgggcggcttcggcggcgtgggcagaatgggcgagctgtacagaggcgccatgaccagcagcatggagagagacttcggcagaggcgacatcggcatcaaccagggcttcggcgacagcttcggcagactgggcagcgccatgatcggcggcttcgccggcagaatcggcagcagcaacatgggccccgtgggcagcggcatcagcggcggcatgggcagcatgaacagcgtgaccggcggcatgggcatgggcctggacagaatgagcagcagcttcgacagaatgggccccggcatcggcgccatcctggagagaagcatcgacatggacagaggcttcctgagcggccccatgggcagcggcatgagagagagaatcggcagcaagggcaaccagatcttcgtgagaaacctgcccttcgacctgacctggcagaagctgaaggagaagttcagccagtgcggccacgtgatgttcgccgagatcaagatggagaacggcaagagcaagggctgcggcaccgtgagattcgacagccccgagagcgccgagaaggcctgcagaatcatgaacggcatcaagatcagcggcagagagatcgacgtgagactggacagaaacgcctag

SEQ ID NO: 189532 - DNA, 1803 bp, Artificial Sequence
  derived and/or modified sequence
atggcagacgctaacaaggctgaggtacctggagcaacgggcggagactcaccgcacctgcagcccgcggagcctccaggcgagcctcgcagagagccccaccccgctgaggctgaaaagcagcagccccagcattcttccagtagtaatggcgtgaagatggaaaacgacgaatcagctaaggaagaaaagagcgacctaaaggaaaaatctacaggtagcaagaaggcaaataggtttcatccctactccaaggacaaaaactccggcgccggtgagaaaaagggacccaatcgaaatcgagtgttcatcagtaacatcccttacgacatgaaatggcaggcaatcaaggatttgatgagggagaaggtgggtgaagtgacgtatgtcgaattgtttaaggatgccgagggaaaatcacgcggttgtggtgttgtggaatttaaggacgaagagtttgtcaaaaaagctctggagactatgaacaaatacgacctgagcgggcgacctctgaatatcaaggaagaccccgacggtgagaacgctcgacgcgctctgcagagaaccggcggctcattcccgggtggacacgttccagacatggggtctgggcttatgaacctgccaccctctatactcaataacccaaatatcccgcccgaggtcatcagtaacctccaggccggcaggttgggctcaactatcttcgtggcaaatctcgatttcaaggtgggctggaagaaattgaaggaagtgttttccatagctggtaccgtgaaaagggcggacattaaggaggacaaggacgggaagtcccgcgggatgggtacagttacttttgagcaggctattgaagcagtccaagctatatccatgttcaatgggcagttcctgttcgaccgccctatgcacgtgaaaatggacgacaaaagtgtcccacacgaagaatacaggagccatgatggaaaaacaccccagttgcctagaggtctgggcgggatcggcatggggttaggaccgggcggacagccgatatcagcctcccagttgaacatcggaggggtgatgggcaatctgggccctggaggtatgggcatggatggtcctggctttggtgggatgaaccgaataggcggaggcatcggctttggagggttagaagcaatgaactccatgggagggttcgggggcgttggccgcatgggcgaactctatagaggggcaatgaccagctccatggaacgagacttcggcaggggcgatatcggtatcaaccagggcttcggcgacagttttgggcgattagggtcagctatgatcggcggctttgcgggccggatcggatcatctaacatgggtccggtgggatccggaatctcgggcggtatggggtccatgaacagcgtaactggcggaatgggtatggggctcgatagaatgagctcatcattcgataggatgggtcccggcatcggggccatactggagcgcagcatcgacatggaccgcgggtttttatcagggccaatgggatccggcatgagagagcgcataggatcaaaaggaaaccagatctttgtcagaaacctgccgtttgatttgacatggcagaaactcaaggagaaattcagtcagtgtggacacgttatgttcgcagagattaaaatggaaaatggaaaatccaaagggtgtggaactgtcaggttcgactcgccagaatccgccgagaaagcctgcaggattatgaatggaattaaaatctctggacgcgaaatcgacgtgaggctggaccgtaacgcgtag

SEQ ID NO: 189533 - DNA, 1803 bp, Artificial Sequence
  derived and/or modified sequence
atggctgatgccaacaaggccgaggtgcctggggccactggaggagacagcccccacctgcagcctgctgagcccccaggagagccccggcgggagccccaccctgctgaggccgagaagcagcagccccagcacagcagcagcagcaatggagtgaagatggagaatgatgaaagtgccaaggaggagaagagtgacctgaaggagaagagcacaggcagcaagaaggccaaccgcttccacccctacagcaaggacaagaacagcggggccggggagaagaagggccccaacagaaacagagtcttcatcagcaacatcccctatgacatgaagtggcaggccatcaaggacctgatgagggagaaggtgggggaggtgacctacgtggagctgttcaaggatgctgagggcaagagccggggctgcggcgtggtggagttcaaggatgaggagtttgtgaagaaggccctggagaccatgaacaagtatgacctgagcggccggcccctgaacatcaaggaggaccctgatggagaaaatgcccggcgggccctgcagaggactggaggcagcttccctgggggccacgtgcctgacatgggcagcggcctgatgaacctgcccccatccatcctgaacaaccccaacatccccccagaggtgatcagcaacctgcaggccggccgcctgggcagcaccatctttgtggccaacctggacttcaaggtgggctggaagaagctgaaggaggtgttcagcattgctggcaccgtgaagagagctgacatcaaggaggacaaggatggcaagagccggggcatgggcaccgtgacctttgagcaggccatcgaggccgtgcaggccatctccatgttcaacggccagttcctgtttgaccggcccatgcacgtgaagatggatgacaagtctgtgccccatgaggagtaccgcagccatgatggcaagaccccccagctgccccggggcctgggcggcatcggcatgggcctgggccctgggggccagcccatcagcgccagccagctgaacatcggcggcgtgatgggcaacctgggccctgggggcatgggcatggatggccctggctttggaggcatgaacagaattggaggcggcattggatttggaggcctggaggccatgaacagcatgggcggctttggaggagtgggccgcatgggagagctgtacagaggagccatgaccagctccatggagcgggactttggccgcggggacatcggcatcaaccagggctttggagacagctttggccgcctgggcagcgccatgattggaggctttgctggaagaattggcagcagcaacatgggccctgtgggcagcggcatcagcggcggcatgggctccatgaacagcgtgactggaggcatgggcatgggcctggacaggatgagcagcagctttgacaggatgggccctggcattggagccatcctggagaggagcattgacatggaccggggcttcctgagcggccccatgggcagcggcatgagggagcgcatcggcagcaaaggaaaccagatctttgtgaggaacctgccctttgacctgacctggcagaagctgaaggagaagttcagccagtgtggccacgtgatgtttgctgagatcaagatggagaatggcaagagcaagggctgcggcaccgtgcgctttgacagccctgagagcgctgagaaggcctgccgcatcatgaatggcatcaagatcagcggccgggagattgatgtgcggctggacagaaatgcctag

SEQ ID NO: 189534 - DNA, 5563 bp, Artificial Sequence
  derived and/or modified sequence
aggactggtccagccctcccaggcaggtgtagggccgactgcagcaacagcggccctgaccccagctcccatggctcccctccccccgcactcccaccccccgcacccggcacacaccatctcccagtcacccagtctcgaccggttctcgcgagatccgggttactgagcgctcggggccttttcaaatcgggatccgttaccgcttccccggcagccgccattgtcgcgctcggagcccctcagctcaggcggccgaggcggaggcagcggcggcgggatggcggacgccaacaaggccgaggtgcccggggccactggtggcgacagcccgcacctgcagcccgcagagccgccgggcgagccgcggcgagagccgcaccccgcggaggcggagaagcagcagccgcagcacagcagcagctccaatggcgttaaaatggagaatgatgaatcagcaaaagaagagaaatctgacttaaaggaaaaatctacaggaagtaagaaggccaatagatttcatccttattcaaaagacaagaattcgggcgctggagaaaagaagggtccaaatcgtaacagagttttcattagcaacatcccatatgacatgaaatggcaagctattaaagatctaatgagagagaaagttggtgaggttacatacgtggagctctttaaggatgcggaaggaaaatcaaggggttgtggtgtggttgaattcaaagatgaagaatttgtaaagaaagccctagaaactatgaacaaatatgatcttagtggaagaccccttaatattaaagaggatcctgatggagaaaatgctcgtagggcattgcagcgaacaggaggatcatttccaggaggacacgtccctgatatgggatcagggttgatgaatttaccaccttccatactcaataatccaaacattcctcctgaagtcatcagtaatttgcaggccggtagacttggttccacaatttttgttgccaatcttgacttcaaagttggttggaagaagctaaaggaagtgttcagcatagctggaactgtgaagcgggcagatattaaagaagacaaagatggcaagagcagaggaatgggcactgtcacttttgagcaagcaattgaagcagttcaagcaatttctatgttcaatgggcagtttttatttgatagacctatgcatgtgaaaatggatgacaagtctgttcctcatgaagagtaccgttcacatgatggtaaaacaccacaattaccacgtggtcttggaggcattgggatgggacttggtccgggtggacagcctattagtgccagccagttgaacataggtggagtaatgggaaatttaggtccaggtggtatgggaatggatggtccaggttttggaggaatgaatagaattggaggaggaatagggtttggtggtctggaagcaatgaatagcatgggaggatttggaggagttggccgaatgggagagctgtaccgtggtgcgatgactagtagcatggagcgagattttggacgtggtgatattggaataaatcaaggctttggagattcctttggtagacttggcagtgcaatgattggagggtttgcaggaagaataggatcttctaacatgggtccagtaggatctggaataagtggtggaatgggtagcatgaacagtgtgactggaggaatggggatgggactggaccggatgagttccagctttgatagaatgggaccaggtataggagctatactggaaaggagcatcgatatggatcgaggatttttatcgggtccaatgggaagcggaatgagagagagaataggctccaaaggcaaccagatatttgtcagaaatctaccttttgacttgacttggcagaaactaaaagagaaattcagtcagtgtggtcatgtaatgtttgcagaaataaaaatggagaatggaaagtcaaaaggctgtggaacagtcagatttgactccccagaatcagctgaaaaagcctgcagaataatgaatggcataaaaatcagtggcagagaaattgatgttcgcttggatcgtaatgcataatttcaagccatggttggaacattcctacatctgttttgctgaatctcctagtaaaagtcatttttttaaagtaatattgtatgcttacaaaagctgtaaaaatgaacttttaaaactcccaccagcttttaacagtataatgttaaaaatatactgtaatttttgttaatctcaagtttgggtttttaaagacagcaagtctggtcattcagtttaaatgaatggttatactgtttttaatgaaataagccattttcttgttgttttcagtactacatagttggatttgtttgttctagtttctccagtttttgtcaacttattgtatggtaaaacatagattttttccccccaaacttctgttttataatatgtaatttttcatgaaaagaaagggctcagaaaaattaggatgtgattttggttggttttaaattactgtaagttttagattctaaggttcaagatttttaaaatttgatttaaatgaagaaatggatttttctctctgcccctccctgccattcatattttctgcataacactattaataatatcaacctccacagccccttattttattatttccaataattccaagttcatatagaactgataatgtagcaagccccaagtatgataataggcagactattcccaactttctgtctagtttccagccattgaagtgaactgctaaaaaaagaaaaataattgaaatgttgagagagatggttatgtaagttagtcctctgctgtttacttctgcaggagctgatccatttataaatgcagttttaataaaccatggaataccaaggcacaacatatcaaacacattggatcccacgatgttagacatagccatatctcctttccctacaaaagaaaagcatactgttaaaatgtgcttaccaatactgtgttttattaataatcttcataagaaaagaaacactggatacttttttgttgttgattcgttttgaaaaattgttgttagagcaaaagtcttactgaatttgtatttttaaatttttcttgggttagtatttaaagtcttaacatttatttaataattatatttattaaaccatttttcaataaggtatatagcttatttgttgcttttcattgtaatttaacatggttaatggttaattactatttaacacacatttcaaatgaatattatttgggggattagattgagtgaaattaacctgctattaaatagtaaacttttcctctggagtcacttttttcccccttcaaagtatgttactgaggaagtaaacttttttttttttttttggtttttgttttttgagacacagtctcgctctgttgcccaggctgctggagtgccgtggcgcaatctcggctcactgcaacctccgcctcctggattcaaacaattctcctgcctcagcctcctgagtagctgggattacaggcacatgccaccacgcccggctaatttttgtatttttagtagagactgggtttcaccatgttggtcaggctggtctcaaactcctgacctcgtgatccacccgcctcggcctcccaaaatcctgggattacaggcgcgagccaccacacccggctggaagtaaacatttttaaagctacttttactcattctagccttgtagaatgaccattgcagcttgagggacctagttcttaccttttcttgcaaccaacacacttgcaattgtgtctggtatgcttgttcctgctgctaataaagtaaggcccattactgtatcgggaatttctagtgtttcccctgtaataaacagatatttcaagttacaaatcttaaagattcactaaccatcctttgcagttattttggatatttccttcgtgaacaaaaataaaataggcacatttagaattcagagccaatatgtgcttgcttattagttttttagctagcaacatatttgaatcaggctggtaattcgggtaacccaggtagcacagatttttaatgacatatctaaagatacgtaacagctaaaattctgccagtgagaaattttcctgtttgatattcttacaaaagatgtttatgtccaccattatctcatcagggctgtgctgaatatttgataatgagactgatcattccgctttttctttcttaaaaatattagtcagagttaagcaaattaattatagctatctttaagctataaatgtgttaacatgtatatataccatttattatgttctactttagtgatataccttaatttagtgggctttggcagggcgggggagggggaacgttcattaatctctgaggaaaacaaaacctgttttctacttgagtctaacatatggtcccaatttattaatacttctgttaaatttgatgtcaggtcaacatttttcagaaatgtatttattctcagaaacagaaccagagagaagttaaacaaaaggttatgtaactgttcctttaatgttgtaattgaaaacttggtttagcgtcttttttttctttctctttttttttcttaaaatgccaactaaaataattagaaagtagcttatttattgcatgcttatacattgatattggaattggaattggttgttaatttctgttactggctttgctagaattcatatgtgcataaataacactaatatttatcatcttgggggctgttctgtgatctattacatgatttttgctctctttttatttttctagtatcaaatgtgttctggctgagtgaatttggatagatataatatgcaagctaattggactttttcatttttctcattaaaaaaaggaagaagtagtccactttttgctagcatactattctgagacttacattaatttgggaaaagtcaagggtcaacaaatttttgtgtctgtgaggggccagatagtaattatttaggctttgcaggctgtgtgatttctgttgcagttattcagctttgccaatgtagtgtgaaaacaatcatagataatatgtaaaaccttactaataaaaacaagctgggttatgttggcacacaggcagtagtttgttcacctctgctgtaagttaatttgggttaacctttgtaggagaaattacagattatttttgtctttgttcatagtttttttgtttagggactgtagtggattatggccaagcagcagtagctagttaagtcttaatcatgaaggtagtagaaacctagaataaaattattatgcccttttcactcatttcataatatgtttgtattgccgtgttgaaaagccaaataaaatacaatccagttaagcagtgagcacccattgttttcccaaaaatagagctccttgctttgtttttgtttttttgttcttttttttttttattatggaatggaattcaatataaagagtttattgtggaccccatggaatgtgattaaattattagcataataaaaagacatcctatgaatttg

SEQ ID NO: 189535 - DNA, 1803 bp, Artificial Sequence
  derived and/or modified sequence
atggccgacgccaacaaggccgaggtgcccggcgccaccggcggcgattcaccacatctccagcccgcagagcctcctggcgaacctcgtagagagccccacccagccgaggctgaaaaacagcagcctcagcattcgtcctccagcaatggcgtcaagatggaaaacgatgagagcgccaaagaggaaaaatccgacctcaaggagaagtcaaccggatccaaaaaagcgaaccgtttccatccctatagcaaggacaaaaattctggtgctggtgagaaaaagggcccgaatcggaatcgagtgtttatcagtaatatcccctacgacatgaagtggcaggccataaaagacttaatgagggagaaagtgggggaggtcacgtacgtggagctgttcaaggacgcagaagggaaaagtagagggtgtggagtggttgagttcaaagacgaggaattcgtaaagaaggccctggagacgatgaacaagtatgatcttagcggtaggccgctaaatattaaagaggatcccgacggcgagaatgctaggagagctctgcaaaggacggggggaagcttcccaggagggcacgtcccagacatgggatccggattgatgaacctgcccccttctattctgaacaacccaaatatcccaccagaggtgatcagcaacctgcaggctggccggcttggatccacaatattcgtggcaaatctggactttaaggtgggctggaaaaagctaaaggaagtcttttcaatcgcaggcactgtgaagagagcagatattaaggaggataaagacggaaagtcaaggggtatgggaacagtgaccttcgagcaggcgatcgaggctgtgcaagcgatcagtatgtttaacgggcagtttttgtttgatcggccaatgcacgttaagatggatgataaaagcgttcctcacgaggagtatagatctcacgatggcaaaactcctcagttaccacggggcctgggcggcataggtatggggttaggtccagggggtcaacctatcagcgcatcacagctgaacattggtggggtgatgggcaacttgggccctggcggcatggggatggatggaccaggttttggtggcatgaatcggatcggaggtgggatcggcttcggcgggcttgaggcaatgaatagcatggggggcttcgggggcgtcggacggatgggtgagctgtatcgcggggctatgaccagctcgatggagcgtgacttcggccgcggtgatatcgggattaaccagggtttcggagacagttttggacggcttggaagtgcgatgataggcggctttgcgggaaggataggaagtagtaatatggggcccgtcgggtcaggcatttccggtgggatgggatctatgaatagcgtgaccggtggcatgggaatgggcctcgaccgcatgtccagctcttttgacagaatgggacccggaatcggggccattttggaacggagcatagacatggatagaggcttcttgagcggtcccatgggctccggtatgagggaacgcataggaagcaaagggaaccaaattttcgtgcggaacttgcccttcgacttgacatggcagaagttgaaggagaaatttagccaatgtggccatgttatgtttgctgaaatcaaaatggagaacggtaagtccaagggctgtggcacagtgcgattcgactctcccgaatcagcagagaaggcttgtcgcataatgaacggaattaaaatatccggtagggagatagatgtgaggcttgaccgcaacgcctag

SEQ ID NO: 189536 - DNA, 1803 bp, Artificial Sequence
  derived and/or modified sequence
atggcagacgccaacaaggccgaggtgcccggtgccactgggggtgactctccccatctccagcccgcagaacctccaggcgagccgagacgggaaccccaccccgcagaggcagagaaacagcagccgcaacactctagctcatcaaacggggtcaagatggaaaacgatgagagcgcgaaagaggaaaagtccgatctgaaggagaaatccaccggctctaagaaggctaatcggttccatccatacagtaaagacaagaattccggcgctggtgaaaaaaaggggcctaacagaaaccgcgtctttattagcaatataccctatgacatgaagtggcaggcaataaaagacctcatgagagagaaggtgggcgaggttacctatgtggaactgttcaaagacgccgaggggaagagtcgcggttgtggtgtggtcgaattcaaggacgaggagttcgtgaagaaggcactggagactatgaataaatatgatctgtccgggagacctctgaacatcaaggaggatccagacggagagaacgctagacgggcattgcaacgcaccgggggatcattccctggcggacatgtaccggacatgggaagtggactcatgaacttgccaccaagcattcttaacaatccaaacattccccctgaggttattagcaaccttcaagctggaagattgggctccacaattttcgtagcaaatctcgacttcaaggtcgggtggaagaagctgaaagaggtattttctatcgcaggaactgtaaagcgcgctgatataaaagaagataaagacgggaaatccagagggatgggaactgtgaccttcgagcaggctatagaggccgttcaggccatttccatgtttaatggacaatttttgtttgataggcctatgcatgtaaagatggatgacaagtctgtccctcacgaggaatatcggtctcatgatggaaagacaccgcagctccctcgaggacttggaggtatcggcatgggactgggcccagggggtcagcctatcagtgcttctcaactcaatatagggggtgtgatgggtaatttaggtcctggcggtatgggcatggatggcccagggttcgggggaatgaaccgtataggcggagggatcggctttggtggtctagaagccatgaactctatgggagggttcggcggagtggggcgtatgggcgagctttaccggggagcaatgacttcctccatggagcgtgacttcggaaggggagatattggaatcaatcagggcttcggggacagttttggcagactgggatccgctatgatcggcggtttcgctgggagaataggctcctccaacatgggtcctgtaggttccggtattagtggaggaatgggttccatgaattcagtgacaggcggaatgggcatgggcctggaccggatgtcctctagtttcgatcgaatgggcccaggaattggagccatcctcgagcgcagcatcgacatggatcgcggtttccttagtgggcctatgggcagcggcatgcgcgagaggatagggagcaaagggaatcagattttcgtcaggaacctgccgttcgaccttacatggcagaaactcaaggagaagttctcccagtgcggacacgtcatgtttgcagagataaaaatggaaaatggcaagagtaagggctgtggaactgtgagattcgatagcccagagagtgcagagaaagcatgcaggattatgaacggtattaaaatcagcgggagagaaattgacgttaggttggacaggaacgcctag

SEQ ID NO: 189537 - protein, 472 aa, Artificial Sequence
  derived and/or modified sequence
MKFLIFAFFGGVHLLSLCSGKAICKNGISKRTFEEIKEEIASCGDVAKAIINLAVYGKAQNRSYERLALLVDTVGPRLSGSKNLEKAIQIMYQNLQQDGLEKVHLEPVRIPHWERGEESAVMLEPRIHKIAILGLGSSIGTPPEGITAEVLVVTSFDELQRRASEARGKIVVYNQPYINYSRTVQYRTQGAVEAAKVGALASLIRSVASFSIYSPHTGIQEYQDGVPKIPTACITVEDAEMMSRMASHGIKIVIQLKMGAKTYPDTDSFNTVAEITGSKYPEQVVLVSGHLDSWDVGQGAMDDGGGAFISWEALSLIKDLGLRPKRTLRLVLWTAEEQGGVGAFQYYQLHKVNISNYSLVMESDAGTFLPTGLQFTGSEKARAIMEEVMSLLQPLNITQVLSHGEGTDINFWIQAGVPGASLLDDLYKYFFFHHSHGDTMTVMDPKQMNVAAAVWAVVSYVVADMEEMLPRS

SEQ ID NO: 189538 - DNA, 1947 bp, Artificial Sequence
  derived and/or modified sequence
aggtctttgccccgcctctcggccccgcggcctggccggcaagcagggctgcagtcacggggcggcgcggagggccccagcccagtcaggggtgtggccgccgccaccgtaaggctaggccgcgagcttagtcctgggagccgcctccgtcgccgccgtcagagccgccctatcagattatcttaacaagaaaaccaactggaaaaaaaaatgaaattccttatcttcgcatttttcggtggtgttcaccttttatccctgtgctctgggaaagctatatgcaagaatggcatctctaagaggacttttgaagaaataaaagaagaaatagccagctgtggagatgttgctaaagcaatcatcaacctagctgtttatggtaaagcccagaacagatcctatgagcgattggcacttctggttgatactgttggacccagactgagtggctccaagaacctagaaaaagccatccaaattatgtaccaaaacctgcagcaagatgggctggagaaagttcacctggagccagtgagaataccccactgggagaggggagaagaatcagctgtgatgctggagccaagaattcataagatagccatcctgggtcttggcagcagcattgggactcctccagaaggcattacagcagaagttctggtggtgacctctttcgatgaactgcagagaagggcctcagaagcaagagggaagattgttgtttataaccaaccttacatcaactactcaaggacggtgcaataccgaacgcagggggcggtggaagctgccaaggtgggggctttggcatctctcattcgatccgtggcctccttctccatctacagtcctcacacaggtattcaggaataccaggatggcgtgcccaagattccaacagcctgtattacggtggaagatgcagaaatgatgtcaagaatggcttctcatgggatcaaaattgtcattcagctaaagatgggggcaaagacctacccagatactgattccttcaacactgtagcagagatcactgggagcaaatatccagaacaggttgtactggtcagtggacatctggacagctgggatgttgggcagggtgccatggatgatggcggtggagcctttatatcatgggaagcactctcacttattaaagatcttgggctgcgtccaaagaggactctgcggctggtgctctggactgcagaagaacaaggtggagttggtgccttccagtattatcagttacacaaggtaaatatttccaactacagtctggtgatggagtctgacgcaggaaccttcttacccactgggctgcaattcactggcagtgaaaaggccagggccatcatggaggaggttatgagcctgctgcagcccctcaatatcactcaggtcctgagccatggagaagggacagacatcaacttttggatccaagctggagtgcctggagccagtctacttgatgacttatacaagtatttcttcttccatcactcccacggagacaccatgactgtcatggatccaaagcagatgaatgttgctgctgctgtttgggctgttgtttcttatgttgttgcagacatggaagaaatgctgcctaggtcctagaaacagtaagaaagaaacgttttcatgcttctggccaggaatcctgggtctgcaactttggaaaactcctcttcacataacaatttcatccaattcatcttcaaagcacaactctatttcatgctttctgttattatctttcttgatactttccaaattctctgattctagaaaaaggaatcattctcccctccctcccaccacatagaatcaacatatggtagggattacagtgggggcatttctttatatcacctcttaaaaacattgtttccactttaaaagtaaacacttaataaatttttggaagatctctga

SEQ ID NO: 189539 - DNA, 1419 bp, Artificial Sequence
  derived and/or modified sequence
atgaaattccttatatttgctttcttcggcggggtgcacttattaagcctgtgttcagggaaagctatatgcaaaaacggcattagtaaaagaacattcgaggaaattaaggaggaaatcgcttcctgcggagacgtcgccaaagctataataaatctggccgtatatggcaaggcacaaaacaggtcctacgagagactagccttactagtcgataccgtgggcccccgtttatctgggtcaaaaaatcttgagaaagccatccagatcatgtaccaaaacctccagcaggatggcctggaaaaagtgcatctcgagcccgtacggatcccacattgggaaaggggggaggagtccgccgtgatgcttgaaccgcgcatccacaagattgcaatcctgggattaggatctagtattgggacgccgccagaaggcatcaccgctgaggtgctggtagtcacatcatttgacgagctccaacggagagcgagcgaagcgaggggaaaaatcgtggtatataatcagccctatattaactattccaggacggtgcaatataggacacaaggagccgtggaagcagctaaagtcggtgcgctggccagtctgataagatcggttgcgagctttagcatctactctccccacaccggcattcaggagtaccaggacggagtccctaagattcctaccgcttgcatcactgttgaagacgccgaaatgatgtcgcgtatggcctcccatgggatcaaaatcgtgatccagctcaagatgggagccaaaacctaccctgacaccgacagttttaacaccgtggctgaaatcacggggagcaaatatcccgagcaggtggttctggtgagcggtcatcttgatagttgggacgtcggtcagggcgccatggatgatgggggtggggcatttatttcatgggaggcgttgtctctcatcaaggacttaggacttaggcccaaacggacactcaggctcgtgttatggactgctgaagaacaggggggagttggcgcgtttcaatattaccagctccacaaggtcaacatcagtaactacagcctcgttatggagtctgatgcgggcacttttctgccaacgggtctgcagttcacagggtctgaaaaggcacgagctattatggaggaagtgatgtccctgctccagcctctgaatatcacccaggttctctctcatggggaaggcacagatattaacttttggatccaggccggagtccctggagcatcgctgttagacgatctgtacaaatacttcttttttcaccactcccacggtgatacgatgaccgtcatggatcctaagcagatgaacgttgctgctgcagtctgggccgttgtcagctatgtggtggccgacatggaggagatgttaccccggtcctag

SEQ ID NO: 189540 - DNA, 1419 bp, Artificial Sequence
  derived and/or modified sequence
atgaagttcctgatctttgccttctttggaggagtgcacctgctgagcctgtgcagcggcaaggccatctgcaagaatggcatcagcaagaggacctttgaggagatcaaggaggagatcgccagctgtggagatgtggccaaggccatcatcaacctggccgtgtatggcaaggcccagaacagaagctatgaaaggctggccctgctggtggacacagtgggcccccggctgagcggcagcaagaacctggagaaggccatccagatcatgtaccagaacctgcagcaggacggcctggagaaggtgcacctggagcctgtgcgcatcccccactgggagcggggggaggagagcgctgtgatgctggagccccgcatccacaagatcgccatcctgggcctgggcagcagcatcggcaccccacctgagggcatcacagctgaggtgctggtggtgaccagctttgatgagctgcagaggcgggccagcgaggcccggggcaagatcgtggtgtacaaccagccctacatcaactacagcaggacagtgcagtaccgcacccagggcgctgtggaggccgccaaggtgggcgccctggccagcctcatccgctctgtggccagcttcagcatctacagcccccacacaggcatccaggagtaccaggatggagtgcccaagatccccacagcctgcatcaccgtggaggatgctgagatgatgagcaggatggccagccacggcatcaagatcgtcatccagctgaagatgggcgccaagacctacccagacacagacagcttcaacacagtggccgagatcaccggcagcaagtacccagagcaggtggtgctggtgtctggccacctggacagctgggatgtgggccagggcgccatggatgatggcggcggggccttcatctcctgggaggccctgagcctcatcaaggacctgggcctgcggcccaagaggaccctgcggctggtgctgtggacagctgaggagcagggcggcgtgggcgccttccagtactaccagctgcacaaggtgaacatcagcaactacagcctggtgatggagagtgatgctggcaccttcctgcccaccggcctgcagttcaccggcagcgagaaggcccgggccatcatggaggaggtgatgagcctgctgcagcccctgaacatcacccaggtgctgagccatggagagggcacagacatcaacttctggatccaggccggcgtgcctggggccagcctgctggatgacctgtacaagtacttcttcttccaccacagccacggggacaccatgacagtgatggaccccaagcagatgaatgtggccgctgctgtgtgggccgtggtgtcctatgtggtggccgacatggaggagatgctgcccaggagctag

SEQ ID NO: 189541 - DNA, 1419 bp, Artificial Sequence
  derived and/or modified sequence
atgaagttcctgatcttcgccttcttcggcggcgtgcacctgctgtcactctgctctgggaaggcgatctgtaaaaatggtatctctaagagaaccttcgaggaaatcaaagaggaaatcgcaagctgtggagatgtggctaaggcaatcattaatcttgccgtgtatggcaaagcgcagaaccggtcctatgaacgccttgccctgctggtggacactgtgggtccgcggctaagtggttcaaagaaccttgaaaaggctattcagattatgtaccagaatctgcaacaggacgggctggaaaaggtgcacctcgagccagtgcggatccctcattgggaaagaggcgaggaaagtgctgttatgctggaacccaggattcataagatcgccattcttgggctcggcagtagcatcggcaccccccccgaagggatcactgccgaggttctggtcgtaacttcatttgacgagctgcagcggagagcaagtgaagccagagggaagattgttgtgtataaccagccatacatcaattattcgcgcacagtgcaatacagaacccagggggccgtggaagctgctaaagtaggtgccttggctagcctcatccgatccgtcgcatctttcagcatctactctccacacaccggcattcaagagtatcaggatggagtcccgaagatcccgacggcctgcattactgtggaagacgcggagatgatgagtcgtatggcttcccatgggatcaaaatcgttattcagctgaaaatgggagctaagacataccctgacacagattccttcaacactgtggccgagatcactggatctaagtatccagaacaggttgtgctcgtatctgggcatttagactcctgggacgtgggccagggggctatggacgacggagggggagccttcataagttgggaggcgctgtccctgatcaaagacctcggtctgcggcccaaaagaaccctgaggctggtcctgtggacagctgaagagcagggaggtgtcggagctttccagtattaccaactccacaaggtaaacattagcaattacagcctggtgatggaaagcgatgctgggacgtttctgccgactggactgcagtttacaggctctgagaaagcccgcgctattatggaagaggttatgtcccttctgcagcccctgaatattacccaagtcttgtctcacggtgagggcacagatatcaacttctggattcaggctggtgtccctggcgctagccttcttgacgatttatacaagtattttttcttccatcactcacatggtgacacgatgacagtgatggatcccaagcaaatgaacgtcgccgccgccgtgtgggctgtcgtaagttatgtcgtcgcagacatggaggagatgttaccccgaagctag

SEQ ID NO: 189542 - DNA, 1419 bp, Artificial Sequence
  derived and/or modified sequence
atgaagtttctcatctttgcgttctttggcggtgtccatctactcagcctgtgctctggaaaagccatctgcaaaaacggcatatcaaagagaacattcgaagaaattaaagaggaaattgcttcatgtggggacgttgcgaaagcgatcatcaatctcgccgtgtatggaaaagctcagaataggagctacgagcgcctcgccctactggtcgacaccgttgggcctcgtttaagcggctccaaaaacctagagaaggccatccagatcatgtaccagaacctccagcaggatggcttggaaaaagtacaccttgaaccggtcagaataccccattgggaaaggggcgaagagagtgcagttatgctggagcctcgaatacacaaaattgccatccttggcttgggtagctccataggtaccccaccggaaggcataaccgcggaagttctggtagtgaccagctttgatgagcttcagcgtagggcctcagaggcgagaggcaagatcgttgtctataaccagccgtacattaattatagcagaacagtccagtacaggacccaaggtgctgtggaggcagccaaggtgggagcactggcctctttaatcaggtctgtggcctctttcagtatttattcgccacacaccggcatccaggaatatcaggatggtgtgccaaaaattcctaccgcgtgtatcaccgtggaggacgccgagatgatgtcaagaatggcctctcacggaatcaagatcgtaattcaactgaaaatgggcgctaaaacatatcctgacaccgactcttttaacacggtggctgaaataacaggtagcaagtatccggaacaggtggtgctagtgtctggccaccttgactcctgggacgtgggccaaggagcgatggacgacggtgggggagcgttcatctcgtgggaggcgttatcactgattaaggatctgggcctgagaccgaaaagaacgttaaggctcgtcctatggaccgccgaggagcaaggcggagttggggcatttcagtactaccagctgcacaaagtaaatatttctaattactctctggtgatggaatcggatgcgggtacatttttgcctaccggactgcagttcaccggatcggaaaaggcccgagcaatcatggaagaagttatgtcgctattgcaaccactcaatatcacacaagttttgtcccatggagaaggcaccgacataaatttttggatccaggccggtgtcccgggagcctcactgctcgatgacctgtataaatacttctttttccaccattcccatggcgataccatgacagtcatggatcctaaacagatgaatgtggcggctgccgtctgggcagtcgtgtcctacgtcgtagcagacatggaagagatgcttccacggagttag

SEQ ID NO: 189543 - DNA, 1419 bp, Artificial Sequence
  derived and/or modified sequence
atgaaattccttatcttcgcatttttcgggggagttcacctgttatcactttgttcaggcaaagctatctgtaaaaatggcatcagcaaacgaacatttgaggaaattaaggaggaaatagccagctgcggggatgtggccaaagcaatcattaatttagcagtctatggaaaagcgcagaatcgcagttacgagcggctagcccttttagtggatactgtggggccgcgcctgtcaggcagtaaaaatttggagaaagccatacagataatgtaccaaaatctgcaacaggatggcctggagaaggtgcatcttgagcccgtgcggattcctcattgggagaggggagaggaatctgcggttatgctggagccccgcattcacaagattgccatactcggactgggctcatctataggaacaccccccgagggcataacagccgaagtactggtcgttacctcatttgatgagctgcaacgaagagcaagtgaagcaagaggcaagatcgtcgtgtataaccagccctatatcaactattcccggaccgtacagtacagaacccagggtgctgtggaagcagccaaggtgggagccctcgcttcactgattcgcagcgtagcatccttcagtatatatagcccccacactggtattcaggagtatcaggatggagtgcctaagatcccaactgcctgtataaccgtggaagatgctgagatgatgtcgcggatggcaagccacgggataaaaatcgtgatccagctaaagatgggggcaaagacgtatccagacacagattcatttaacacagtggctgaaattaccggctctaagtaccccgagcaggttgtgctcgtgtcagggcatctggactcgtgggatgtgggacagggcgcaatggacgatggcggaggcgcattcattagctgggaagccctttctttaataaaagatctaggcctgcggcccaaaaggactctaaggctcgtgctctggacagctgaggaacagggtggcgtaggggctttccaatactatcagctgcacaaagtcaacatcagcaattacagtttagttatggagtcagatgctggaaccttcctgcctactggacttcaattcaccggaagcgagaaagcccgagctattatggaagaagtgatgtctttgctccagccacttaacatcacccaggttctgtcgcatggtgagggaacggacatcaatttttggattcaagctggcgtgcccggcgctagcctactggatgatctttataaatattttttcttccaccattcacatggtgatactatgaccgtgatggaccctaaacagatgaacgtcgctgccgctgtgtgggcggtggtttcctacgtcgtggccgacatggaggagatgctgccccggtcttag

SEQ ID NO: 189544 - DNA, 1419 bp, Artificial Sequence
  derived and/or modified sequence
atgaaattccttatcttcgcatttttcgggggagttcacctgttatcactttgttcaggcaaagctatctgtaaaaatggcatcagcaaacgaacatttgaggaaattaaggaggaaatagccagctgcggggatgtggccaaagcaatcattaatttagcagtctatggaaaagcgcagaatcgcagttacgagcggctagcccttttagtggatactgtggggccgcgcctgtcaggcagtaaaaatttggagaaagccatacagataatgtaccaaaatctgcaacaggatggcctggaaaaagtccacttagagccagttcggatccctcactgggaacgcggggaggagagcgcggttatgctggaaccaagaattcacaaaatagccatactcggcttgggaagctctatcgggactccaccagagggaatcactgcagaggtgctcgttgttactagtttcgacgagcttcagagacgcgctagcgaggcacggggtaagatcgtcgtttacaatcagccatatataaactattctaggacagttcaatatcgaacgcagggcgcagtggaagctgcaaaggttggcgcactagcctctttgattcggtctgttgcctcattttctatttactcaccacataccggaatacaggagtaccaggatggtgtacccaagatccccaccgcatgtataacagtggaggatgccgaaatgatgtcacggatggctagccatggtattaagatcgtcattcagctgaaaatgggcgctaagacatatccagacaccgactcattcaatacggttgccgagatcaccggctctaaataccccgaacaggtagttttagtaagcggccacctggacagctgggatgtggggcagggtgctatggatgacgggggcggtgcattcatcagttgggaagccctctcccttattaaagatttaggcttaagaccaaaaaggacactgaggttggtactgtggacagccgaagagcagggcggggtgggcgcattccaatactaccagctacacaaggtgaatatatcaaactactctcttgtgatggagtctgacgccggcacattcctgcccactggcttgcagtttacaggtagtgaaaaagcacgcgccataatggaggaagtaatgagtctgctgcagcccttaaacattactcaggtgctgtcacatggagagggcaccgatattaacttttggatccaggccggagtgcctggcgctagtttattggatgatttatacaaatatttttttttccaccattcccatggggataccatgacagtaatggacccgaaacaaatgaacgtagccgcagccgtatgggccgtcgtctcttatgtcgtggctgacatggaagaaatgttacctaggagctag

SEQ ID NO: 189545 - DNA, 1419 bp, Artificial Sequence
  derived and/or modified sequence
atgaagttcctgatcttcgccttcttcggcggcgtgcacctgctgagcctgtgcagcggcaaggccatctgcaagaacggcatcagcaagagaaccttcgaggagatcaaggaggagatcgccagctgcggcgacgtggccaaggccatcatcaacctggccgtgtacggcaaggcccagaacagaagctacgagagactggccctgctggtggacaccgtgggccccagactgagcggcagcaagaacctggagaaggccatccagatcatgtaccagaacctgcagcaggacggcctggagaaggtgcacctggagcccgtgagaatcccccactgggagagaggcgaggagagcgccgtgatgctggagcccagaatccacaagatcgccatcctgggcctgggcagcagcatcggcaccccccccgagggcatcaccgccgaggtgctggtggtgaccagcttcgacgagctgcagagaagagccagcgaggccagaggcaagatcgtggtgtacaaccagccctacatcaactacagcagaaccgtgcagtacagaacccagggcgccgtggaggccgccaaggtgggcgccctggccagcctgatcagaagcgtggccagcttcagcatctacagcccccacaccggcatccaggagtaccaggacggcgtgcccaagatccccaccgcctgcatcaccgtggaggacgccgagatgatgagcagaatggccagccacggcatcaagatcgtgatccagctgaagatgggcgccaagacctaccccgacaccgacagcttcaacaccgtggccgagatcaccggcagcaagtaccccgagcaggtggtgctggtgagcggccacctggacagctgggacgtgggccagggcgccatggacgacggcggcggcgccttcatcagctgggaggccctgagcctgatcaaggacctgggcctgagacccaagagaaccctgagactggtgctgtggaccgccgaggagcagggcggcgtgggcgccttccagtactaccagctgcacaaggtgaacatcagcaactacagcctggtgatggagagcgacgccggcaccttcctgcccaccggcctgcagttcaccggcagcgagaaggccagagccatcatggaggaggtgatgagcctgctgcagcccctgaacatcacccaggtgctgagccacggcgagggcaccgacatcaacttctggatccaggccggcgtgcccggcgccagcctgctggacgacctgtacaagtacttcttcttccaccacagccacggcgacaccatgaccgtgatggaccccaagcagatgaacgtggccgccgccgtgtgggccgtggtgagctacgtggtggccgacatggaggagatgctgcccagaagctag

SEQ ID NO: 189546 - protein, 341 aa, Artificial Sequence
  derived and/or modified sequence
MQEGELAISPISPVAAMPPLGTHVQARCEAQINLLGEGGICKLPGRLRIQPALWSREDVLHWLRWAEQEYSLPCTAEHGFEMNGRALCILTKDDFRHRAPSSGDVLYELLQYIKTQRRALVCGPFFGGIFRLKTPTQHSPVPPEEVTGPSQMDTRRGHLLQPPDPGLTSNFGHLDDPGLARWTPGKEESLNLCHCAELGCRTQGVCSFPAMPQAPIDGRIADCRLLWDYVYQLLLDTRYEPYIKWEDKDAKIFRVVDPNGLARLWGNHKNRVNMTYEKMSRALRHYYKLNIIKKEPGQKLLFRFLKTPGKMVQDKHSHLEPLESQEQDRIEFKDKRPEISP

SEQ ID NO: 189547 - DNA, 1670 bp, Artificial Sequence
  derived and/or modified sequence
gatttcctcccacgcgaccttccagttctcggagccaggttaggggtttggcggaggaggactgcggggcgcgggcctagggccccagcagccacggccaggggagcgctcaagacagaaagccggtggcttcctcacctccacctgtaatgcaggagggagaattggctatttctcctataagccctgtggcagccatgcctcccctaggcacccacgtgcaagccagatgtgaagctcaaattaacctgctgggtgaaggggggatctgcaagctgccaggaagactccgcatccagcccgcactgtggagcagggaggacgtgctgcactggctgcgctgggcagagcaggagtactctctgccatgcaccgcggagcacgggttcgagatgaacggacgcgccctctgcatcctcaccaaggacgacttccggcaccgtgcgcccagctcaggtgacgtcctgtatgagctgctccagtacatcaagacccagcggcgagccctggtgtgtggacccttttttggagggatcttcaggctgaagacgcccacccagcactctccagtccccccggaagaggtgactggcccctctcagatggacacccgaaggggccacctgctgcagccaccagacccagggcttaccagcaacttcggccacctggatgaccctggcctggcaaggtggacccctggcaaggaggagtccctcaacttatgtcactgtgcagagctcggctgcaggacccagggggtctgttccttccccgcgatgccgcaggcccccattgacggcaggatcgctgactgccgcctgctgtgggattacgtgtatcagctgctccttgatacccgatatgagccctacatcaagtgggaagacaaggacgccaagatcttccgagttgtggatccaaatgggctcgccagactctggggaaatcacaagaaccgggtgaacatgacctacgagaagatgtctcgtgccctgcgccactattataagcttaatatcattaagaaggaaccggggcagaaactcctgttcagatttctaaagactccgggaaagatggtccaggacaagcacagccacctggagccgctggagagccaggagcaggacagaatagagttcaaggacaagaggccagaaatctctccgtgaggggcaggtggactccaggcacccggtaccgatggggcagggaccgagtctcccatgaaggcagactcctcctcccagcagagcagcaggatccccagccagactctgtacccacaggattacagccattgcttgggaaggctgggaggcctcccatccaggacactgggggcaggagtgtcatcttttgggcagggcaatcctggggctaaatgaggtacaggggaatggactctcccctactgcacccctgggagaggaagccaggcaccgatagagcacccagccccacccctgtaaatggaatttaccagatgaagggaatgaagtccctcactgagcctcagatttcctcacctgtgaaatgggctgaggcaggaaatgggaaaaagtgttagtgcttccaggcggcactgacagcctcagtaacaataaaaacaatggtagctgaaaaaaaaaaaaaaaaaaaaaaaaaaaaaaaaaaaaaaaaaaaaa

SEQ ID NO: 189548 - DNA, 1026 bp, Artificial Sequence
  derived and/or modified sequence
atgcaagagggcgagctggccatctcccccatcagtccagtcgcagcgatgcctccgttgggaacccacgtgcaggcaagatgtgaagcgcagatcaatttactgggggagggcgggatttgtaagttgcctgggagactgcgaatacagcccgccctgtggtctcgggaagacgtgctgcattggctgcggtgggctgaacaggagtatagtctgccatgcacagccgagcacggcttcgagatgaatggccgggccctctgcattctgaccaaggatgacttcagacacagggccccctcctcaggtgacgtgttgtatgagctgttgcagtatatcaagacccagagacgggccctggtttgtggccctttcttcggtggcattttccgtctcaaaacccccactcaacattctcccgtaccccctgaagaggttactggacctagccagatggacacccgtagagggcatctcctgcaaccacctgatccaggtctgaccagcaatttcgggcatcttgacgacccaggtttagcccgctggacccctggaaaagaggagtcattaaacctgtgtcattgcgctgagctaggctgcagaactcaaggagtgtgttccttccctgcaatgccccaggcaccaattgacggcagaatcgctgactgtagactgctgtgggactacgtgtaccagttactgctcgatacgagatacgagccctacatcaaatgggaagacaaagatgctaagatcttcagggtggttgatccgaatggattagcacggctttggggcaatcataagaaccgggtgaacatgacatatgagaagatgtccagagctctccgccactactacaagctcaacattattaaaaaggaaccagggcagaaactcttgtttcgttttctaaaaactccaggaaagatggtgcaggacaagcacagccatttggagccgctcgagagccaggagcaggatagaatcgaattcaaggacaagcgtcccgagatttctccttag

SEQ ID NO: 189549 - DNA, 1026 bp, Artificial Sequence
  derived and/or modified sequence
atgcaggagggggagctggccatcagccccatcagccctgtggccgccatgccacccctgggcacccacgtgcaggcccgctgtgaggcccagatcaacctgctgggggagggcggcatctgcaagctgcccggccgcctgcgcatccagcctgccctgtggagcagagaagatgtgctgcactggctgcgctgggccgagcaggagtacagcctgccctgcacagctgagcacggctttgagatgaatggccgggccctgtgcatcctgaccaaggatgacttccgccaccgggcccccagcagtggagatgtgctgtatgagctgctgcagtacatcaagacccagaggcgggccctggtgtgtggccccttcttcggcggcatcttccggctgaagacccccacccagcacagccctgtgcccccagaggaggtgacaggccccagccagatggacacccggcggggccacctgctgcagcccccagaccccggcctgaccagcaactttggccacctggatgatcctggcctggcccgctggacccctgggaaggaggagagcctgaacctgtgccactgtgccgagctgggctgcaggacccagggcgtgtgcagcttccctgccatgccccaggcccccattgatggaagaattgctgactgccgcctgctgtgggactatgtgtaccagctgctgctggacaccaggtatgagccctacatcaagtgggaggacaaggatgccaagatcttccgggtggtggaccccaacggcctggcccggctgtggggcaaccacaagaacagagtgaacatgacctatgagaagatgagccgggccctgcggcactactacaagctgaacatcatcaagaaggagcccggccagaagctgctcttccgcttcctgaagacccctgggaagatggtgcaggacaagcacagccacctggagcccctggagagccaggagcaggaccgcatcgagttcaaggacaagaggcctgagatcagcccctag

SEQ ID NO: 189550 - DNA, 1026 bp, Artificial Sequence
  derived and/or modified sequence
atgcaggagggcgagctggccatcagccccatcagccccgtggccgctatgccccccctcggcacacacgtccaggcccggtgtgaggcgcagataaatttacttggagaaggcgggatctgcaaacttcccggacgactgagaattcagcctgccctttggagcagggaggatgtgttacattggttgcgttgggccgaacaggaatacagtctgccctgcactgccgagcacggcttcgagatgaatggccgtgccctgtgcatattgactaaagatgactttagacaccgcgcaccttctagtggcgacgtgctgtatgagctccttcagtatatcaagacacagaggcgggctttagtgtgcggaccattttttggaggaatcttcagacttaaaacgcctactcagcacagtccagtacccccagaagaagtaactggcccctcacagatggacacgcggcgaggccatctgcttcagcccccagacccgggcctgacatccaacttcggccatttggatgatcctgggctagctaggtggacccccggcaaagaagagtcgctaaatctctgccactgtgcagagcttggatgtcgtacccagggggtgtgcagtttccccgccatgccccaggcaccaattgacggaaggatcgccgattgtcggctgttgtgggattacgtttatcagctgctgctggacacacggtacgagccatatattaaatgggaagacaaggacgcaaaaattttcagggtagtcgacccaaacgggctggccaggctgtgggggaaccacaaaaatcgggtaaatatgacctatgagaaaatgtctagggctctccgccactactacaaattgaatattattaaaaaggaaccagggcagaagctgctgtttagatttctgaagactccagggaaaatggtgcaggacaagcactcccacttggagcctctggaatcacaggagcaggaccgcatcgaatttaaagataaacggcccgagatttcaccctag

SEQ ID NO: 189551 - DNA, 1026 bp, Artificial Sequence
  derived and/or modified sequence
atgcaggaaggagagctagccatttcccccatttcccccgtggcagctatgccccctctgggaacccacgttcaggcgcgatgtgaagcgcagattaatctactgggcgaagggggtatctgcaagctccccggtaggctgaggatacaaccagcactgtggtccagggaggatgttctgcattggctccggtgggcagagcaagaatactccctgccctgcactgctgaacatggattcgagatgaacggcagggcgctgtgcatattgactaaggacgattttagacacagagccccttcctccggggatgtcctctacgagcttcttcaatatataaagacacaaagacgtgcgctggtgtgtggcccattttttgggggaatcttccggttaaagaccccgacccagcactccccggtgcccccagaggaagtcaccggcccaagccagatggatacaagacgcggacacctgctgcagccccctgacccaggtctgacgtcaaacttcggacaccttgacgaccccggtctggcccgatggactccaggtaaggaggagtcacttaatctgtgccattgcgcagaactgggttgcagaacacagggagtctgttctttccctgctatgccacaggctcccatagatggccgaatagctgattgccgattactgtgggactacgtgtaccaactattacttgacacaaggtatgagccttacattaagtgggaagataaggatgcaaaaatctttcgcgtcgtcgatccaaacggactcgcacgactttggggtaaccataaaaacagggtgaacatgacatatgagaaaatgtcgagggcactgagacactactacaaactgaacataatcaagaaagagcctgggcagaagctccttttccggttcctaaagaccccaggcaagatggtacaggataagcattcccatctcgagccacttgaaagtcaggagcaggatcggattgaatttaaggacaagcgtcctgagatttctccctag

SEQ ID NO: 189552 - DNA, 1026 bp, Artificial Sequence
  derived and/or modified sequence
atgcaggagggcgagctggccatcagccccatcagccccgtggccgccatgccccccctgggcacccacgtgcaggccagatgcgaggcccagatcaacctgctgggcgagggcggcatctgcaagctgcccggcagactgagaatccagcccgccctgtggagcagagaggacgtgctgcactggctgagatgggccgagcaggagtacagcctgccctgcaccgccgagcacggcttcgagatgaacggcagagccctgtgcatcctgaccaaggacgacttcagacacagagcccccagcagcggcgacgtgctgtacgagctgctgcagtacatcaagacccagagaagagccctggtgtgcggccccttcttcggcggcatcttcagactgaagacccccacccagcacagccccgtgccccccgaggaggtgaccggccccagccagatggacaccagaagaggccacctgctgcagccccccgaccccggcctgaccagcaacttcggccacctggacgaccccggcctggccagatggacccccggcaaggaggagagcctgaacctgtgccactgcgccgagctgggctgcagaacccagggcgtgtgcagcttccccgccatgccccaggcccccatcgacggcagaatcgccgactgcagactgctgtgggactacgtgtaccagctgctgctggacaccagatacgagccctacatcaagtgggaggacaaggacgccaagatcttcagagtggtggaccccaacggcctggccagactgtggggcaaccacaagaacagagtgaacatgacctacgagaagatgagcagagccctgagacactactacaagctgaacatcatcaagaaggagcccggccagaagctgctgttcagattcctgaagacccccggcaagatggtgcaggacaagcacagccacctggagcccctggagagccaggagcaggacagaatcgagttcaaggacaagagacccgagatcagcccctag

SEQ ID NO: 189553 - DNA, 1719 bp, Artificial Sequence
  derived and/or modified sequence
gtttcccggaaggatagcgattaccggagcgcctcgcgcgcctgcccgcctgcggaggacccgggcgcacacgccttggcgcttctcgaaagagatttcctcccacgcgaccttccagttctcggagccaggttaggggtttggcggaggaggactgcggggcgcgggcctagggccccagcagccacagccaggggagcgctcaagacagaaagccggtggcttcctcacctccacctgtaatgcaggagggagaattggctatttctcctataagccctgtggcagccatgcctcccctaggcacccacgtgcaagccagatgtgaagctcaaattaacctgctgggtgaaggggggatctgcaagctgccaggaagactccgcatccagcccgcactgtggagcagggaggacgtgctgcactggctgcgctgggcagagcaggagtactctctgccatgcaccgcggagcacgggttcgagatgaacggacgcgccctctgcatcctcaccaaggacgacttccggcaccgtgcgcccagctcaggtgacgtcctgtatgagctgctccagtacatcaagacccagcggcgagccctggtgtgtgggcccttttttggagggatcttcaggctgaagacgcccacccagcactctccagtccccccggaagaggtgactggcccctctcagatggacacccgaaggggccacctgctgcagccaccagacccagggcttaccagcaacttcggccacctggatgaccctggcctggcaaggtggacccctggcaaggaggagtccctcaacttatgtcactgtgcagagctcggctgcaggacccagggggtctgttccttccccgcgatgccgcaggcccccattgacggcaggatcgctgactgccgcctgctgtgggattacgtgtatcagctgctccttgatacccgatatgagccctacatcaagtgggaagacaaggacgccaagatcttccgagttgtggatccaaatgggctcgccagactctggggaaatcacaagaaccgggtgaacatgacctacgagaagatgtctcgtgccctgcgccactattataagcttaatatcattaagaaggaaccggggcagaaactcctgttcagatttctaaagactccgggaaagatggtccaggacaagcacagccacctggagccgctggagagccaggagcaggacagaatagagttcaaggacaagaggccagaaatctctccgtgaggggcaggtggactccaggcacccggtaccgatggggcagggaccgagtctcccatgaaggcagactcctcctcccagcagagcagcaggatccccagccagactctgtacccacaggattacagccattgcttgggaaggctgggaggcctcccatccaggacactgggggcaggagtgtcatcttttgggcagggcaatcctggggctaaatgaggtacaggggaatggactctcccctactgcacccctgggagaggaagccaggcaccgatagagcacccagccccacccctgtaaatggaatttaccagatgaagggaatgaagtccctcactgagcctcagatttcctcacctgtgaaatgggctgaggcaggaaatgggaaaaagtgttagtgcttccaggcggcactgacagcctcagtaacaataaaaacaatggtagctga

SEQ ID NO: 189554 - protein, 217 aa, Artificial Sequence
  derived and/or modified sequence
MSCAGAAAAPRLWRLRPGARRSLSAYGRRTSVRFRSSGMTLDNISRAAVDRIIRVDHAGEYGANRIYAGQMAVLGRTSVGPVIQKMWDQEKDHLKKFNELMVTFRVRPTVLMPLWNVLGFALGAGTALLGKEGAMACTVAVEESIAHHYNNQIRTLMEEDPEKYEELLQLIKKFRDEELEHHDIGLDHDAELAPAYAVLKSIIQAGCRVAIYLSERL

SEQ ID NO: 189555 - protein, 179 aa, Artificial Sequence
  derived and/or modified sequence
MTLDNISRAAVDRIIRVDHAGEYGANRIYAGQMAVLGRTSVGPVIQKMWDQEKDHLKKFNELMVTFRVRPTVLMPLWNVLGFALGAGTALLGKEGAMACTVAVEESIAHHYNNQIRTLMEEDPEKYEELLQLIKKFRDEELEHHDIGLDHDAELAPAYAVLKSIIQAGCRVAIYLSERL

SEQ ID NO: 189556 - DNA, 654 bp, Artificial Sequence
  derived and/or modified sequence
atgtcctgcgccggagctgcggcggccccccggctctggagacttcggcccggcgcaaggcggtccttgagtgcatatggccgacgcacctccgtgagatttcgctcctccgggatgacacttgacaatatcagccgcgccgcggtcgatcggatcattcgggtagaccatgcgggcgaatatggggcaaatcgcatttacgctgggcagatggccgtgttgggcaggactagcgtagggccagtgatccagaagatgtgggatcaggaaaaggaccatcttaagaaatttaatgaactaatggtgacatttagggtgcgacccacagtgctgatgccactgtggaatgtgctcggcttcgccctaggagccggtactgcccttctggggaaagagggggcgatggcctgtacagtggctgtagaggaatctattgcgcaccattacaataatcagatccggacgctcatggaagaagaccccgagaagtacgaggagctgctccaactgataaagaaattccgggacgaggagttggaacatcatgacattgggcttgaccacgacgccgagctggcccctgcatacgccgtgctgaaatcaatcatacaggccggttgcagggtagcaatctacctcagcgaaaggctctag

SEQ ID NO: 189557 - DNA, 654 bp, Artificial Sequence
  derived and/or modified sequence
atgagctgtgccggggctgctgctgccccccggctgtggaggctgcggcctggggcccggcgcagcctgagcgcctacggccgccgcacctctgtgcgcttccgcagcagcggcatgaccctggacaacatcagcagagctgctgtggaccgcatcatccgggtggaccacgccggggagtatggagccaaccgcatctatgccggccagatggctgtgctgggccgcacctctgtgggccctgtgatccagaagatgtgggaccaggagaaggaccacctgaagaagttcaatgagctgatggtgaccttccgggtgcggcccaccgtgctgatgcccctgtggaatgtgctgggctttgccctgggcgccggcacagccctgctgggcaaggagggcgccatggcctgcaccgtggccgtggaggagagcatcgcccaccactacaacaaccagatccgcaccctgatggaggaggaccctgagaagtatgaggagctgctgcagctgatcaagaagttcagagatgaggagctggagcaccacgacatcggcctggaccatgatgctgagctggccccagcctatgctgtgctgaagagcatcatccaggccggctgccgggtggccatctacctgtctgagcggctgtag

SEQ ID NO: 189558 - DNA, 654 bp, Artificial Sequence
  derived and/or modified sequence
atgagctgcgccggcgccgccgccgccccccggctgtggcggctgaggcctggtgcccgccgatctctttccgcctatggacggaggaccagtgtcagatttcgatctagcggcatgaccctcgataatattagccgagcagccgtcgatagaattatccgcgtggaccatgcaggggaatatggcgctaaccgaatttatgcaggccagatggccgtgctgggtcgtaccagtgtgggccctgtcattcaaaaaatgtgggaccaggaaaaagatcatcttaaaaagttcaatgaactgatggtaactttccgggtgcgccccactgtccttatgcccctctggaacgtcctgggttttgccttaggggcgggaaccgcccttctgggaaaggagggcgccatggcttgcaccgtggctgttgaagagtccatagctcaccattataacaaccagatacgaactctcatggaggaggaccccgagaaatacgaagaactccttcagcttatcaagaagttcagagatgaagagcttgaacatcatgatataggattagatcatgacgccgagctcgcaccggcatatgccgtccttaaatccatcatccaggccggatgcagagtcgctatatatctgtctgagagactgtag

SEQ ID NO: 189559 - DNA, 654 bp, Artificial Sequence
  derived and/or modified sequence
atgtcatgtgcaggcgctgctgcagcgcctaggctgtggagactgcgtcctggtgctagacggagtctgagcgcgtatggcaggcgaacttcggttcgcttcagatcttccggaatgacattggacaacattagtcgcgctgcggtagatcggatcatacgcgtcgaccacgcaggagagtacggagccaaccgaatttatgccggacagatggctgtacttggcagaacctctgtgggcccagttatccagaagatgtgggatcaggagaaggatcacttaaagaaatttaatgaacttatggtgacctttcgcgttcgcccaactgtcctgatgcccttatggaacgtgctgggcttcgcactaggtgccggaaccgcactgctgggaaaggagggcgcaatggcctgcactgtggctgtggaggagtctattgcccaccattacaataaccagatcaggacactcatggaagaggatcccgaaaaatatgaagaactactgcagctgataaagaaattccgggatgaggagcttgagcaccatgacatcgggctggatcacgacgcagaacttgctccagcttacgctgttctcaaatcgatcatccaggcaggatgccgagtggctatctatctcagcgagaggttgtag

SEQ ID NO: 189560 - DNA, 2657 bp, Artificial Sequence
  derived and/or modified sequence
gtccgagccaagggcactattggccagttccgttcaacgaagtggttgctttttttagttccggcaatgagttgcgccggggcggcggcggctccccgcctttggcggctgcgcccgggggcccggcggtccctctcagcttatggaagaagaaccagtgtcagatttcgcagttcaggaatgactttagacaatatcagtcgggcagctgtggatcgaataatccgggtggatcatgcaggcgaatatggagcaaaccgcatctatgccgggcagatggctgtcctgggtcggaccagcgtcgggccagtcattcagaaaatgtgggatcaagaaaaggaccatttgaaaaagttcaatgagttgatggttacgttcagggtccggccaacagttctgatgcccttgtggaacgtgctggggtttgcactgggggcggggaccgccttgctcgggaaggaaggtgccatggcctgcaccgtggcggtggaagagagcatagcacatcactacaacaaccagatcaggacgctgatggaggaggaccctgaaaaatacgaggaacttcttcagctgataaagaaatttcgggatgaagagcttgagcaccatgacataggcctcgaccatgatgcagaattggctccagcctatgccgtcctgaagagcattatccaggccggatgcagagtggcgatatatttatcagaaagattataaagtgtgtccagttttgcctgtctataaaagatgatagtaatttaccaagtgacatttgcagagaaacaggtgtacagttatcgttgtacttttgtacaatgtgaattttgttaataaattataaggtttgtttttttttttttaaactctgcagtgttgatttttctctgggttgttttttctgccatgagaccaacaggtcaccagccttgttcaagttacagcaaacgaagctgggccttgtttggtctcatacttaattttcttttatatacatgtttttcttttacatgcatatatatatattttattttattttatgttttttggagacagggcctcgctcttttgtccaggccgggtcacaactcactgcagcctggacctcctagcctcaagcaatccacccacctcagccttccaagtagctgggactacaggtgtgcaccaccacagctggctaattctatttttttatagaggcgaagtctcactatgtcgccaggctggtctctaactcctgggctcagtgatcctcccgtttcgacttcccaaagtgctgggattacaggtgtgagccacttcaccaggcccattttctcctaaaacttcaaggacaaatcattaataatgtaacaggaatctttaggagaaaaaacaatttggtttactgataacaaaagataattggaaacatgagagtatttgagattggccaagcagaactatgaagtccatcaagtaagtcaaagatcatcgtttctgttttgaattgtgggtgataatgggtgggagagtgctacagtctgtatgtctgtgtctccctagaattcatacgatgaaatcttcactctcaagttgatagaaggtggggcccttgggaagtgtgaggtcatgagagtggagccctcatgaatgggatcagtgccttatgaaaggccctagagagatacctcatcctctccacagtgtgagacttcaaggggaagtatgagacttctctgaggaagcagacccttcacaagcaaaatcagccagcactttgatcacggacttcccagcctctaggactgtgagcaataaatgtttgatgtttataagccacccagactgtggtattttgttatagcagcctgaacagactaagacgggggtgttgcttccatcaaaggatgtactaagttgtggattatttgtgaaattgaattacaaccttttccttaaggtcttttaccacctcccccccaaaaaaatcccccaaaactgattcagattttcatactttaatgaaatattttataatttgcaaatttttaagtaatttatgaaaaacctagatcagtggatctcctctctggctgcccattagaatgtcctgtggagattaaacttttttttttcagtttatggaccaagagttttgatttatttagggtggagttcaggatcagaatggtttcagaagctcccaggtgattccggagtgagttggagctgcaagcccctgagctagattataagatgcttctgggaaagaaccacattttaggaatttgcttcccacccagtgccctgcatttaatcagcacctgatgacttggcaggacttgccccaccagggtctggctttgaagggtagtggacaccaggatcctttggattaatcctctgccacctctctcttttcctcaaccgagagtgaatttatgtaattgagtgaaagtctacgaatcataattgtaataaattaaggctgggcatttgtttgaaattagataggataaagccaaaggtttgaacaagttgtggatggtttgtaaaaattaatcttacaaaataaatgctgtgtgtgaacacgttgattaaattcaaaagggtattatttggtttttctgtaaattgaaccttgaaataaaagcacaacaaggttttcttaa

SEQ ID NO: 189561 - DNA, 2608 bp, Artificial Sequence
  derived and/or modified sequence
agcggcgagagtgacaggaggacaggggttgtttcggcagtgacgcctggggagtgacgcaattgcacccctgtgcagtgatgtcacggcagcttatggaagaagaaccagtgtcagatttcgcagttcaggaatgactttagacaatatcagtcgggcagctgtggatcgaataatccgggtggatcatgcaggcgaatatggagcaaaccgcatctatgccgggcagatggctgtcctgggtcggaccagcgtcgggccagtcattcagaaaatgtgggatcaagaaaaggaccatttgaaaaagttcaatgagttgatggttacgttcagggtccggccaacagttctgatgcccttgtggaacgtgctggggtttgcactgggggcggggaccgccttgctcgggaaggaaggtgccatggcctgcaccgtggcggtggaagagagcatagcacatcactacaacaaccagatcaggacgctgatggaggaggaccctgaaaaatacgaggaacttcttcagctgataaagaaatttcgggatgaagagcttgagcaccatgacataggcctcgaccatgatgcagaattggctccagcctatgccgtcctgaagagcattatccaggccggatgcagagtggcgatatatttatcagaaagattataaagtgtgtccagttttgcctgtctataaaagatgatagtaatttaccaagtgacatttgcagagaaacaggtgtacagttatcgttgtacttttgtacaatgtgaattttgttaataaattataaggtttgtttttttttttttaaactctgcagtgttgatttttctctgggttgttttttctgccatgagaccaacaggtcaccagccttgttcaagttacagcaaacgaagctgggccttgtttggtctcatacttaattttcttttatatacatgtttttcttttacatgcatatatatatattttattttattttatgttttttggagacagggcctcgctcttttgtccaggccgggtcacaactcactgcagcctggacctcctagcctcaagcaatccacccacctcagccttccaagtagctgggactacaggtgtgcaccaccacagctggctaattctatttttttatagaggcgaagtctcactatgtcgccaggctggtctctaactcctgggctcagtgatcctcccgtttcgacttcccaaagtgctgggattacaggtgtgagccacttcaccaggcccattttctcctaaaacttcaaggacaaatcattaataatgtaacaggaatctttaggagaaaaaacaatttggtttactgataacaaaagataattggaaacatgagagtatttgagattggccaagcagaactatgaagtccatcaagtaagtcaaagatcatcgtttctgttttgaattgtgggtgataatgggtgggagagtgctacagtctgtatgtctgtgtctccctagaattcatacgatgaaatcttcactctcaagttgatagaaggtggggcccttgggaagtgtgaggtcatgagagtggagccctcatgaatgggatcagtgccttatgaaaggccctagagagatacctcatcctctccacagtgtgagacttcaaggggaagtatgagacttctctgaggaagcagacccttcacaagcaaaatcagccagcactttgatcacggacttcccagcctctaggactgtgagcaataaatgtttgatgtttataagccacccagactgtggtattttgttatagcagcctgaacagactaagacgggggtgttgcttccatcaaaggatgtactaagttgtggattatttgtgaaattgaattacaaccttttccttaaggtcttttaccacctcccccccaaaaaaatcccccaaaactgattcagattttcatactttaatgaaatattttataatttgcaaatttttaagtaatttatgaaaaacctagatcagtggatctcctctctggctgcccattagaatgtcctgtggagattaaacttttttttttcagtttatggaccaagagttttgatttatttagggtggagttcaggatcagaatggtttcagaagctcccaggtgattccggagtgagttggagctgcaagcccctgagctagattataagatgcttctgggaaagaaccacattttaggaatttgcttcccacccagtgccctgcatttaatcagcacctgatgacttggcaggacttgccccaccagggtctggctttgaagggtagtggacaccaggatcctttggattaatcctctgccacctctctcttttcctcaaccgagagtgaatttatgtaattgagtgaaagtctacgaatcataattgtaataaattaaggctgggcatttgtttgaaattagataggataaagccaaaggtttgaacaagttgtggatggtttgtaaaaattaatcttacaaaataaatgctgtgtgtgaacacgttgattaaattcaaaagggtattatttggtttttctgtaaattgaaccttgaaataaaagcacaacaaggttttctt

SEQ ID NO: 189562 - DNA, 654 bp, Artificial Sequence
  derived and/or modified sequence
atgagctgcgccggcgccgccgccgcccccagactgtggagactgagacccggcgccagaagaagcctgagcgcctacggcagaagaaccagcgtgagattcagaagcagcggcatgaccctggacaacatcagcagagccgccgtggacagaatcatcagagtggaccacgccggcgagtacggcgccaacagaatctacgccggccagatggccgtgctgggcagaaccagcgtgggccccgtgatccagaagatgtgggaccaggagaaggaccacctgaagaagttcaacgagctgatggtgaccttcagagtgagacccaccgtgctgatgcccctgtggaacgtgctgggcttcgccctgggcgccggcaccgccctgctgggcaaggagggcgccatggcctgcaccgtggccgtggaggagagcatcgcccaccactacaacaaccagatcagaaccctgatggaggaggaccccgagaagtacgaggagctgctgcagctgatcaagaagttcagagacgaggagctggagcaccacgacatcggcctggaccacgacgccgagctggcccccgcctacgccgtgctgaagagcatcatccaggccggctgcagagtggccatctacctgagcgagagactgtag

SEQ ID NO: 189563 - protein, 176 aa, Artificial Sequence
  derived and/or modified sequence
MAASTDMAGLEESFRKFAIHGDPKASGQEMNGKNWAKLCKDCKVADGKSVTGTDVDIVFSKVKGKSARVINYEEFKKALEELATKRFKGKSKEEAFDAICQLVAGKEPANVGVTKAKTGGAVDRLTDTSRYTGSHKERFDESGKGKGIAGRQDILDDSGYVSAYKNAGTYDAKVKK

SEQ ID NO: 189564 - DNA, 531 bp, Artificial Sequence
  derived and/or modified sequence
atggctgcaagcaccgacatggccggcctagaagaatcttttcgtaagttcgctattcacggtgacccaaaagcctcggggcaggaaatgaatggcaagaactgggccaagctgtgcaaggattgtaaggtggctgatgggaagtccgtgactgggacagacgtggatattgtgttctccaaggtcaaaggaaagagtgcccgcgtcatcaattacgaggagttcaaaaaagcactcgaagagttggccaccaaacgcttcaaaggcaaaagcaaggaagaagccttcgacgccatttgccagctggtcgcaggcaaggagccggcaaatgtgggcgtgacaaaggcaaagacagggggcgccgtcgatagattgacagacacgtcacgctacactggctcacacaaggagaggtttgacgaatcgggaaagggaaaggggatcgccgggcggcaggacattttggacgatagtgggtatgtttctgcgtacaagaatgctgggacctatgatgcaaaggtcaagaagtag

SEQ ID NO: 189565 - DNA, 531 bp, Artificial Sequence
  derived and/or modified sequence
atggccgcatctactgatatggccggcctcgaggaatcatttcgcaagttcgccatccatggtgaccctaaggcgagtgggcaagagatgaacggaaagaactgggcaaagctctgtaaagattgcaaggtggcagacggcaaaagtgtgacaggcaccgatgtcgatatagtgttcagtaaggtgaagggtaaaagcgcacgggtcataaactatgaagagttcaagaaggctctcgaggagttagctactaagcgctttaaaggcaaaagtaaagaggaggccttcgacgcgatatgtcagctggtggcagggaaagaaccagcgaacgttggcgtcactaaagctaagacagggggagctgtggacagacttacagacacctccagatatacaggatcacataaggaacgctttgacgagtcgggcaagggtaagggtattgcgggacggcaggacattctggacgactccggttatgtgtcagcatacaaaaatgcaggtacttacgacgccaaagtgaaaaagtag

SEQ ID NO: 189566 - DNA, 531 bp, Artificial Sequence
  derived and/or modified sequence
atggccgccagcacagacatggccggcctggaggagagcttcaggaagtttgccatccacggggaccccaaggccagcggccaggagatgaatggcaagaactgggccaagctgtgcaaggactgcaaggtggctgatggcaagtctgtgactggaacagatgtggacatcgtgttcagcaaggtgaagggcaagagcgcccgggtcatcaactatgaggagttcaagaaggccctggaggagctggccaccaagcgcttcaagggcaagagcaaggaggaggcctttgatgccatctgccagctggtggccggcaaggagcccgccaacgtgggcgtgaccaaggccaagacaggaggagctgtggaccggctgacagacaccagccgctacacaggcagccacaaggagagatttgatgagagcggcaagggcaagggcattgctggccggcaggacatcctggatgacagcggctacgtgtctgcctacaagaatgccggcacctatgatgccaaggtgaagaagtag

SEQ ID NO: 189567 - DNA, 531 bp, Artificial Sequence
  derived and/or modified sequence
atggccgccagcaccgacatggccggcctggaggagagcttccggaagtttgcgatccacggagaccctaaggcgtctggccaagaaatgaatggcaaaaattgggccaaattatgcaaggactgtaaagtggctgatggtaagtcagtgacgggaacagatgtggacatagtgttttccaaggtcaaggggaaaagcgctcgcgtgattaactacgaggagtttaagaaggcgcttgaggagctggccacaaagagattcaagggcaaatccaaggaagaagcattcgatgccatttgtcagctggtggccgggaaagagcctgctaatgtcggtgttaccaaggccaaaacggggggcgctgtggaccgcctgaccgatacttcaaggtatactggaagtcataaggagcggttcgatgagtccggaaagggcaagggtatcgccgggcgtcaagacatcttggatgatagtggttacgtgtcagcttataaaaacgcaggaacctatgatgcgaaggtgaagaaatag

SEQ ID NO: 189568 - DNA, 1058 bp, Artificial Sequence
  derived and/or modified sequence
gaaacaggggataatacggcggagccgcctgggctgcagtcccacccgggagccggcagggagcggagctgcggagccgcctggtctcccgcgtccatcggtccattcctgcgtcgttctgtccttccgaacgcacacttcaggagcagccgcgagggtggcatggcagcgagcacagacatggctgggctggaggagagcttccgcaagtttgccatccatggtgaccccaaggccagtgggcaagagatgaatggcaagaactgggccaagctgtgcaaggactgcaaggtggctgacggaaagtccgtgacagggaccgatgtggacatcgtcttctccaaagtcaaggggaagtctgctcgggtcatcaactatgaggagttcaagaaggccctggaagagctggcgaccaagagattcaaggggaagagcaaggaggaggccttcgatgccatctgccagctggtggcaggcaaagagccagccaatgtgggcgtcactaaagcaaaaacagggggtgctgtagaccggctgacggacaccagcagatacacgggctcccacaaggagcgcttcgatgagagcggcaagggcaagggcattgcgggacggcaggacatcctggacgacagtggctacgtgagcgcctacaagaatgcaggcacctacgatgccaaggtgaagaagtgaggcttgggaagaccgccctgccaagtgcggctgcccctgccagaggctcaggcctgggtctaaggggcacgtggagcaagagatcctggtcccctccctgctggacctgccacccagagcttcctgcctagtcccactgggctggcccaccaggcctctgacccaggctgctctgcggccccttcctcctcctcttcctgctccaacttctgtccacctggggacagtctgtgcctgtagcctcatgaccccaacccagccccaggcatggctaacccctgactgcttgcctcatatttaagctgctgctctggccaagtgcctaattttaacccagacctcaataaagacaccttttgtaccaa

SEQ ID NO: 189569 - DNA, 531 bp, Artificial Sequence
  derived and/or modified sequence
atggccgccagcaccgacatggccggcctggaggagagcttccggaagttcgcaattcacggcgatcctaaagcctcaggccaggagatgaacggcaaaaactgggccaagctgtgcaaggattgtaaagtcgccgacggaaaatctgtgacgggcacagatgtagatattgtgttctcgaaggttaaaggcaagtctgccagggtgatcaactatgaagagttcaagaaggctctcgaggagttagccaccaagagattcaagggaaaaagtaaagaagaagctttcgacgccatttgtcagttggttgcgggaaaggaacccgccaatgttggagtgactaaggccaaaacaggcggagccgtggataggctgaccgatacttcccgatataccggctcacacaaagagagattcgacgaatccgggaagggcaaaggtatagctggccgccaggacatcttggacgattctgggtatgtgtccgcttataagaacgcaggtacttacgacgctaaagtcaaaaaatag

SEQ ID NO: 189570 - DNA, 531 bp, Artificial Sequence
  derived and/or modified sequence
atggcagcaagcaccgatatggctgggctcgaggaatccttcagaaagtttgctattcatggggaccccaaggcaagcggtcaggagatgaatgggaaaaactgggccaaactgtgtaaggattgtaaggtagccgatgggaagtcagtcacaggaacagacgtggatattgtcttctccaaagtgaagggaaagtctgcaagagtgattaactatgaagagtttaaaaaagcacttgaagagctggctaccaagaggttcaagggtaaatcaaaggaggaggcctttgacgcgatttgccagctcgtggccggaaaggagcctgcaaacgttggcgtgacaaaggcaaaaacaggcggagccgtcgatagacttactgataccagcagatacaccggctctcataaagaaagatttgatgaaagcggtaaaggcaagggcattgctgggagacaggacatcctggacgactccggctacgtgtctgcctacaagaatgcagggacctacgacgcaaaagttaagaaatag

SEQ ID NO: 189571 - DNA, 531 bp, Artificial Sequence
  derived and/or modified sequence
atggccgcatccactgacatggctggtctggaagaatcgtttcgcaaattcgccattcatggagatccaaaagcgagtggccaggagatgaacggaaagaattgggccaaactctgtaaggactgcaaagttgctgacggtaaatcagtgaccggtaccgatgtagacatcgtgttctctaaggttaagggtaaatcagcccgtgtgatcaattacgaggaatttaaaaaggccttagaagagctcgctacaaaacgattcaagggtaagagtaaggaggaggctttcgacgccatttgccagttggtggccggtaaagaacctgctaacgtcggagtgaccaaagccaaaacaggtggcgctgtagacagacttacagataccagccggtacacgggttctcacaaagagcggtttgatgagtcagggaaaggcaagggtatcgctggacgtcaggacatactagacgactcagggtatgtctctgcctataaaaacgcaggaacttacgacgcgaaagtgaaaaagtag

SEQ ID NO: 189572 - DNA, 1089 bp, Artificial Sequence
  derived and/or modified sequence
cccgggagccggcagggagcggagctgcggagccgcctggtctcccgcgtccatcggtccattcctgcgtcgttctgtccttccgaacgcacacttcaggagcagccgcgaggagtgagcactgcacgcaggatccgcccagtgcttgggccaagcaccctgtggcatccaagctcccctggacgttacccttggtgaaccaaggtggcatggcagcgagcacagacatggctgggctggaggagagcttccgcaagtttgccatccatggtgaccccaaggccagtgggcaagagatgaatggcaagaactgggccaagctgtgcaaggactgcaaggtggctgacggaaagtccgtgacagggaccgatgtggacatcgtcttctccaaagtcaaggggaagtctgctcgggtcatcaactatgaggagttcaagaaggccctggaagagctggcgaccaagagattcaaggggaagagcaaggaggaggccttcgatgccatctgccagctggtggcaggcaaagagccagccaatgtgggcgtcactaaagcaaaaacagggggtgctgtagaccggctgacggacaccagcagatacacgggctcccacaaggagcgcttcgatgagagcggcaagggcaagggcattgcgggacggcaggacatcctggacgacagtggctacgtgagcgcctacaagaatgcaggcacctacgatgccaaggtgaagaagtgaggcttgggaagaccgccctgccaagtgcggctgcccctgccagaggctcaggcctgggtctaaggggcacgtggagcaagagatcctggtcccctccctgctggacctgccacccagagcttcctgcctagtcccactgggctggcccaccaggcctctgacccaggctgctctgcggccccttcctcctcctcttcctgctccaacttctgtccacctggggacagtctgtgcctgtagcctcatgaccccaacccagccccaggcatggctaacccctgactgcttgcctcatatttaagctgctgctctggccaagtgcctaattttaacccagacctcaataaag

SEQ ID NO: 189573 - DNA, 531 bp, Artificial Sequence
  derived and/or modified sequence
atggccgccagcaccgacatggccggcctggaggagagcttcagaaagttcgccatccacggcgaccccaaggccagcggccaggagatgaacggcaagaactgggccaagctgtgcaaggactgcaaggtggccgacggcaagagcgtgaccggcaccgacgtggacatcgtgttcagcaaggtgaagggcaagagcgccagagtgatcaactacgaggagttcaagaaggccctggaggagctggccaccaagagattcaagggcaagagcaaggaggaggccttcgacgccatctgccagctggtggccggcaaggagcccgccaacgtgggcgtgaccaaggccaagaccggcggcgccgtggacagactgaccgacaccagcagatacaccggcagccacaaggagagattcgacgagagcggcaagggcaagggcatcgccggcagacaggacatcctggacgacagcggctacgtgagcgcctacaagaacgccggcacctacgacgccaaggtgaagaagtag

SEQ ID NO: 189574 - protein, 523 aa, Artificial Sequence
  derived and/or modified sequence
MAAVGRVGSFGSSPPGLSSTYTGGPLGNEIASGNGGAAAGDDEDGQNLWSCILSEVSTRSRSKLPAGKNVLLLGEDGAGKTSLIRKIQGIEEYKKGRGLEYLYLNVHDEDRDDQTRCNVWILDGDLYHKGLLKFSLDAVSLKDTLVMLVVDMSKPWTALDSLQKWASVVREHVDKLKIPPEEMKQMEQKLIRDFQEYVEPGEDFPASPQRRNTASQEDKDDSVVLPLGADTLTHNLGIPVLVVCTKCDAISVLEKEHDYRDEHFDFIQSHIRKFCLQYGAALIYTSVKENKNIDLVYKYIVQKLYGFPYKIPAVVVEKDAVFIPAGWDNDKKIGILHENFQTLKAEDNFEDIITKPPVRKFVHEKEIMAEDDQVFLMKLQSLLAKQPPTAAGRPVDASPRVPGGSPRTPNRSVSSNVASVSPIPAGSKKIDPNMKAGATSEGVLANFFNSLLSKKTGSPGGPGVSGGSPAGGAGGGSSGLPPSTKKSGQKPVLDVHAELDRITRKPVTVSPTTPTSPTEGEAS

SEQ ID NO: 189575 - DNA, 1572 bp, Artificial Sequence
  derived and/or modified sequence
atggccgccgtgggcagagtgggcagcttcggcagcagcccccccggcctgagcagcacctacaccggcggccccctgggcaacgagatcgccagcggcaacggcggcgccgccgccggcgacgacgaggacggccagaacctgtggagctgcatcctgagcgaggtgagcaccagaagcagaagcaagctgcccgccggcaagaacgtgctgctgctgggcgaggacggcgccggcaagaccagcctgatcagaaagatccagggcatcgaggagtacaagaagggcagaggcctggagtacctgtacctgaacgtgcacgacgaggacagagacgaccagaccagatgcaacgtgtggatcctggacggcgacctgtaccacaagggcctgctgaagttcagcctggacgccgtgagcctgaaggacaccctggtgatgctggtggtggacatgagcaagccctggaccgccctggacagcctgcagaagtgggccagcgtggtgagagagcacgtggacaagctgaagatcccccccgaggagatgaagcagatggagcagaagctgatcagagacttccaggagtacgtggagcccggcgaggacttccccgccagcccccagagaagaaacaccgccagccaggaggacaaggacgacagcgtggtgctgcccctgggcgccgacaccctgacccacaacctgggcatccccgtgctggtggtgtgcaccaagtgcgacgccatcagcgtgctggagaaggagcacgactacagagacgagcacttcgacttcatccagagccacatcagaaagttctgcctgcagtacggcgccgccctgatctacaccagcgtgaaggagaacaagaacatcgacctggtgtacaagtacatcgtgcagaagctgtacggcttcccctacaagatccccgccgtggtggtggagaaggacgccgtgttcatccccgccggctgggacaacgacaagaagatcggcatcctgcacgagaacttccagaccctgaaggccgaggacaacttcgaggacatcatcaccaagccccccgtgagaaagttcgtgcacgagaaggagatcatggccgaggacgaccaggtgttcctgatgaagctgcagagcctgctggccaagcagccccccaccgccgccggcagacccgtggacgccagccccagagtgcccggcggcagccccagaacccccaacagaagcgtgagcagcaacgtggccagcgtgagccccatccccgccggcagcaagaagatcgaccccaacatgaaggccggcgccaccagcgagggcgtgctggccaacttcttcaacagcctgctgagcaagaagaccggcagccccggcggccccggcgtgagcggcggcagccccgccggcggcgccggcggcggcagcagcggcctgccccccagcaccaagaagagcggccagaagcccgtgctggacgtgcacgccgagctggacagaatcaccagaaagcccgtgaccgtgagccccaccacccccaccagccccaccgagggcgaggccagctag

SEQ ID NO: 189576 - DNA, 2504 bp, Artificial Sequence
  derived and/or modified sequence
gtgcgctgaacgccccatatccgggttcccgccgcctccaccgccaccgcctcagccgcctcgcacatttagtcttgccgggagtggtgtgattcccgaccaagatggcggccgtggggcgagtcggctccttcggttcttctccgccgggattatcctcgacttacactggcggccccttgggcaacgagatagcgtcgggcaacggtggcgccgcggcaggcgacgacgaggacgggcagaacctttggtcctgcatcctcagcgaggtctccacccgctcgcgctccaagctccctgcggggaagaacgtgctactgctgggtgaagatggagctggaaaaacaagcttaataagaaaaattcagggaatagaggagtataagaaaggaagaggattggaatatttgtacttaaatgtgcatgatgaagacagggatgatcaaacaagatgtaatgtttggatcttagatggagacctatatcacaaaggcctccttaaattttcactggatgccgtatctctgaaggatactctagttatgctggttgttgacatgtcaaagccttggactgctttggattctttacagaaatgggcaagtgttgttagagaacatgttgacaaactgaaaatccctcctgaagaaatgaaacaaatggaacaaaagttgattagagacttccaagaatatgtagagccaggagaagacttcccggcttctccccagagaagaaatactgcgtcacaagaagacaaagatgacagtgtagttttacctctgggtgcggatacacttacacataacttgggcattccagtactagtagtttgcacaaagtgtgatgccattagtgtattggagaaagaacatgactacagagatgaacattttgattttattcagtcacatatccggaagttttgtttacagtatggtgcagcacttatttacacttcagtaaaagaaaacaaaaatatagacttagtatataaatacatcgttcagaaactatatggatttccctataagattcctgctgttgttgtggaaaaggatgcagtatttattccagcagggtgggataatgataagaaaataggaatattacatgaaaattttcaaacattaaaagcagaagataattttgaagacatcataactaaaccacctgttcgaaagtttgtacatgagaaggaaattatggcagaagatgatcaggtgtttcttatgaagctacagtcccttttagcaaagcaaccaccaactgcagctggaaggcctgtggatgcctcaccaagagtcccaggaggctccccacgaacaccaaatagatctgtatcatctaatgttgccagcgtgtcacccattcctgctgggtcaaaaaaaattgatccaaacatgaaagctggagctacaagtgaaggcgttctggcaaatttcttcaacagtttgttgagtaaaaagactggctctccaggaggccctggtgtgagtggtggtagccctgcaggtggggctggaggtggaagcagtggtttaccaccatccaccaaaaagtcaggccagaagcctgtcttagatgttcatgcagaactagacagaattacacgaaaaccagttacagtttctcccacaacacctacatctcctacggaaggagaagcttcttgaagataccaaataaagccatttattctgttttctgggataatgtaaacatgcctctgccttttccttcaaaagtggaattagaaagctggagtgcttcttcagatggactaaatttatgtcgtgtgtgtgtgtgtgtgtgtgtgtggttacccattttttagaaggagccgtacagaagaaaaattattctacattatgtaggattgctgtttgcattgccattttgcataagaaagtaatttttgattttgaaaatctcaaaacttttagatctgaaatacagccatgtgatcgatcatattctaaaggctatttaaaacatgtaaaaggatttggggaacggcagaaaacatgcagtttgggcatttgactgacttggaagtctaagcttattttagttataactattaaaatcatttttaaaaatttgttagttttgctgacagagaaaaatcgtcagttgtcagattttgcacaccacaataaatgtaccaccacacacggaatatgctaagaaaactatcagatagcgtttgatacactagtcattgtctcaatcactgatcctgtaagttgtcatcaaaatatgatttagaaatattggccaaggtgttgctttaactgaggagaaaagaaagcacactgcctaaatgtgtaaaagaaaaatgcagaggttattaaaatgtaaagaagtaacaatctttggatttgtctatacatatatatatatatatatggctttgccttaatatacccccttttttgtttgtgactttcaactgtaatcagttaataaagtatttattctctgcattcaggttcaaataa

SEQ ID NO: 189577 - DNA, 1572 bp, Artificial Sequence
  derived and/or modified sequence
atggcggccgtcggtagggtcgggagcttcggcagctcacctccaggactatcatccacatatactggagggcctctgggtaacgaaatagcctccggcaatggcggtgccgctgcgggggacgacgaggatggtcagaatttatggagctgcattctgagcgaggtgtctacgcggtcccggtccaagcttccagcagggaaaaatgtgctcctgctcggagaagacggcgcaggcaagacatccctgattcggaagattcagggcatagaggagtataagaaaggcagaggtctagagtacctttacctcaatgtccatgatgaggaccgagacgaccagacccggtgtaacgtgtggattctcgacggggacctttaccataaaggcctactgaagttctcattggacgcagtgtccttgaaagatactctggtgatgcttgtggtggatatgtcaaagccctggacagcattggactcactgcaaaaatgggcatcagtggtcagagagcacgtcgacaagctgaagataccccccgaagaaatgaaacagatggagcaaaagctcattcgggacttccaggaatacgtcgagccgggagaagatttccccgcctccccacaacgccgcaacacagcatcgcaggaagacaaggacgatagtgtggttttaccattaggcgctgacactcttacccacaacctcggaatacccgttctggtggtttgtaccaaatgtgatgccatctctgtcctggagaaggagcacgactatcgcgacgagcacttcgatttcatccaatcacatattaggaaattttgcctgcaatacggagcggccctcatctatacctctgtgaaggagaataagaacattgacttggtatacaaatatattgttcagaaactttatggatttccttataaaatccccgcagttgtggtggagaaggatgcagtgtttatcccagccggttgggataacgataagaagataggtattctccacgagaattttcaaacacttaaagctgaagacaatttcgaggacattattactaaaccaccagtgcgaaagtttgtccacgagaaggagataatggctgaggatgaccaagtgttcttaatgaaactccagagtctgctcgccaagcaaccaccaactgccgcaggacgccccgtggacgccagtccacgcgtgccaggcggttcccctaggacccctaacagatcagtcagctctaacgttgcatccgtaagcccaatccccgccggttcaaaaaaaatcgaccctaacatgaaggctggcgccacatccgagggcgtattggcaaacttcttcaattcattgctctccaagaagacgggctcacctggcggccctggcgttagtggaggcagccccgctgggggcgcaggcgggggctcatccggccttccaccctcaactaagaagagtggacagaaacctgtcctggacgtgcacgccgagcttgaccgtatcactcgtaaacccgtcactgtcagtccgacaacgcccactagccctacagaaggagaggctagctag

SEQ ID NO: 189578 - DNA, 1572 bp, Artificial Sequence
  derived and/or modified sequence
atggctgctgtgggccgggtgggcagctttggcagcagccccccaggcctgagcagcacctacacaggaggccccctgggcaatgagatcgccagcggaaatggaggagctgctgctggagatgatgaagatggccagaacctgtggagctgcatcctgtctgaggtgtccaccaggagccgcagcaagctgcctgctgggaagaatgtgctgctgctgggagaagatggagctgggaagaccagcctcatcaggaagatccagggcatcgaggagtacaagaagggccggggcctggagtacctgtacctgaatgtgcatgatgaagatagagatgaccagacccgctgcaatgtgtggatcctggatggagacctgtaccacaagggcctgctgaagttcagcctggatgctgtgtccctgaaggacaccctggtgatgctggtggtggacatgagcaagccctggacagccctggacagcctgcagaagtgggcctctgtggtgcgggagcacgtggacaagctgaagatccccccagaggagatgaagcagatggagcagaagctgatccgggacttccaggagtatgtggagcccggggaggacttccctgccagcccccagaggaggaacacagccagccaggaggacaaggatgacagcgtggtgctgcccctgggcgctgacaccctgacccacaacctgggcatccctgtgctggtggtgtgcaccaagtgtgatgccatctctgtgctggagaaggagcatgactacagagatgagcactttgacttcatccagagccacatcaggaagttctgcctgcagtacggggccgccctgatctacacctctgtgaaggagaacaagaacatcgacctggtgtacaagtacatcgtgcagaagctgtatggcttcccctacaagatcccagctgtggtggtggagaaggatgctgtgttcatcccagctggctgggacaatgacaagaagattggcatcctgcacgagaacttccagaccctgaaggccgaggacaactttgaggacatcatcaccaagccccctgtgaggaagtttgtgcatgagaaggagatcatggccgaggatgaccaggtgttcctgatgaagctgcagagcctgctggccaagcagcccccaacagctgctggccggcctgtggatgccagcccccgggtgcctgggggcagccccaggacccccaacagatctgtgagcagcaatgtggcctctgtgagccccatcccagctggcagcaagaagattgaccccaacatgaaggccggggccaccagcgagggcgtgctggccaacttcttcaacagcctgctgagcaagaagacaggcagccctgggggccctggggtgtctgggggcagccctgctgggggcgccggcggcggcagcagcggcctgccccccagcaccaagaagagcggccagaagcctgtgctggatgtgcatgctgagctggaccgcatcaccaggaagcctgtgacagtgagccccaccacccccaccagccccacagaaggagaggccagctag

SEQ ID NO: 189579 - DNA, 1572 bp, Artificial Sequence
  derived and/or modified sequence
atggccgccgtgggccgggtgggcagcttcggcagcagcccccccggtctgtcctccacctacacaggtgggcctctgggtaatgagatcgctagcgggaacggcggcgcggcggccggcgatgatgaggatggacaaaatctctggtcttgtatcctgtccgaggtttcgacaaggtcaaggtctaagttgccagccggcaaaaatgtgctgttgctcggtgaggatggagctggtaagaccagtctgatacggaaaattcaaggcatcgaggagtataagaagggtcgaggactagagtacctgtacctgaatgtccacgacgaggacagagatgaccaaacacgatgcaacgtatggatcttggatggggacttgtatcacaagggactgctgaagtttagcctggatgccgtgtctctgaaggatacactggtgatgcttgttgtagacatgtccaaaccgtggacggcccttgactctctgcagaagtgggcttctgtggttcgtgagcatgtcgataaactgaaaatccctccagaggagatgaagcagatggagcaaaagcttataagagatttccaggagtatgtggaacctggtgaggacttccccgccagccctcagcgcaggaataccgccagtcaggaggataaagacgattccgtggtcctgccgctaggtgccgacacccttacgcacaacctaggaatccctgttctggtggtgtgcactaagtgtgatgccatttctgtgctggaaaaggagcacgactacagagatgaacactttgacttcattcagagccacattcgcaaattttgcctccagtatggcgctgcgttgatttatacgagcgtgaaagaaaataagaacatagacctcgtttataagtacatcgtccaaaaactctacggctttccttacaagatccctgctgtggtggtggaaaaggatgccgttttcattccagccggatgggacaacgacaagaagatcggcattctccatgaaaacttccagacactgaaagcagaagataactttgaagatataatcacaaagcctccagtccgaaagttcgttcacgaaaaggagattatggcagaggacgaccaagtttttctgatgaaactgcaatctctgctcgcaaagcaacctcctacagctgcaggtagaccagttgatgccagcccaagggtgcccggcggatccccaagaaccccaaaccggtcagtcagttccaatgtggccagcgtgtccccaatcccggcaggaagcaagaagatagaccctaatatgaaagccggtgccacctccgaaggagtgctcgctaacttttttaactcgttgctgtccaagaaaaccggatcacccggcggacccggcgtaagcggcggatcgcccgctggaggcgcaggcgggggttcttctgggctacccccctcaactaaaaaaagcggccagaagccagtgctagatgtccacgctgaactagatcgaattaccagaaaacctgtcactgtgagccccacaactcccacatctcccactgagggagaagcttcctag

SEQ ID NO: 189580 - DNA, 1572 bp, Artificial Sequence
  derived and/or modified sequence
atggcggctgttggacgggtgggctcattcggtagcagccctcctggcctgtcttcaacctacacaggaggaccactcggcaacgagattgcatctgggaatggaggggcagctgctggggacgacgaggacggacagaatttatggtcgtgtatactgtcggaagtctctaccaggtctaggtccaagctgcccgctggtaaaaacgtgctgcttctcggagaggatggtgccggaaaaacctccctgattagaaaaattcagggcatcgaagagtacaagaagggacgagggctggagtacctgtatcttaacgtccacgacgaggacagggacgatcaaacgcggtgtaacgtttggattcttgatggagatttgtaccataagggcttacttaagttctctctggatgcagtcagcttgaaggataccctggtcatgctcgttgtagatatgtctaaaccttggactgccctggattctctccagaaatgggcctctgtggttcgcgagcacgtggacaaattaaagattcctcctgaggagatgaaacagatggaacagaagctgatccgcgacttccaagaatatgtggaacccggagaggacttccctgctagtccgcagaggaggaatactgctagtcaggaggataaagatgattctgtggtactgccgttaggtgccgacaccttaacccacaatcttggtatcccagttctggtagtctgcactaagtgtgatgctatcagcgtactggagaaagagcatgactatcgcgatgagcactttgactttattcagagccatattaggaagttttgtttgcagtacggcgctgctttgatctatacatcagtgaaggagaacaaaaatatcgatctggtttacaagtacatagtccagaagctttacgggtttccttacaagatcccagcagtggtcgtggagaaagacgcagtattcattccagcaggatgggacaacgacaagaaaataggcatacttcacgaaaacttccaaactttaaaggccgaggataattttgaggacattatcacgaagcccccagtacggaagtttgtacatgagaaagagatcatggcagaggacgatcaggtctttctgatgaaacttcaaagcctcctagccaagcagccacctacagcagccggtcggccagtggatgcgtcacccagggtccccggaggaagccccagaacacccaatagaagcgtgagttctaacgtcgccagcgtttctcccatccccgctggatccaagaagattgaccccaacatgaaggccggagctacttccgagggggtcctggcaaatttttttaacagtctgctgtcaaagaaaacaggctcacctggaggccctggagtgtctggcggatccccagcgggaggcgctggcggtggctccagtgggctccctccgagtaccaagaagagtggtcaaaagccagtgcttgatgttcatgcagagctggatcggataacccgaaaaccggtcaccgtgtctcccaccactcccacatcaccaaccgaaggagaggccagctag

SEQ ID NO: 189581 - protein, 312 aa, Artificial Sequence
  derived and/or modified sequence
MESALPAAGFLYWVGAGTVAYLALRISYSLFTALRVWGVGNEAGVGPGLGEWAVVTGSTDGIGKSYAEELAKHGMKVVLISRSKDKLDQVSSEIKEKFKVETRTIAVDFASEDIYDKIKTGLAGLEIGILVNNVGMSYEYPEYFLDVPDLDNVIKKMININILSVCKMTQLVLPGMVERSKGAILNISSGSGMLPVPLLTIYSATKTFVDFFSQCLHEEYRSKGVFVQSVLPYFVATKLAKIRKPTLDKPSPETFVKSAIKTVGLQSRTNGYLIHALMGSIISNLPSWIYLKIVMNMNKSTRAHYLKKTKKN

SEQ ID NO: 189582 - DNA, 939 bp, Artificial Sequence
  derived and/or modified sequence
atggaaagcgcattaccggcagcaggtttcttgtattgggtcggagcaggcacggtggcctacctggctttgaggatttcttacagcttattcacagccctgagagtctggggcgtggggaacgaggccggagtgggtcctggtttgggcgagtgggccgtcgttactgggtccacagacggcattggcaaaagttatgctgaggaattggctaaacacgggatgaaggtggtgctcattagtagatccaaggataagctggatcaggtgagttctgaaatcaaggaaaaatttaaggtggagactaggacgattgccgtcgacttcgccagtgaagacatctacgataagattaagaccggcctggccggactggaaatcggcattcttgtaaacaatgttggcatgtcctatgagtaccctgagtacttcctggatgtgcccgacttagataatgtcatcaaaaagatgatcaacatcaatatcctgtcagtatgcaaaatgactcagcttgtcctaccaggcatggtggaacggagtaagggcgctatcctgaacatttcctccggctctggtatgctacctgttccacttttgactatttactcggccacaaaaaccttcgtggacttcttctcgcagtgcctgcatgaggagtacaggtccaagggcgtgttcgtacaatcggtgctgccctacttcgtggctaccaaattggctaagattcggaaacccacactggacaaaccatctcctgagacattcgtgaagtcagcaataaagaccgtcggcttacagagtaggactaacggttacctcattcatgccctgatggggtccatcatctccaatctgcctagctggatctatctgaaaatcgtaatgaatatgaacaagagtacacgggcacattacctgaagaagaccaagaagaattag

SEQ ID NO: 189583 - DNA, 939 bp, Artificial Sequence
  derived and/or modified sequence
atggagtcagctttacccgcggcagggtttttatactgggttggagctggcactgtcgcatacctcgcactgaggatttcatacagcctgtttactgcgttgagagtgtggggggtcggcaatgaggcaggggtgggtcccggccttggagaatgggccgtcgtgactggatcaaccgacgggattggcaaatcatacgctgaagagcttgccaaacatggtatgaaggtagtcctcatttccaggtccaaagacaagctggatcaagtcagttcagagataaaggaaaagtttaaagttgaaactagaactatcgctgtcgatttcgcatccgaagacatttacgacaaaattaagactgggctggccggtctcgagatcgggattctcgtgaataacgtaggcatgtcatatgagtacccagagtacttcttggacgtccccgatctggataacgtaattaaaaaaatgataaacattaatatattgtccgtctgtaagatgactcagctggttctgcccggcatggtcgaacggtccaaaggggcaatactaaatattagttcaggttctgggatgctccctgtccccctgctaaccatttactcagctacaaagacgtttgtagacttcttttcccagtgtctgcacgaggaataccgcagcaaaggcgtgttcgtgcagtctgtgttgccctatttcgtagccacaaagctagcgaaaattagaaagcctacccttgataaaccatcacctgaaacttttgtcaaatccgctatcaagaccgtgggccttcagtctagaaccaatggatatcttattcacgctctgatgggtagtataatctcaaatctgccatcttggatttacctcaaaattgtgatgaacatgaacaagtccactagagcacactatctcaagaagaccaagaagaactag

SEQ ID NO: 189584 - DNA, 939 bp, Artificial Sequence
  derived and/or modified sequence
atggagtcagctttacccgcggcagggtttttatactgggttggagctggcactgtcgcatacctcgcactgaggatttcatacagcctgtttactgcgttgagagtgtggggggtcggcaatgaggcaggggtgggtcccggccttggagaatgggccgtcgtgactggatcaaccgacgggattggcaaatcatacgctgaagagcttgccaaacatggtatgaaggtagtcctcatttccaggtccaaagacaagctggatcaagtcagttcagagataaaggaaaagtttaaagttgaaacaaggacaattgctgtcgacttcgccagtgaagacatttatgataagatcaagacaggcctggctgggttggaaatcggtatcctggtgaataacgtaggcatgtcttatgaataccccgagtactttctagatgtacccgacctggataacgtgattaagaagatgatcaatattaatatactcagcgtctgcaaaatgacacagctcgtcctgcctggcatggtagaacgcagtaaaggagctatcctgaacatctcatctggtagtggcatgttgcccgttcccctgctgacgatctattctgccaccaaaacatttgtcgatttcttttctcaatgcctccacgaggaatacagaagcaagggcgtgtttgtgcagagtgtgctgccttatttcgttgctaccaaactggccaaaattaggaaacccaccctagacaaaccaagcccagaaacattcgttaagagtgctattaagaccgtaggccttcagtcccgcaccaacggatacctgattcatgctcttatgggtagcatcatcagcaatcttccatcctggatttatctcaagatcgtcatgaatatgaataagagcactagagcccattacttgaagaaaaccaaaaagaactag

SEQ ID NO: 189585 - DNA, 2420 bp, Artificial Sequence
  derived and/or modified sequence
aaagtggtgtcggagcagcgcctattagtgtcatcctcaccgtcacggccggcgcctcctcctggattcattcactcgctcttttcattcacgaaggtagtgaggcctagtggaaagccatggagagcgctctccccgccgccggcttcctgtactgggtcggcgcgggcaccgtggcctacctagccctgcgtatttcgtactcgctcttcacggccctccgggtctggggagtggggaatgaggcgggggtcggcccggggctcggagaatgggcagttgtcacaggtagtactgatggaattggaaaatcatatgcagaagagttagcaaagcatggaatgaaggttgtccttatcagcagatcaaaggataaacttgaccaggtttccagtgaaataaaagaaaaattcaaagtggagacaagaaccattgctgttgactttgcatcagaagatatttatgataaaattaaaacaggcttggctggtcttgaaatcggcatcttagtgaacaacgtgggaatgtcgtatgagtatcctgaatactttttggatgttcctgacttggacaatgtgatcaagaaaatgataaatattaatattctttctgtttgtaagatgacacaattggtactgcctggcatggtggaaagatccaaaggggctattctgaacatttcatctggcagtggcatgctccctgtcccactcttgaccatctattctgcaaccaagacttttgtagatttcttctctcagtgcctccatgaggagtataggagcaagggcgtctttgtgcagagtgtcctgccatacttcgtagctacaaaactggctaaaatccggaagccaactttggataagccctctccggagacgtttgtgaagtctgcaattaaaacagtcggcctgcaatcccgaaccaatggatacctgatccatgctcttatgggctcgataatctcaaacctgccttcttggatttatttgaaaatagtcatgaatatgaacaagtctacacgggctcactatctgaagaaaaccaagaagaactaagcattgataactgcattgtaacttggccagatgctccagcatatgcacgttcactgcaaagcaccctactggttttgaaaatctgaccttgtcatttcaatagttattaacatgactaaatattatcttaattaagaggaaaatagaagttgcttttaggggtttctgacatatattctggatactatccgaggtaattttgaagtttaatataaatgctcatatcaaatgaatatagaactaatattgtcgggaacacctaatagaaaggaatactattatagcaaatcacagaatgatagactcaagcataaaacttggcagttttatctgcttcaaaatgccattgatcattattcctgtattttctctgaaactgattataaaaaccaatgtccagctactcttttgtttttgacacttgaagaaatggagatcgatttgatttgtttataagcagacacactgcaatttacaaagatctctttacggttttataaaattatcttccagtttgtacatttatatggaattgttctttatcaagggtagctaatgacatgaaaataattgtgaaatatggaattatttctgacacatgaagcccactaaactatgctttcttataatgcatatttcttctcagtttaaatgtatgtaaatatcgaagctatatggtatgatttataaagataaatgggccaaagtgtacattgagactggcagccatctatggtaccactgaaaccctgacccagaaaagtggcttgcttggacacccagctgcctttgtttctgcattaaaccaatattgatcacacatatgacacaggctagtcctataaaagtaatgacttcatagaaatggcattataatttttaagttgatactctacaggtagctattgatataattagttttaataaaacatgctgcaaccatggtatacaacaaaaatacatttctttggtgattgaaattaaggccgtatttacaatgacttaatataagactgacttttatcctgcttcataacttgtatggagaactcaccaagaaagaattcaatactgtgaaatatgcagcaagaagattggtctttacctaggctgtgtttcctaagctctgagttttcagcaccagtagatttgtattaaaagaaaaaaaaatggggccttagcttctggcttttaattttgccagctaaggacataaaacaaaaataaacaaacaaaaacaaatagccatctgctatcagcatcattatgtaaaagaaaatatattttagcccctaaaattaggaagaatgtaatctcagaataaaggttgtcatttaagttgaataaatatatagctttatg

SEQ ID NO: 189586 - DNA, 939 bp, Artificial Sequence
  derived and/or modified sequence
atggagagcgccctgcccgccgccggcttcctgtactgggtgggcgccggcaccgtggcctacctggccctgagaatcagctacagcctgttcaccgccctgagagtgtggggcgtgggcaacgaggccggcgtgggccccggcctgggcgagtgggccgtggtgaccggcagcaccgacggcatcggcaagagctacgccgaggagctggccaagcacggcatgaaggtggtgctgatcagcagaagcaaggacaagctggaccaggtgagcagcgagatcaaggagaagttcaaggtggagaccagaaccatcgccgtggacttcgccagcgaggacatctacgacaagatcaagaccggcctggccggcctggagatcggcatcctggtgaacaacgtgggcatgagctacgagtaccccgagtacttcctggacgtgcccgacctggacaacgtgatcaagaagatgatcaacatcaacatcctgagcgtgtgcaagatgacccagctggtgctgcccggcatggtggagagaagcaagggcgccatcctgaacatcagcagcggcagcggcatgctgcccgtgcccctgctgaccatctacagcgccaccaagaccttcgtggacttcttcagccagtgcctgcacgaggagtacagaagcaagggcgtgttcgtgcagagcgtgctgccctacttcgtggccaccaagctggccaagatcagaaagcccaccctggacaagcccagccccgagaccttcgtgaagagcgccatcaagaccgtgggcctgcagagcagaaccaacggctacctgatccacgccctgatgggcagcatcatcagcaacctgcccagctggatctacctgaagatcgtgatgaacatgaacaagagcaccagagcccactacctgaagaagaccaagaagaactag

SEQ ID NO: 189587 - DNA, 939 bp, Artificial Sequence
  derived and/or modified sequence
atggagtctgccctacccgcggccggctttttgtactgggtgggcgccggcacagtcgcatatctcgccctccgaatctcctactccctttttaccgcactccgggtttggggagtgggcaatgaagctggagttggccctggactcggtgagtgggccgtcgtgaccggcagtaccgacggcattggtaagtcttacgctgaagagctggccaaacatggtatgaaggtggtcctgatttctcggagcaaagacaagctagaccaggtgagctcggagatcaaagaaaaatttaaagttgagacgcgaactatagcagtggactttgcctcagaagatatctacgacaaaataaagaccggactcgctggacttgagatcggtattctagtgaacaatgtggggatgagctacgagtaccctgagtacttcctcgacgtcccagacctagataatgtaatcaagaaaatgatcaacatcaatatactctcagtgtgtaaaatgacccagctcgtcctgccagggatggtggagcgctctaagggcgccatcctgaacatatcaagcgggtctggcatgttgccagtcccgctgcttactatttatagcgcaacaaagactttcgtggactttttctcccagtgcctccacgaggaataccggagtaaaggcgtgttcgtgcagagtgttctaccctatttcgttgcaactaaactggccaagatacgtaagcccaccctggacaagccgagtcctgagacctttgtcaaatcagccatcaagaccgttgggcttcaaagtcggactaatggataccttattcacgccctaatggggtctattatctcaaacctaccatcctggatctacctgaaaattgttatgaatatgaacaagtcaactagggcccactatctcaagaagacaaaaaagaactag

SEQ ID NO: 189588 - DNA, 939 bp, Artificial Sequence
  derived and/or modified sequence
atggagagcgccctgcctgctgctggcttcctgtactgggtgggcgccggcaccgtggcctacctggccctgcgcatctcctacagcctcttcaccgccctgcgggtgtggggcgtgggcaatgaagctggggtgggccctggcctgggggagtgggccgtggtgacaggcagcacagatggcatcggcaagagctatgcagaggagctggccaagcacggcatgaaggtggtgctgatcagccgcagcaaggacaagctggaccaggtgagcagcgagatcaaggagaagttcaaggtggagaccaggaccatcgctgtggactttgccagcgaggacatctatgacaagatcaagacaggcctggccggcctggagatcggcatcctggtgaacaacgtgggcatgtcctatgagtacccagagtacttcctggatgtgcctgacctggacaacgtcatcaagaagatgatcaacatcaacatcctgtctgtgtgcaagatgacccagctggtgctgcccggcatggtggagaggagcaaaggagccatcctgaacatcagcagcggcagcggcatgctgcctgtgcccctgctgaccatctacagcgccaccaagacctttgtggacttcttcagccagtgcctgcacgaggagtaccgcagcaaaggagtgtttgtgcagagcgtgctgccctactttgtggccaccaagctggccaagatcaggaagcccaccctggacaagcccagccctgagacctttgtgaagagcgccatcaagacagtgggcctgcagagcaggaccaacggctacctgattcatgccctgatgggcagcatcatcagcaacctgcccagctggatctacctgaagatcgtgatgaacatgaacaagagcacccgggcccactacctgaagaagaccaagaagaactag

SEQ ID NO: 189589 - DNA, 939 bp, Artificial Sequence
  derived and/or modified sequence
atggagagcgccctgcccgccgccggcttcctgtactgggtgggcgccggtacagtggcctatctagctctgagaattagctatagcctgttcaccgccctaagggtatggggagttgggaacgaggcaggcgtggggcctggactgggagaatgggccgtggttacagggtcaacggatgggatcggtaagtcctacgccgaagagcttgccaagcacggtatgaaggtagtgctaatttcccgtagcaaagataaactcgaccaggtgtcctctgaaattaaggagaaatttaaagttgagacacgaactatcgctgtggacttcgccagtgaggatatttatgataagatcaaaaccgggcttgctggattagagatcgggatcctggtaaacaatgtggggatgtcctatgagtatcctgagtacttcctcgatgttccggacttagataatgtaattaagaaaatgatcaatattaatatattgagtgtctgtaaaatgactcagctggttctacccggcatggtggagaggagcaagggcgccatattgaacatctcatctggctcagggatgctgccagtgcctctgcttacaatttactctgctactaagactttcgtggacttcttttcccagtgcctccacgaagaatatcgctccaagggcgtgttcgtccagagtgtgttaccatactttgtggctaccaagctggccaagattagaaagcccacccttgacaaaccttcccccgaaactttcgtcaaaagtgccattaagactgtaggtctgcagtcccgaactaacggttatttgattcatgccctgatggggagcatcatctctaacctgccaagttggatttacctcaaaatcgttatgaacatgaacaagagcaccagggcccactatctgaagaagactaagaaaaactag

SEQ ID NO: 189590 - RNA, 939 nt, Artificial Sequence
  derived and/or modified sequence
auggagucagcuuuacccgcggcaggguuuuuauacuggguuggagcuggcacugucgcauaccucgcacugaggauuucauacagccuguuuacugcguugagaguguggggggucggcaaugaggcaggggugggucccggccuuggagaaugggccgucgugacuggaucaaccgacgggauuggcaaaucauacgcugaagagcuugccaaacaugguaugaagguaguccucauuuccagguccaaagacaagcuggaucaagucaguucagagauaaaggaaaaguuuaaaguugaaacuagaacuaucgcugucgauuucgcauccgaagacauuuacgacaaaauuaagacugggcuggccggucucgagaucgggauucucgugaauaacguaggcaugucauaugaguacccagaguacuucuuggacguccccgaucuggauaacguaauuaaaaaaaugauaaacauuaauauauuguccgucuguaagaugacucagcugguucugcccggcauggucgaacgguccaaaggggcaauacuaaauauuaguucagguucugggaugcucccugucccccugcuaaccauuuacucagcuacaaagacguuuguagacuucuuuucccagugucugcacgaggaauaccgcagcaaaggcguguucgugcagucuguguugcccuauuucguagccacaaagcuagcgaaaauuagaaagccuacccuugauaaaccaucaccugaaacuuuugucaaauccgcuaucaagaccgugggccuucagucuagaaccaauggauaucuuauucacgcucugauggguaguauaaucucaaaucugccaucuuggauuuaccucaaaauugugaugaacaugaacaaguccacuagagcacacuaucucaagaagaccaagaagaacuag

SEQ ID NO: 189591 - RNA, 939 nt, Artificial Sequence
  derived and/or modified sequence
auggagucagcuuuacccgcggcaggguuuuuauacuggguuggagcuggcacugucgcauaccucgcacugaggauuucauacagccuguuuacugcguugagaguguggggggucggcaaugaggcaggggugggucccggccuuggagaaugggccgucgugacuggaucaaccgacgggauuggcaaaucauacgcugaagagcuugccaaacaugguaugaagguaguccucauuuccagguccaaagacaagcuggaucaagucaguucagagauaaaggaaaaguuuaaaguugaaacaaggacaauugcugucgacuucgccagugaagacauuuaugauaagaucaagacaggccuggcuggguuggaaaucgguauccuggugaauaacguaggcaugucuuaugaauaccccgaguacuuucuagauguacccgaccuggauaacgugauuaagaagaugaucaauauuaauauacucagcgucugcaaaaugacacagcucguccugccuggcaugguagaacgcaguaaaggagcuauccugaacaucucaucugguaguggcauguugcccguuccccugcugacgaucuauucugccaccaaaacauuugucgauuucuuuucucaaugccuccacgaggaauacagaagcaagggcguguuugugcagagugugcugccuuauuucguugcuaccaaacuggccaaaauuaggaaacccacccuagacaaaccaagcccagaaacauucguuaagagugcuauuaagaccguaggccuucagucccgcaccaacggauaccugauucaugcucuuauggguagcaucaucagcaaucuuccauccuggauuuaucucaagaucgucaugaauaugaauaagagcacuagagcccauuacuugaagaaaaccaaaaagaacuag

SEQ ID NO: 189592 - protein, 370 aa, Artificial Sequence
  derived and/or modified sequence
MAAERQEALREFVAVTGAEEDRARFFLESAGWDLQIALASFYEDGGDEDIVTISQATPSSVSRGTAPSDNRVTSFRDLIHDQDEDEEEEEGQRFYAGGSERSGQQIVGPPRKKSPNELVDDLFKGAKEHGAVAVERVTKSPGETSKPRPFAGGGYRLGAAPEEESAYVAGEKRQHSSQDVHVVLKLWKSGFSLDNGELRSYQDPSNAQFLESIRRGEVPAELRRLAHGGQVNLDMEDHRDEDFVKPKGAFKAFTGEGQKLGSTAPQVLSTSSPAQQAENEAKASSSILIDESEPTTNIQIRLADGGRLVQKFNHSHRISDIRLFIVDARPAMAATSFILMTTFPNKELADESQTLKEANLLNAVIVQRLT

SEQ ID NO: 189593 - DNA, 3568 bp, Artificial Sequence
  derived and/or modified sequence
aagttcctctttggagaggcaagagggcaaagaagctgaggacccagaagacaggattgtgcctaagaaagtggccttggagcagaggcccaaagaaagcggggagagcgccttgcccatcggtaagggaaaggtgctccaggcacagaagcagctaatgcaacggccctgaggcaaatgcaagataactggcaagttccaggaacagcaaggagggcaaggcgcctggagcagaggaagctagcggatcccttgatgagagggaggaactggcccatctctcatgggtcctgcaggcaggccatgagactgtcttttatgcggggcgagataacgaggcatggacgtgttgtgagcggaggcctagcctgttcaaggtctgaatttttacccctagaatgtaagaagcatgggagcagggactttgttttgctccctgccatatccacagccctagaaaaacgtcgggccattgatagctctcagtaaatgcttgacaagtaagtgaatgaacgaatgcacaattaatgaaatgagggctgcgtcaatgaataactgggaatctgactcctgcagggagccttcagcccacaggtgtatgtaagacccgccccgcctctcatccttcgggctcccacccccgccgttaggctgcggttcgcgccgcggtcgccagagggcgcggagcggcggggcttcccgcacggagggctttgcgtgaggcaccgcgtggggcggggctgcgggcgggctcccagctgctgggccctcatcggctgggcctcgtcgaccggcaagcggaacgcggcagcggggctgggcctgtgcggcggccgccggagcgctttggaaggcgcacggggcgaagatggcggcggagcgacaggaggcgctgagggagttcgtggcggtgacgggcgccgaggaggaccgggcccgcttctttctcgagtcggccggctgggacttgcagatcgcgctagcgagcttttatgaggacggaggggatgaagacattgtgaccatttcgcaggcaacccccagttcagtgtccagaggcacagcccccagtgataatagagtgacatccttcagagacctcattcatgaccaagatgaagatgaggaggaagaggaaggccagaggttttatgctgggggctcagagagaagtggacagcagattgttggccctcccaggaagaaaagtcccaacgagctggtggatgatctctttaaaggtgccaaagagcatggagctgtagctgtggagcgagtgaccaagagccctggagagaccagtaaaccgagaccatttgcaggaggtggctaccgccttggggcagcaccagaggaagagtctgcctatgtggcaggagaaaagaggcagcattccagccaagatgttcatgtagtattgaaactctggaagagtggattcagcctggataatggagaactcagaagctaccaagacccatccaatgcccagtttctggagtctatccgcagaggggaggtgccagcagagcttcggaggctagctcacggtggacaggtgaacttggatatggaggaccatcgggacgaggactttgtgaagcccaaaggagccttcaaagccttcactggcgagggtcagaaactgggcagcactgccccccaggtgttgagtaccagctctccagcccaacaggcagaaaatgaagccaaagccagctcttccatcttaatcgacgaatcagagcctaccacaaacatccaaattcggcttgcagacggcgggaggctggtgcagaaatttaaccacagccacaggatcagcgacatccgactcttcatcgtggatgcccggccagccatggctgccaccagctttatcctcatgactactttcccgaacaaagagctggctgatgagagccagaccctgaaggaagccaacctgctcaatgctgtcatcgtgcagcggttaacataaccgcccagccagctgcctggcctccctcctgtgtttcccatggccagtggccatgccccatggggatcgcccctcctgcccccttgtgcacacccagcagtccagtgcaacgtctcctccatagctctgggttcttagatcttggttggacgtttgttttctccttagttgcatttcctgggtttttgtgatgatcaatggactttaatgaaaaaaaaaataaaaacaaccaaaaaaattgaaggaatatcaccagcatgttgtacggaaactctcccactgaagcaggctttaattgctttaaaattatatttatcttggggcctgtgggaggaaacttccttccatcttctctgcataaaaacttgtggcacacaatgcttattcactagtgtgtcccacccgccagccccacagatgactggaggaaggaggggaaatgtgtagaaagaggcttcgccaccacttgttcccacgagaatatgtcacttgcccagataaaactgggcggcagccagagttccctgaagtgggaagtcagagctccatgcacacagtgtcttcagaaggtgaaaataaatatttccctgtgctccttttactcaacccctggggtatctaatcttgccaggtcttggccagttgagattctgttccacctgcctgcctggccctttcctccattaccatccagactgctcgcctcctggggattctcaggggctccattatggcttgatttactccacgtgcagaagtcttgagtggacctaggaggtaggtgggatattttttttcactaggatacagctcatgccaacccatcctaagtgagttcagaatcagggtatcttgccctataagataaacagtcaaaatgccaccgagctgttcactagtgatgtgtggcaaatcaaatcaactgttgaagaaggggtgagttttctgtgctacaagcacctgtcactgttggtacttgcaggaggcttctgctgggtatgttttggaagtgagtgtcactacttggctttgcttagcaggttctgcttcacacttgttctttgacctgctgacttgtgacttgcagaaacataggcagtagtcctagcctggtaaagaccctccaccacccctataagtttgattgctatgcaggtttgggagaggaggcctattgggctcttggatggaaccctttcccgtattaaacaaaccagagacagaatcagtgctgactcaggatctcctggtttggaatcgtaatgtgcctcaatcctctttccaagcaggcctcaccagtctctttctctttcctgcttcacccctgcaatgagccaagaaccaacactacatccacctagaactgcagaagggcttgtggtttcaaccaagacccatcctgagcaagggacttggcttggtgcttttgatcccaaagttcccacaccggcagtggcctgctggggcaatggcatctgtcacggtgttttctccagcaggtggagattatggaacctacatatgggtctggaaaaactgtacactgttgtcaccttgaccattaaaaaccagaatgaggacaatgga

SEQ ID NO: 189594 - DNA, 1113 bp, Artificial Sequence
  derived and/or modified sequence
atggccgccgagagacaggaggccctgagagagttcgtggccgtgaccggcgccgaggaggacagagccagattcttcctggagagcgccggctgggacctgcagatcgccctggccagcttctacgaggacggcggcgacgaggacatcgtgaccatcagccaggccacccccagcagcgtgagcagaggcaccgcccccagcgacaacagagtgaccagcttcagagacctgatccacgaccaggacgaggacgaggaggaggaggagggccagagattctacgccggcggcagcgagagaagcggccagcagatcgtgggcccccccagaaagaagagccccaacgagctggtggacgacctgttcaagggcgccaaggagcacggcgccgtggccgtggagagagtgaccaagagccccggcgagaccagcaagcccagacccttcgccggcggcggctacagactgggcgccgcccccgaggaggagagcgcctacgtggccggcgagaagagacagcacagcagccaggacgtgcacgtggtgctgaagctgtggaagagcggcttcagcctggacaacggcgagctgagaagctaccaggaccccagcaacgcccagttcctggagagcatcagaagaggcgaggtgcccgccgagctgagaagactggcccacggcggccaggtgaacctggacatggaggaccacagagacgaggacttcgtgaagcccaagggcgccttcaaggccttcaccggcgagggccagaagctgggcagcaccgccccccaggtgctgagcaccagcagccccgcccagcaggccgagaacgaggccaaggccagcagcagcatcctgatcgacgagagcgagcccaccaccaacatccagatcagactggccgacggcggcagactggtgcagaagttcaaccacagccacagaatcagcgacatcagactgttcatcgtggacgccagacccgccatggccgccaccagcttcatcctgatgaccaccttccccaacaaggagctggccgacgagagccagaccctgaaggaggccaacctgctgaacgccgtgatcgtgcagagactgacctag

SEQ ID NO: 189595 - DNA, 1113 bp, Artificial Sequence
  derived and/or modified sequence
atggccgcagagcggcaagaagccctgagagagttcgtcgcagtgactggagcagaggaagacagggctagattttttctcgaatcagctgggtgggacttgcagatcgctttggcatcgttttatgaagacggaggcgatgaagatatagttactatctcacaggctaccccatcaagtgtgagccgggggacagccccttccgataaccgggttacctccttcagggatttgatccacgaccaggatgaagacgaggaagaggaagagggccagagattttacgcaggcgggagtgaaagaagtgggcagcagatcgtcgggccgccccggaagaaatctcccaatgagcttgtggatgacctgttcaaaggagcaaaggagcacggcgccgttgccgttgaacgggtcacaaagagtccaggcgaaacaagcaaacccagacccttcgcaggcggagggtatcggttgggagctgccccagaggaggagagtgcttatgtggccggtgaaaaaaggcagcactcgtctcaggatgtgcatgtggtcctaaagctctggaagtcagggttctcactcgacaacggagaacttcgttcctatcaggacccctctaatgctcaatttttagaaagtataagaagaggagaggttcctgccgagttaagaaggctggcgcacggtgggcaggtcaaccttgatatggaagaccacagggatgaagattttgtgaagccaaagggagctttcaaagcgttcacaggagagggccaaaagttgggttctactgccccccaggtgctgtctacttccagccccgctcaacaggctgagaatgaggccaaggcttcctcgagcatcctcatcgacgagtccgagccaaccactaacatccagataagattagcggacggcggtaggttggtgcagaagttcaatcattcgcaccgaatttctgatataaggctgtttatcgtagacgcacgcccagcaatggctgctacgagcttcatccttatgacaacttttcctaataaagagcttgcagatgaatcccaaacactcaaggaggccaatctgctgaacgccgtcatcgtacagagacttacgtag

SEQ ID NO: 189596 - DNA, 1113 bp, Artificial Sequence
  derived and/or modified sequence
atggctgctgagcggcaggaggccctgcgggagtttgtggccgtgactggagctgaggaggaccgggcccgcttcttcctggagagcgctggctgggacctgcagatcgccctggccagcttctatgaagatggaggagatgaggacatcgtgaccatcagccaggccacccccagctctgtgtcccggggcacagcccccagcgacaacagagtgaccagcttccgggacctgattcatgaccaggatgaagatgaggaggaggaggagggccagcgcttctacgccggcggcagcgagaggagcggccagcagatcgtgggcccccccaggaagaagagccccaatgagctggtggatgacctcttcaagggggccaaggagcacggggctgtggccgtggagcgggtgaccaagagccctggagagaccagcaagccccggccctttgctgggggcggctaccgcctgggcgccgcccctgaggaggagagcgcctacgtggccggggagaagaggcagcacagcagccaggatgtgcacgtggtgctgaagctgtggaagagcggcttcagcctggacaatggagagctgcggagctaccaggaccccagcaatgcccagttcctggagagcatccggcggggggaggtgcctgctgagctgcggcggctggcccatggaggccaggtgaacctggacatggaggaccacagagatgaagattttgtgaagcccaagggggccttcaaggccttcaccggggagggccagaagctgggcagcacagccccccaggtgctgagcaccagcagccctgcccagcaggccgagaatgaggccaaggccagcagcagcatcctgattgatgagagcgagcccaccaccaacatccagatccggctggctgatggcggccgcctggtgcagaagttcaaccacagccaccgcatcagtgacatccgcctcttcatcgtggatgcccggcctgccatggccgccaccagcttcatcctgatgaccaccttccccaacaaggagctggctgatgagagccagaccctgaaggaggccaacctgctgaatgctgtgattgtgcagaggctgacctag

SEQ ID NO: 189597 - DNA, 1113 bp, Artificial Sequence
  derived and/or modified sequence
atggccgccgagcggcaggaggccctgcgggagttcgtggccgtgaccggggcagaggaggaccgggcccgattttttttagagtccgccggctgggatctgcagatagccctggcctccttttatgaagacggcggggacgaagacatcgtaactatttctcaggcaaccccctccagcgtgagcagaggcaccgctccgtctgacaacagggtgacatcctttagagatttgattcatgatcaggacgaggatgaggaggaagaagaagggcagcgattctatgctggtggcagcgagaggagtggacaacagattgtcggtcctcctcgaaagaagagccctaacgagttggtggacgacttattcaaaggcgcaaaggaacacggtgctgtcgcagtggagagggtgacgaagagtcctggtgaaacctctaaacctcgcccttttgccgggggaggctacaggctgggtgccgctcccgaggaggagagcgcatatgtagccggtgagaaacgtcaacattcaagccaggatgttcatgtggtgttaaagctttggaaatctggattctccttggacaatggagaattgcgctcctaccaagacccaagcaacgctcagttcctggagtcaataagaagaggtgaggttcccgcggagctacggcgtctggctcacggcggtcaggtgaatctcgatatggaggaccatagggacgaggattttgtgaaacccaaaggcgcgtttaaggcattcaccggggaaggacagaaactgggttcaactgcacctcaagttctcagtacgtccagtcccgcccagcaggccgagaatgaagcgaaggcgtcctcatccattctgatcgatgaaagcgaacccacaaccaatatccagatacgcttagctgacggtggccgacttgttcaaaagtttaatcattcacacagaattagtgacattaggctcttcatcgttgatgctcgcccagccatggctgctacttcctttatcttaatgacaaccttccccaacaaagagctagccgacgagagccagacactcaaagaggcgaacctgctgaacgccgtgatagtgcagcggctaacttag

SEQ ID NO: 189598 - DNA, 1113 bp, Artificial Sequence
  derived and/or modified sequence
atggcagctgaacgccaggaagcacttagggaatttgtggccgtgacaggcgcagaagaggaccgggcaagattcttcttggagtcagctggttgggacttacagatcgcgctcgcctcattctatgaagatggaggagatgaagacattgtcacaatctcacaagccacaccctcctctgtgagcaggggaactgccccttcagacaacagggtgacatctttcagggacctgatccacgaccaggacgaggatgaagaggaagaggaaggacaaaggttctacgccggtggaagcgagagatccggacaacagatcgtcggcccacccagaaagaaatccccaaacgagttagtggacgatctgtttaaaggtgccaaggaacacggggcagtcgcggtcgaaagagtgacgaagtctcccggtgagacctccaagcccaggccattcgccggagggggatacaggctgggagctgcaccagaggaggagtccgcgtacgtggctggagaaaagcgtcaacattcatcccaggacgtacacgtcgtgttaaagctgtggaaatcaggattctccctcgacaacggggaactgcggagctaccaagatcctagcaacgctcaattccttgaatcaatccgtcgcggagaggtcccagccgaactccgcagacttgcccacggcggacaagtgaatctagacatggaagaccatagagacgaagactttgtgaaacctaaaggggctttcaaggcgttcacgggcgagggccagaagctgggatccaccgccccacaagtattatctactagctcccctgcacagcaggcagagaacgaagccaaggcatccagctcaatcttgatcgacgagagtgaacccacaacaaacatccaaattagactcgctgacgggggacggctggtgcagaaatttaatcactcacatcgaatcagcgatatccgactctttatcgtggacgccagacctgcgatggctgccacttcattcatccttatgacaactttccccaataaggaactggctgatgaaagccaaactctgaaagaggcaaacttgttaaatgccgtgatcgttcagcggctgacctag

SEQ ID NO: 189599 - protein, 202 aa, Artificial Sequence
  derived and/or modified sequence
MAVPAALILRESPSMKKAVSLINAIDTGRFPRLLTRILQKLHLKAESSFSEEEEEKLQAAFSLEKQDLHLVLETISFILEQAVYHNVKPAALQQQLENIHLRQDKAEAFVNTWSSMGQETVEKFRQRILAPCKLETVGWQLNLQMAHSAQAKLKSPQAVLQLGVNNEDSKSLEKVLVEFSHKELFDFYNKLETIQAQLDSLT

SEQ ID NO: 189600 - DNA, 609 bp, Artificial Sequence
  derived and/or modified sequence
atggcagtgccagcggctcttattctgagagaatcaccttccatgaagaaggcagtcagcttgatcaatgccatcgacacgggtagattccctcgtcttctaacaaggatcctgcagaagttgcatctgaaggccgagtcttcattttccgaggaggaggaggagaaattacaagctgcatttagcttggagaaacaggacctccacttagttctagaaaccatttcgttcatactagaacaagctgtgtaccacaatgtaaagccagcagccctccaacaacagcttgagaatattcatctgagacaggacaaagccgaagctttcgtgaatacatggtcgagcatggggcaggaaaccgtggagaagtttaggcaacggatcctggccccatgtaaattggagacggtcggctggcaactaaatctgcagatggctcactctgcccaagcgaagcttaagtctccacaagcggtgctgcaactgggggtgaacaatgaggacagcaagagcctagagaaagtgttggtagagtttagtcacaaagagctgtttgacttttacaacaagttggagactattcaagctcagctcgactccctcacgtag

SEQ ID NO: 189601 - DNA, 609 bp, Artificial Sequence
  derived and/or modified sequence
atggctgtgcctgctgccctgatcctgcgggagagccccagcatgaagaaggctgtgtccctcatcaatgccatcgacaccggccgcttcccccggctgctgacccgcatcctgcagaagctgcacctgaaggccgagagcagcttcagcgaggaggaggaggagaagctgcaggccgccttcagcctggagaagcaggacctgcacctggtgctggagaccatctccttcatcctggagcaggccgtgtaccacaacgtgaagccagctgccctgcagcagcagctggagaacatccacctgcggcaggacaaggccgaggcctttgtgaacacctggagctccatgggccaggagaccgtggagaagttccggcagaggatcctggccccctgcaagctggagaccgtgggctggcagctgaacctgcagatggcccacagcgcccaggccaagctgaagagcccccaggccgtgctgcagctgggcgtgaacaatgaagacagcaagagcctggagaaggtgctggtggagttcagccacaaggagctgtttgacttctacaacaagctggagaccatccaggcccagctggacagcctgacctag

SEQ ID NO: 189602 - DNA, 609 bp, Artificial Sequence
  derived and/or modified sequence
atggccgtgcccgccgccctgatcctgcgggagagccccagcatgaagaaggccgtaagtctgatcaacgccattgatacaggacgcttccctcggcttctgacaagaattctccagaaactccatctgaaagcagagagctcattttccgaggaggaagaagagaaactccaggcagccttctctctggagaagcaggacttacatcttgtccttgagaccatttctttcatcttggagcaggctgtgtaccacaatgtgaaaccggcagccctccagcagcaactcgagaatattcaccttcggcaagataaggcagaagcttttgtgaacacctggagctcaatgggacaggaaacagtggaaaagtttaggcagagaatccttgccccctgcaagcttgaaacggtgggttggcagctgaatttgcagatggcccatagtgctcaggccaaactgaagtcgcctcaggcagtactccaacttggcgtgaacaatgaagactccaaatccctggagaaggttctagtcgagtttagtcataaagagctgtttgacttttataataaactcgagacaattcaggcacagctggatagtctcacatag

SEQ ID NO: 189603 - DNA, 609 bp, Artificial Sequence
  derived and/or modified sequence
atggcggtacctgctgccctaattctgagagaatctcctagcatgaagaaggccgtatcactgataaacgcaattgacactggaagatttcctcggctgctaacaagaattctgcagaagctacatttaaaagccgagagcagcttctccgaagaggaagaagaaaagcttcaggccgcattctctttagagaagcaagatctccacctggtattggaaactatctcttttattctcgaacaagctgtttatcacaacgtgaagcccgctgcccttcaacagcaattggagaatatccacctgaggcaggacaaggcagaagcctttgtgaatacttggtcttcgatgggacaggaaactgtagaaaagtttcggcaacggattctggccccatgcaagctggagacagtaggatggcaactgaatttacagatggcccacagcgcccaggctaaactcaagagccctcaagctgtgctgcagctgggtgttaacaacgaggactctaagtctcttgagaaggtcctggtcgagttctctcacaaagagctctttgatttctataacaagcttgagaccatccaggcccagctggacagtctgacctag

SEQ ID NO: 189604 - DNA, 1469 bp, Artificial Sequence
  derived and/or modified sequence
gcggccgccattggctgggttcggcgcagctaacagacggcggcagtgcgagaaagccgaagatggcggtccccgcggcgctgatcctacgggagagccccagcatgaagaaagcagtgtcactgataaatgcaatagatacaggaagatttccacggttgctcactcggattcttcaaaaacttcacctgaaggctgagagcagtttcagtgaagaagaggaagaaaaacttcaagcggcattttctctagagaaacaagatcttcacctagttcttgaaacaatatcatttattttagaacaggcagtgtatcacaatgtgaagccagcagctttgcagcagcaattagagaacattcatcttagacaagacaaagctgaagcatttgtcaatacgtggtcttctatgggtcaagaaacagttgaaaagttccggcagagaattctggctccctgtaagctagagaccgttggatggcagcttaaccttcagatggctcactctgctcaagcaaaactaaaatctcctcaagctgtgttacaactcggagtgaacaatgaagattcaaagagcctggagaaagttcttgtggaattcagtcacaaggagttgtttgatttctataacaagctagagactatacaagcacagctggattcccttacatgatgttttcgaagactgtttttttcatcacgctcctgccacctcattattttgcattgaagatacattgccaggttgtgttttctgaaggattcagtgacttgctttctgtaaattatatggcttatcacttcttagacaaataacaaccaatagagatcattgttaagaatactgaggttctaatatactttctttagttctgtgagccaacagtaattattaagaacactttccctttaaaggaaacaaaagtgaataccatattgtttttactgtcatagtgttgctttcttgcctgtcctgcttagtttttacttgctggatgataccataatgtatcaaggagcgtccatggatacaagataagatgtgtaccttagtagaatacagagctttggtaattacatgaataaaattaagaaaatagccatatacaatcaaatacactatggcatttttatttgaatatgatgagtatattttgcttcggaaataatataggaaggaaatgtaaaatagtgagtagtatggtatcagttaattccagtctgagcttctctgtcaacttcagtttctctctcagtttaatgatttaataatagtccaggtttttgtgtgtttttctttatactgcaaattaataatgattcactttatagtttgggagacagaatcaggtcttgaataaaataattgtaatgagtgctaaatgggcaccattattcgaatcagataccttttatattctctttccataaatacgttgatttctgtcaataaaatttttgtgtcttagga

SEQ ID NO: 189605 - DNA, 609 bp, Artificial Sequence
  derived and/or modified sequence
atggccgtgcccgccgccctgatcctgagagagagccccagcatgaagaaggccgtgagcctgatcaacgccatcgacaccggcagattccccagactgctgaccagaatcctgcagaagctgcacctgaaggccgagagcagcttcagcgaggaggaggaggagaagctgcaggccgccttcagcctggagaagcaggacctgcacctggtgctggagaccatcagcttcatcctggagcaggccgtgtaccacaacgtgaagcccgccgccctgcagcagcagctggagaacatccacctgagacaggacaaggccgaggccttcgtgaacacctggagcagcatgggccaggagaccgtggagaagttcagacagagaatcctggccccctgcaagctggagaccgtgggctggcagctgaacctgcagatggcccacagcgcccaggccaagctgaagagcccccaggccgtgctgcagctgggcgtgaacaacgaggacagcaagagcctggagaaggtgctggtggagttcagccacaaggagctgttcgacttctacaacaagctggagaccatccaggcccagctggacagcctgacctag

SEQ ID NO: 189606 - protein, 219 aa, Artificial Sequence
  derived and/or modified sequence
MAIFSVYVVNKAGGLIYQLDSYAPRAEAEKTFSYPLDLLLKLHDERVLVAFGQRDGIRVGHAVLAINGMDVNGRYTADGKEVLEYLGNPANYPVSIRFGRPRLTSNEKLMLASMFHSLFAIGSQLSPEQGSSGIEMLETDTFKLHCYQTLTGIKFVVLADPRQAGIDSLLRKIYEIYSDFALKNPFYSLEMPIRCELFDQNLKLALEVAEKAGTFGPGS

SEQ ID NO: 189607 - DNA, 660 bp, Artificial Sequence
  derived and/or modified sequence
atggccatcttcagcgtgtacgtggtgaacaaggccggcggcctgatctaccagctggacagctacgcccccagagccgaggccgagaagaccttcagctaccccctggacctgctgctgaagctgcacgacgagagagtgctggtggccttcggccagagagacggcatcagagtgggccacgccgtgctggccatcaacggcatggacgtgaacggcagatacaccgccgacggcaaggaggtgctggagtacctgggcaaccccgccaactaccccgtgagcatcagattcggcagacccagactgaccagcaacgagaagctgatgctggccagcatgttccacagcctgttcgccatcggcagccagctgagccccgagcagggcagcagcggcatcgagatgctggagaccgacaccttcaagctgcactgctaccagaccctgaccggcatcaagttcgtggtgctggccgaccccagacaggccggcatcgacagcctgctgagaaagatctacgagatctacagcgacttcgccctgaagaaccccttctacagcctggagatgcccatcagatgcgagctgttcgaccagaacctgaagctggccctggaggtggccgagaaggccggcaccttcggccccggcagctag

SEQ ID NO: 189608 - DNA, 660 bp, Artificial Sequence
  derived and/or modified sequence
atggcgatttttagcgtctatgttgtcaacaaggctggaggtttgatttaccagctcgattcatacgcccctcgggccgaggctgagaagaccttcagttatccgttggatctgctcctgaagttgcacgacgaaagggttcttgtagccttcgggcagcgagatggtattagggtgggacatgctgtcttggccattaatgggatggatgtgaatggcaggtacaccgccgacggcaaagaggtgctagagtacttgggaaatcccgcgaactaccccgtgagtattcgattcggcagaccgcgcttgacctctaacgaaaagctgatgctcgcgagtatgttccactctctttttgcgatcggctcacaattatcccctgaacagggatcgtcgggtattgagatgttggagactgatacattcaagctgcattgttatcagactcttactgggattaagtttgttgtgttggccgacccacgccaagccgggatcgattccttgcttagaaaaatctacgaaatctattctgattttgcactcaaaaaccctttctattcactcgagatgccaattcggtgcgagctgtttgaccagaacctgaagctcgccctggaggtcgccgagaaggccggcacctttgggccaggatcttag

SEQ ID NO: 189609 - DNA, 660 bp, Artificial Sequence
  derived and/or modified sequence
atggccatcttctctgtgtatgtggtgaacaaggccggcggcctcatctaccagctggacagctatgcccccagggctgaggccgagaagaccttctcctaccccctggacctgctgctgaagctgcatgatgagcgggtgctggtggccttcggccagagagatggcatccgggtgggccatgctgtgctggccatcaatggcatggatgtgaatggccgctacacagcagatggcaaggaggtgctggagtacctgggcaacccagccaactaccctgtgtccatccgcttcggccggccccggctgaccagcaatgagaagctgatgctggcctccatgttccacagcctgtttgccatcggcagccagctgagccctgagcagggcagcagcggcatcgagatgctggagacagacaccttcaagctgcactgctaccagaccctgaccggcatcaagtttgtggtgctggccgacccccggcaggccggcatcgacagcctgctgaggaagatctatgagatctacagcgactttgccctgaagaaccccttctacagcctggagatgcccatccgctgtgagctgtttgaccagaacctgaagctggccctggaggtggccgagaaggccggcacctttggacctggcagctag

SEQ ID NO: 189610 - DNA, 660 bp, Artificial Sequence
  derived and/or modified sequence
atggccatcttcagcgtgtacgtggtgaacaaggccggcggcctgatctatcagttggattcttatgcccctcgtgccgaggccgagaagaccttcagctatccccttgacctgttactcaagcttcacgatgagcgggtgctcgtcgccttcgggcagagggacggcattcgagttggtcatgccgtgctagcgattaatggtatggacgtgaacggccgctataccgccgatggcaaagaagtgctcgaatacctagggaacccagctaactatccagttagcatacgctttggccggccgagacttactagcaatgagaagctgatgttggcctcaatgttccactcgctcttcgccatcgggtctcagctgtctcctgagcagggtagtagtggaatcgaaatgctggaaactgacaccttcaaactgcactgctaccagacattgaccggcatcaagttcgtggttctagccgatcctagacaagccggcatcgactcactgctccgcaaaatttatgaaatttattccgattttgccctgaagaatcctttttactcactggaaatgcccattcgctgcgaattgttcgaccagaatctgaagctcgccctggaagtcgcagagaaagccggcaccttcggccctggaagctag

SEQ ID NO: 189611 - DNA, 660 bp, Artificial Sequence
  derived and/or modified sequence
atggccatatttagcgtgtacgtggtgaataaagccggtggcctcatttatcagctggatagttacgcccctcgggcagaggccgagaaaaccttctcttatcctctcgacctcctgctgaagctgcacgacgaaagagtattggttgccttcgggcaacgcgatgggattcgagtggggcacgcggtgcttgccatcaatgggatggacgtcaatggcagatacacagcagatgggaaagaagtgctggagtacttaggtaaccctgccaattacccggtgagcattaggttcgggaggcctcggctcacatccaatgagaagctgatgctcgcttctatgttccacagtctcttcgcaatcggcagtcagctcagccctgagcagggctcgagcggcatcgaaatgctcgagaccgacacttttaaactgcactgttaccagactctcacgggaatcaaatttgtggtcctcgccgatccacgccaggctgggatagatagtctcctcagaaagatttacgagatctactctgactttgccctgaaaaaccctttctattctctggagatgcctatacgctgcgagctcttcgatcagaacctgaagctggcactggaggttgcagagaaggccggtacatttgggccagggagttag

SEQ ID NO: 189612 - DNA, 1759 bp, Artificial Sequence
  derived and/or modified sequence
cggcgaagcgctcgccctctagcctgaggcggaagacaggaagtggattctagttcccaagccgcaccgcctaaatactgccggagtctgcgctagttgtgacgcatactatagcgctgttttcctgcactgataaacgaaaagcaatccaccaggtctcggcagctaactttccggcactacttatgcccgagcgtgtcgctcccagtgcgcaagtgcagcaggtggctgcacggggggcgcgggaggaggaggaggaggaggaggaggctggggtggggccggcggcaagtgctgtgatgcggttccggggaggggccgtcgggtagaggctgaataccagtttccgagcggcaaggcagcgatggcgatttttagtgtgtatgtggtgaacaaagctggcggcttgatttaccagttggacagctacgcgccacgggctgaggctgagaaaactttcagttatccgctggatctgctgctcaagctacacgatgagcgtgtgttggttgctttcggccagcgggacggcatccgagtgggtcatgcagtgctggccatcaatggcatggacgtgaatggcaggtacacggccgacgggaaagaggtgctggagtatctgggtaaccctgctaattacccggtgtccattcgatttggccggccccgcctcacttctaatgagaagcttatgctggcctccatgttccactcgctctttgccatcggctcccagctgtctcctgaacagggaagctcaggcattgagatgctggagacagacacattcaaattgcactgctaccagacactgacagggatcaagtttgtggttctagcagatcctaggcaagctggaatagattctcttctccgaaagatttatgagatttactcagactttgccctcaagaatccattctattccttagaaatgcctatcaggtgtgagctctttgaccagaacctgaagctagctctggaggtggcagagaaggctggaacttttggacctgggtcataggctgaacctgttatggacccccaaattctgagagttcctgcaacaagaatactgctgttgacactccagtggaaatcccagcagccttgttagtgcacttgaaagtgggagaatgctgaccctgatgacttgtactgattcctgagccttaacactgtgctctttccttctgtatataccatggtcttactttccaactctgtacagatttatttatggaggagctaggtccataaatgttgtaataaatattcctttgatcttggtgtttgcaatctgtcttaatcgatggttttgggggaaagatacaggaagtgagtcaaaaatggttagggaattctgggaagatgattatgtgctagtaaaaaacataacaaatatgtgttcattaaataaatgaacataagattttgaagcatgagcattggatctagtcccagaattgctgctgatttcctggggtcctggggtggtggcagcagtggtggtggctgttatgatgatgatgatgatggaacatatttcaagcacttacagccaggcattcctgctttatctcacttgatcttcaccctaactccagggggtacattctgttacagataagagatttagcagactttctgcctcaaagtttccaagctagttactgacagtctgggtttgaaccaggctttctggctacacactcagtaaaccactgttacacttcttccctccatcaagttatttaat

SEQ ID NO: 189613 - protein, 386 aa, Artificial Sequence
  derived and/or modified sequence
MSALEKSMHLGRLPSRPPLPGSGGSQSGAKMRMGPGRKRDFSPVPWSQYFESMEDVEVENETGKDTFRVYKSGSEGPVLLLLHGGGHSALSWAVFTAAIISRVQCRIVALDLRSHGETKVKNPEDLSAETMAKDVGNVVEAMYGDLPPPIMLIGHSMGGAIAVHTASSNLVPSLLGLCMIDVVEGTAMDALNSMQNFLRGRPKTFKSLENAIEWSVKSGQIRNLESARVSMVGQVKQCEGITSPEGSKSIVEGIIEEEEEDEEGSESISKRKKEDDMETKKDHPYTWRIELAKTEKYWDGWFRGLSNLFLSCPIPKLLLLAGVDRLDKDLTIGQMQGKFQMQVLPQCGHAVHEDAPDKVAEAVATFLIRHRFAEPIGGFQCVFPGC

SEQ ID NO: 189614 - protein, 199 aa, Artificial Sequence
  derived and/or modified sequence
MDALNSMQNFLRGRPKTFKSLENAIEWSVKSGQIRNLESARVSMVGQVKQCEGITSPEGSKSIVEGIIEEEEEDEEGSESISKRKKEDDMETKKDHPYTWRIELAKTEKYWDGWFRGLSNLFLSCPIPKLLLLAGVDRLDKDLTIGQMQGKFQMQVLPQCGHAVHEDAPDKVAEAVATFLIRHRFAEPIGGFQCVFPGC

SEQ ID NO: 189615 - DNA, 1161 bp, Artificial Sequence
  derived and/or modified sequence
atgagcgccctggagaagtccatgcacttgggccgcctaccatccaggccaccattaccgggatctggcgggagtcagagcggtgccaagatgcgaatggggccagggcggaaacgcgacttcagccctgtgccttggagtcagtactttgaaagcatggaagacgtggaggtggagaacgagaccgggaaagataccttcagagtttacaagtccgggtctgaagggcctgtacttcttctgctgcacggagggggccactcagctctgtcttgggcagtctttacagctgctatcatctctcgggtccagtgccgcatcgtcgccctagacctgaggagccacggggagaccaaggtgaaaaaccctgaagatctgtcagccgagacaatggcgaaagatgtcgggaatgtggtggaagcgatgtacggtgacctgccccccccaatcatgctcatcggccattccatgggcggcgctattgctgtacacactgcctccagcaatctcgtgccctctttgctagggctgtgcatgatagatgtggtagaaggtaccgcgatggacgccttaaattcaatgcagaatttcctccggggacggcccaagacctttaagtcattggaaaatgccattgagtggtctgttaaatcaggccagattcggaacctggagagtgcaagggttagcatggtgggtcaggtaaagcagtgtgagggaataacatctcccgagggatccaagagcatagtcgagggtataatcgaagaggaggaagaagacgaagaaggaagtgagtcaatcagcaaaagaaaaaaggaggatgatatggagacaaaaaaggatcacccgtatacttggagaatcgaactagctaagaccgagaaatactgggacgggtggtttagaggtctgtctaacttattcttgtcgtgtcctataccgaagctgcttctcctggctggagtggaccgcttggacaaggaccttaccattggacagatgcaggggaagttccagatgcaggtgttacctcagtgcgggcatgcggtgcatgaggatgctcccgataaggtcgccgaggcagtggccacatttctcattagacaccgctttgcagaaccgattggtggcttccagtgtgtttttcccggctgctag

SEQ ID NO: 189616 - DNA, 600 bp, Artificial Sequence
  derived and/or modified sequence
atggatgctcttaattctatgcagaattttctgcgcggcagaccaaagacgtttaagtctctagaaaacgccatcgagtggagtgttaagtccgggcagatccgtaacctcgagtcagcaagggtttcaatggtggggcaggtaaaacaatgtgagggtattacttcacctgaagggagcaaatctatcgtggagggaatcattgaagaagaagaagaagatgaggaggggtccgagtctatttccaaacgcaagaaagaggacgacatggaaaccaagaaagaccatccatacacctggcgaattgaattggcaaagaccgaaaagtactgggatggatggttccggggcctgagcaacctatttctgagctgtccaatccccaaactactgctcctggccggcgtcgacagattggacaaggaccttacaattggtcaaatgcagggcaagttccagatgcaagtgctgcctcagtgcggacacgccgtgcatgaggatgcaccagacaaggtggccgaagccgtagccacctttctgattaggcacagattcgccgaacccatcggcggcttccagtgtgtttttcctggctgctag

SEQ ID NO: 189617 - DNA, 1161 bp, Artificial Sequence
  derived and/or modified sequence
atgtctgccctggagaagtccatgcacctgggccgcctgcccagcaggcctcccctgcccggcagcggcggcagccagagcggggccaagatgaggatgggccctggcaggaagagggacttcagccctgtgccctggagccagtactttgagagcatggaggatgtggaggtggagaatgagaccgggaaggacaccttccgggtgtacaagagcggcagcgagggccctgtgctgctgctgctgcatggaggcggccacagcgccctgtcctgggccgtgttcaccgctgccatcatcagccgggtgcagtgcagaattgtggccctggacctgcggagccatggagagaccaaggtgaagaaccctgaggacctgtctgctgagaccatggccaaggatgtgggcaatgtggtggaggccatgtatggagacctgcccccacccatcatgctgattggccacagcatgggcggggccatcgctgtgcacacagccagcagcaacctggtgcccagcctgctgggcctgtgcatgattgatgtggtggagggcacagccatggatgccctgaacagcatgcagaacttcctgcggggccggcccaagaccttcaagagcctggagaatgccatcgagtggagcgtgaagagcggccagatccggaacctggagagcgcccgggtgtccatggtgggccaggtgaagcagtgtgagggcatcaccagccctgagggcagcaagagcatcgtggagggcatcatcgaggaggaggaggaggatgaggagggcagcgagagcatcagcaagaggaagaaggaggatgacatggagaccaagaaggaccacccctacacctggagaattgagctggccaagacagagaagtactgggatggctggttccggggcctgagcaacctcttcctgagctgccccatccccaagctgctgctgctggccggcgtggaccggctggacaaggacctgaccatcggccagatgcagggcaagttccagatgcaggtgctgccccagtgtggccatgctgtgcatgaagatgccccagacaaggtggccgaggccgtggccaccttcctgatccgccacagatttgctgagcccatcggcggcttccagtgtgtgtttcctggctgctag

SEQ ID NO: 189618 - DNA, 600 bp, Artificial Sequence
  derived and/or modified sequence
atggatgccctgaacagcatgcagaacttcctgcggggccggcccaagaccttcaagagcctggagaatgccatcgagtggagcgtgaagagcggccagatccggaacctggagagcgcccgggtgtccatggtgggccaggtgaagcagtgtgagggcatcaccagccctgagggcagcaagagcatcgtggagggcatcatcgaggaggaggaggaggatgaggagggcagcgagagcatcagcaagaggaagaaggaggatgacatggagaccaagaaggaccacccctacacctggagaattgagctggccaagacagagaagtactgggatggctggttccggggcctgagcaacctcttcctgagctgccccatccccaagctgctgctgctggccggcgtggaccggctggacaaggacctgaccatcggccagatgcagggcaagttccagatgcaggtgctgccccagtgtggccatgctgtgcatgaagatgccccagacaaggtggccgaggccgtggccaccttcctgatccgccacagatttgctgagcccatcggcggcttccagtgtgtgtttcctggctgctag

SEQ ID NO: 189619 - DNA, 1161 bp, Artificial Sequence
  derived and/or modified sequence
atgagcgccctggagaagagcatgcacctgggccggctgcccagcaggccacctctgccagggagtggcggatctcagagcggcgcgaaaatgcgaatgggccctggacgcaagagagatttcagcccggtgccatggagccagtactttgaatccatggaggacgtagaagtggagaatgaaactggaaaggatacttttagggtttacaagtctggatcggaaggccccgtgctgttactccttcacggcggtggacacagcgcactgtcatgggccgtgtttaccgccgctatcatctcccgggtccaatgtcgaatcgtggccctggatctccgaagccacggcgaaacaaaagttaagaacccagaggacctgtcagccgagacaatggccaaagacgtagggaatgtggtagaggctatgtatggagatttgcccccgcccataatgctaatcgggcatagcatggggggcgccatagcagttcacacagccagcagcaacctggtaccctcccttctcggcctttgcatgattgacgtcgtagaagggacagccatggatgcactgaattccatgcagaacttcctgcggggccggcccaaaacctttaaaagtcttgagaatgcaatcgaatggagtgtgaagtccggtcagatccgcaacctggagtctgctcgcgtgtcaatggtgggccaggtgaagcaatgtgaaggtataaccagcccagaggggagtaagtccatcgttgaaggaatcattgaagaggaagaggaagatgaggaggggagtgagtctatcagtaagcgcaagaaggaggatgacatggagactaagaaagaccatccctatacctggcgcattgaattagccaaaactgagaaatattgggacggttggtttcgtggattaagtaacctgttcttgagctgccctataccgaagttgctccttctggctggcgtggacaggctggataaggatctgaccatcgggcagatgcaaggcaagttccagatgcaggtactgccccagtgcggccatgcagtgcacgaagatgctccggacaaggtggcggaggccgtggctacttttctcatccgacatagatttgccgagcccatcggcggcttccagtgcgtttttccaggatgttag

SEQ ID NO: 189620 - DNA, 600 bp, Artificial Sequence
  derived and/or modified sequence
atggacgccctgaacagcatgcagaacttcctgcggggccggcccaaaacatttaagagcctggaaaacgcaatagagtggagtgtgaaaagcggacagattcgaaatctcgaaagtgcccgagtgtcgatggttggccaagtgaaacaatgtgagggcatcacatctccagaggggtctaaatccatcgtggaaggcattatcgaagaagaggaggaagacgaagaggggtcggagtccataagcaagagaaaaaaggaagacgacatggagactaagaaagaccatccttacacgtggcggatcgagctggcgaaaacagagaaatactgggacggatggttccggggtcttagcaatctgttcttgagttgcccaattccaaaacttttgctgctggcgggagtggataggctggacaaggatctgaccataggacagatgcagggcaaatttcaaatgcaagtgctgccacagtgcgggcatgccgttcatgaggatgcccccgacaaggtagccgaagctgtggctacctttcttataaggcaccgctttgccgagccaattggcggcttccagtgcgtctttcctggatgctag

SEQ ID NO: 189621 - DNA, 1161 bp, Artificial Sequence
  derived and/or modified sequence
atgagcgccttggagaaatccatgcacctcggaaggctgcctagtcggccacctttacctggatctggaggatctcagagcggagccaagatgcgtatggggcctggcaggaaacgtgactttagccctgtcccatggtcgcagtatttcgagtccatggaggatgtcgaggtggagaacgaaacaggcaaagacacatttagggtgtataaaagcggctctgagggcccagttcttttgctgcttcacgggggaggccactccgcactgtcctgggcggtgttcacagcggcaatcattagccgtgtgcagtgcaggatagtcgcattagacctccgctcccatggggagacaaaggtcaaaaatccagaggacctgtccgccgaaacaatggcgaaggatgtggggaatgtggtggaagccatgtatggggacctcccaccaccaataatgcttattggacactccatggggggagcgatcgccgtgcatactgcctcatccaatcttgtgcccagcctgctgggcctgtgtatgattgatgtggtagagggcacagcaatggacgccctgaactcaatgcaaaatttcttgaggggcaggccaaaaactttcaaatccttggagaatgccattgagtggtccgtgaaaagcggacaaattcgcaacctggaatccgcgagggtgtcaatggtcggccaggtcaaacagtgcgaagggattacatcccctgagggcagcaagagtattgttgagggcatcattgaagaggaggaggaggacgaagaaggatctgagagcattagtaagaggaaaaaagaagacgatatggagacaaaaaaggaccacccctacacatggagaattgagctggcaaagactgagaaatattgggatggatggttccgtggcctgtcaaatctgttcctttcgtgccctatcccaaagttgctcttactcgccggagtggaccgccttgataaggatctaaccatcggacagatgcagggcaaattccagatgcaagttttaccccaatgtggccacgccgtgcacgaggacgcaccagacaaagtcgctgaggccgtcgctaccttcctcattcggcatcggttcgccgagcctataggcggattccaatgtgtgttcccaggctgctag

SEQ ID NO: 189622 - DNA, 600 bp, Artificial Sequence
  derived and/or modified sequence
atggatgctctgaacagcatgcagaacttccttagagggcgacctaagaccttcaaaagccttgagaatgccatagagtggtcagtgaaatcggggcagatcaggaacctggagagtgcacgggtgtcaatggtgggacaggtgaaacagtgcgagggaatcacgagtcctgaagggagcaagtcaatcgtggagggaattatcgaagaggaggaggaagacgaggaaggcagtgaatcaatcagtaaaagaaagaaagaggacgacatggaaactaagaaggatcacccctatacatggagaatcgaactcgcaaaaacggagaagtattgggacggctggttccggggattgtctaatctctttctcagttgtcccattcctaaactcttgctgctggcgggtgtggacagactggataaagatctgacgattggacagatgcagggcaagttccagatgcaagtgctccctcagtgcggacacgccgtccatgaggatgcaccagacaaagtggccgaggcagtggcaaccttccttattcgacatagatttgccgaacctatcggcggattccagtgcgtttttcctggatgctag

SEQ ID NO: 189623 - DNA, 2677 bp, Artificial Sequence
  derived and/or modified sequence
attgcgcagggtgcattgccctgaagagcgctcctccttccggtgaaagtcgtcgggttcccagccgggagtctgcggagttctcatactctgttacccagcttcctttgtatgagtgctgttgcgcacttccggtggaagcgctgaagcgagtgggtggagtttacggagccggtgggcggtaggcggtgctacgggtagctgggtgctgtccaaaggcgacagggcgtcgttaggggagcgagtcgtgaccggttgggccacactcaacgtgggacgaagcttcgcctactgtttgactacgtgcgtgcagcctcccctcgatgtcggccctcgaaaagagcatgcacctcggccgccttccctctcgcccacctctacccggcagcgggggcagtcagagcggagccaagatgcgaatgggccctggaagaaagcgggacttttcccctgttccttggagtcagtattttgagtccatggaagatgtagaagtagagaatgaaactggcaaggatacttttcgagtctacaagagtggttcagagggtccagtcctgctccttctgcatggaggaggtcattctgccctttcttgggctgtgttcacggcagcgattattagtagagttcagtgtaggattgtagctttggatctgcgaagtcatggtgaaacaaaggtcaagaatcctgaagatctgtctgcagaaacaatggcaaaagacgttggcaatgtggttgaagccatgtatggggaccttcctcctccaattatgctgattggacatagcatgggtggtgctattgcagtccacacagcatcatccaacctggtaccaagcctcttgggtctgtgcatgattgatgttgtagaaggtacagctatggatgcacttaatagcatgcagaatttcttacggggtcgtcctaaaaccttcaagtctctggagaatgctattgaatggagtgtgaagagtggccagattcgaaatctggagtctgcccgtgtctcaatggttggccaagtcaaacagtgtgaaggaattacaagtccagaaggctcaaaatctatagtggaaggaatcatagaggaagaagaagaagatgaggaaggaagtgagtctataagcaagaggaaaaaggaagatgacatggagaccaagaaagaccatccatacacctggagaattgaactggcaaaaacagaaaaatactgggacggctggttccgaggcttatccaatctctttcttagttgtcccattcctaaattgctgctcttggctggtgttgatagattggataaagatctgaccattggccagatgcaagggaagttccagatgcaggtcctaccccagtgtggccatgcagtccatgaggatgcccctgacaaggtagctgaagctgttgccactttcctgatccggcacaggtttgcagaacccatcggtggattccagtgtgtgtttcctggctgttagtgacctgctgtccacccctcctcaacatcgagctctgttgtaaatacgtcgcaccagaggccactgtgatgccactgtctcctctccatcccgcccagccatgtgacactggctcccggtagacgggcaccccgagatgtaccaaccttttcatgtattctgccaaaagcattgttttccagggcccttgaccaacatcggcttccccagtccagggctcccctgctcctttcccttccctgtactggggtagctcctgcctgctctccctgcgttgcctagggtaaagcctccagatttgccatactgagcccctcttcctagcatcaggcgatacatctgagttcaaatgtcttcccaggctcagggacctccattccttgagattgtcttggcatggcccagccctgcctcatgggatggacaatgcatggggtggtctttatttttccctttcaaataaaacactagtcaggtaccgttttatcccagtcgtactcttccaggtttggaagacccagagaggccaagatcccatccttagccatagcgagcggtggtggtggatagcatcacaagaaacgagcctgaaaatcaggtccagccggtccaagcacatggcctcccatctgggagagcccactgtcccactcccacatgtctgggcacctgccctgggctgaggccaggctgctccaggggcctcctgcgccctcacctgccacagagcaacccaggttaaatacagcccatgcacaaagccacaggccaaagcctatggaattgtttttaatcatcaaatttaaccattttcataactggttcctggaggtgtgcagtgcccccttgcctcttcaaacctacagcttctctttgccatttgtggatttcacatcactccacacagaaacattacagcctggcatccccagtctttgccttcttccagctgcctcgacacagcactgtggcctgtccctattgcccaggcacgccatttccaagggcaggaaggggcagtgtcctgaagcccatcttttctgtgactgtcttaggtgatgtgtagccccctccacctttccactcaacaacctcccacccctgtcctgctgcatggtccggagtctgggacctactttgttttttgttatttatgaccttgtttaaagaaaataaatatctcccaaccttta

SEQ ID NO: 189624 - DNA, 1928 bp, Artificial Sequence
  derived and/or modified sequence
ctttatttctctgcgagcatcactaaattctgctgtcatcaagagcagatatatagtagttgactcagtaagtgtaaatgctcagaataagttaaatatgtggttacagtttttgtttaacatccaggtacagctatggatgcacttaatagcatgcagaatttcttacggggtcgtcctaaaaccttcaagtctctggagaatgctattgaatggagtgtgaagagtggccagattcgaaatctggagtctgcccgtgtctcaatggttggccaagtcaaacagtgtgaaggaattacaagtccagaaggctcaaaatctatagtggaaggaatcatagaggaagaagaagaagatgaggaaggaagtgagtctataagcaagaggaaaaaggaagatgacatggagaccaagaaagaccatccatacacctggagaattgaactggcaaaaacagaaaaatactgggacggctggttccgaggcttatccaatctctttcttagttgtcccattcctaaattgctgctcttggctggtgttgatagattggataaagatctgaccattggccagatgcaagggaagttccagatgcaggtcctaccccagtgtggccatgcagtccatgaggatgcccctgacaaggtagctgaagctgttgccactttcctgatccggcacaggtttgcagaacccatcggtggattccagtgtgtgtttcctggctgttagtgacctgctgtccacccctcctcaacatcgagctctgttgtaaatacgtcgcaccagaggccactgtgatgccactgtctcctctccatcccgcccagccatgtgacactggctcccggtagacgggcaccccgagatgtaccaaccttttcatgtattctgccaaaagcattgttttccagggcccttgaccaacatcggcttccccagtccagggctcccctgctcctttcccttccctgtactggggtagctcctgcctgctctccctgcgttgcctagggtaaagcctccagatttgccatactgagcccctcttcctagcatcaggcgatacatctgagttcaaatgtcttcccaggctcagggacctccattccttgagattgtcttggcatggcccagccctgcctcatgggatggacaatgcatggggtggtctttatttttccctttcaaataaaacactagtcaggtaccgttttatcccagtcgtactcttccaggtttggaagacccagagaggccaagatcccatccttagccatagcgagcggtggtggtggatagcatcacaagaaacgagcctgaaaatcaggtccagccggtccaagcacatggcctcccatctgggagagcccactgtcccactcccacatgtctgggcacctgccctgggctgaggccaggctgctccaggggcctcctgcgccctcacctgccacagagcaacccaggttaaatacagcccatgcacaaagccacaggccaaagcctatggaattgtttttaatcatcaaatttaaccattttcataactggttcctggaggtgtgcagtgcccccttgcctcttcaaacctacagcttctctttgccatttgtggatttcacatcactccacacagaaacattacagcctggcatccccagtctttgccttcttccagctgcctcgacacagcactgtggcctgtccctattgcccaggcacgccatttccaagggcaggaaggggcagtgtcctgaagcccatcttttctgtgactgtcttaggtgatgtgtagccccctccacctttccactcaacaacctcccacccctgtcctgctgcatggtccggagtctgggacctactttgttttttgttatttatgaccttgtttaaagaaaataaatatctcccaaccttta

SEQ ID NO: 189625 - DNA, 1161 bp, Artificial Sequence
  derived and/or modified sequence
atgagcgccctggagaagagcatgcacctgggcagactgcccagcagaccccccctgcccggcagcggcggcagccagagcggcgccaagatgagaatgggccccggcagaaagagagacttcagccccgtgccctggagccagtacttcgagagcatggaggacgtggaggtggagaacgagaccggcaaggacaccttcagagtgtacaagagcggcagcgagggccccgtgctgctgctgctgcacggcggcggccacagcgccctgagctgggccgtgttcaccgccgccatcatcagcagagtgcagtgcagaatcgtggccctggacctgagaagccacggcgagaccaaggtgaagaaccccgaggacctgagcgccgagaccatggccaaggacgtgggcaacgtggtggaggccatgtacggcgacctgcccccccccatcatgctgatcggccacagcatgggcggcgccatcgccgtgcacaccgccagcagcaacctggtgcccagcctgctgggcctgtgcatgatcgacgtggtggagggcaccgccatggacgccctgaacagcatgcagaacttcctgagaggcagacccaagaccttcaagagcctggagaacgccatcgagtggagcgtgaagagcggccagatcagaaacctggagagcgccagagtgagcatggtgggccaggtgaagcagtgcgagggcatcaccagccccgagggcagcaagagcatcgtggagggcatcatcgaggaggaggaggaggacgaggagggcagcgagagcatcagcaagagaaagaaggaggacgacatggagaccaagaaggaccacccctacacctggagaatcgagctggccaagaccgagaagtactgggacggctggttcagaggcctgagcaacctgttcctgagctgccccatccccaagctgctgctgctggccggcgtggacagactggacaaggacctgaccatcggccagatgcagggcaagttccagatgcaggtgctgccccagtgcggccacgccgtgcacgaggacgcccccgacaaggtggccgaggccgtggccaccttcctgatcagacacagattcgccgagcccatcggcggcttccagtgcgtgttccccggctgctag

SEQ ID NO: 189626 - DNA, 600 bp, Artificial Sequence
  derived and/or modified sequence
atggacgccctgaacagcatgcagaacttcctgagaggcagacccaagaccttcaagagcctggagaacgccatcgagtggagcgtgaagagcggccagatcagaaacctggagagcgccagagtgagcatggtgggccaggtgaagcagtgcgagggcatcaccagccccgagggcagcaagagcatcgtggagggcatcatcgaggaggaggaggaggacgaggagggcagcgagagcatcagcaagagaaagaaggaggacgacatggagaccaagaaggaccacccctacacctggagaatcgagctggccaagaccgagaagtactgggacggctggttcagaggcctgagcaacctgttcctgagctgccccatccccaagctgctgctgctggccggcgtggacagactggacaaggacctgaccatcggccagatgcagggcaagttccagatgcaggtgctgccccagtgcggccacgccgtgcacgaggacgcccccgacaaggtggccgaggccgtggccaccttcctgatcagacacagattcgccgagcccatcggcggcttccagtgcgtgttccccggctgctag

SEQ ID NO: 189627 - protein, 587 aa, Artificial Sequence
  derived and/or modified sequence
MTRFSYAEYFSLFHSCSAPSRSTAPPESSPARAPMGLFQGVMQKYSSSLFKTSQLAPADPLIKAIKDGDEEALKTMIKEGKNLAEPNKEGWLPLHEAAYYGQVGCLKVLQRAYPGTIDQRTLQEETAVYLATCRGHLDCLLSLLQAGAEPDISNKSRETPLYKACERKNAEAVKILVQHNADTNHRCNRGWTALHESVSRNDLEVMQILVSGGAKVESKNAYGITPLFVAAQSGQLEALRFLAKYGADINTQASDNASALYEACKNEHEEVVEFLLSQGADANKTNKDGLLPLHIASKKGNYRIVQMLLPVTSRTRIRRSGVSPLHLAAERNHDEVLEALLSARFDVNTPLAPERARLYEDRRSSALYFAVVNNNVYATELLLQHGADPNRDVISPLLVAIRHGCLRTMQLLLDHGANIDAYIATHPTAFPATIMFAMKCLSLLKFLMDLGCDGEPCFSCLYGNGPHPPAPQPSSRFNDAPAADKEPSVVQFCEFVSAPEVSRWAGPIIDVLLDYVGNVQLCSRLKEHIDSFEDWAVIKEKAEPPRPLAHLCRLRVRKAIGKYRIKLLDTLPLPGRLIRYLKYENTQ

SEQ ID NO: 189628 - DNA, 1764 bp, Artificial Sequence
  derived and/or modified sequence
atgacacggttctcctacgccgaatacttctctctgtttcatagttgcagcgccccatcccgctctaccgcccccccggagtcgtctcccgctcgcgcacctatgggattattccagggggtgatgcagaagtacagctcttccttgttcaagacctctcaacttgctcctgccgacccactcataaaggccatcaaagacggcgacgaagaggcactaaaaaccatgatcaaagaagggaaaaacctggctgagcccaacaaggagggatggctgccgctgcacgaggccgcatactatggtcaggtgggatgtctcaaagttctccagagggcttacccgggcacgatagatcagagaactctgcaagaggagacagctgtctaccttgccacttgcagaggccatctggactgtctgctgtctctactgcaggcaggtgctgagcctgatatctcaaataaaagcagggagacccctctgtataaagcatgcgagaggaaaaatgcggaggctgttaagatcttagtccagcataacgccgatacaaaccaccggtgtaaccgcggttggacagccctgcacgaatctgtgtcacggaacgacttagaagtgatgcagatcctggtctccggcggggccaaagtggaatcaaagaacgcatatggtatcactccgctcttcgtggccgcccagagcggccagttggaggctctgcggtttctcgccaagtacggggccgacattaatacccaagcctcagacaatgcaagcgctctttatgaggcatgcaagaatgagcacgaagaagttgtggaatttcttttgtcccagggagccgatgccaacaaaaccaataaggatgggctgctaccgcttcacatagcatctaaaaaaggcaactaccgaattgtgcagatgcttctgcccgtcacaagccggaccaggatcagacggtcaggggtgtcccctctgcatctggctgccgagaggaaccatgacgaagtcttggaagccctgttaagcgctcgctttgacgtgaacactccgttggctcctgagcgagctcgtctttacgaggaccgccgttcgtccgctttgtattttgccgtcgtgaacaacaatgtgtacgctaccgaactcttgctgcaacacggcgccgaccctaaccgcgatgtaatttcccccctcctggtagcgattaggcacggctgccttagaactatgcaactccttctcgaccacggcgctaacatcgatgcttacattgccactcatcccacggcttttccggccactattatgtttgccatgaagtgtttatccttgctgaagtttctaatggaccttggctgcgacggcgagccatgcttttcttgtttatacggaaacggaccccacccccctgcacctcagccaagcagtcgcttcaacgatgcgccagccgccgataaggagccatccgtggtgcagttttgtgaatttgtaagtgctcctgaagtgtcacggtgggctggccctataattgatgtgctgctggattacgttggcaatgtgcagctctgttcccgactaaaggaacacatagactcattcgaagactgggccgtgattaaggagaaagctgagcccccaagaccactggcccatctgtgcaggttgcgcgtacgtaaggccatcggcaagtaccgcatcaagcttctggataccttgcctttgccagggcgcctgatacgatatttgaagtacgagaatacccagtag

SEQ ID NO: 189629 - DNA, 1764 bp, Artificial Sequence
  derived and/or modified sequence
atgacccgcttctcctatgcagagtacttcagcctcttccacagctgcagcgcccccagccgcagcacagcccctcctgagagcagccctgcccgggcccccatgggcctcttccagggcgtgatgcagaagtacagcagcagcctcttcaagaccagccagctggccccagctgaccccctcatcaaggccatcaaggatggagatgaggaggccctgaagaccatgatcaaggagggcaagaacctggccgagcccaacaaggagggctggctgcccctgcatgaagctgcctactacggccaggtgggctgcctgaaggtgctgcagagggcctacccaggcaccatcgaccagaggaccctgcaggaggagacagctgtgtacctggccacctgccggggccacctggactgcctgctgagcctgctgcaggccggggctgagccagacatcagcaacaagagccgggagacccccctgtacaaggcctgtgagaggaagaatgctgaggccgtgaagatcctggtgcagcacaatgctgacaccaaccaccgctgcaacagaggctggacagccctgcatgaatctgtgtccagaaatgacctggaggtgatgcagatcctggtgtctggaggagccaaggtggagagcaagaatgcctacggcatcacccccctgtttgtggccgcccagagcggccagctggaggccctgcgcttcctggccaagtatggagctgacatcaacacccaggccagtgacaatgccagcgccctgtatgaggcctgcaagaatgagcacgaggaggtggtggagttcctgctgagccagggcgcagatgccaacaagaccaacaaggatggcctgctgcccctgcacatcgccagcaagaagggcaactaccgcatcgtgcagatgctgctgcctgtgaccagcaggacccgcatccgccgcagcggcgtgagccccctgcacctggccgctgagagaaatcatgatgaggtgctggaggccctgctgagcgccaggtttgatgtgaacacccccctggcccctgagcgggcccggctgtatgaggaccggcgcagcagcgccctgtactttgctgtggtgaacaacaacgtgtatgccacagagctgctgctgcagcacggggctgaccccaacagagatgtgatcagccccctgctggtggccatcagacatggctgcctgcggaccatgcagctgctgctggaccatggagccaacattgatgcctacatcgccacccaccccacagccttccctgccaccatcatgtttgccatgaagtgcctgagcctgctgaagttcctgatggacctgggctgtgatggagagccctgcttcagctgcctgtatggaaatggcccccaccccccagccccccagcccagcagccgcttcaatgatgccccagctgctgacaaggagcccagcgtggtgcagttctgtgaatttgtgtctgcccctgaggtgagccgctgggccggccccatcattgatgtgctgctggactatgtgggcaatgtgcagctgtgcagccggctgaaggagcacatcgacagctttgaggactgggccgtcatcaaggagaaggccgagcccccccggcccctggcccacctgtgccgcctgcgggtgaggaaggccatcggcaagtaccgcatcaagctgctggacaccctgcccctgcccggccgcctcatccgctacctgaagtatgagaacacccagtag

SEQ ID NO: 189630 - DNA, 1764 bp, Artificial Sequence
  derived and/or modified sequence
atgacccggttcagctacgccgagtacttcagcctgttccacagctgcagcgcaccttcacggagcacggcccctccagagagctcacctgccagggcccctatgggcctctttcagggggtcatgcagaagtattcatcttcactgtttaagacatcccaacttgcccccgccgatccgttgattaaggccatcaaagatggagatgaagaggccctgaaaacaatgatcaaggagggaaagaatctcgccgaaccgaataaagaggggtggctgccactgcatgaggcagcctattacggccaggtggggtgcctgaaggttctgcagcgcgcctaccccggaacgattgatcaacgcacgcttcaggaagaaacagcggtatacttggcgacatgccgaggacacttggattgtttgttgtctttgttacaggctggagccgagcctgatattagcaacaagagccgggagacacctctgtacaaagcctgcgaacgaaagaacgctgaggccgtgaagatccttgtacaacacaacgccgacacaaaccatcgctgtaacaggggatggaccgctctccacgagtccgtgtcacggaatgacctcgaagtgatgcagatcctagtgtcgggcggggcaaaggttgagagcaaaaatgcctatgggataactccactctttgtcgccgcccaaagtgggcagcttgaggccctccgctttctggcaaagtacggggctgatataaacacgcaggcctccgataacgctagcgccctctatgaagcctgtaaaaacgagcatgaggaggtggtagaatttctattatctcagggtgcagatgctaataagaccaataaggacggactgctgccactccacattgcaagcaaaaagggcaactacagaatcgtgcagatgctgttgccagtgacaagccggactcggattaggaggtccggcgtctccccattgcacctggctgcagagcgtaaccacgacgaggttttagaggctctcctgtcggctcgcttcgatgttaacacgcctctggcaccagagagggcacgactctacgaagataggcgcagtagcgcgctgtactttgctgtggttaataataacgtgtacgccactgaattgctgctgcagcacggggcagacccaaacagggatgtgataagccccctcctggttgcaatccgacacgggtgcctcagaactatgcaattactgctggaccacggggccaatatcgacgcatatatcgctacacacccgactgccttccccgcaaccatcatgttcgctatgaagtgcctctcactcctgaagtttcttatggatctgggctgtgacggagaaccctgcttcagctgcctgtacggcaacggaccgcacccacccgcccctcagcctagctctcgcttcaatgatgcccctgccgcggacaaagagccctctgtggtgcagttttgcgaattcgtctcagcacctgaggtttccagatgggcaggacctatcattgacgttttattagattacgtgggcaatgtacagttgtgttctaggttaaaggaacacatcgattcttttgaagactgggccgtaatcaaggagaaggcagaaccaccacgcccccttgctcacctctgccgccttcgagtgagaaaagctattggtaaatataggatcaagctgctcgataccctccctctgccaggcaggcttataagatacctcaagtacgaaaatacccagtag

SEQ ID NO: 189631 - DNA, 2743 bp, Artificial Sequence
  derived and/or modified sequence
aggttactatagtgtctgctcctacccctgggacaagatcccctaatgagctggcaggtgggcgtggggggcacaggtacagcttggcttctcagctttgctcccctatcctctgctttgccatgaatctctcatccagccccgcagggatctgcctggccagcagtgagcctgagcccctttcatcctgggacctgccgaccacggctcacatcctcctgggtgaagaatgtcaccttgcttcctatctgcctctttcgtggttggctggggagggggaccggggggtggggtgaggttaacctcattgttgtcttatatggtcatttaaatctcccagggcttcctccaagggccaaaaataatccggagacacagcagctgtgtccagcacacagaggacccggccatctgctttggttcagagccctgtgtctgtcagtcagtctctccctggctctccctccatcctcattcctgcctgaagccatgacccgcttctcctatgcagagtacttttccctctttcactcctgctctgcaccctccaggtccactgcacctcctgagagttcgccggcccgggccccaatgggcttgttccaaggggtcatgcagaaatacagcagcagcttgttcaagacctcccagctggcgcctgcggaccccttgataaaggccatcaaggatggcgatgaagaggccttgaagaccatgatcaaggaagggaagaatctcgcagagcccaacaaggagggctggctgccgctgcacgaggccgcatactatggccaggtgggctgcctgaaagtcctgcagcgagcgtacccagggaccatcgaccagcgcaccctgcaggaggaaacagccgtttacttggcaacgtgcaggggccacctggactgtctcctgtcactgctccaagcaggggcagagccggacatctccaacaaatcccgagagacaccgctctacaaagcctgcgagcgcaagaacgcggaggccgtgaagattctggtgcagcacaatgcagacaccaaccaccgctgcaaccgcggctggaccgctctgcacgagtctgtgtctcgcaatgacctggaggtcatgcagatcctggtgagcggaggagccaaggtggaatccaagaacgcctacggcatcacccccttgttcgtggccgcccagagtggacagttggaggccttgaggttcttagccaagtacggtgctgacatcaacacgcaggccagcgacaacgcgtctgccctctacgaggcctgcaagaatgagcatgaggaggtggtggagtttctgctgtcacagggtgccgacgccaacaagaccaacaaggacggcttgctcccgctgcacatcgcctccaagaagggcaactacaggatcgtgcagatgctgctgccggtgaccagccgcacgcgcatacgccgtagcggcgtcagtccgctgcacctggcggccgagcgcaaccacgacgaggtgctggaggcgctgctgagcgcgcgcttcgacgtgaacacgccgctggcccccgagcgcgcgcgcctctacgaagaccggcgcagctccgcgctgtacttcgcggtggtcaacaacaacgtgtacgccaccgagctgctgctgcaacacggcgccgaccccaaccgcgacgtcatcagccccttgctcgtggccatccgccacggctgcctgcgcacaatgcagctgctgctggaccacggcgcgaacatcgacgcctatatcgccacgcaccccaccgccttccccgccaccatcatgttcgccatgaagtgcctgtcgctgctcaagttcctcatggacctgggctgcgacggcgagccctgcttctcatgcctctacggcaacggcccgcacccgccggccccgcagccctccagcaggttcaacgacgcgcccgcggccgacaaggagcccagcgtggtgcagttctgtgagttcgtatctgccccagaggtgagccgctgggcggggcccatcatcgatgtcctcctggactacgtgggcaacgtgcagctctgctcgcggctgaaggaacacatcgacagctttgaggactgggccgtcatcaaggagaaggcagaacctccaagacctctggctcacctttgccgactgcgggttcgaaaggccattgggaaataccgtataaaactcctagacaccttgccgctcccaggcaggctgattagatacctgaaatacgagaacacccagtaactggggccacggggagagaggagtagcccctcagactcttcttactaagtctcaggacgtcggtgttcccaactccaaggggacctggtgacagacgaggctgcaggctgcctccctctcagcctggacagctaccaggatctcactgggtctcagggcccagagctttggccagagcagagaacagaatgtgtcaaggagaagaatcatttgtttacaaactgatgagcagatcccagaccttctctaccttcaggaatggcagaaacctctattcctggggccagggcagagcttgaggtgttctggggaaggtggtgctcagagccttccctgtgcccctccacttgttctggaaaactcaccacttgacttcagagctttctctccaaagactaagatgaagacgtggcccaaggtagggggtagggggagcctgggtcttggagggctttgttaagtattaatataataaatgttacacatgtga

SEQ ID NO: 189632 - DNA, 1764 bp, Artificial Sequence
  derived and/or modified sequence
atgacccggttcagctatgccgagtatttctccctttttcactcctgcagcgcccctagcagatccacagcacctccggagtcatctcccgctagagcgcctatggggctgttccaaggagttatgcaaaagtattctagttctctgttcaagacatctcagctggcgcctgctgacccccttattaaggccatcaaggacggcgatgaagaggccttaaagacaatgatcaaagagggcaagaatctagctgaacctaataaggaagggtggctgcccctgcatgaagccgcatattatggtcaggtagggtgtttgaaggtgttgcagagggcgtatcctggcacaatcgaccaaagaaccctgcaggaagagaccgcggtgtacctggctacgtgtagggggcacctggactgtctactgtccctgctacaagccggagccgaacccgatatcagcaacaaaagccgagagacccctctctataaggcatgcgaaaggaagaacgccgaggccgtgaaaatcttggtgcagcacaacgcagatacaaatcaccgctgcaatagaggatggaccgccctacacgaaagtgtctctcgcaacgatctggaggtgatgcaaattctggtaagcggaggggcaaaggtggagtctaaaaatgcatatggaattactcctctgttcgtggccgctcagtccggacagctggaggccttgcgattcttagccaagtatggcgctgatatcaacacacaggcctcagataacgcctccgcactgtatgaggcatgtaaaaacgagcatgaggaggtggtcgagttcctgctgtctcagggggctgatgccaataagacaaataaggatggcctactgcccctccacattgcttcaaagaaagggaattacagaatcgtccagatgttactccccgtgacaagcagaacccgtattcgtagaagtggggtcagcccactgcaccttgctgcggagcgtaaccacgatgaggtactcgaggcactactgtccgcacggttcgacgttaacacccctctggccccagagcgcgctcggctgtacgaagaccgaaggagtagcgcgttgtacttcgctgtggtgaataacaacgtctacgcgaccgagctactcctgcagcacggagcggaccctaaccgagacgtgataagtccccttctggtcgctatcaggcacggctgccttcgcacaatgcaacttcttctggatcatggcgcaaacatcgatgcctacattgccacacaccctaccgctttccctgctaccattatgtttgccatgaagtgcctttccctgctgaaattcctgatggatttggggtgcgacggagaaccatgtttcagctgcttatacgggaatggtccccaccccccagcaccacaaccatcttcacgcttcaatgacgctccagcagccgacaaggagccatccgtggtccagttttgtgaatttgtgtctgcaccggaagttagccgttgggctggccctatcattgacgttttgctcgactacgtcggaaatgtgcagctctgtagcaggcttaaagaacacatagactcttttgaagattgggccgtgatcaaagagaaggccgagccgcctcgaccgctggctcacctgtgtaggcttagagtccgtaaggcgattggcaagtatcggattaagctgctcgacacccttcctttacccggtaggcttattcggtacctgaagtacgaaaacactcaatag

SEQ ID NO: 189633 - DNA, 1764 bp, Artificial Sequence
  derived and/or modified sequence
atgaccagattcagctacgccgagtacttcagcctgttccacagctgcagcgcccccagcagaagcaccgccccccccgagagcagccccgccagagcccccatgggcctgttccagggcgtgatgcagaagtacagcagcagcctgttcaagaccagccagctggcccccgccgaccccctgatcaaggccatcaaggacggcgacgaggaggccctgaagaccatgatcaaggagggcaagaacctggccgagcccaacaaggagggctggctgcccctgcacgaggccgcctactacggccaggtgggctgcctgaaggtgctgcagagagcctaccccggcaccatcgaccagagaaccctgcaggaggagaccgccgtgtacctggccacctgcagaggccacctggactgcctgctgagcctgctgcaggccggcgccgagcccgacatcagcaacaagagcagagagacccccctgtacaaggcctgcgagagaaagaacgccgaggccgtgaagatcctggtgcagcacaacgccgacaccaaccacagatgcaacagaggctggaccgccctgcacgagagcgtgagcagaaacgacctggaggtgatgcagatcctggtgagcggcggcgccaaggtggagagcaagaacgcctacggcatcacccccctgttcgtggccgcccagagcggccagctggaggccctgagattcctggccaagtacggcgccgacatcaacacccaggccagcgacaacgccagcgccctgtacgaggcctgcaagaacgagcacgaggaggtggtggagttcctgctgagccagggcgccgacgccaacaagaccaacaaggacggcctgctgcccctgcacatcgccagcaagaagggcaactacagaatcgtgcagatgctgctgcccgtgaccagcagaaccagaatcagaagaagcggcgtgagccccctgcacctggccgccgagagaaaccacgacgaggtgctggaggccctgctgagcgccagattcgacgtgaacacccccctggcccccgagagagccagactgtacgaggacagaagaagcagcgccctgtacttcgccgtggtgaacaacaacgtgtacgccaccgagctgctgctgcagcacggcgccgaccccaacagagacgtgatcagccccctgctggtggccatcagacacggctgcctgagaaccatgcagctgctgctggaccacggcgccaacatcgacgcctacatcgccacccaccccaccgccttccccgccaccatcatgttcgccatgaagtgcctgagcctgctgaagttcctgatggacctgggctgcgacggcgagccctgcttcagctgcctgtacggcaacggcccccacccccccgccccccagcccagcagcagattcaacgacgcccccgccgccgacaaggagcccagcgtggtgcagttctgcgagttcgtgagcgcccccgaggtgagcagatgggccggccccatcatcgacgtgctgctggactacgtgggcaacgtgcagctgtgcagcagactgaaggagcacatcgacagcttcgaggactgggccgtgatcaaggagaaggccgagccccccagacccctggcccacctgtgcagactgagagtgagaaaggccatcggcaagtacagaatcaagctgctggacaccctgcccctgcccggcagactgatcagatacctgaagtacgagaacacccagtag

SEQ ID NO: 189634 - protein, 1235 aa, Artificial Sequence
  derived and/or modified sequence
MPAGGRAGSLKDPDVAELFFKDDPEKLFSDLREIGHGSFGAVYFARDVRNSEVVAIKKMSYSGKQSNEKWQDIIKEVRFLQKLRHPNTIQYRGCYLREHTAWLVMEYCLGSASDLLEVHKKPLQEVEIAAVTHGALQGLAYLHSHNMIHRDVKAGNILLSEPGLVKLGDFGSASIMAPANSFVGTPYWMAPEVILAMDEGQYDGKVDVWSLGITCIELAERKPPLFNMNAMSALYHIAQNESPVLQSGHWSEYFRNFVDSCLQKIPQDRPTSEVLLKHRFVLRERPPTVIMDLIQRTKDAVRELDNLQYRKMKKILFQEAPNGPGAEAPEEEEEAEPYMHRAGTLTSLESSHSVPSMSISASSQSSSVNSLADASDNEEEEEEEEEEEEEEEGPEAREMAMMQEGEHTVTSHSSIIHRLPGSDNLYDDPYQPEITPSPLQPPAAPAPTSTTSSARRRAYCRNRDHFATIRTASLVSRQIQEHEQDSALREQLSGYKRMRRQHQKQLLALESRLRGEREEHSARLQRELEAQRAGFGAEAEKLARRHQAIGEKEARAAQAEERKFQQHILGQQKKELAALLEAQKRTYKLRKEQLKEELQENPSTPKREKAEWLLRQKEQLQQCQAEEEAGLLRRQRQYFELQCRQYKRKMLLARHSLDQDLLREDLNKKQTQKDLECALLLRQHEATRELELRQLQAVQRTRAELTRLQHQTELGNQLEYNKRREQELRQKHAAQVRQQPKSLKVRAGQRPPGLPLPIPGALGPPNTGTPIEQQPCSPGQEAVLDQRMLGEEEEAVGERRILGKEGATLEPKQQRILGEESGAPSPSPQKHGSLVDEEVWGLPEEIEELRVPSLVPQERSIVGQEEAGTWSLWGKEDESLLDEEFELGWVQGPALTPVPEEEEEEEEGAPIGTPRDPGDGCPSPDIPPEPPPTHLRPCPASQLPGLLSHGLLAGLSFAVGSSSGLLPLLLLLLLPLLAAQGGGGLQAALLALEVGLVGLGASYLLLCTALHLPSSLFLLLAQGTALGAVLGLSWRRGLMGVPLGLGAAWLLAWPGLALPLVAMAAGGRWVRQQGPRVRRGISRLWLRVLLRLSPMAFRALQGCGAVGDRGLFALYPKTNKDGFRSRLPVPGPRRRNPRTTQHPLALLARVWVLCKGWNWRLARASQGLASHLPPWAIHTLASWGLLRGERPTRIPRLLPRSQRQLGPPASRQPLPGTLAGRRSRTRQSRALPPWR

SEQ ID NO: 189635 - DNA, 3708 bp, Artificial Sequence
  derived and/or modified sequence
atgcccgccggcggcagagccggcagcctgaaggaccccgacgtggccgagctgttcttcaaggacgaccccgagaagctgttcagcgacctgagagagatcggccacggcagcttcggcgccgtgtacttcgccagagacgtgagaaacagcgaggtggtggccatcaagaagatgagctacagcggcaagcagagcaacgagaagtggcaggacatcatcaaggaggtgagattcctgcagaagctgagacaccccaacaccatccagtacagaggctgctacctgagagagcacaccgcctggctggtgatggagtactgcctgggcagcgccagcgacctgctggaggtgcacaagaagcccctgcaggaggtggagatcgccgccgtgacccacggcgccctgcagggcctggcctacctgcacagccacaacatgatccacagagacgtgaaggccggcaacatcctgctgagcgagcccggcctggtgaagctgggcgacttcggcagcgccagcatcatggcccccgccaacagcttcgtgggcaccccctactggatggcccccgaggtgatcctggccatggacgagggccagtacgacggcaaggtggacgtgtggagcctgggcatcacctgcatcgagctggccgagagaaagccccccctgttcaacatgaacgccatgagcgccctgtaccacatcgcccagaacgagagccccgtgctgcagagcggccactggagcgagtacttcagaaacttcgtggacagctgcctgcagaagatcccccaggacagacccaccagcgaggtgctgctgaagcacagattcgtgctgagagagagaccccccaccgtgatcatggacctgatccagagaaccaaggacgccgtgagagagctggacaacctgcagtacagaaagatgaagaagatcctgttccaggaggcccccaacggccccggcgccgaggcccccgaggaggaggaggaggccgagccctacatgcacagagccggcaccctgaccagcctggagagcagccacagcgtgcccagcatgagcatcagcgccagcagccagagcagcagcgtgaacagcctggccgacgccagcgacaacgaggaggaggaggaggaggaggaggaggaggaggaggaggaggagggccccgaggccagagagatggccatgatgcaggagggcgagcacaccgtgaccagccacagcagcatcatccacagactgcccggcagcgacaacctgtacgacgacccctaccagcccgagatcacccccagccccctgcagccccccgccgcccccgcccccaccagcaccaccagcagcgccagaagaagagcctactgcagaaacagagaccacttcgccaccatcagaaccgccagcctggtgagcagacagatccaggagcacgagcaggacagcgccctgagagagcagctgagcggctacaagagaatgagaagacagcaccagaagcagctgctggccctggagagcagactgagaggcgagagagaggagcacagcgccagactgcagagagagctggaggcccagagagccggcttcggcgccgaggccgagaagctggccagaagacaccaggccatcggcgagaaggaggccagagccgcccaggccgaggagagaaagttccagcagcacatcctgggccagcagaagaaggagctggccgccctgctggaggcccagaagagaacctacaagctgagaaaggagcagctgaaggaggagctgcaggagaaccccagcacccccaagagagagaaggccgagtggctgctgagacagaaggagcagctgcagcagtgccaggccgaggaggaggccggcctgctgagaagacagagacagtacttcgagctgcagtgcagacagtacaagagaaagatgctgctggccagacacagcctggaccaggacctgctgagagaggacctgaacaagaagcagacccagaaggacctggagtgcgccctgctgctgagacagcacgaggccaccagagagctggagctgagacagctgcaggccgtgcagagaaccagagccgagctgaccagactgcagcaccagaccgagctgggcaaccagctggagtacaacaagagaagagagcaggagctgagacagaagcacgccgcccaggtgagacagcagcccaagagcctgaaggtgagagccggccagagaccccccggcctgcccctgcccatccccggcgccctgggcccccccaacaccggcacccccatcgagcagcagccctgcagccccggccaggaggccgtgctggaccagagaatgctgggcgaggaggaggaggccgtgggcgagagaagaatcctgggcaaggagggcgccaccctggagcccaagcagcagagaatcctgggcgaggagagcggcgcccccagccccagcccccagaagcacggcagcctggtggacgaggaggtgtggggcctgcccgaggagatcgaggagctgagagtgcccagcctggtgccccaggagagaagcatcgtgggccaggaggaggccggcacctggagcctgtggggcaaggaggacgagagcctgctggacgaggagttcgagctgggctgggtgcagggccccgccctgacccccgtgcccgaggaggaggaggaggaggaggagggcgcccccatcggcacccccagagaccccggcgacggctgccccagccccgacatcccccccgagcccccccccacccacctgagaccctgccccgccagccagctgcccggcctgctgagccacggcctgctggccggcctgagcttcgccgtgggcagcagcagcggcctgctgcccctgctgctgctgctgctgctgcccctgctggccgcccagggcggcggcggcctgcaggccgccctgctggccctggaggtgggcctggtgggcctgggcgccagctacctgctgctgtgcaccgccctgcacctgcccagcagcctgttcctgctgctggcccagggcaccgccctgggcgccgtgctgggcctgagctggagaagaggcctgatgggcgtgcccctgggcctgggcgccgcctggctgctggcctggcccggcctggccctgcccctggtggccatggccgccggcggcagatgggtgagacagcagggccccagagtgagaagaggcatcagcagactgtggctgagagtgctgctgagactgagccccatggccttcagagccctgcagggctgcggcgccgtgggcgacagaggcctgttcgccctgtaccccaagaccaacaaggacggcttcagaagcagactgcccgtgcccggccccagaagaagaaaccccagaaccacccagcaccccctggccctgctggccagagtgtgggtgctgtgcaagggctggaactggagactggccagagccagccagggcctggccagccacctgcccccctgggccatccacaccctggccagctggggcctgctgagaggcgagagacccaccagaatccccagactgctgcccagaagccagagacagctgggcccccccgccagcagacagcccctgcccggcaccctggccggcagaagaagcagaaccagacagagcagagccctgcccccctggagatag

SEQ ID NO: 189636 - DNA, 3708 bp, Artificial Sequence
  derived and/or modified sequence
atgcccgcgggcggaagggcaggctctcttaaagatcccgacgtagccgaactgttctttaaagacgatccggaaaaactgttttccgatctgagggaaatcggccatgggtcattcggagcagtgtactttgcacgggatgtgagaaattctgaagtggtcgccatcaagaaaatgagctactccggcaagcagtctaatgagaagtggcaggatatcataaaggaggttcggttcctgcagaaactccggcaccctaacactatacagtatcggggatgttacctgagggagcataccgcatggctggtgatggaatattgcctgggatccgccagtgatcttctcgaggtacacaagaagcctctgcaggaagtagaaatcgccgcagtaacgcatggagctctgcagggcttggcctacctgcatagccacaatatgatccacagggacgtaaaggcggggaacattctgctgtccgaacctgggctggtgaaactaggggatttcggcagcgcctccatcatggcgcccgccaattccttcgtgggaactccctattggatggccccagaagtcatcttagctatggacgagggacagtacgacgggaaggtggatgtgtggagtctggggattacctgcatcgagctggccgagcggaagccccccctctttaacatgaacgcaatgagcgctttgtatcacatcgcccagaatgagtctcctgtgttacagagtgggcactggagcgagtatttccggaactttgtggatagttgcttacagaagattccacaagacagacccacgtccgaggtgctccttaagcatcgattcgtgctgcgcgagaggcccccaaccgtgattatggacctgatccaaaggacaaaggacgcggtgcgcgaattagataatctacaatatcggaaaatgaagaaaattctgtttcaggaagccccgaatggcccaggtgcagaggctcctgaagaggaggaagaagcggaaccatacatgcaccgggctgggaccctgacatctctcgagtcttcccactccgtgccatctatgtctataagcgctagtagccagtctagtagcgtgaatagcctcgctgacgccagcgacaacgaggaagaagaggaggaggaagaggaagaggaagaggaagaggagggacctgaggcccgggaaatggcaatgatgcaggaaggggaacatacagtcacaagccacagttctatcatccaccgccttcctggcagcgacaacctgtatgacgatccctaccagcccgagattacaccttcaccactgcagcctccagccgcccccgcccccacatcgacaacttctagcgccaggaggcgggcttactgtcgcaaccgagatcacttcgcaaccattcgaaccgctagcctggtctcaaggcagatccaagaacacgagcaagattcagctctgagggaacaactgtccggatacaagcggatgcgcagacagcatcagaagcagctgttggctttggagagccgcctccggggagaacgggaggagcattcagccaggctgcagcgcgaactggaggcgcagcgagcaggatttggcgccgaggcagagaaactggccaggcgccaccaggctattggagagaaggaggcacgcgccgcccaggccgaggagaggaagttccaacagcacatcctcgggcagcagaagaaggaactggctgctttgctcgaggctcagaagcggacttacaagctgagaaaggagcagctgaaagaggagcttcaggaaaaccctagcaccccaaagagggagaaagcagaatggctccttagacagaaagaacaactacagcagtgtcaggccgaagaggaagccggactgttgaggcggcaacggcagtactttgaacttcaatgccggcagtacaagagaaagatgctcttagccagacattcactagaccaagatttgctcagagaagatttaaataagaagcagactcagaaggacctggagtgcgcactgctattgcggcagcacgaggctactagagagttggaactccgccagctccaggccgttcagcggactagggcggagctgactcggctgcagcatcagactgaattgggaaaccaattagagtacaataagcggagggagcaggaattaaggcagaagcacgcagcccaagtgagacagcagcctaaaagtctgaaagtgcgcgccggccagcggccacctggactacccttgcccattccgggcgctcttggccctcccaacaccggaactcctattgagcagcagccttgctcccccggccaggaagcagtgctggaccagcgcatgctgggagaagaggaggaagccgtcggagagaggagaatcctgggcaaggagggggccacgctggaaccaaaacagcagagaatactgggggaggagtcaggtgccccatctcctagcccgcaaaaacatggctcacttgtcgatgaggaggtctgggggcttcctgaggagatagaggagctgcgagtcccaagtcttgtaccccaggagaggagcattgttggccaggaagaagctggaacctggagcttatggggtaaagaggacgaatccctactcgacgaagagtttgagctgggctgggttcagggcccagccctcactccagtcccggaggaggaggaggaagaggaagagggcgcccccattggcacccctagggaccccggagatggttgccctagtcccgacatcccaccggagccgccccccactcatctgaggccctgtcccgctagtcagttgcctggactgctgtcacacggtctgttagccggcttgtcattcgccgtaggctcatcctcaggcctgttgccgctgctgctgctcctcttacttccactcttggccgcgcagggcggaggcggcctccaggccgccctcctggcactggaggtaggtctggtgggattgggggccagctatctcctgctatgtacagcactgcatcttccgtcaagtttattcctgctgcttgctcaaggtaccgccttgggcgctgttcttgggctaagttggaggcggggcctcatgggagtgcccctgggcttaggcgccgcctggctgttggcatggccaggtctggccctaccattggtagccatggctgctgggggaagatgggtccggcagcagggcccgagggttcgcagaggaatttcccgattgtggctgcgcgtgcttctaagactgtcgccaatggcattccgagcactgcaggggtgcggtgccgtaggtgatcgtgggctcttcgctctgtacccaaaaaccaataaggacgggttccggtcgcggctgcctgttccaggacccagacgccgaaaccctcggactacacagcatcccctcgcccttctggctagggtctgggtcctgtgtaaagggtggaactggcgactggctagggcaagccagggattagcttctcacctgccgccatgggcgatccacacactggccagctggggcctcctgcggggggaacggcccactcggattccacggttgctcccaaggagtcagcggcaactcggaccacccgcctcgaggcagcctctccccggcacgctggcaggaaggagaagccgtactaggcagtcccgcgccctccccccttggcgatag

SEQ ID NO: 189637 - DNA, 3708 bp, Artificial Sequence
  derived and/or modified sequence
atgcctgctgggggccgggccggcagcctgaaggaccctgatgtggccgagctgttcttcaaggatgatcctgagaagctgttcagtgacctgcgggagatcggccacggcagctttggagctgtgtactttgccagagatgtgagaaattctgaggtggtggccatcaagaagatgagctacagcggcaagcagagcaatgagaagtggcaggacatcatcaaggaggtgcgcttcctgcagaagctgcggcaccccaacaccatccagtaccggggctgctacctgcgggagcacacagcctggctggtgatggagtactgcctgggcagcgccagtgacctgctggaggtgcacaagaagcccctgcaggaggtggagattgctgctgtgacccatggagccctgcagggcctggcctacctgcacagccacaacatgatccacagagatgtgaaggccggcaacatcctgctgtctgagcccggcctggtgaagctgggggactttggcagcgccagcatcatggccccagccaacagctttgtgggcaccccctactggatggcccctgaggtgatcctggccatggatgagggccagtatgatggcaaggtggatgtgtggagcctgggcatcacctgcatcgagctggccgagaggaagcccccactcttcaacatgaatgccatgtctgccctgtaccacatcgcccagaatgaaagccctgtgctgcagagcggccactggagcgagtacttcaggaactttgtggacagctgcctgcagaagatcccccaggaccggcccaccagcgaggtgctgctgaagcacagatttgtgctgcgggagcggccccccaccgtcatcatggacctgatccagaggaccaaggatgctgtgcgggagctggacaacctgcagtacaggaagatgaagaagatcctcttccaggaggcccccaacggccctggagctgaggcccctgaggaggaggaggaggccgagccctacatgcaccgggccggcaccctgaccagcctggagagcagccacagcgtgcccagcatgagcatcagcgccagcagccagagcagctctgtgaacagcctggctgatgccagtgacaatgaggaggaggaggaggaggaggaggaggaggaggaggaggaggagggccctgaggcccgggagatggccatgatgcaggagggggagcacacagtgaccagccacagcagcatcatccaccggctgcccggcagtgacaacctgtatgatgacccctaccagcctgagatcacccccagccccctgcagcccccagctgccccagcccccaccagcaccaccagcagcgcccggcggcgggcctactgcaggaacagagaccactttgccaccatcagaacagccagcctggtgtcccggcagatccaggagcacgagcaggacagcgccctgcgggagcagctgagcggctacaagaggatgaggcggcagcaccagaagcagctgctggccctggagagccggctgcggggggagcgggaggagcacagcgcccggctgcagcgggagctggaggcccagagagctggctttggagctgaggccgagaagctggcccggcggcaccaggccatcggggagaaggaggcccgggccgcccaggccgaggagaggaagttccagcagcacatcctgggccagcagaagaaggagctggccgccctgctggaggcccagaagaggacctacaagctgaggaaggagcagctgaaggaggagctgcaggagaaccccagcacccccaagcgggagaaggccgagtggctgctgcggcagaaggagcagctgcagcagtgccaggccgaggaggaggccggcctgctgcggcggcagaggcagtactttgagctgcagtgccggcagtacaagaggaagatgctgctggcccggcacagcctggaccaggacctgctgcgggaggacctgaacaagaagcagacccagaaggacctggagtgtgccctgctgctgcggcagcacgaggccacccgggagctggagctgcggcagctgcaggccgtgcagaggaccagggctgagctgacccggctgcagcaccagacagagctgggcaaccagctggagtacaacaagagaagagagcaggagctgcggcagaagcatgctgcccaggtgcggcagcagcccaagagcctgaaggtgcgggccggccagaggcctcctggcctgcccctgcccatccctggggccctgggcccccccaacacaggcacccccatcgagcagcagccctgcagccctggccaggaggccgtgctggaccagaggatgctgggggaggaggaggaggccgtgggggagcggcgcatcctgggcaaggagggcgccaccctggagcccaagcagcagaggatcctgggggaggagagcggggcccccagccccagcccccagaagcacggcagcctggtggatgaggaggtgtggggcctgcctgaggagattgaggagctgcgggtgcccagcctggtgccccaggagaggagcatcgtgggccaggaggaggccggcacctggagcctgtggggcaaggaggatgagagcctgctggatgaggagtttgagctgggctgggtgcagggccctgccctgacccctgtgcctgaggaggaggaggaggaggaggagggcgcccccatcggcaccccccgggaccctggagatggctgccccagcccagacatccccccagagcccccacccacccacctgcggccctgcccagccagccagctgcccggcctgctgagccacggcctgctggccggcctgagctttgctgtgggcagcagcagcggcctgctgcccctgctgctgctgctgctgctgcccctgctggccgcccagggcggcggcggcctgcaggccgccctgctggccctggaggtgggcctggtgggcctgggcgccagctacctgctgctgtgcacagccctgcacctgcccagcagcctcttcctgctgctggcccagggcacagccctgggcgctgtgctgggcctgtcctggaggcggggcctgatgggcgtgcccctgggcctgggcgccgcctggctgctggcctggccaggcctggccctgcccctggtggccatggctgctgggggccgctgggtgcggcagcagggcccccgggtgcggcggggcatcagccggctgtggctgcgggtgctgctgcggctgagccccatggccttccgggccctgcagggctgtggggctgtgggggaccggggcctgtttgccctgtaccccaagaccaacaaggatggcttccgcagccggctgcctgtgcccggccccaggagaagaaaccccaggaccacccagcaccccctggccctgctggcccgggtgtgggtgctgtgcaagggctggaactggaggctggcccgggccagccagggcctggccagccacctgcccccctgggccatccacaccctggcctcctggggcctgctgcggggggagcggcccacccgcatcccccggctgctgcccaggagccagaggcagctgggccccccagccagccggcagcccctgcccggcaccctggccggcagaagaagcaggacccggcagagccgggccctgcccccctggaggtag

SEQ ID NO: 189638 - DNA, 3708 bp, Artificial Sequence
  derived and/or modified sequence
atgcccgccggcggccgggccggcagcctgaaggaccccgacgtggctgaactgtttttcaaagacgatccagagaaacttttctcagacctgcgagagattggacatggttcattcggtgccgtttattttgcacgggatgtgcggaattccgaagtcgtcgcgatcaagaagatgagttactctggcaaacagagcaacgaaaagtggcaggatattattaaagaagttcgctttctgcaaaagctgaggcacccgaatacaatccaataccggggatgctatctccgcgagcacaccgcttggttggtaatggagtattgcttgggaagcgcttctgacctcctagaggtccacaaaaagccactgcaggaggtagagatagccgctgtcacacatggagccctccaagggctcgcataccttcatagtcataatatgattcatagagatgtgaaggctggtaacatcctcctctcggagcccggcttggtgaaactgggggactttggaagtgccagcatcatggcccccgctaactcgttcgtggggaccccctactggatggcccccgaagtgatattggcaatggacgaggggcagtacgatggaaaggtggatgtgtggtcccttggaataacctgtatcgaactcgcggaacgaaagccccccctgtttaacatgaatgctatgagcgctctttatcatatcgcccagaatgagtcgcccgtattacaaagcgggcattggagcgagtactttcgtaatttcgtagactcttgcctgcagaagattccccaggatcgccctacttctgaagtgttactcaagcacagattcgtgctgcgggaacgtccccctaccgtaataatggatctgattcagaggaccaaagacgccgtgagggagttggataacctgcagtaccgtaagatgaagaaaatcttgtttcaggaagcaccaaatgggcctggcgctgaagcccccgaggaagaggaagaggctgagccttacatgcacagagcagggaccctgacctcgctggaatccagccattctgttccttcgatgtctatcagcgcgtcctctcagtcctcttcagttaacagcctggctgacgcctctgataatgaagaggaagaggaagaagaggaggaggaggaggaggaggaggagggacccgaagcccgggagatggccatgatgcaggaaggagaacacactgtcacaagccattcaagcatcatccaccggctgcctggctcagataatttgtacgacgatccgtaccagcccgagattacacccagtccactgcagccacctgcagccccagccccaacctcaacaacatcctcagctagaagaagagcctactgtaggaaccgggaccattttgcgaccatcagaaccgccagcctggtgtctagacaaatccaggagcacgagcaggattccgcgcttcgcgagcagctgagcgggtataaaagaatgcgccgacagcaccagaaacagctgctggcactggagagccgcttgcgaggggaaagagaggaacattcggcgcgtctccaaagagagctggaggcgcagagggctggcttcggcgctgaagccgaaaagctggctaggaggcaccaggcaattggagagaaagaggcacgtgctgcgcaggccgaagaaaggaaattccagcagcatatcctcggtcagcagaagaaggaattggctgccctgctggaagctcagaagcgtacctataaattacgcaaagagcagctaaaggaagagcttcaagagaaccctagcactccaaagagagaaaaagcagagtggctcctgcgccaaaaggaacaactgcaacaatgccaggccgaggaggaggccggcctactgcgaaggcagcggcagtactttgaactgcaatgccggcaatacaaacgaaagatgctgttggctagacattccctggaccaggacctgttgcgtgaggacttaaacaagaaacagacccaaaaggatctggaatgtgctctgctgttgagacagcatgaggcgaccagagagctcgaacttagacagcttcaggctgttcagcggactcgtgcagaattaacgcgattgcagcaccagacagaactgggtaaccagctggagtataacaagcgcagggagcaggagttgcgacagaagcatgccgctcaggtccggcaacagcccaagagcttgaaggtaagggctgggcagcgcccacccggtttaccactccctatacccggagccctgggaccacccaacaccgggacacccattgagcagcaaccatgttcaccagggcaggaagccgtgctggatcaacgcatgttgggcgaagaggaggaggccgtgggagaaagaaggattttgggtaaggagggagcaactctggaacctaaacaacagagaatcttaggtgaagaatctggggctcccagcccaagtccacagaagcacggttcattggtggacgaagaagtgtggggcctgccagaggaaatagaggagctccgtgtcccttcgttggttccgcaggagaggagtattgtcggccaggaagaggccggcacgtggtcactgtggggcaaagaagacgagtcattgcttgacgaggagtttgaactgggatgggtgcagggcccagcactgaccccagttcctgaagaggaggaagaggaagaggagggcgcccctatcggaaccccccgcgatcctggagacggctgcccgtccccggacataccccccgaacctcccccaacgcacttgaggccatgtccggccagccaattgcctgggctgcttagccacggtttgctcgcaggcctgagcttcgcagtgggcagtagctcaggcctcttgccattgcttctactcttacttctgcccctgctggcagcccagggcgggggcgggttgcaagccgctttgctggctctcgaagtcggcttggtcgggctgggagcctcctacctgttgctttgtacggctctccacctgcctagttctctttttctgctactggcacagggaaccgcgttgggcgcagtcctgggtctgagctggcgacggggtcttatgggggtgcccctgggactgggcgcagcatggttgttagcttggccaggtctggccttaccgttagtggccatggccgccggtggcagatgggtcaggcagcagggacctcgcgtcaggagggggatttccaggctgtggctgagagtgttgcttcgcctgtcccctatggccttcagagccctgcagggctgcggagccgtgggggatagaggtcttttcgcactgtatcccaaaactaataaggatggattccgctccaggcttccggtacccggtccgcgtaggagaaatcccagaaccacgcagcatccccttgcactcctggcgcgtgtttgggtgctctgtaaaggctggaactggagactggctcgggcctcccagggccttgccagccacctacccccttgggccatacacacattggcatcctggggtctcctgcgcggtgaacgcccaactcgtatacctaggctcctgccccgcagtcaaaggcaactgggaccacctgcctctagacaaccattgcctggaacccttgcaggcagacgttcaaggacaagacagagccgggccctcccaccttggaggtag

SEQ ID NO: 189639 - DNA, 3708 bp, Artificial Sequence
  derived and/or modified sequence
atgcccgctggaggtcgagccggatcactaaaggaccccgatgtggctgaacttttttttaaggatgaccctgagaagttatttagtgaccttcgggagatcgggcacggcagctttggcgctgtttatttcgccagggacgtgagaaactcggaagttgtggccatcaagaaaatgagttactccggtaaacagtcaaatgagaaatggcaggacattattaaggaggtgagattcctgcagaagcttcggcacccgaacacaattcaatatcggggatgctatctgcgtgagcacacagcctggctcgttatggaatactgtctcgggagtgctagtgatctgctggaggtccataagaaaccactgcaagaagtcgaaatagcagcggtcacccatggcgctttgcagggccttgcctatcttcattctcacaatatgatacatcgcgacgtgaaggctggcaacattctgttgagtgagcccggtctcgtaaaactcggggattttggcagtgccagcatcatggcacctgcaaattccttcgtgggcaccccatactggatggcaccggaggtgatcttagccatggacgagggccagtacgatggcaaggttgatgtttggtctctgggaatcacgtgcatcgaattagccgaaagaaagccacctctttttaacatgaatgctatgagcgctctctaccacatcgcccagaacgagtcccctgtgctccaatctggacattggtctgagtattttcgcaactttgtggactcctgcctccagaagattccgcaagataggcccacatctgaggtcctcctgaagcaccgctttgtcctgagagagcgccctcccaccgttataatggacctcatccagagaacaaaagacgcagtaagagagctggacaacctccagtatcgaaagatgaaaaaaattctcttccaggaggccccaaatgggccaggagcagaggctccagaagaggaggaggaagcagagccatacatgcatcgagctggcactctcacgagtctagagtcctcgcattccgtgccttccatgagtattagcgcctcaagccagtcaagttctgtcaacagcctcgctgatgccagcgacaatgaggaggaagaggaggaggaagaggaagaagaagaggaagaagagggtcctgaagctagggagatggcaatgatgcaggaaggcgaacatactgtaacttcccactcatctattatccaccgcttgcctggatccgacaacttatacgacgacccctatcaaccagaaatcaccccttctcccctgcagcctcccgctgcacctgcaccaaccagtacaacatcctctgctcgcagacgggcatactgccggaatcgggaccattttgcgaccattaggacggcctctttggtaagcagacagatccaagagcatgaacaggattcggctctacgcgagcagctctctggatacaagaggatgcggcgtcagcaccagaagcagttgctggcgcttgagtcgaggctaaggggggagagagaggagcacagcgccagactccaacgagagctcgaggcccaaagagccggattcggcgcagaagcagaaaagcttgccaggcgccaccaggcgatcggggagaaggaagcgagggcagcgcaggccgaggaaaggaagttccagcagcacattctcgggcagcagaagaaagaattggcggcactgcttgaggcgcagaagaggacgtataagctccgtaaggagcagttaaaggaggagctgcaggagaacccaagcacgccaaagcgggaaaaggctgaatggttactccgccaaaaggaacagttacagcagtgtcaggcggaggaggaagctgggcttctgcggagacagcgtcagtacttcgagctccagtgtcgtcagtacaagcggaaaatgctactggcccgacatagcctggaccaggacttgctgcgagaggaccttaacaagaagcagacacagaaagatctggaatgtgcactgctccttaggcagcatgaagcaacgcgagagctggagctcaggcagctccaggccgtgcagcgtactcgggcagagctgaccaggctgcagcaccaaacagagctcgggaaccaactggagtacaacaagagaagggagcaagaattaaggcagaaacatgcggcacaggtgagacagcagcctaaatcactgaaggtgcgggctggccagaggccaccgggactcccattaccaatccctggagcactgggccctccaaacaccggcaccccgatcgagcagcagccttgcagtcccggacaagaggcagtgttagaccagcgtatgttgggtgaagaagaagaggccgttggggagcgccgtatcttgggcaaagaaggcgcaacactggagccaaagcagcaacgtattcttggagaggaatctggagcccctagcccgtcacctcagaagcacggttcattggttgacgaggaagtgtggggcctgccggaagagatcgaggaacttcgggtcccgagccttgtccctcaagagcggagcatcgtagggcaagaagaggccggtacctggtccctgtgggggaaggaagacgagtctctgcttgatgaggaattcgaactgggatgggtccaggggcctgccctcaccccagttccggaggaggaagaggaagaggaagagggcgcacctatcgggacacctcgcgatccaggcgacggctgtccctctccagacatccctcctgagcctccgcctacccacctccggccatgccccgcaagccagctgccgggtttgctgagccatggcctactggccggtctgtccttcgctgtggggtctagctccggccttctgcccctgctgctcctgttgctgctgcctctgctggcagcacaaggcggaggcggactgcaggcagcactgctcgctctagaggtgggcctggtgggcttgggggcaagttacctcctgctatgtaccgcactgcacttgccatcctccctctttctgctgctcgcccagggtaccgcgctgggagctgtgttagggctgtcctggcgcagaggcctgatgggtgttcctctggggcttggcgctgcttggctcctggcgtggccaggactggcgctacctttggtggcaatggctgccggaggcaggtgggttcgacaacaggggccaagggtgcgaagggggatttctcgcctctggctgcgcgttctgctacgcttgtcacccatggccttccgggcactgcaagggtgtggcgcagtgggagaccgcggactgttcgctctgtacccaaaaactaacaaagatggctttagaagcaggctgcccgttcctggcccacgtaggaggaatcctaggaccacacagcatcctcttgcattgttggccagagtgtgggtactgtgtaagggttggaactggcgcctggctcgcgcaagccagggcctggcctcccacctgcctccatgggctatccacaccctggcctcctggggcctccttaggggggaacgccctacacgaatccctaggctgcttcccagatcacagagacagctggggcctccggctagcagacagccattgcctggcaccttagccggtcgcagatcgcgcaccagacagtcacgagccctgcccccatggcgctag

SEQ ID NO: 189640 - DNA, 4871 bp, Artificial Sequence
  derived and/or modified sequence
gctgagacggagaagaggagaggcagagagggcgcggggaccgtcagcagcaccttagctacaatcgttcagctattctcggaagagagaagggagagggaggaggccggggcgggagtgggggctgtcaccctcggaccccggcgtgagaggggccgtgcggccggacgtcctcggggtgggcccccagtcggtggccgaagacctacagctcaggcccctgggtcccaaatttccaggctttgcccctcctcctttctcagatacccgggtaacagtcctcatagtccagatatccgggactcgggtcccaacctctctaaacctgggtctctgtttcatagaatttcaaatatcaggttcaggcccctgcgtgcaccagtatccggggttcattccccgggcgttcaaatatcggattcagtctccatcccgttcagatattcggggttcagaccccacaatcagaaatccggaattcggcagctgtcgccctcgacgagggggaggactggaccgcgaggtcagattaggttgtcaccccctcccctccaggggaggcttcccgggcccgcccctcaggaagggcgaaagccgaggaagaggtggcaaggggaaaggtctccttgcccctctccctgcttggcagagccgctggaggaccccaggcggaagcggaggcgctggggcaccatagtgacccctaccaggccaggccccactctcagggcccccaggggccaccatgccagctgggggccgggccgggagcctgaaggacccagatgtggctgagctcttcttcaaggatgacccagaaaagctcttctctgacctccgggaaattggccatggcagctttggagccgtatactttgcccgggatgtccggaatagtgaggtggtggccatcaagaagatgtcctacagtgggaagcagtccaatgagaaatggcaagacatcatcaaggaggtgcggttcttacagaagctccggcatcccaacaccattcagtaccggggctgttacctgagggagcacacggcttggctggtaatggagtattgcctgggctcagcttctgaccttctagaagtgcacaagaaaccccttcaggaggtagagatcgcagctgtgacccacggggcgcttcagggcctggcatatctgcactcccacaacatgatccatagggatgtgaaggctggaaacatcctgctgtcagagccagggttagtgaagctaggggactttggttctgcgtccatcatggcacctgccaactccttcgtgggcaccccatactggatggcacccgaggtgatcctggccatggatgaggggcagtacgatggcaaagtggacgtctggtccttggggataacctgcatcgagctggctgaacggaaaccaccgctctttaacatgaatgcgatgagtgccttataccacattgcacagaacgaatcccccgtgctccagtcaggacactggtctgagtacttccggaattttgtcgactcctgtcttcagaaaatccctcaagacagaccaacctcagaggttctcctgaagcaccgctttgtgctccgggagcggccacccacagtcatcatggacctgatccagaggaccaaggatgccgtgcgggagctggacaacctgcagtaccgcaagatgaagaagatcctgttccaagaggcacccaacggccctggtgccgaggccccagaggaggaagaggaggccgagccctacatgcaccgggccgggactctgaccagcctcgagagtagccactcagtgcccagcatgtccatcagcgcctccagccagagcagctccgtcaacagcctagcagatgcctcagacaacgaggaagaggaggaggaggaggaggaagaggaggaggaggaagaaggccctgaagcccgggagatggccatgatgcaggagggggagcacacagtcacctctcacagctccattatccaccggctgccgggctctgacaacctatatgatgacccctaccagccagagataacccccagccctctccagccgcctgcagccccagctcccacttccaccacctcttccgcccgccgccgggcctactgccgtaaccgagaccactttgccaccatccgaaccgcctccctggtcagccgtcagatccaggagcatgagcaggactctgcgctgcgggagcagctgagcggctataagcggatgcgacgacagcaccagaagcagctgctggccctggagtcacggctgaggggtgaacgggaggagcacagtgcacggctgcagcgggagcttgaggcgcagcgggctggctttggggcagaggcagaaaagctggcccggcggcaccaggccataggtgagaaggaggcacgagctgcccaggccgaggagcggaagttccagcagcacatccttgggcagcagaagaaggagctggctgccctgctggaggcacagaagcggacctacaaacttcgcaaggaacagctgaaggaggagctccaggagaaccccagcactcccaagcgggagaaggccgagtggctgctgcggcagaaggagcagctccagcagtgccaggcggaggaggaagcagggctgctgcggcggcagcgccagtactttgagctgcagtgtcgccagtacaagcgcaagatgttgctggctcggcacagcctggaccaggacctgctgcgggaggacctgaacaagaagcagacccagaaggacttggagtgtgcactgctgcttcggcagcacgaggccacgcgggagctggagctgcggcagctccaggccgtgcagcgcacgcgggctgagctcacccgcctgcagcaccagacggagctgggcaaccagctggagtacaacaagcggcgtgagcaagagttgcggcagaagcatgcggcccaggttcgccagcagcccaagagcctcaaagtacgtgcaggccagcgccccccgggccttccactccccattcctggggctctgggcccacccaacacaggcacccctatagaacagcagccctgctcacctggccaggaggcagtcctggaccaaagaatgcttggcgaggaggaggaagcagttggagagagaaggattctgggaaaggaaggggccactttggagcccaagcagcagaggattctgggggaagaatcaggagcccctagtcccagtccacaaaaacatgggagcctggttgatgaggaagtttggggtctgcctgaggagatagaggagcttagggtgccctcccttgtaccccaggagaggagcattgttggccaggaggaggctgggacatggagcttgtgggggaaggaggatgagagtcttctggatgaggagtttgagcttggctgggtccagggcccagcactgactcccgtccctgaggaggaggaagaagaggaagagggggctccgattgggacccctagggatcctggagatggttgtccttcccccgacatccctcctgaaccccctccaacacacctgaggccctgccctgccagccagctccctggactcctgtcccatggcctcctggccggcctctcctttgcagtggggtcctcctctggcctcctgcccctcctgctgctgctgctgcttccattgctggcagcccagggtgggggtggcctgcaggcagcgctgctggcccttgaggtggggctggtgggtctgggggcctcctacctgctcctttgtacagccctgcacctgccctccagtcttttcctactcctggcccagggtaccgcactgggggccgtcctgggcctgagctggcgccgaggcctcatgggtgttcccctgggccttggagctgcctggctcttagcttggccaggcctagctctacctctggtggctatggcagcggggggcagatgggtgcggcagcagggcccccgggtgcgccggggcatatctcgactctggttgcgggttctgctgcgcctgtcacccatggccttccgggccctgcagggctgtggggctgtgggggaccggggtctgtttgcactgtaccccaaaaccaacaaggatggcttccgcagccgcctgcccgtccctgggccccggcggcgtaatccccgcaccacccaacacccattagctctgttggcaagggtctgggtcctgtgcaagggctggaactggcgtctggcacgggccagccagggtttagcatcccacttgcccccgtgggccatccacacactggccagctggggcctgcttcggggtgaacggcccacccgaatcccccggctactaccacgcagccagcgccagctagggccccctgcctcccgccagccactgccagggactctagccgggcggaggtcacgcacccgccagtcccgggccctgcccccctggaggtagctgactccagcccttccagcccaaatctagagcattgagcactttatctcccacgactcagtgaagtttctccagtccctagtcctctcttttcacccaccttcctcagtttgctcacttaccccaggcccagcccttcggacctctagacaggcagcctcctcagctgtggagtccagcagtcactctgtgttctcctggcgctcctcccctaagttattgctgttcgcccgctgtgtgtgctcatcctcaccctcattgactcaggcctggggccaggggtggtggagggtgggaagagtcatgttttttttctcctctttgattttgtttttctgtctcccttccaacctgtccccttccccccaccaaaaaaagaaaaagacaaacacaaataaaatatctgagcggaactgtg

SEQ ID NO: 189641 - protein, 213 aa, Artificial Sequence
  derived and/or modified sequence
MAETYDFLFKFLVIGSAGTGKSCLLHQFIENKFKQDSNHTIGVEFGSRVVNVGGKTVKLQIWDTAGQERFRSVTRSYYRGAAGALLVYDITSRETYNSLAAWLTDARTLASPNIVVILCGNKKDLDPEREVTFLEASRFAQENELMFLETSALTGENVEEAFLKCARTILNKIDSGELDPERMGSGIQYGDASLRQLRQPRSAQAVAPQPCGC

SEQ ID NO: 189642 - protein, 121 aa, Artificial Sequence
  derived and/or modified sequence
MAETYDFLFKFLVIGSAGTGKSCLLHQFIENKFKQDSNHTIGVEFGSRVVNVGGKTVKLQIWDTAGQERFRSVTRSYYRGAAGALLVYDITRADVPGDQRSHRRERGGGVPQVCPHYPQQD

SEQ ID NO: 189643 - DNA, 642 bp, Artificial Sequence
  derived and/or modified sequence
atggctgagacatacgactttctttttaagttccttgtgattgggagcgctggaaccgggaaatcatgcttactgcaccagttcattgaaaataaattcaaacaggacagcaatcatactattggggtggagttcgggagccgcgtcgtgaatgtgggcggcaaaacagttaagttacagatctgggatacagctggacaggaacggttcaggagtgtgacccgcagctattatagaggagccgccggcgcgcttctcgtgtatgacatcacctcacgtgagacctataactcgctagccgcttggctgacggacgccagaacactcgcctcccctaatatcgttgtcattctctgcggaaacaagaaggacttggatcctgaaagagaggtaacgttcttagaggcaagccggtttgcccaagaaaatgaactgatgttccttgaaacaagtgccctgacaggcgaaaatgtggaggaagcattcttgaaatgcgcccgaacaattctgaataagattgatagtggggaactggaccccgagagaatgggatcagggatccagtatggggacgcctcacttagacagcttcggcagcccagatctgcacaggccgtcgctcctcagccatgtgggtgctag

SEQ ID NO: 189644 - DNA, 366 bp, Artificial Sequence
  derived and/or modified sequence
atggcggagacttatgactttttgtttaagttcctcgtaattggcagcgcaggtactggcaaatcttgtctattacatcagttcatcgagaacaagttcaagcaggactccaatcatactattggcgtggagtttggctcacgagtggttaacgttggtggcaaaaccgtgaagttgcagatctgggataccgccggacaagagcggttcaggtcagtcacccggagctattaccgtggtgccgcgggagccctcttagtttatgacatcactcgagctgatgttcctggggatcaacggagtcataggagggagcgcggagggggagtgccccaagtgtgtcctcactacccacaacaggactag

SEQ ID NO: 189645 - DNA, 642 bp, Artificial Sequence
  derived and/or modified sequence
atggccgagacctatgacttcctgttcaagttcctggtgattggcagcgctggcaccgggaagagctgcctgctgcaccagttcatcgagaacaagttcaagcaggacagcaaccacaccatcggcgtggagtttggcagccgggtggtgaatgtgggcggcaagacagtgaagctgcagatctgggacacagctggccaggagcgcttccgctctgtgaccaggagctactacagaggagctgctggggccctgctggtgtatgacatcaccagccgggagacctacaacagcctggccgcctggctgacagatgcccggaccctggccagccccaacatcgtggtgatcctgtgtggcaacaagaaggacctggaccctgagcgggaggtgaccttcctggaggccagcagatttgcccaggagaatgagctgatgttcctggagaccagcgccctgaccggggagaatgtggaggaggccttcctgaagtgtgcccggaccatcctgaacaagattgattctggagagctggaccctgagaggatgggcagcggcatccagtatggagatgccagcctgcggcagctgcggcagcccaggtctgcccaggccgtggccccccagccctgtggctgctag

SEQ ID NO: 189646 - DNA, 366 bp, Artificial Sequence
  derived and/or modified sequence
atggccgagacctatgacttcctgttcaagttcctggtgattggcagcgctggcaccgggaagagctgcctgctgcaccagttcatcgagaacaagttcaagcaggacagcaaccacaccatcggcgtggagtttggcagccgggtggtgaatgtgggcggcaagacagtgaagctgcagatctgggacacagctggccaggagcgcttccgctctgtgaccaggagctactacagaggagctgctggggccctgctggtgtatgacatcaccagggcagatgtgcctggggaccagaggagccacagaagagagcggggcggcggcgtgccccaggtgtgcccccactacccccagcaggactag

SEQ ID NO: 189647 - DNA, 1140 bp, Artificial Sequence
  derived and/or modified sequence
ccggggagtaggaaggagccggggctgtagccggagtggagcggctgccagccgaggagcaggcgcggccgcggcgccatattgcggccctcagcggccgcgaccgagtcatggctgagacctacgacttcctcttcaaattcctggtgattggcagtgcaggaactggcaaatcatgtctccttcatcagttcattgagaataagttcaaacaggactccaaccacacaatcggcgtggagtttggatcccgggtggtcaacgtgggtgggaagactgtgaagctacagatttgggacacggctggccaggagcggtttcggtcagtgacgcggagttattaccgaggggcggctggagccctgctggtgtacgacatcaccagccgggagacatacaactcactggctgcctggctgacggatgcccgcaccctggccagccccaacatcgtggtcatcctctgtggcaacaagaaggacctggaccctgagcgggaggtcactttcctggaggcctcccgctttgcccaggagaatgagctgatgttcctggagaccagcgctctcacaggcgagaacgtggaggaggcgttcctcaagtgtgcccgcactatcctcaacaagattgactcaggcgagctagacccggagaggatgggctctggcattcagtacggggatgcgtccctccgccagcttcggcagcctcggagtgcccaggccgtggcccctcagccgtgtggctgctgagctctgtggagccagctcacctgttctccaggaccagccctgctggggcccaggcccaggctctgagaggccgtgtcctaacctgccctggccccggagaagctacgttgccacctgtcccccttccctggcctggtggggcctggctttggggcaagactgagccacgggggaagggggaatcccgtacctgctgctgcttcctctgtcttggctaacgtctgtccccctgaacccctaaccataccccaagagctcccaaagcctgagaccagggtcatttgtccccaactccccatctggccctgctgttgctagtacctgttatttattacctggaggcctgtccagcacccaccctacccccataaagcattgtttacacctg

SEQ ID NO: 189648 - DNA, 943 bp, Artificial Sequence
  derived and/or modified sequence
ggctgccagccgaggagcaggcgcggccgcggcgccatattgcggccctcagcggccgcgaccgagtcatggctgagacctacgacttcctcttcaaattcctggtgattggcagtgcaggaactggcaaatcatgtctccttcatcagttcattgagaataagttcaaacaggactccaaccacacaatcggcgtggagtttggatcccgggtggtcaacgtgggtgggaagactgtgaagctacagatttgggacacggctggccaggagcggtttcggtcagtgacgcggagttattaccgaggggcggctggagccctgctggtgtacgacatcaccagagctgatgttcctggagaccagcgctctcacaggcgagaacgtggaggaggcgttcctcaagtgtgcccgcactatcctcaacaagattgactcaggcgagctagacccggagaggatgggctctggcattcagtacggggatgcgtccctccgccagcttcggcagcctcggagtgcccaggccgtggcccctcagccgtgtggctgctgagctctgtggagccagctcacctgttctccaggaccagccctgctggggcccaggcccaggctctgagaggccgtgtcctaacctgccctggccccggagaagctacgttgccacctgtcccccttccctggcctggtggggcctggctttggggcaagactgagccacgggggaagggggaatcccgtacctgctgctgcttcctctgtcttggctaacgtctgtccccctgaacccctaaccataccccaagagctcccaaagcctgagaccagggtcatttgtccccaactccccatctggccctgctgttgctagtacctgttatttattacctggaggcctgtccagcacccaccctacccccataaagcattgtttacacctg

SEQ ID NO: 189649 - DNA, 642 bp, Artificial Sequence
  derived and/or modified sequence
atggccgagacctacgacttcctgttcaagttcctggtgatcggctctgcaggaaccggtaaaagctgtctgctgcaccaatttatcgagaacaaattcaagcaagattcaaaccacactattggggttgagtttggaagtcgcgtcgtaaatgtcggcgggaagaccgtaaagctgcagatttgggacactgcagggcaggagcgttttcgctcagttacacgtagctattaccgcggggctgcaggcgctttgctggtttacgatataacttctcgcgaaacttacaatagcttagcagcatggctgacagatgcacggacacttgcctcacccaatattgttgtcattctgtgcggtaacaaaaaggacctggatccggaaagggaggttacatttctggaggccagtaggttcgcgcaggaaaatgagcttatgttcttagaaacctccgccttaactggggagaacgtcgaagaggcattcctgaagtgcgcgcgaaccattcttaataaaattgatagtggggagctggatcctgagcgaatgggatctgggatccagtacggggatgcctcattgagacagctcagacagcccaggagcgcccaggcagtcgccccacagccatgtggctgttag

SEQ ID NO: 189650 - DNA, 366 bp, Artificial Sequence
  derived and/or modified sequence
atggccgagacctacgacttcctgttcaagttcctggtgatcggctcggccgggacaggaaaaagttgtttattacaccaatttatcgaaaataaatttaaacaggatagcaaccatacaatcggggttgagtttggcagcagggtggtgaatgtgggcggaaagactgtgaagttgcagatctgggacactgccggacaggagaggtttcgtagcgtgactagatcttattaccgtggggccgccggagcactgctcgtctacgatattaccagagccgatgtgccgggagaccagaggtctcaccggagggaacggggcgggggagttcctcaggtgtgccctcactaccctcagcaggactag

SEQ ID NO: 189651 - DNA, 642 bp, Artificial Sequence
  derived and/or modified sequence
atggcagaaacttacgactttctgttcaagttcctcgttataggttcagctggcacggggaagagctgcctcttacaccagtttattgaaaataaattcaaacaggattctaatcacacgatcggggtggagttcggatcaagagttgttaacgtagggggtaaaactgtgaagctgcagatctgggacaccgctggccaagaacgatttcgctctgtgacgcgatcctactataggggggctgctggggctttgttggtatatgatatcactagccgcgagacttacaattcgctggcagcctggctcacggacgctaggactctcgcctcaccaaacattgtggtaattctttgtggaaacaaaaaggaccttgaccccgagcgagaagtcacgtttctcgaagcaagccggtttgctcaggaaaatgagctcatgtttttggagacatcagctttaactggagagaacgtggaggaagcttttctgaaatgtgccaggaccatcctcaacaagatcgactcgggggaactagaccctgagcgcatgggttcaggcatccagtacggagacgcaagtctgagacaactgagacaacccagaagcgcacaggcagtcgcccctcagccatgcggctgttag

SEQ ID NO: 189652 - DNA, 366 bp, Artificial Sequence
  derived and/or modified sequence
atggcagagacgtacgactttctattcaaattccttgtgatagggagtgcaggcacaggcaaaagttgcttactgcaccagtttatagagaacaaattcaagcaagatagtaaccatacaataggcgtcgagttcggcagccgggtggtgaacgtagggggtaagactgtgaagctgcagatctgggatacagcgggtcaggagaggttcaggtctgttaccaggtcctactatcggggagccgctggagccttactggtgtacgacatcacacgggctgacgtgcctggggaccagcgaagtcatcggagggaacgcggagggggtgtgccccaggtctgcccgcattatccacaacaagattag

SEQ ID NO: 189653 - DNA, 642 bp, Artificial Sequence
  derived and/or modified sequence
atggccgagacctacgacttcctgttcaagttcctggtgatcggcagcgccggcaccggcaagagctgcctgctgcaccagttcatcgagaacaagttcaagcaggacagcaaccacaccatcggcgtggagttcggcagcagagtggtgaacgtgggcggcaagaccgtgaagctgcagatctgggacaccgccggccaggagagattcagaagcgtgaccagaagctactacagaggcgccgccggcgccctgctggtgtacgacatcaccagcagagagacctacaacagcctggccgcctggctgaccgacgccagaaccctggccagccccaacatcgtggtgatcctgtgcggcaacaagaaggacctggaccccgagagagaggtgaccttcctggaggccagcagattcgcccaggagaacgagctgatgttcctggagaccagcgccctgaccggcgagaacgtggaggaggccttcctgaagtgcgccagaaccatcctgaacaagatcgacagcggcgagctggaccccgagagaatgggcagcggcatccagtacggcgacgccagcctgagacagctgagacagcccagaagcgcccaggccgtggccccccagccctgcggctgctag

SEQ ID NO: 189654 - DNA, 366 bp, Artificial Sequence
  derived and/or modified sequence
atggccgagacctacgacttcctgttcaagttcctggtgatcggcagcgccggcaccggcaagagctgcctgctgcaccagttcatcgagaacaagttcaagcaggacagcaaccacaccatcggcgtggagttcggcagcagagtggtgaacgtgggcggcaagaccgtgaagctgcagatctgggacaccgccggccaggagagattcagaagcgtgaccagaagctactacagaggcgccgccggcgccctgctggtgtacgacatcaccagagccgacgtgcccggcgaccagagaagccacagaagagagagaggcggcggcgtgccccaggtgtgcccccactacccccagcaggactag

SEQ ID NO: 189655 - protein, 603 aa, Artificial Sequence
  derived and/or modified sequence
MRRRAARGPGPPPPGPGLSRLPLPLLLLLALGTRGGCAAPAPAPRAEDLSLGVEWLSRFGYLPPADPTTGQLQTQEELSKAITAMQQFGGLEATGILDEATLALMKTPRCSLPDLPVLTQARRRRQAPAPTKWNKRNLSWRVRTFPRDSPLGHDTVRALMYYALKVWSDIAPLNFHEVAGSAADIQIDFSKADHNDGYPFDGPGGTVAHAFFPGHHHTAGDTHFDDDEAWTFRSSDAHGMDLFAVAVHEFGHAIGLSHVAAAHSIMRPYYQGPVGDPLRYGLPYEDKVRVWQLYGVRESVSPTAQPEEPPLLPEPPDNRSSAPPRKDVPHRCSTHFDAVAQIRGEAFFFKGKYFWRLTRDRHLVSLQPAQMHRFWRGLPLHLDSVDAVYERTSDHKIVFFKGDRYWVFKDNNVEEGYPRPVSDFSLPPGGIDAAFSWAHNDRTYFFKDQLYWRYDDHTRHMDPGYPAQSPLWRGVPSTLDDAMRWSDGASYFFRGQEYWKVLDGELEVAPGYPQSTARDWLVCGDSQADGSVAAGVDAAEGPRAPPGQHDQSRSEDGYEVCSCTSGASSPPGAPGPLVAATMLLLLPPLSPGALWTAAQALTL

SEQ ID NO: 189656 - protein, 519 aa, Artificial Sequence
  derived and/or modified sequence
MQQFGGLEATGILDEATLALMKTPRCSLPDLPVLTQARRRRQAPAPTKWNKRNLSWRVRTFPRDSPLGHDTVRALMYYALKVWSDIAPLNFHEVAGSAADIQIDFSKADHNDGYPFDGPGGTVAHAFFPGHHHTAGDTHFDDDEAWTFRSSDAHGMDLFAVAVHEFGHAIGLSHVAAAHSIMRPYYQGPVGDPLRYGLPYEDKVRVWQLYGVRESVSPTAQPEEPPLLPEPPDNRSSAPPRKDVPHRCSTHFDAVAQIRGEAFFFKGKYFWRLTRDRHLVSLQPAQMHRFWRGLPLHLDSVDAVYERTSDHKIVFFKGDRYWVFKDNNVEEGYPRPVSDFSLPPGGIDAAFSWAHNDRTYFFKDQLYWRYDDHTRHMDPGYPAQSPLWRGVPSTLDDAMRWSDGASYFFRGQEYWKVLDGELEVAPGYPQSTARDWLVCGDSQADGSVAAGVDAAEGPRAPPGQHDQSRSEDGYEVCSCTSGASSPPGAPGPLVAATMLLLLPPLSPGALWTAAQALTL

SEQ ID NO: 189657 - DNA, 1812 bp, Artificial Sequence
  derived and/or modified sequence
atgagaagaagagccgccagaggccccggcccccccccccccggccccggcctgagcagactgcccctgcccctgctgctgctgctggccctgggcaccagaggcggctgcgccgcccccgcccccgcccccagagccgaggacctgagcctgggcgtggagtggctgagcagattcggctacctgccccccgccgaccccaccaccggccagctgcagacccaggaggagctgagcaaggccatcaccgccatgcagcagttcggcggcctggaggccaccggcatcctggacgaggccaccctggccctgatgaagacccccagatgcagcctgcccgacctgcccgtgctgacccaggccagaagaagaagacaggcccccgcccccaccaagtggaacaagagaaacctgagctggagagtgagaaccttccccagagacagccccctgggccacgacaccgtgagagccctgatgtactacgccctgaaggtgtggagcgacatcgcccccctgaacttccacgaggtggccggcagcgccgccgacatccagatcgacttcagcaaggccgaccacaacgacggctaccccttcgacggccccggcggcaccgtggcccacgccttcttccccggccaccaccacaccgccggcgacacccacttcgacgacgacgaggcctggaccttcagaagcagcgacgcccacggcatggacctgttcgccgtggccgtgcacgagttcggccacgccatcggcctgagccacgtggccgccgcccacagcatcatgagaccctactaccagggccccgtgggcgaccccctgagatacggcctgccctacgaggacaaggtgagagtgtggcagctgtacggcgtgagagagagcgtgagccccaccgcccagcccgaggagccccccctgctgcccgagccccccgacaacagaagcagcgccccccccagaaaggacgtgccccacagatgcagcacccacttcgacgccgtggcccagatcagaggcgaggccttcttcttcaagggcaagtacttctggagactgaccagagacagacacctggtgagcctgcagcccgcccagatgcacagattctggagaggcctgcccctgcacctggacagcgtggacgccgtgtacgagagaaccagcgaccacaagatcgtgttcttcaagggcgacagatactgggtgttcaaggacaacaacgtggaggagggctaccccagacccgtgagcgacttcagcctgccccccggcggcatcgacgccgccttcagctgggcccacaacgacagaacctacttcttcaaggaccagctgtactggagatacgacgaccacaccagacacatggaccccggctaccccgcccagagccccctgtggagaggcgtgcccagcaccctggacgacgccatgagatggagcgacggcgccagctacttcttcagaggccaggagtactggaaggtgctggacggcgagctggaggtggcccccggctacccccagagcaccgccagagactggctggtgtgcggcgacagccaggccgacggcagcgtggccgccggcgtggacgccgccgagggccccagagccccccccggccagcacgaccagagcagaagcgaggacggctacgaggtgtgcagctgcaccagcggcgccagcagcccccccggcgcccccggccccctggtggccgccaccatgctgctgctgctgccccccctgagccccggcgccctgtggaccgccgcccaggccctgaccctgtag

SEQ ID NO: 189658 - DNA, 1560 bp, Artificial Sequence
  derived and/or modified sequence
atgcagcagttcggcggcctggaggccaccggcatcctggacgaggccaccctggccctgatgaagacccccagatgcagcctgcccgacctgcccgtgctgacccaggccagaagaagaagacaggcccccgcccccaccaagtggaacaagagaaacctgagctggagagtgagaaccttccccagagacagccccctgggccacgacaccgtgagagccctgatgtactacgccctgaaggtgtggagcgacatcgcccccctgaacttccacgaggtggccggcagcgccgccgacatccagatcgacttcagcaaggccgaccacaacgacggctaccccttcgacggccccggcggcaccgtggcccacgccttcttccccggccaccaccacaccgccggcgacacccacttcgacgacgacgaggcctggaccttcagaagcagcgacgcccacggcatggacctgttcgccgtggccgtgcacgagttcggccacgccatcggcctgagccacgtggccgccgcccacagcatcatgagaccctactaccagggccccgtgggcgaccccctgagatacggcctgccctacgaggacaaggtgagagtgtggcagctgtacggcgtgagagagagcgtgagccccaccgcccagcccgaggagccccccctgctgcccgagccccccgacaacagaagcagcgccccccccagaaaggacgtgccccacagatgcagcacccacttcgacgccgtggcccagatcagaggcgaggccttcttcttcaagggcaagtacttctggagactgaccagagacagacacctggtgagcctgcagcccgcccagatgcacagattctggagaggcctgcccctgcacctggacagcgtggacgccgtgtacgagagaaccagcgaccacaagatcgtgttcttcaagggcgacagatactgggtgttcaaggacaacaacgtggaggagggctaccccagacccgtgagcgacttcagcctgccccccggcggcatcgacgccgccttcagctgggcccacaacgacagaacctacttcttcaaggaccagctgtactggagatacgacgaccacaccagacacatggaccccggctaccccgcccagagccccctgtggagaggcgtgcccagcaccctggacgacgccatgagatggagcgacggcgccagctacttcttcagaggccaggagtactggaaggtgctggacggcgagctggaggtggcccccggctacccccagagcaccgccagagactggctggtgtgcggcgacagccaggccgacggcagcgtggccgccggcgtggacgccgccgagggccccagagccccccccggccagcacgaccagagcagaagcgaggacggctacgaggtgtgcagctgcaccagcggcgccagcagcccccccggcgcccccggccccctggtggccgccaccatgctgctgctgctgccccccctgagccccggcgccctgtggaccgccgcccaggccctgaccctgtag

SEQ ID NO: 189659 - DNA, 1812 bp, Artificial Sequence
  derived and/or modified sequence
atgaggcgccgcgctgcccgcggccctggccctccaccaccaggacccgggctatcccgcctgccgcttccactcctattgctcctggcactgggaacacgaggtggttgtgcagcccctgcgccggctccgcgagctgaggacctgtccctgggggttgaatggttgagcagattcgggtacctacctcctgccgacccaacaaccgggcagcttcagacgcaggaagagctgtcaaaggctatcacagcaatgcagcaattcggaggactagaggctacaggaatactggatgaggccaccctcgccctcatgaagacaccgcgctgttccctgccagacctacccgtgcttacgcaggcccgccgtaggaggcaagctccggccccaaccaaatggaataaacgtaatctgtcttggcgcgttagaacattcccaagagattcccctctgggccatgacacagtgagggcactgatgtactacgccctgaaggtctggagtgatattgctcctctcaactttcacgaggtggcaggatctgccgctgacatccagatagattttagcaaagctgaccacaatgatggctatcctttcgatggacctggtggcactgtcgcgcatgcctttttccccgggcatcatcatactgcaggcgacactcacttcgacgacgatgaggcatggacttttaggtccagcgatgctcacggcatggatttgtttgctgtggccgtgcatgagtttggtcacgctatcggtcttagccacgtcgccgccgcacactctataatgcgcccttattatcagggccccgtgggagatcctctgcggtacggcctgccctacgaagacaaagtgagagtctggcagctatacggggtgcgcgagagcgtttccccaacggctcaaccggaggagcccccccttttgccagagcctccagataaccggagttcggcacccccaagaaaggacgtcccccatcgttgtagtacacatttcgatgccgttgcacagattcggggagaagctttcttttttaaaggaaaatatttctggcgtctgactcgggaccgccatcttgtgagcctgcagccagctcaaatgcatcggttctggagaggactcccgcttcatctcgattcggtggatgctgtgtacgaaaggacctcagaccacaagatcgtcttctttaagggcgatcgttactgggtgttcaaggacaataatgtggaggaaggctatcctcggccagtgagcgacttcagcttgccaccaggcggcatcgacgctgctttttcgtgggcccataatgatcggacttatttttttaaggatcagctttattggaggtacgatgaccatacaagacacatggaccctggatatcctgcacagtctccactttggcgtggggtaccgagtacactggatgatgcaatgcgttggtcggacggggcctcttacttttttcggggccaggaatattggaaggtgctggatggagagctggaggttgccccgggctacccccagagcacagcccgtgattggttggtttgtggggacagccaggccgacgggagcgtggccgccggcgtcgacgccgctgaggggccacgggctccccccggtcaacacgatcaatcaaggtccgaagatgggtacgaggtgtgctcttgtacctccggtgcctcttctcctcccggggcacccggcccattagtcgcggcaactatgctcttgttgctccccccgctcagcccgggggctctgtggactgccgcacaggcgttgactctttag

SEQ ID NO: 189660 - DNA, 1560 bp, Artificial Sequence
  derived and/or modified sequence
atgcaacagtttggaggtttggaggcaaccgggatacttgacgaggctactcttgctctgatgaaaactccgcggtgttccctaccagatctgccggtgttgactcaggcccgacgcaggaggcaggcccccgcccctacaaagtggaacaagagaaatctttcttggcgtgtcagaactttcccccgtgattctcccctgggtcacgacacagttcgtgcactcatgtattatgctctgaaagtgtggtctgatatcgcacctctcaatttccacgaagtcgccggtagtgcggctgacatccaaatcgatttcagtaaggctgatcacaatgacggctacccgttcgatggacctggcggcaccgtcgcccatgcatttttcccaggccaccatcacacagcaggcgacacgcactttgatgatgatgaggcctggactttccgtagctctgacgcccatggtatggatctgttcgccgtggccgtacacgaattcggacacgcaattgggctctctcacgtggccgcagcccattccatcatgagaccgtactaccagggaccagtaggtgaccctctgcgttatgggcttccctacgaagacaaagtgagggtctggcaactgtatggcgttcgagagtcagtttcccctaccgctcagcccgaagaacctccactcctgccagaaccgcctgacaacaggtcgtctgcccccccgagaaaggacgtgccacatcgctgttctacacacttcgatgcagtcgcccaaattcgtggcgaagctttctttttcaaggggaaatacttctggaggcttactagggatcggcacctggtctcgttgcagccagcgcagatgcacagattttggcgtggcttgccactgcacctggacagtgtggacgcggtctacgagcgcacatccgaccacaaaatcgtcttctttaaaggggaccgatactgggttttcaaagataacaacgtggaggaaggatatccaagacctgtctctgattttagcctcccccctgggggtattgacgctgcattcagctgggcccataacgaccgaacttatttcttcaaagaccagctgtactggcgctacgacgaccacaccaggcacatggacccaggctacccagcgcagagtcccctgtggcgcggcgtgccttccactctggatgacgctatgaggtggtccgatggggcatcatactttttccgtggtcaagagtactggaaggtgttggatggtgaacttgaggtggctcccggttatccacaatcaaccgctagagactggctggtgtgcggagacagccaggcggacggatcagtggcagccggggtggatgccgcagagggtccccgggcgccaccaggacagcatgaccagtcacgtagcgaggacggctatgaagtatgttcatgcacctccggagcctccagccccccaggagcccccggcccgcttgtggccgcaacaatgctgttgctccttccgcctctcagcccaggcgccctctggactgctgctcaggcactgaccctgtag

SEQ ID NO: 189661 - DNA, 1812 bp, Artificial Sequence
  derived and/or modified sequence
atgagaagaagagctgcccggggccctggccccccacctcctggccctggcctgagccggctgcccctgcccctgctgctgctgctggccctgggcacccggggcggctgtgccgccccagccccagcccccagggctgaggacctgagcctgggcgtggagtggctgagcagatttggctacctgcccccagctgaccccaccaccggccagctgcagacccaggaggagctgagcaaggccatcacagccatgcagcagtttggaggcctggaggccaccggcatcctggatgaggccaccctggccctgatgaagaccccccgctgcagcctgcctgacctgcctgtgctgacccaggccaggagaagacggcaggccccagcccccaccaagtggaacaagaggaacctgtcctggagggtgaggaccttcccccgggacagccccctgggccatgacacagtgcgggccctgatgtactatgccctgaaggtgtggagcgacatcgcccccctgaacttccacgaggtggccggcagcgctgctgacatccagattgacttcagcaaggctgaccacaatgatggctacccctttgatggccctgggggcaccgtggcccacgccttcttccctggccaccaccacacagctggggacacccactttgatgatgatgaggcctggaccttccgcagcagtgatgcccacggcatggacctgtttgctgtggccgtgcatgaatttggccacgccatcggcctgagccacgtggccgccgcccacagcatcatgaggccctactaccagggccctgtgggggaccccctgcgctatggcctgccctatgaggacaaggtgcgggtgtggcagctgtatggagtgcgggagagcgtgagccccacagcccagcctgaggagccccccctgctgcctgagcccccagacaacagaagcagcgccccacccaggaaggatgtgccccaccgctgcagcacccactttgatgctgtggcccagatccggggggaggccttcttcttcaagggcaagtacttctggaggctgacccgggacagacacctggtgtccctgcagcctgcccagatgcaccgcttctggaggggcctgcccctgcacctggacagcgtggatgctgtgtatgaaagaacaagtgaccacaagatcgtgttcttcaagggggaccgctactgggtgttcaaggacaacaacgtggaggagggctaccccaggcctgtgtctgacttcagcctgcccccaggcggcattgatgctgccttctcctgggcccacaatgacaggacctacttcttcaaggaccagctgtactggaggtatgatgaccacaccaggcacatggaccccggctacccagcccagagccccctgtggaggggcgtgcccagcaccctggatgatgccatgcgctggagcgatggagccagctacttcttccggggccaggagtactggaaggtgctggatggagagctggaggtggcccctggctacccccagagcacagcccgggactggctggtgtgtggggacagccaggctgatggctctgtggccgccggcgtggatgctgctgagggcccccgggcccctcctggccagcacgaccagagccgctcagaagatggctatgaggtgtgcagctgcaccagcggggccagcagccccccaggggcccctggccccctggtggccgccaccatgctgctgctgctgccccccctgagccctggggccctgtggacagctgcccaggccctgaccctgtag

SEQ ID NO: 189662 - DNA, 1560 bp, Artificial Sequence
  derived and/or modified sequence
atgcagcagtttggaggcctggaggccaccggcatcctggatgaggccaccctggccctgatgaagaccccccgctgcagcctgcctgacctgcctgtgctgacccaggccaggagaagacggcaggccccagcccccaccaagtggaacaagaggaacctgtcctggagggtgaggaccttcccccgggacagccccctgggccatgacacagtgcgggccctgatgtactatgccctgaaggtgtggagcgacatcgcccccctgaacttccacgaggtggccggcagcgctgctgacatccagattgacttcagcaaggctgaccacaatgatggctacccctttgatggccctgggggcaccgtggcccacgccttcttccctggccaccaccacacagctggggacacccactttgatgatgatgaggcctggaccttccgcagcagtgatgcccacggcatggacctgtttgctgtggccgtgcatgaatttggccacgccatcggcctgagccacgtggccgccgcccacagcatcatgaggccctactaccagggccctgtgggggaccccctgcgctatggcctgccctatgaggacaaggtgcgggtgtggcagctgtatggagtgcgggagagcgtgagccccacagcccagcctgaggagccccccctgctgcctgagcccccagacaacagaagcagcgccccacccaggaaggatgtgccccaccgctgcagcacccactttgatgctgtggcccagatccggggggaggccttcttcttcaagggcaagtacttctggaggctgacccgggacagacacctggtgtccctgcagcctgcccagatgcaccgcttctggaggggcctgcccctgcacctggacagcgtggatgctgtgtatgaaagaacaagtgaccacaagatcgtgttcttcaagggggaccgctactgggtgttcaaggacaacaacgtggaggagggctaccccaggcctgtgtctgacttcagcctgcccccaggcggcattgatgctgccttctcctgggcccacaatgacaggacctacttcttcaaggaccagctgtactggaggtatgatgaccacaccaggcacatggaccccggctacccagcccagagccccctgtggaggggcgtgcccagcaccctggatgatgccatgcgctggagcgatggagccagctacttcttccggggccaggagtactggaaggtgctggatggagagctggaggtggcccctggctacccccagagcacagcccgggactggctggtgtgtggggacagccaggctgatggctctgtggccgccggcgtggatgctgctgagggcccccgggcccctcctggccagcacgaccagagccgctcagaagatggctatgaggtgtgcagctgcaccagcggggccagcagccccccaggggcccctggccccctggtggccgccaccatgctgctgctgctgccccccctgagccctggggccctgtggacagctgcccaggccctgaccctgtag

SEQ ID NO: 189663 - DNA, 1812 bp, Artificial Sequence
  derived and/or modified sequence
atgcggcggcgggccgcccggggccccggcccccccccccccggccccgggctgagcagattaccactccccctcttattgcttctggccttagggactcggggagggtgtgccgcgccagctccagctccacgagctgaagacctctccctgggcgttgaatggctgtctcgctttggatatctcccccctgctgatcccacaaccggccaactccagacacaagaggaactgagcaaagctatcacagcaatgcaacagtttggtggcctggaagctacggggattttggacgaagctacacttgccttaatgaagacccccaggtgcagcctgcccgacctgccggttctgacacaggcccgtcggcggaggcaagcacctgctccaacaaaatggaataagagaaacctgagctggcgcgtgcgcacattcccccgggatagcccattgggccacgataccgtgagagccctcatgtattatgccctgaaagtgtggtctgatatagcaccattaaacttccacgaagtggctgggagcgcagcagatatccagatcgacttttccaaggcggatcataacgatggctatcccttcgatggccctggaggtacagtggcccacgccttcttccctggacaccatcataccgctggggacacccacttcgacgacgatgaggcatggacctttaggagtagcgatgcacacgggatggatctgtttgccgtagctgtgcatgaattcggccatgcaattgggctatcccacgtggcggctgcacatagtattatgagaccctattaccaggggccagtgggagatccacttcgctatgggttgccgtacgaggacaaggttcgagtgtggcagctttacggggtccgagagtcggtatctcccactgcgcagccagaagagcctccccttcttccagaacccccagataataggtcttctgcaccaccaaggaaggatgttccgcaccgctgctcaactcatttcgatgccgtcgctcaaatacgcggcgaagcctttttctttaaggggaaatacttttggcgcctgactcgagatcgacacctggtctccctgcaacctgctcagatgcataggttctggagaggactgcctcttcatcttgatagtgtggacgcagtgtacgagcgcacatcagatcataagatcgttttctttaagggggaccgatattgggtgttcaaagacaacaatgtggaagagggctatccacgacccgtgtccgattttagcctgccacccggtggtatagacgccgctttctcttgggcccacaacgatagaacatacttttttaaggatcaactttactggcgctatgatgatcacaccaggcatatggatccaggttaccctgcacagtctcctctgtggagaggagtgccatcgacactggacgacgctatgagatggtctgatggggcctcctatttctttaggggacaggagtattggaaggtccttgacggcgagctcgaagtcgctcctggatatccccaatctacagccagagactggcttgtatgtggtgattcacaggctgatggcagcgtcgctgccggagtggacgccgccgaaggtccgcgcgccccaccagggcagcacgaccagtcccgttccgaagacggatatgaggtatgttcctgtacctccggcgcttcgtcacccccaggcgccccgggacccttggtggccgcgacaatgcttctgctgctgcctccgctttccccgggagctctctggacggccgcccaggccctaaccctgtag

SEQ ID NO: 189664 - DNA, 1560 bp, Artificial Sequence
  derived and/or modified sequence
atgcagcagttcggcggcctggaggccaccggcatcctggacgaggctactttagcgcttatgaagactccaaggtgttcattacccgatctgcctgtgttgacgcaagctaggcggagaaggcaagcacccgcccctactaaatggaataaaaggaatcttagttggcgcgtcaggactttccctcgagattcccctttgggccatgatactgttcgcgccctcatgtactacgctctgaaagtttggagtgacattgctccactaaattttcatgaggtggcaggatctgctgcagatattcagatcgacttttccaaggctgaccataacgatggctaccccttcgatggtccgggaggaaccgtggcccacgcctttttcccaggccatcaccacactgccggggacactcacttcgatgacgacgaagcgtggacctttcgttcctctgacgcgcatggtatggatctgttcgcggtagccgtccatgagtttggtcacgcaattggactctcacacgtggcggcagcgcactctatcatgcgtccttattatcagggacctgtgggggatccgctacgatacggtttaccatacgaagacaaagtccgcgtctggcagctgtacggagtgcgcgagtctgtctctcccaccgctcagcccgaagagccccccctgcttccagaacctcccgataacaggagctccgcgccccctaggaaggatgtgccccatcgctgtagtacccactttgatgccgtggcccaaattagaggcgaggcttttttcttcaaagggaagtatttttggagattgactcgagaccgccacctcgtgagtctacaaccagcccagatgcataggttctggaggggtctaccattgcatctcgattccgtcgacgccgtctatgaaaggacgtctgaccacaagatagtcttttttaagggtgaccgttactgggttttcaaggataacaacgtcgaggaaggatacccccgccccgtgagtgatttttccctgccacctggcggcatcgatgctgctttcagctgggcgcataatgatcggacctacttctttaaagaccagttgtattggcgctatgatgaccatactaggcacatggatcccggataccccgcgcagagcccactgtggcggggggtgccctcaacacttgacgatgctatgagatggtcggacggtgcttcctattttttccgcggccaggaatattggaaggttctggacggagaactggaggtcgcccctggctaccctcagagcacagcacgggactggctcgtgtgtggagacagtcaagcggacggctcagtcgccgccggcgtggatgccgccgagggtccccgcgcccctcctgggcagcacgatcagagtcgttcggaagatgggtacgaagtctgttcttgcacttctggagcatcctctcctcctggagcaccaggtcctctggtggccgccactatgcttctcctcctcccacccttgagccccggggcactctggactgctgcccaggccctcacgttatag

SEQ ID NO: 189665 - DNA, 1812 bp, Artificial Sequence
  derived and/or modified sequence
atgcggaggagggcagcaagaggacccggacctcctccacccggacccggactctcacggctgcctctgccgctgctgctgcttctggcgttgggcaccaggggaggatgcgccgcaccggctccggcacccagagcagaggacctgtcactcggcgtggagtggttgagcaggttcgggtacctacctcccgctgatccaacaactggacagcttcagacccaggaagaactgtctaaggctataaccgctatgcagcagtttggagggttagaggccacgggcattctggatgaagcaaccctagcactaatgaaaacgccaagatgcagcctgccagatctgcccgttctcacacaggcaagacggagacgacaggccccagctcctacaaagtggaacaaacgtaatctgtcttggcgtgttcggacgtttccacgggatagccctctgggccacgacactgtgagggcacttatgtactatgcattgaaggtgtggtctgatattgccccactgaattttcatgaggttgcaggaagcgctgctgacatccagatagacttttcaaaggccgatcacaacgatggatacccatttgatgggcctgggggaactgttgcccatgccttcttcccgggacaccatcataccgccggagatacacacttcgatgatgacgaggcttggactttccgctcttctgatgcacatggcatggatttgttcgcagtagcggtgcacgagttcgggcacgccattggcctgtctcacgtggctgccgctcactcaatcatgcgcccatattaccagggaccagtaggcgatccgcttcggtatggactcccgtacgaggacaaagtgagggtctggcagctgtatggcgtgagggagtccgtgagcccaaccgcacagcccgaggagccgccactcctgccagagcccccagataaccgatcctctgcccctccaaggaaggatgtccctcacagatgttcaacacatttcgacgcagtagctcagatcagaggcgaagctttcttttttaaagggaaatatttctggcgactcacgagagaccgccatctagtaagccttcagccagcacaaatgcaccggttctggcggggtcttcccctgcacctcgactctgtggacgcggtctacgagcgcacgagtgaccacaagatcgtctttttcaagggcgatcggtattgggtcttcaaggataataacgttgaggaagggtatcctcgacctgttagcgacttcagtctgccacccggaggaattgacgcagccttctcttgggcccataatgacaggacatacttttttaaagaccagctgtactggaggtatgacgaccacactcgacatatggaccccggatacccggcacagagccccctgtggaggggagtccctagcaccttggacgacgctatgcgctggtccgacggagcatcgtacttcttcaggggtcaagaatactggaaagtccttgatggagagctggaagtggcacccggatatccacaatcaaccgcgcgagactggctggtgtgtggcgatagtcaagctgatggatcagtggctgcaggtgtggatgccgctgaggggcctcgagctcctcctggccagcacgatcagtcacgatcagaagatggctacgaagtgtgtagttgcactagtggcgcttcctctccacctggtgcgcctgggccactcgtggcagcaacgatgctgttactgcttccccctcttagccccggtgccctttggacagccgcacaggcattaacactctag

SEQ ID NO: 189666 - DNA, 1560 bp, Artificial Sequence
  derived and/or modified sequence
atgcagcagtttgggggtctcgaggccacaggcattctggacgaagccactctcgcacttatgaagacaccacgctgtagcttacctgatctccccgtgcttacgcaggcgcgtaggaggcggcaggcaccagcacccacaaaatggaataagagaaatctgtcatggcgggtgagaacatttccgagggactcccccttaggacacgatacagtgcgagccctgatgtattatgccctcaaggtttggagtgacatcgcaccattaaattttcacgaagtggccggaagcgccgctgatatccagatcgacttttcgaaagcagaccataatgatggataccctttcgatgggccaggagggacggtggcccatgccttttttcccggacatcatcacactgctggggacacccatttcgacgatgatgaggcgtggacgtttaggagttcggacgcccatggaatggatctgttcgccgtggccgtgcatgagttcggacacgcgataggactgtcacacgttgctgctgcacatagtataatgagaccttactaccagggccctgtcggcgacccactgcggtatggcctgccatacgaggataaagttagggtgtggcagctatatggagtgagagaatcagtgagtcctaccgctcagcctgaggagcctccattgctccctgagccaccagataaccggtcatctgcaccacctagaaaggatgtgcctcacaggtgttctactcatttcgacgccgtggctcagatccgaggcgaagcgtttttctttaagggcaaatacttttggaggttgactcgggataggcatctggtgtccctccagcctgcccagatgcaccgcttctggagaggccttccactgcatctggactctgtggatgcagtgtacgagagaacatccgaccacaagatcgtcttttttaagggagatcgatattgggtgtttaaagataataatgtggaggagggatatccacgtcctgtgagcgatttctccctgcctcccggaggaattgacgccgcattttcatgggcccacaatgatcgaacctacttctttaaagatcagctttattggcggtatgacgatcatacccggcatatggacccagggtacccggctcaatctcctctctggcggggagtcccatctaccctcgatgatgcgatgaggtggtcagatggagcctcatactttttcagaggccaggagtactggaaagtcctggacggtgaactggaggtcgcccctggataccctcagagcacggcaagggattggcttgtatgtggcgatagccaggcagacggatctgtggcagccggtgtagatgctgcagaggggccaagggcccctccaggacaacacgatcagagtcggagcgaggacggctacgaagtctgttcttgcacatccggggcatcttcgcctcctggagcccctggcccactggttgccgctaccatgcttctccttctcccgcctctaagccccggagccttgtggaccgccgcacaggccctcactctctag

SEQ ID NO: 189667 - DNA, 2411 bp, Artificial Sequence
  derived and/or modified sequence
agtccggcgggggcgccgcggagagcggagggcgccgggctgcggaacgcgaagcggagggcgcgggaccctgcacgccgcccgcgggcccatgtgagcgccatgcggcgccgcgcagcccggggacccggcccgccgcccccagggcccggactctcgcggctgccgctgccgctgctgctgctgctggcgctggggacccgcgggggctgcgccgcgcccgcacccgcgccgcgcgccgaggacctcagcctgggagtggagtggctaagcaggttcggttacctgcccccggctgaccccacaacagggcagctgcagacgcaagaggagctgtctaaggccatcacagccatgcagcagtttggtggcctggaggccaccggcatcctggacgaggccaccctggccctgatgaaaaccccacgctgctccctgccagacctccctgtcctgacccaggctcgcaggagacgccaggctccagcccccaccaagtggaacaagaggaacctgtcgtggagggtccggacgttcccacgggactcaccactggggcacgacacggtgcgtgcactcatgtactacgccctcaaggtctggagcgacattgcgcccctgaacttccacgaggtggcgggcagcgccgccgacatccagatcgacttctccaaggccgaccataacgacggctaccccttcgacggccccggcggcaccgtggcccacgccttcttccccggccaccaccacaccgccggggacacccactttgacgatgacgaggcctggaccttccgctcctcggatgcccacgggatggacctgtttgcagtggctgtccacgagtttggccacgccattgggttaagccatgtggccgctgcacactccatcatgcggccgtactaccagggcccggtgggtgacccgctgcgctacgggctcccctacgaggacaaggtgcgcgtctggcagctgtacggtgtgcgggagtctgtgtctcccacggcgcagcccgaggagcctcccctgctgccggagcccccagacaaccggtccagcgccccgcccaggaaggacgtgccccacagatgcagcactcactttgacgcggtggcccagatccggggtgaagctttcttcttcaaaggcaagtacttctggcggctgacgcgggaccggcacctggtgtccctgcagccggcacagatgcaccgcttctggcggggcctgccgctgcacctggacagcgtggacgccgtgtacgagcgcaccagcgaccacaagatcgtcttctttaaaggagacaggtactgggtgttcaaggacaataacgtagaggaaggatacccgcgccccgtctccgacttcagcctcccgcctggcggcatcgacgctgccttctcctgggcccacaatgacaggacttatttctttaaggaccagctgtactggcgctacgatgaccacacgaggcacatggaccccggctaccccgcccagagccccctgtggaggggtgtccccagcacgctggacgacgccatgcgctggtccgacggtgcctcctacttcttccgtggccaggagtactggaaagtgctggatggcgagctggaggtggcacccgggtacccacagtccacggcccgggactggctggtgtgtggagactcacaggccgatggatctgtggctgcgggcgtggacgcggcagaggggccccgcgcccctccaggacaacatgaccagagccgctcggaggacggttacgaggtctgctcatgcacctctggggcatcctctcccccgggggccccaggcccactggtggctgccaccatgctgctgctgctgccgccactgtcaccaggcgccctgtggacagcggcccaggccctgacgctatgacacacagcgcgagcccatgagaggacagaggcggtgggacagcctggccacagagggcaaggactgtgccggagtccctgggggaggtgctggcgcgggatgaggacgggccaccctggcaccggaaggccagcagagggcactgtccgccagggctgggcaggctcaggtggcaaggacggagctgtcccctagtgagggactgtgttgactgacgagccgaggggtggccgctccagaagggtgcccagtcaggccgcaccgccgccagcctcctccggccctggagggagcatctcgggctgggggcccacccctctctgtgccggcgccaccaaccccacccacactgctgcctggtgctcccgccggcccacagggcctccgtccccaggtccccagtggggcagccctccccacagacgagccccccacatggtgccgcggcacgtcccccctgtgacgcgttccagaccaacatgacctctccctgcttt

SEQ ID NO: 189668 - DNA, 2301 bp, Artificial Sequence
  derived and/or modified sequence
aagagacaagaggtgccttgtgggcagatagggggctgggagggggcctgcccggaagcagtggtggcccgtggcaggcttctcactgggtaggaccgggccctctgttgcaccccctcaccctgctctctgccctcaggagtggctaagcaggttcggttacctgcccccggctgaccccacaacagggcagctgcagacgcaagaggagctgtctaaggccatcacagccatgcagcagtttggtggcctggaggccaccggcatcctggacgaggccaccctggccctgatgaaaaccccacgctgctccctgccagacctccctgtcctgacccaggctcgcaggagacgccaggctccagcccccaccaagtggaacaagaggaacctgtcgtggagggtccggacgttcccacgggactcaccactggggcacgacacggtgcgtgcactcatgtactacgccctcaaggtctggagcgacattgcgcccctgaacttccacgaggtggcgggcagcgccgccgacatccagatcgacttctccaaggccgaccataacgacggctaccccttcgacggccccggcggcaccgtggcccacgccttcttccccggccaccaccacaccgccggggacacccactttgacgatgacgaggcctggaccttccgctcctcggatgcccacgggatggacctgtttgcagtggctgtccacgagtttggccacgccattgggttaagccatgtggccgctgcacactccatcatgcggccgtactaccagggcccggtgggtgacccgctgcgctacgggctcccctacgaggacaaggtgcgcgtctggcagctgtacggtgtgcgggagtctgtgtctcccacggcgcagcccgaggagcctcccctgctgccggagcccccagacaaccggtccagcgccccgcccaggaaggacgtgccccacagatgcagcactcactttgacgcggtggcccagatccggggtgaagctttcttcttcaaaggcaagtacttctggcggctgacgcgggaccggcacctggtgtccctgcagccggcacagatgcaccgcttctggcggggcctgccgctgcacctggacagcgtggacgccgtgtacgagcgcaccagcgaccacaagatcgtcttctttaaaggagacaggtactgggtgttcaaggacaataacgtagaggaaggatacccgcgccccgtctccgacttcagcctcccgcctggcggcatcgacgctgccttctcctgggcccacaatgacaggacttatttctttaaggaccagctgtactggcgctacgatgaccacacgaggcacatggaccccggctaccccgcccagagccccctgtggaggggtgtccccagcacgctggacgacgccatgcgctggtccgacggtgcctcctacttcttccgtggccaggagtactggaaagtgctggatggcgagctggaggtggcacccgggtacccacagtccacggcccgggactggctggtgtgtggagactcacaggccgatggatctgtggctgcgggcgtggacgcggcagaggggccccgcgcccctccaggacaacatgaccagagccgctcggaggacggttacgaggtctgctcatgcacctctggggcatcctctcccccgggggccccaggcccactggtggctgccaccatgctgctgctgctgccgccactgtcaccaggcgccctgtggacagcggcccaggccctgacgctatgacacacagcgcgagcccatgagaggacagaggcggtgggacagcctggccacagagggcaaggactgtgccggagtccctgggggaggtgctggcgcgggatgaggacgggccaccctggcaccggaaggccagcagagggcactgtccgccagggctgggcaggctcaggtggcaaggacggagctgtcccctagtgagggactgtgttgactgacgagccgaggggtggccgctccagaagggtgcccagtcaggccgcaccgccgccagcctcctccggccctggagggagcatctcgggctgggggcccacccctctctgtgccggcgccaccaaccccacccacactgctgcctggtgctcccgccggcccacagggcctccgtccccaggtccccagtggggcagccctccccacagacgagccccccacatggtgccgcggcacgtcccccctgtgacgcgttccagaccaacatgacctctccctgctttctagcggctcgg

SEQ ID NO: 189669 - DNA, 552 bp, Artificial Sequence
  derived and/or modified sequence
cccggactctcgcggctgccgctgccgctgctgctgctgctggcgctggggacccgcgggggctgcgccgcgcccgcacccgcgccgcgcgccgaggacctcagcctgggagtggagtggctaagcaggttcggttacctgcccccggctgaccccacaacagggcagctgcagacgcaagaggagctgtctaaggccatcacagccatgcagcagtttggtggcctggaggccaccggcatcctggacgaggccaccctggccctgatgaaaaccccacgctgctccctgccagacctccctgtcctgacccaggctcgcaggagacgccaggctccagcccccaccaagtggaacaagaggaacctgtcgtggagggtccggacgttcccacgggactcaccactggggcacgacacggtgcgtgcactcatgtactacgccctcaaggtctggagcgacattgcgcccctgaacttccacgaggtggcgggcagcgccgccgacatccagatcgacttctccaaggccgaccataacgacggctacccc

SEQ ID NO: 189670 - protein, 643 aa, Artificial Sequence
  derived and/or modified sequence
MEKSSSCESLGSQPAAARPPSVDSLSSASTSHSENSVHTKSASVVSSDSISTSADNFSPDLRVLRESNKLAEMEEPPLLPGENIKDMAKDVTYICPFTGAVRGTLTVTNYRLYFKSMERDPPFVLDASLGVINRVEKIGGASSRGENSYGLETVCKDIRNLRFAHKPEGRTRRSIFENLMKYAFPVSNNLPLFAFEYKEVFPENGWKLYDPLLEYRRQGIPNESWRITKINERYELCDTYPALLVVPANIPDEELKRVASFRSRGRIPVLSWIHPESQATITRCSQPMVGVSGKRSKEDEKYLQAIMDSNAQSHKIFIFDARPSVNAVANKAKGGGYESEDAYQNAELVFLDIHNIHVMRESLRKLKEIVYPNIEETHWLSNLESTHWLEHIKLILAGALRIADKVESGKTSVVVHCSDGWDRTAQLTSLAMLMLDGYYRTIRGFEVLVEKEWLSFGHRFQLRVGHGDKNHADADRSPVFLQFIDCVWQMTRQFPTAFEFNEYFLITILDHLYSCLFGTFLCNSEQQRGKENLPKRTVSLWSYINSQLEDFTNPLYGSYSNHVLYPVASMRHLELWVGYYIRWNPRMKPQEPIHNRYKELLAKRAELQKKVEELQREISNRSTSSSERASSPAQCVTPVQTVV

SEQ ID NO: 189671 - protein, 571 aa, Artificial Sequence
  derived and/or modified sequence
MEEPPLLPGENIKDMAKDVTYICPFTGAVRGTLTVTNYRLYFKSMERDPPFVLDASLGVINRVEKIGGASSRGENSYGLETVCKDIRNLRFAHKPEGRTRRSIFENLMKYAFPVSNNLPLFAFEYKEVFPENGWKLYDPLLEYRRQGIPNESWRITKINERYELCDTYPALLVVPANIPDEELKRVASFRSRGRIPVLSWIHPESQATITRCSQPMVGVSGKRSKEDEKYLQAIMDSNAQSHKIFIFDARPSVNAVANKAKGGGYESEDAYQNAELVFLDIHNIHVMRESLRKLKEIVYPNIEETHWLSNLESTHWLEHIKLILAGALRIADKVESGKTSVVVHCSDGWDRTAQLTSLAMLMLDGYYRTIRGFEVLVEKEWLSFGHRFQLRVGHGDKNHADADRSPVFLQFIDCVWQMTRQFPTAFEFNEYFLITILDHLYSCLFGTFLCNSEQQRGKENLPKRTVSLWSYINSQLEDFTNPLYGSYSNHVLYPVASMRHLELWVGYYIRWNPRMKPQEPIHNRYKELLAKRAELQKKVEELQREISNRSTSSSERASSPAQCVTPVQTVV

SEQ ID NO: 189672 - protein, 326 aa, Artificial Sequence
  derived and/or modified sequence
MLAVALTILSASTSHSENSVHTKSASVVSSDSISTSADNFSPDLRVLRESNKLAEMEEPPLLPGENIKDMAKDVTYICPFTGAVRGTLTVTNYRLYFKSMERDPPFVLDASLGVINRVEKIGGASSRGENSYGLETVCKDIRNLRFAHKPEGRTRRSIFENLMKYAFPVSNNLPLFAFEYKEVFPENGWKLYDPLLEYRRQGIPNESWRITKINERYELCDTYPALLVVPANIPDEELKRVASFRSRGRIPVLSWIHPESQATITRCSQPMVGVSGKRSKEDEKYLQAIMDSNAQSHKIFIFDARPSVNAVANKAKGGGYESEDAY

SEQ ID NO: 189673 - DNA, 1932 bp, Artificial Sequence
  derived and/or modified sequence
atggagaagagcagctcttgcgaatctctcggcagccaaccagctgctgcccgccctcccagcgttgactcactcagttcagcttccacttcacatagcgaaaattcagtccacacaaagtccgcaagcgtggtctccagtgacagcatttctacatccgccgataatttctccccagacctgagagtgttgcgggagtctaacaagctagctgaaatggaggaaccgccactccttccaggagagaatatcaaagatatggctaaggacgtgacatatatttgtcccttcacaggcgccgtacgggggacactgacggtgacgaactatcgcttatatttcaagtccatggaacgagatcctccattcgtgctggatgcttccctgggcgtgatcaacagagtcgaaaagattggtggagcttcatctagaggcgagaacagttatgggctggagacagtgtgtaaagatatccgtaacctgcgctttgctcacaagcctgaaggccgtactcggaggtctatttttgaaaatcttatgaagtacgcctttcctgtgagtaacaatctgcccctgtttgcattcgaatataaggaagtgtttccggagaatgggtggaagctgtacgaccccttactggagtatagaagacaggggatcccgaacgaaagctggcggatcacgaagatcaatgaacgttatgaactgtgcgatacctacccagcattgctggtggtccctgccaacatcccagacgaagaactgaaacgggttgccagtttccgttcccgagggcgcattcccgttctgtcctggattcaccctgaaagccaggcgacaatcacaagatgctcccagcccatggttggtgtgtcagggaagaggtctaaggaggacgagaaataccttcaggcaataatggactccaacgcccagagccacaaaatcttcatctttgacgcccgcccttcggtgaatgctgtggccaataaggccaagggcggaggatacgaaagcgaggatgcataccagaacgccgagttggtctttctcgatattcataacatccatgtgatgcgggaatcactccgcaaactgaaagagattgtgtaccccaacatcgaagaaactcattggctgagtaacctcgagtccacccattggctggaacacatcaaactgattctggctggtgccctccggatcgccgataaagtggagagtggaaaaacctctgtggtggtccattgttccgacgggtgggatcgcactgcacagctgacttctcttgctatgctgatgcttgatggatattatagaaccatcagaggatttgaggtactggtggagaaagaatggctgtccttcggtcatagattccagctgcgggtgggtcacggcgataagaatcacgccgatgccgatcgaagcccagtctttctgcagttcatcgactgtgtgtggcagatgacacgacagtttcccacagcttttgaatttaatgaatatttcctgattaccattttggaccatctttacagttgtctctttggaacattcctgtgtaactccgaacaacagaggggaaaggagaacctgcccaaacgcacggtttctctgtggtcctacataaacagccagctggaggatttcaccaaccctctctatggctcatattcgaatcacgtcttgtatcctgtggcgagtatgcggcacctcgaactgtgggtggggtactacattagatggaacccacggatgaaaccccaagagcccatccataatcggtataaggagctgctcgcaaagcgtgctgaactgcagaaaaaagtggaagaattacagagagaaattagcaataggagtacctctagctccgaaagagcatcaagccccgcccaatgtgtgactcccgtacagactgtggtgtag

SEQ ID NO: 189674 - DNA, 981 bp, Artificial Sequence
  derived and/or modified sequence
atgctggcggtcgccctgaccatcttgtctgctagtaccagtcatagcgaaaatagtgtccacactaagtccgcctcagtcgtctccagcgattcgattagtacttcagccgacaactttagcccggacctccgagtgctgagagagtctaacaagctggctgagatggaggagcccccgttgctgccaggggagaacatcaaagatatggccaaagatgtaacatatatctgtccattcactggagcagtgcgggggaccttgacggtcacaaactacagactgtacttcaaaagcatggaaagagaccccccatttgtcctcgatgcatccctgggcgtgatcaaccgggttgaaaagatcggaggggcttcaagtaggggcgagaactcttacggcttggaaaccgtgtgtaaagacattaggaacctacgatttgctcataaaccagagggccggactcgccgctcaatatttgaaaacctgatgaaatatgcctttcctgtcagcaacaacctgcctctcttcgcttttgaatataaagaggtttttccagagaacgggtggaaactgtacgaccccctgctggagtataggcggcagggcatccctaacgagtcttggaggatcactaaaataaacgaacgctatgaactgtgtgatacctacccagctctgctcgttgtgcccgccaacattccggacgaggagctcaagcgcgtggctagtttccgcagtcggggacgaattccagtcctctcctggatacaccccgagagtcaggcaacaattaccaggtgtagtcagccgatggttggtgtgtccgggaagcggtctaaagaggacgaaaagtacctccaggccattatggatagcaacgctcagagccacaaaatctttatctttgatgcccggccatctgttaatgcagtagccaacaaggcaaaaggaggcggctatgagagtgaggacgcctactag

SEQ ID NO: 189675 - DNA, 1932 bp, Artificial Sequence
  derived and/or modified sequence
atggagaagagcagcagctgtgagagcctgggcagccagcctgctgctgcccggcccccatctgtggacagcctgagcagcgccagcaccagccacagcgagaacagcgtgcacaccaagagcgcctctgtggtgtccagtgacagcatcagcaccagcgctgacaacttctccccagacctgcgggtgctgcgggagagcaacaagctggccgagatggaggagccccccctgctgcccggggagaacatcaaggacatggccaaggatgtgacctacatctgccccttcaccggggctgtgcggggcaccctgactgtgaccaactaccgcctgtacttcaagtccatggagcgggaccccccatttgtgctggatgccagcctgggcgtcatcaacagagtggagaagattggaggagccagcagcagaggagagaacagctatggcctggagaccgtgtgcaaggacatccggaacctgcgctttgcccacaagccagagggccgcacccggcgcagcatctttgagaacctgatgaagtatgccttccctgtgagcaacaacctgcccctgtttgcctttgagtacaaggaggtgtttcctgaaaatggctggaagctgtatgaccccctgctggagtaccgccggcagggcatccccaatgaatcctggaggatcaccaagatcaatgaaagatatgagctgtgtgacacctacccagccctgctggtggtgcctgccaacatcccagatgaggagctgaagagggtggccagcttccgcagccggggccgcatccctgtgctgtcctggatccaccctgagagccaggccaccatcacccgctgcagccagcccatggtgggcgtgtctgggaagaggagcaaggaggatgagaagtacctgcaggccatcatggacagcaatgcccagagccacaagatcttcatctttgatgcccggcccagcgtgaatgctgtggccaacaaggccaagggcggcggctatgaaagtgaagatgcctaccagaatgctgagctggtgttcctggacatccacaacatccacgtgatgagggagagcctgaggaagctgaaggagatcgtgtaccccaacatcgaggagacccactggctgagcaacctggagagcacccactggctggagcacatcaagctgatcctggccggggccctgagaattgctgacaaggtggagagcggcaagacctctgtggtggtgcactgcagtgatggctgggacagaacagcccagctgaccagcctggccatgctgatgctggatggctactaccgcaccatccggggctttgaggtgctggtggagaaggagtggctgagctttggccaccgcttccagctgcgggtgggccacggggacaagaaccacgcagatgctgacaggagccctgtgttcctgcagttcatcgactgtgtgtggcagatgacccggcagttccccacagcctttgagttcaatgagtacttcctgatcaccatcctggaccacctgtacagctgcctgtttggcaccttcctgtgcaacagcgagcagcagaggggcaaggagaacctgcccaagaggacagtgtccctgtggagctacatcaacagccagctggaggacttcaccaaccccctgtatggcagctacagcaaccacgtgctgtaccctgtggcctccatgaggcacctggagctgtgggtgggctactacatccgctggaaccccaggatgaagccccaggagcccatccacaaccgctacaaggagctgctggccaagagagctgagctgcagaagaaggtggaggagctgcagcgggagatcagcaacagaagcaccagcagcagcgagcgggccagcagccctgcccagtgtgtgacccctgtgcagacagtggtgtag

SEQ ID NO: 189676 - DNA, 981 bp, Artificial Sequence
  derived and/or modified sequence
atgctggccgtggccctgaccatcctgagcgccagcaccagccacagtgaaaattctgtgcacaccaagagcgcctctgtggtgtccagtgacagcatcagcaccagcgctgacaacttctccccagacctgcgggtgctgcgggagagcaacaagctggccgagatggaggagccccccctgctgcctggagagaacatcaaggacatggccaaggatgtgacctacatctgccccttcaccggggctgtgcggggcaccctgactgtgaccaactaccgcctgtacttcaagtccatggagcgggaccccccatttgtgctggatgccagcctgggcgtcatcaacagagtggagaagattggaggagccagcagcagaggagaaaattcctatggcctggagaccgtgtgcaaggacatccggaacctgcgctttgcccacaagccagagggccgcaccaggaggagcatctttgagaacctgatgaagtatgccttccctgtgagcaacaacctgcccctgtttgcctttgagtacaaggaggtgtttcctgaaaatggctggaagctgtatgaccccctgctggagtaccgccggcagggcatccccaatgaatcctggaggatcaccaagatcaatgaaagatatgagctgtgtgacacctacccagccctgctggtggtgcctgccaacatcccagatgaggagctgaagagggtggccagcttccgcagccggggccgcatccctgtgctgtcctggatccaccctgagagccaggccaccatcacccgctgcagccagcccatggtgggcgtgtctgggaagaggagcaaagaagatgagaagtacctgcaggccatcatggacagcaatgcccagagccacaagatcttcatctttgatgcccggcccagcgtgaatgctgtggccaacaaggccaagggcggcggctatgaaagtgaagatgcctactag

SEQ ID NO: 189677 - DNA, 4681 bp, Artificial Sequence
  derived and/or modified sequence
ctccttccataagggtctggtccttcatccctcccgcttcaccagaccccctcaccctgggagccgccacctccctttccccaagaccagatgtcgcgcggccggacacagccagcacggagagtcgatgccggcgtctgagctgcgcagtggggtcttcccgctgcccagcagcctacaggcgcggtgcactctgggggaacatggccgcttccggtctccctcccgggccggcgctggcctgactgcggccccggtccgtagcactccgccctccgcttctcccgccctgtagccgcgaagactgcttcagcctttccctgtgctgcccctgccgcgcgatggagaagagctcgagctgcgagagtcttggctcccagccggcggcggctcggccgcccagcgtggactccttgtccagtgcctccacttctcattcagagaattcagtgcatacaaaatcagcttctgttgtatcatcagattccatttcaacttctgccgacaacttttctcctgatttgagggtcctgagggagtctaacaagttagcagaaatggaagaaccacccttgcttccaggagaaaatattaaagacatggccaaagatgtaacttatatatgtccattcactggcgctgtacgaggaactctgactgtcacgaattataggttatatttcaaaagcatggaacgggatcccccatttgttttagatgcttcccttggtgtgataaatagagtagaaaaaattggtggtgcttctagtcgaggtgaaaattcttatggactagaaactgtgtgtaaggatattaggaatttacgatttgctcataaacctgaggggcggacaagaagatccatatttgagaatctaatgaaatatgcatttcctgtctctaataacctgcctctttttgcttttgaatacaaagaagtattccctgaaaatgggtggaagctatatgaccctcttttagagtatagaaggcagggaattccaaatgaaagctggagaataacaaagataaatgaacgatatgaactttgtgatacataccctgccctcctggttgtgccagcaaatattcctgatgaagaattaaagagagtggcatccttcagatcaagaggccgtatcccagttttatcatggattcatcctgaaagtcaagccacaatcactcggtgtagccagcccatggttggagtgagtggaaagcgaagcaaagaagatgaaaaataccttcaagctatcatggattccaatgcccagtctcacaaaatctttatatttgatgcccggccaagtgttaatgctgttgccaacaaggcaaagggtggaggttatgaaagtgaagatgcctatcaaaatgctgaactagttttcctggatatccacaatattcatgttatgagagaatcattacgaaaacttaaggagattgtgtaccccaacattgaggaaacccactggttgtctaacttggaatctactcattggctagaacatattaagcttattcttgcaggggctcttaggattgctgacaaggtagagtcagggaagacgtctgtggtagtgcattgcagtgatggttgggatcgcacagctcagctcacttcccttgccatgctcatgttggatggatactatcgaaccatccgaggatttgaagtccttgtggagaaagaatggctaagttttggacatcgatttcaactaagagttggccatggagataagaaccatgcagatgcagacagatcgcctgtttttcttcaatttattgactgtgtctggcagatgacaagacagtttcctaccgcatttgaattcaatgagtattttctcattaccattttggaccacctatacagctgcttattcggaacattcctctgtaatagtgaacaacagagaggaaaagagaatcttcctaaaaggactgtgtcactgtggtcttacataaacagccagctggaagacttcactaatcctctctatgggagctattccaatcatgtcctttatccagtagccagcatgcgccacctagagctctgggtgggatattacataaggtggaatccacggatgaaaccacaggaacctattcacaacagatacaaagaacttcttgctaaacgagcagagcttcagaaaaaagtagaggaactacagagagagatttctaaccgatcaacctcatcctcagagagagccagctctcctgcacagtgtgtcactcctgtccaaactgttgtataaaggactgtaagatcaggggcatcattgctatacactcttgattacactggcagctctatgagtagaaagtcttcggaatttagaacccatctatgagagaaagttcagtcactttatttattttaaatctctctaggatgagtttagaactgtagcagtgcaggtggcttaagtgaagtaactccatatgtaattacatgattatgatactaatcttttaagtatccaaagaatattaaaatacttcaatcctggattcacagtgggaacaagtttctattaaaaggcaaatgctgttacaaatttttggcatctggtaatattaaaaccattttagaaatacactctgtgctcactgtgcagaggaacatcagttttcaaaccaacactgaaattctgtggcatcacatatattgggccttgatgtcatgacagatcaaaatcatttgatatccctttctccattctaggtttttctttttttcagtaactgatttaccttgatcacttttcaacttccatattcttcatatagtaaaaggcaaagtgttgaagatactacggtgtggtagtagttgaaaattattgccgtcattatttacatacttaagacatattagcaagttgatccaaaatgggaggccttatagatgtgcttgggggaaaatgaaggggagaaagtagccatacaggagttcaaagaattccatgcccttcagattagcccaattaccagaaacatcatgaaagatattttaaaaactaattatttactacagtgtatttcacttgtcttgtgtgtctgaacacacagaagctaattagcaagtttttaagaagtatttaaaaatcttactaggattgacattttttctgaattctgtataaatagcttatagtgagaagtactgtgctcaaattttacatttttttcctttgcaaattctgtaatttcactcaacgattaagtctaccaaagaacacactgcatgtaaaagatgtattacaatctcaaagccagtaaaagaaatcttgcttcactgttcacctgctacaagtaagagtttggtgctggtagaaacatttgactctgatgtctattttattctacataagagccatatgtaatgtactgtaacaaaggagcttcttgtccccttggtcttttaattaaaagaaattccaactgacttttaaactttgttcttgtccaaagttgccatttcttttttttccccagaaatatttggaaattattggaggaatatgcaccccagatgaaaatgttcagtttgtacccatttttccttaaccaacacccaaatcaaacaattaaaatatacagtgtttttccactcactaattcactatacagagagtctgaaccttagcctccctcttggtcttgcagtgaggaagtttctattagtatatccaatttagcaaaattggtaccaaaatgatttctttggtaattgtgtgaaatataagctttttaacagggcatttaagtggctagcaaatcagtaattaaaaattaagctttctactccaagtatttcacaaacgcatctgccattttcctcatttaaaccttggttatcttggcctgataccacataaaagaatgtagaatggctgaagagatcaagaatttaaagcttctagtcttaacatacttgcatccacttcaaattcaaatcaaaagccagggaaatctaagtgcaaccctaccacttctctgctgagaaccttccagtggttcccctcaccttctgcagaagtctccaatatggagtacatgcacttgggcatttaatatataccactggtgtgtgtgggagggagggaggaggaatactagccctttttatatatttacacaagcaaaacttttaaatatttgaattgacagttacatgtttcataactttgtatgtctattggttgtgcaggtgtaattttttccctttttgattagggttacaaaatttagagaccagtatgattaagttgaagctccttagcctccttcgacctagtctctgcatacctcaacttttacgtaccaatgctactctgctgttcacaattgcctcatgtaatctgcagattcctgcctccccactttggttcagtctgtcttgtgcacctggaacaactgttctcccttgtgactaattcctattttctagagtttaggcatcatctcttcctttgggaagttatctgattcacgactgccttctctgacatccccaccttcctctgtgcccccatagcactgtgtataccgctactaccactgcaattcacattatattggaatgaacaattcacatgtctaccacaagtctgtaaacataaccttatttgaaatgaattgcaataaagctctgttacaacgt

SEQ ID NO: 189678 - DNA, 3350 bp, Artificial Sequence
  derived and/or modified sequence
gggggaacatggccgcttccggtctccctcccgggccggcgctggcctgactgcggccccggtccgtagcactccgccctccgcttctcccgccctgtagccgcgaagactgcttcagcctttccctgtgctgcccctgccgcgcgatggagaagagctcgagctgcgagagtcttggctcccagccggcggcggctcggccgcccagcgtggactccttgtccagttaatgtgttaagagccattgacatttgaagatcatcagaagtgaagataaaacatctcaaaaattataattgcctccacttctcattcagagaattcagtgcatacaaaatcagcttctgttgtatcatcagattccatttcaacttctgccgacaacttttctcctgatttgagggtcctgagggagtctaacaagttagcagaaatggaagaaccacccttgcttccaggagaaaatattaaagacatggccaaagatgtaacttatatatgtccattcactggcgctgtacgaggaactctgactgtcacgaattataggttatatttcaaaagcatggaacgggatcccccatttgttttagatgcttcccttggtgtgataaatagagtagaaaaaattggtggtgcttctagtcgaggtgaaaattcttatggactagaaactgtgtgtaaggatattaggaatttacgatttgctcataaacctgaggggcggacaagaagatccatatttgagaatctaatgaaatatgcatttcctgtctctaataacctgcctctttttgcttttgaatacaaagaagtattccctgaaaatgggtggaagctatatgaccctcttttagagtatagaaggcagggaattccaaatgaaagctggagaataacaaagataaatgaacgatatgaactttgtgatacataccctgccctcctggttgtgccagcaaatattcctgatgaagaattaaagagagtggcatccttcagatcaagaggccgtatcccagttttatcatggattcatcctgaaagtcaagccacaatcactcggtgtagccagcccatggttggagtgagtggaaagcgaagcaaagaagatgaaaaataccttcaagctatcatggattccaatgcccagtctcacaaaatctttatatttgatgcccggccaagtgttaatgctgttgccaacaaggcaaagggtggaggttatgaaagtgaagatgcctatcaaaatgctgaactagttttcctggatatccacaatattcatgttatgagagaatcattacgaaaacttaaggagattgtgtaccccaacattgaggaaacccactggttgtctaacttggaatctactcattggctagaacatattaagcttattcttgcaggggctcttaggattgctgacaaggtagagtcagggaagacgtctgtggtagtgcattgcagtgatggttgggatcgcacagctcagctcacttcccttgccatgctcatgttggatggatactatcgaaccatccgaggatttgaagtccttgtggagaaagaatggctaagttttggacatcgatttcaactaagagttggccatggagataagaaccatgcagatgcagacagatcgcctgtttttcttcaatttattgactgtgtctggcagatgacaagacagtttcctaccgcatttgaattcaatgagtattttctcattaccattttggaccacctatacagctgcttattcggaacattcctctgtaatagtgaacaacagagaggaaaagagaatcttcctaaaaggactgtgtcactgtggtcttacataaacagccagctggaagacttcactaatcctctctatgggagctattccaatcatgtcctttatccagtagccagcatgcgccacctagagctctgggtgggatattacataaggtggaatccacggatgaaaccacaggaacctattcacaacagatacaaagaacttcttgctaaacgagcagagcttcagaaaaaagtagaggaactacagagagagatttctaaccgatcaacctcatcctcagagagagccagctctcctgcacagtgtgtcactcctgtccaaactgttgtataaaggactgtaagatcaggggcatcattgctatacactcttgattacactggcagctctatgagtagaaagtcttcggaatttagaacccatctatgagagaaagttcagtcactttatttattttaaatctctctaggatgagtttagaactgtagcagtgcaggtggcttaagtgaagtaactccatatgtaattacatgattatgatactaatcttttaagtatccaaagaatattaaaatacttcaatcctggattcacagtgggaacaagtttctattaaaaggcaaatgctgttacaaatttttggcatctggtaatattaaaaccattttagaaatacactctgtgctcactgtgcagaggaacatcagttttcaaaccaacactgaaattctgtggcatcacatatattgggccttgatgtcatgacagatcaaaatcatttgatatccctttctccattctaggtttttctttttttcagtaactgatttaccttgatcacttttcaacttccatattcttcatatagtaaaaggcaaagtgttgaagatactacggtgtggtagtagttgaaaattattgccgtcattatttacatacttaagacatattagcaagttgatccaaaatgggaggccttatagatgtgcttgggggaaaatgaaggggagaaagtagccatacaggagttcaaagaattccatgcccttcagattagcccaattaccagaaacatcatgaaagatattttaaaaactaattatttactacagtgtatttcacttgtcttgtgtgtctgaacacacagaagctaattagcaagtttttaagaagtatttaaaaatcttactaggattgacattttttctgaattctgtataaatagcttatagtgagaagtactgtgctcaaattttacatttttttcctttgcaaattctgtaatttcactcaacgattaagtctaccaaagaacacactgcatgtaaaagatgtattacaatctcaaagccagtaaaagaaatcttgcttcactgttcacctgctacaagtaagagtttggtgctggtagaaacatttgactctgatgtctattttattctacataagagccatatgtaatgtactgtaacaaaggagcttcttgtccccttggtcttttaattaaaagaaattccaactgacttttaaactt

SEQ ID NO: 189679 - DNA, 4787 bp, Artificial Sequence
  derived and/or modified sequence
agatgtcgcgcggccggacacagccagcacggagagtcgatgccggcgtctgagctgcgcagtggggtcttcccgctgcccagcagcctacaggcgcggtgcactctgggggaacatggccgcttccggtctccctcccgggccggcgctggcctgactgcggccccggtccgtagcactccgccctccgcttctcccgccctgtagccgcgaagactgcttcagcctttccctgtgctgcccctgccgcgcgatggagaagagctcgagctgcgagagtcttggctcccagccggcggcggctcggccgcccagcgtggactccttgtccagttaatgtgttaagagccattgacatttgaagatcatcagaagtgaagataaaacatctcaaaaattataattgcctccacttctcattcagagaattcagtgcatacaaaatcagcttctgttgtatcatcagattccatttcaacttctgccgacaacttttctcctgatttgaggagggagtctcgctctatcccctaggctggagtgcattggcgccatctcggctcatttgcaacctctgtctcccgggttcaagcgattctcctgcctcagcttcccgaggagctgggattacaggtcctgagggagtctaacaagttagcagaaatggaagaaccacccttgcttccaggagaaaatattaaagacatggccaaagatgtaacttatatatgtccattcactggcgctgtacgaggaactctgactgtcacgaattataggttatatttcaaaagcatggaacgggatcccccatttgttttagatgcttcccttggtgtgataaatagagtagaaaaaattggtggtgcttctagtcgaggtgaaaattcttatggactagaaactgtgtgtaaggatattaggaatttacgatttgctcataaacctgaggggcggacaagaagatccatatttgagaatctaatgaaatatgcatttcctgtctctaataacctgcctctttttgcttttgaatacaaagaagtattccctgaaaatgggtggaagctatatgaccctcttttagagtatagaaggcagggaattccaaatgaaagctggagaataacaaagataaatgaacgatatgaactttgtgatacataccctgccctcctggttgtgccagcaaatattcctgatgaagaattaaagagagtggcatccttcagatcaagaggccgtatcccagttttatcatggattcatcctgaaagtcaagccacaatcactcggtgtagccagcccatggttggagtgagtggaaagcgaagcaaagaagatgaaaaataccttcaagctatcatggattccaatgcccagtctcacaaaatctttatatttgatgcccggccaagtgttaatgctgttgccaacaaggcaaagggtggaggttatgaaagtgaagatgcctatcaaaatgctgaactagttttcctggatatccacaatattcatgttatgagagaatcattacgaaaacttaaggagattgtgtaccccaacattgaggaaacccactggttgtctaacttggaatctactcattggctagaacatattaagcttattcttgcaggggctcttaggattgctgacaaggtagagtcagggaagacgtctgtggtagtgcattgcagtgatggttgggatcgcacagctcagctcacttcccttgccatgctcatgttggatggatactatcgaaccatccgaggatttgaagtccttgtggagaaagaatggctaagttttggacatcgatttcaactaagagttggccatggagataagaaccatgcagatgcagacagatcgcctgtttttcttcaatttattgactgtgtctggcagatgacaagacagtttcctaccgcatttgaattcaatgagtattttctcattaccattttggaccacctatacagctgcttattcggaacattcctctgtaatagtgaacaacagagaggaaaagagaatcttcctaaaaggactgtgtcactgtggtcttacataaacagccagctggaagacttcactaatcctctctatgggagctattccaatcatgtcctttatccagtagccagcatgcgccacctagagctctgggtgggatattacataaggtggaatccacggatgaaaccacaggaacctattcacaacagatacaaagaacttcttgctaaacgagcagagcttcagaaaaaagtagaggaactacagagagagatttctaaccgatcaacctcatcctcagagagagccagctctcctgcacagtgtgtcactcctgtccaaactgttgtataaaggactgtaagatcaggggcatcattgctatacactcttgattacactggcagctctatgagtagaaagtcttcggaatttagaacccatctatgagagaaagttcagtcactttatttattttaaatctctctaggatgagtttagaactgtagcagtgcaggtggcttaagtgaagtaactccatatgtaattacatgattatgatactaatcttttaagtatccaaagaatattaaaatacttcaatcctggattcacagtgggaacaagtttctattaaaaggcaaatgctgttacaaatttttggcatctggtaatattaaaaccattttagaaatacactctgtgctcactgtgcagaggaacatcagttttcaaaccaacactgaaattctgtggcatcacatatattgggccttgatgtcatgacagatcaaaatcatttgatatccctttctccattctaggtttttctttttttcagtaactgatttaccttgatcacttttcaacttccatattcttcatatagtaaaaggcaaagtgttgaagatactacggtgtggtagtagttgaaaattattgccgtcattatttacatacttaagacatattagcaagttgatccaaaatgggaggccttatagatgtgcttgggggaaaatgaaggggagaaagtagccatacaggagttcaaagaattccatgcccttcagattagcccaattaccagaaacatcatgaaagatattttaaaaactaattatttactacagtgtatttcacttgtcttgtgtgtctgaacacacagaagctaattagcaagtttttaagaagtatttaaaaatcttactaggattgacattttttctgaattctgtataaatagcttatagtgagaagtactgtgctcaaattttacatttttttcctttgcaaattctgtaatttcactcaacgattaagtctaccaaagaacacactgcatgtaaaagatgtattacaatctcaaagccagtaaaagaaatcttgcttcactgttcacctgctacaagtaagagtttggtgctggtagaaacatttgactctgatgtctattttattctacataagagccatatgtaatgtactgtaacaaaggagcttcttgtccccttggtcttttaattaaaagaaattccaactgacttttaaactttgttcttgtccaaagttgccatttcttttttttccccagaaatatttggaaattattggaggaatatgcaccccagatgaaaatgttcagtttgtacccatttttccttaaccaacacccaaatcaaacaattaaaatatacagtgtttttccactcactaattcactatacagagagtctgaaccttagcctccctcttggtcttgcagtgaggaagtttctattagtatatccaatttagcaaaattggtaccaaaatgatttctttggtaattgtgtgaaatataagctttttaacagggcatttaagtggctagcaaatcagtaattaaaaattaagctttctactccaagtatttcacaaacgcatctgccattttcctcatttaaaccttggttatcttggcctgataccacataaaagaatgtagaatggctgaagagatcaagaatttaaagcttctagtcttaacatacttgcatccacttcaaattcaaatcaaaagccagggaaatctaagtgcaaccctaccacttctctgctgagaaccttccagtggttcccctcaccttctgcagaagtctccaatatggagtacatgcacttgggcatttaatatataccactggtgtgtgtgggagggagggaggaggaatactagccctttttatatatttacacaagcaaaacttttaaatatttgaattgacagttacatgtttcataactttgtatgtctattggttgtgcaggtgtaattttttccctttttgattagggttacaaaatttagagaccagtatgattaagttgaagctccttagcctccttcgacctagtctctgcatacctcaacttttacgtaccaatgctactctgctgttcacaattgcctcatgtaatctgcagattcctgcctccccactttggttcagtctgtcttgtgcacctggaacaactgttctcccttgtgactaattcctattttctagagtttaggcatcatctcttcctttgggaagttatctgattcacgactgccttctctgacatccccaccttcctctgtgcccccatagcactgtgtataccgctactaccactgcaattcacattatattggaatgaacaattcacatgtctaccacaagtctgtaaacataaccttatttgaaatgaattgcaataaagctctgttacaacgt

SEQ ID NO: 189680 - DNA, 3420 bp, Artificial Sequence
  derived and/or modified sequence
gaacatggccgcttccggtctccctcccgggccggcgctggcctgactgcggccccggtccgtagcactccgccctccgcttctcccgccctgtagccgcgaagactgcttcagcctttccctgtgctgcccctgccgcgcgatggagaagagctcgagctgcgagagtcttggctcccagccggcggcggctcggccgcccagcgtggactccttgtccagttaatgtgttaagagccattgacatttgaagatcatcagaagtgaagataaaacatctcaaaaattataattgcctccacttctcattcagagaattcagtgcatacaaaatcagcttctgttgtatcatcagattccatttcaacttctgccgacaacttttctcctgatttgaggcccatgcagtccagttcgggagctaagtcacttaaacactgtgtgatagttcctacacatctcattatagtttgtcctgagggagtctaacaagttagcagaaatggaagaaccacccttgcttccaggagaaaatattaaagacatggccaaagatgtaacttatatatgtccattcactggcgctgtacgaggaactctgactgtcacgaattataggttatatttcaaaagcatggaacgggatcccccatttgttttagatgcttcccttggtgtgataaatagagtagaaaaaattggtggtgcttctagtcgaggtgaaaattcttatggactagaaactgtgtgtaaggatattaggaatttacgatttgctcataaacctgaggggcggacaagaagatccatatttgagaatctaatgaaatatgcatttcctgtctctaataacctgcctctttttgcttttgaatacaaagaagtattccctgaaaatgggtggaagctatatgaccctcttttagagtatagaaggcagggaattccaaatgaaagctggagaataacaaagataaatgaacgatatgaactttgtgatacataccctgccctcctggttgtgccagcaaatattcctgatgaagaattaaagagagtggcatccttcagatcaagaggccgtatcccagttttatcatggattcatcctgaaagtcaagccacaatcactcggtgtagccagcccatggttggagtgagtggaaagcgaagcaaagaagatgaaaaataccttcaagctatcatggattccaatgcccagtctcacaaaatctttatatttgatgcccggccaagtgttaatgctgttgccaacaaggcaaagggtggaggttatgaaagtgaagatgcctatcaaaatgctgaactagttttcctggatatccacaatattcatgttatgagagaatcattacgaaaacttaaggagattgtgtaccccaacattgaggaaacccactggttgtctaacttggaatctactcattggctagaacatattaagcttattcttgcaggggctcttaggattgctgacaaggtagagtcagggaagacgtctgtggtagtgcattgcagtgatggttgggatcgcacagctcagctcacttcccttgccatgctcatgttggatggatactatcgaaccatccgaggatttgaagtccttgtggagaaagaatggctaagttttggacatcgatttcaactaagagttggccatggagataagaaccatgcagatgcagacagatcgcctgtttttcttcaatttattgactgtgtctggcagatgacaagacagtttcctaccgcatttgaattcaatgagtattttctcattaccattttggaccacctatacagctgcttattcggaacattcctctgtaatagtgaacaacagagaggaaaagagaatcttcctaaaaggactgtgtcactgtggtcttacataaacagccagctggaagacttcactaatcctctctatgggagctattccaatcatgtcctttatccagtagccagcatgcgccacctagagctctgggtgggatattacataaggtggaatccacggatgaaaccacaggaacctattcacaacagatacaaagaacttcttgctaaacgagcagagcttcagaaaaaagtagaggaactacagagagagatttctaaccgatcaacctcatcctcagagagagccagctctcctgcacagtgtgtcactcctgtccaaactgttgtataaaggactgtaagatcaggggcatcattgctatacactcttgattacactggcagctctatgagtagaaagtcttcggaatttagaacccatctatgagagaaagttcagtcactttatttattttaaatctctctaggatgagtttagaactgtagcagtgcaggtggcttaagtgaagtaactccatatgtaattacatgattatgatactaatcttttaagtatccaaagaatattaaaatacttcaatcctggattcacagtgggaacaagtttctattaaaaggcaaatgctgttacaaatttttggcatctggtaatattaaaaccattttagaaatacactctgtgctcactgtgcagaggaacatcagttttcaaaccaacactgaaattctgtggcatcacatatattgggccttgatgtcatgacagatcaaaatcatttgatatccctttctccattctaggtttttctttttttcagtaactgatttaccttgatcacttttcaacttccatattcttcatatagtaaaaggcaaagtgttgaagatactacggtgtggtagtagttgaaaattattgccgtcattatttacatacttaagacatattagcaagttgatccaaaatgggaggccttatagatgtgcttgggggaaaatgaaggggagaaagtagccatacaggagttcaaagaattccatgcccttcagattagcccaattaccagaaacatcatgaaagatattttaaaaactaattatttactacagtgtatttcacttgtcttgtgtgtctgaacacacagaagctaattagcaagtttttaagaagtatttaaaaatcttactaggattgacattttttctgaattctgtataaatagcttatagtgagaagtactgtgctcaaattttacatttttttcctttgcaaattctgtaatttcactcaacgattaagtctaccaaagaacacactgcatgtaaaagatgtattacaatctcaaagccagtaaaagaaatcttgcttcactgttcacctgctacaagtaagagtttggtgctggtagaaacatttgactctgatgtctattttattctacataagagccatatgtaatgtactgtaacaaaggagcttcttgtccccttggtcttttaattaaaagaaattccaactgacttttaaacttt

SEQ ID NO: 189681 - DNA, 1450 bp, Artificial Sequence
  derived and/or modified sequence
aattcgcggattctggtttctgaaggctacgccggaattccttccccgggacttgggaaccacttctgcctccctccctggggcgtggaggctgaggaaaaggagttaatgtgttaagagccattgacatttgaagatcatcagaagtgaagataaaacatctcaaaaattataatgggaatacttccagcttttacccattcagtgtgatgttggctgtagctctcactattttgagtgcctccacttctcattcagagaattcagtgcatacaaaatcagcttctgttgtatcatcagattccatttcaacttctgccgacaacttttctcctgatttgagggtcctgagggagtctaacaagttagcagaaatggaagaaccacccttgcttccaggagaaaatattaaagacatggccaaagatgtaacttatatatgtccattcactggcgctgtacgaggaactctgactgtcacgaattataggttatatttcaaaagcatggaacgggatcccccatttgttttagatgcttcccttggtgtgataaatagagtagaaaaaattggtggtgcttctagtcgaggtgaaaattcttatggactagaaactgtgtgtaaggatattaggaatttacgatttgctcataaacctgaggggcggacaagaagatccatatttgagaatctaatgaaatatgcatttcctgtctctaataacctgcctctttttgcttttgaatacaaagaagtattccctgaaaatgggtggaagctatatgaccctcttttagagtatagaaggcagggaattccaaatgaaagctggagaataacaaagataaatgaacgatatgaactttgtgatacataccctgccctcctggttgtgccagcaaatattcctgatgaagaattaaagagagtggcatccttcagatcaagaggccgtatcccagttttatcatggattcatcctgaaagtcaagccacaatcactcggtgtagccagcccatggttggagtgagtggaaagcgaagcaaagaagatgaaaaataccttcaagctatcatggattccaatgcccagtctcacaaaatctttatatttgatgcccggccaagtgttaatgctgttgccaacaaggcaaagggtggaggttatgaaagtgaagatgcctatcaaaatgctgaactagttttcctggatatccacaatattcatgttatgagagaatcattacgaaaacttaaggagattgtgtaccccaacattgaggaaacccactggttgtctaacttggaatctactcattggctagaacatattaagcttattcttgcaggggctcttaggattgctgacaaggtagagtcagggaagacgtctgtggtagtgcattgcagtgatggttgggatcgcacagctcagctcacttcccttgc

SEQ ID NO: 189682 - DNA, 1932 bp, Artificial Sequence
  derived and/or modified sequence
atggagaagagcagcagctgcgagagcctgggcagccagcccgccgccgcacgcccgccgtcagtcgacagcctctcatccgcctccacctcccattccgaaaattccgttcatactaagagcgcatccgtcgtgagcagtgactctatttcaacgagtgccgacaactttagccctgatctgcgcgtgctgcgcgagtcaaacaaattagctgaaatggaagagccccctttgttgccaggtgaaaacatcaaggacatggcaaaagacgtgacctacatttgtccgtttaccggcgccgtccggggcactttaacagtgaccaactaccgtctgtactttaaatccatggagcgtgaccccccattcgtgctagacgcctctttgggcgtaataaaccgcgtagagaaaatcggcggcgcctctagtagaggcgagaattcgtacggtcttgagactgtgtgtaaggatatccgcaacctcagattcgcacacaaaccagaaggtcgtacccggcgatccatattcgagaaccttatgaaatacgcctttcctgtaagcaataatcttcccttattcgcattcgaatacaaagaggtgttccccgagaacggctggaagttgtacgaccctcttctggagtatagaaggcagggcattcccaacgaatcttggcgcattactaaaataaacgagagatatgagttatgcgatacctatccagccctcctagttgtccctgctaacataccagacgaagaactgaaacgggtagccagcttcagatcgaggggtagaattccagttctgagctggatccaccccgaaagccaggccaccatcacgcgctgctcccagccgatggtcggtgtatccggtaagagaagcaaagaagatgaaaaatacctgcaggctatcatggactcaaatgctcagtctcacaaaattttcatctttgacgcacgaccttctgtgaacgcggtcgcaaataaagcaaagggtgggggctatgagtcggaggatgcctatcaaaatgccgagctggttttcctggacatccacaatattcatgtgatgagagagtccttgagaaagcttaaagaaattgtgtatcccaacattgaagaaacccactggctgtcgaatctcgagagtacccattggctggaacacatcaaactgatcctggccggagcccttcgcatcgctgacaaagtggagtccggtaagaccagcgtcgtggtgcactgctcagatgggtgggaccgcactgcccagttaacctctcttgctatgttaatgcttgacggatactataggacaatcaggggattcgaggtgctcgtagaaaaggaatggctgagttttgggcataggtttcaactgcgagttggtcatggagataaaaaccacgctgacgcagaccgcagccccgtgttcctccaattcattgactgtgtgtggcaaatgacgcgccagtttcctactgcctttgaatttaacgagtattttctgatcaccatcctggaccatttgtattcatgtctatttggaactttcctgtgcaattctgaacagcaacgggggaaagagaacctaccaaaaagaactgtctccctgtggtcttacattaattcccagctggaagacttcacgaacccgctctatggctcctatagcaatcacgtcctgtaccccgtggcttctatgaggcacctggaactctgggttgggtattatataagatggaatcctaggatgaagccccaagagccgattcacaatagatacaaggaactactggcaaagcgggccgagctccagaagaaagtggaggaactgcagagagagattagcaacagaagcacgtcctcttcagagcgcgccagttcacctgcccagtgcgttactcctgttcaaacggtggtgtag

SEQ ID NO: 189683 - DNA, 981 bp, Artificial Sequence
  derived and/or modified sequence
atgctggccgtggccctgaccatcctgagcgccagcaccagccacagcgaaaatagcgtgcacaccaagtctgctagtgttgtgtcatccgattcaatttcgacatctgctgataacttctccccagacttgagagtgctgagagaaagcaacaagctggctgagatggaggagcccccattgttaccaggtgagaacatcaaagatatggctaaggacgtcacatacatttgcccattcacaggagctgtcagaggaacactgacggtcactaactacaggctctactttaaaagcatggaaagggatccacctttcgttctggacgcaagtctgggcgtgattaatcgcgtggaaaaaatcggcggtgcttcgtccagaggtgaaaactcatacggtctggagaccgtctgtaaagacatacgaaatctgagattcgcccacaaacccgaggggcgtactcgaagaagtatctttgaaaacttgatgaagtacgcctttcctgtatctaataaccttccattgtttgcctttgagtacaaggaagtgttccctgaaaacggttggaaactgtatgaccccctgttggaataccgccgccagggcatcccaaacgagagctggcgaatcacaaaaatcaacgaacgctacgagctctgcgatacgtatccggcacttttggtcgtgcccgccaacattcccgacgaagagctcaaacgtgttgctagttttcgcagcaggggccgcatcccggtgttgtcttggatacacccagaatcacaggccaccattactcgatgctcacaacccatggttggtgtcagcggtaaaagaagcaaagaagatgaaaagtacctacaggccataatggattctaatgcacaatcccataagattttcatcttcgacgccaggccttcagtcaacgccgtcgccaataaggcgaagggcgggggatatgagtcagaggacgcttactag

SEQ ID NO: 189684 - DNA, 1932 bp, Artificial Sequence
  derived and/or modified sequence
atggagaaatcctcctcttgcgagtctttagggagtcaacccgcagcagccagacccccaagtgtggattccctttcaagcgcaagcacgagccatagtgaaaatagcgtgcacactaaatccgcctctgtggtaagctccgactccatctccacctctgccgacaacttctcacctgacttgcgtgtcttgcgggaatctaataagctagctgagatggaggaaccacctctattgcccggagaaaacataaaagacatggctaaagatgttacttacatttgtcccttcaccggagccgtcagaggcacgctcaccgtcacaaactatcggctttactttaagtctatggagcgtgaccctcctttcgtgctggatgcctccctgggagtgataaatcgcgttgagaagatagggggagcttcctcgagaggtgagaatagctatggcttagagaccgtgtgtaaggacattcgcaatcttaggttcgcccataaacccgaaggaagaaccagacgctctatttttgagaaccttatgaagtatgccttcccagtgagcaataacttacccttatttgctttcgaatacaaagaagtgttccccgagaatggatggaagctctacgatccgttactggaatacaggcgccaaggtattcccaatgagtcctggaggatcactaaaatcaatgaacgctacgaactgtgtgatacttatcctgcgctgctggttgttcctgccaacattcctgacgaagaactgaaacgcgtcgccagctttagatccagggggagaatccccgtcctgagctggatccatcctgaaagccaggctaccatcacccgctgctcccagcccatggtgggggtctccggcaaacggagtaaagaagacgaaaagtatttacaggcaattatggattccaacgctcagtcacacaaaattttcatttttgatgcccgtcccagcgttaatgctgtcgctaataaagccaaaggtggcggatatgagtccgaagacgcttatcagaatgccgaactagtgttcttggatatccataatatacatgtcatgcgcgagagtttgcgaaaattgaaggaaatagtgtacccaaacatcgaggagacccactggctatctaacctggaaagcactcattggcttgaacacatcaagcttatcctcgccggagcccttcgcatcgcggacaaagtagagtcaggaaagaccagtgtcgtcgtgcactgctccgacggatgggaccggactgcgcagctcaccagcctggctatgctcatgttagatggctattaccgcacaatccgtggattcgaggtacttgtcgaaaaggagtggctgtcattcggacaccgattccagctgagagtcggccacggggacaagaaccatgccgacgccgacaggagtccggtcttcctgcagttcattgactgtgtgtggcagatgacccgccaattcccaacagcgttcgagttcaatgagtactttttgataacaatcctggatcacttgtactcttgtctgttcgggacctttctgtgcaatagcgagcagcagagaggaaaagagaatctaccgaaaaggacagtgagcctgtggagttatatcaacagccagctggaagacttcactaatccgctgtatggcagttattccaatcacgtcctgtatcccgtcgcttcaatgagacacctggagctttgggtgggctattacatccggtggaacccacggatgaaacctcaagagccaatccacaatcgatacaaagaattgctggcaaagcgcgcagagctgcagaagaaagtggaagagcttcagcgcgagatttccaacagaagtacaagctcatctgaacgggcatcctcgccagcccaatgcgtgacccccgtgcaaacggtagtttag

SEQ ID NO: 189685 - DNA, 981 bp, Artificial Sequence
  derived and/or modified sequence
atgctggccgttgccctgacaatactgtcagcatccacatcccatagcgagaactccgtccatacgaaatccgcaagcgtggtgagtagcgactccatatcgacgagcgctgacaattttagtcctgacctgcgagtcttgcgggagtccaacaaacttgctgagatggaagaacctccacttttgcccggagagaatataaaggacatggctaaggacgtaacctacatttgtcctttcactggagcggtgcggggaacactaactgtgacaaactatcggctgtactttaaatctatggaacgggatccaccttttgtgctagatgctagtctcggcgtgataaatagagtcgaaaaaatcgggggagcatcgagccggggagagaactcctacggactggaaacggtgtgtaaagacattaggaatctgagatttgcccataagcctgaaggcagaaccagacgcagcatcttcgaaaacttgatgaaatatgcattccccgtgtcaaacaacttgccactcttcgcgttcgagtacaaagaagttttccccgaaaacggctggaaattgtatgaccctcttttggaatatcgacgccagggaatccccaatgaaagctggagaatcaccaaaattaacgagcggtatgagctttgcgatacatacccagccctgctggtggtccctgccaatattcccgacgaggaactgaaacgtgttgccagtttccggagtagaggacgcattccggtgctgtcctggattcaccccgaatcccaggcaaccatcacacgatgcagccagccaatggtgggcgtctctggcaaacggagtaaggaggatgagaaatacctgcaagcaatcatggattcaaacgcccaatcccataaaatcttcatcttcgatgccagaccgagtgtgaacgcagtcgcgaataaggccaagggaggaggatatgaatcagaggatgcttattag

SEQ ID NO: 189686 - DNA, 1932 bp, Artificial Sequence
  derived and/or modified sequence
atggagaagagcagcagctgcgagagcctgggcagccagcccgccgccgccagaccccccagcgtggacagcctgagcagcgccagcaccagccacagcgagaacagcgtgcacaccaagagcgccagcgtggtgagcagcgacagcatcagcaccagcgccgacaacttcagccccgacctgagagtgctgagagagagcaacaagctggccgagatggaggagccccccctgctgcccggcgagaacatcaaggacatggccaaggacgtgacctacatctgccccttcaccggcgccgtgagaggcaccctgaccgtgaccaactacagactgtacttcaagagcatggagagagacccccccttcgtgctggacgccagcctgggcgtgatcaacagagtggagaagatcggcggcgccagcagcagaggcgagaacagctacggcctggagaccgtgtgcaaggacatcagaaacctgagattcgcccacaagcccgagggcagaaccagaagaagcatcttcgagaacctgatgaagtacgccttccccgtgagcaacaacctgcccctgttcgccttcgagtacaaggaggtgttccccgagaacggctggaagctgtacgaccccctgctggagtacagaagacagggcatccccaacgagagctggagaatcaccaagatcaacgagagatacgagctgtgcgacacctaccccgccctgctggtggtgcccgccaacatccccgacgaggagctgaagagagtggccagcttcagaagcagaggcagaatccccgtgctgagctggatccaccccgagagccaggccaccatcaccagatgcagccagcccatggtgggcgtgagcggcaagagaagcaaggaggacgagaagtacctgcaggccatcatggacagcaacgcccagagccacaagatcttcatcttcgacgccagacccagcgtgaacgccgtggccaacaaggccaagggcggcggctacgagagcgaggacgcctaccagaacgccgagctggtgttcctggacatccacaacatccacgtgatgagagagagcctgagaaagctgaaggagatcgtgtaccccaacatcgaggagacccactggctgagcaacctggagagcacccactggctggagcacatcaagctgatcctggccggcgccctgagaatcgccgacaaggtggagagcggcaagaccagcgtggtggtgcactgcagcgacggctgggacagaaccgcccagctgaccagcctggccatgctgatgctggacggctactacagaaccatcagaggcttcgaggtgctggtggagaaggagtggctgagcttcggccacagattccagctgagagtgggccacggcgacaagaaccacgccgacgccgacagaagccccgtgttcctgcagttcatcgactgcgtgtggcagatgaccagacagttccccaccgccttcgagttcaacgagtacttcctgatcaccatcctggaccacctgtacagctgcctgttcggcaccttcctgtgcaacagcgagcagcagagaggcaaggagaacctgcccaagagaaccgtgagcctgtggagctacatcaacagccagctggaggacttcaccaaccccctgtacggcagctacagcaaccacgtgctgtaccccgtggccagcatgagacacctggagctgtgggtgggctactacatcagatggaaccccagaatgaagccccaggagcccatccacaacagatacaaggagctgctggccaagagagccgagctgcagaagaaggtggaggagctgcagagagagatcagcaacagaagcaccagcagcagcgagagagccagcagccccgcccagtgcgtgacccccgtgcagaccgtggtgtag

SEQ ID NO: 189687 - DNA, 981 bp, Artificial Sequence
  derived and/or modified sequence
atgctggccgtggccctgaccatcctgagcgccagcaccagccacagcgagaacagcgtgcacaccaagagcgccagcgtggtgagcagcgacagcatcagcaccagcgccgacaacttcagccccgacctgagagtgctgagagagagcaacaagctggccgagatggaggagccccccctgctgcccggcgagaacatcaaggacatggccaaggacgtgacctacatctgccccttcaccggcgccgtgagaggcaccctgaccgtgaccaactacagactgtacttcaagagcatggagagagacccccccttcgtgctggacgccagcctgggcgtgatcaacagagtggagaagatcggcggcgccagcagcagaggcgagaacagctacggcctggagaccgtgtgcaaggacatcagaaacctgagattcgcccacaagcccgagggcagaaccagaagaagcatcttcgagaacctgatgaagtacgccttccccgtgagcaacaacctgcccctgttcgccttcgagtacaaggaggtgttccccgagaacggctggaagctgtacgaccccctgctggagtacagaagacagggcatccccaacgagagctggagaatcaccaagatcaacgagagatacgagctgtgcgacacctaccccgccctgctggtggtgcccgccaacatccccgacgaggagctgaagagagtggccagcttcagaagcagaggcagaatccccgtgctgagctggatccaccccgagagccaggccaccatcaccagatgcagccagcccatggtgggcgtgagcggcaagagaagcaaggaggacgagaagtacctgcaggccatcatggacagcaacgcccagagccacaagatcttcatcttcgacgccagacccagcgtgaacgccgtggccaacaaggccaagggcggcggctacgagagcgaggacgcctactag

SEQ ID NO: 189688 - protein, 706 aa, Artificial Sequence
  derived and/or modified sequence
MDRRNDYGYRVPLFQGPLPPPGSLGLPFPPDIQTETTEEDSVLLMHTLLAATKDSLAMDPPVVNRPKKSKTKKAPIKTITKAAPAAPPVPAANEIATNKPKITWQALNLPVITQISQALPTTEVTNTQASSVTAQPKKANKMKRVTAKAAQGSQSPTGHEGGTIQLKSPLQVLKLPVISQNIHAPIANESASSQALITSIKPKKASKAKKAANKAIASATEVSLAATATHTATTQGQITNETASIHTTAASIRTKKASKARKTIAKVINTDTEHIEALNVTDAATRQIEASVVAIRPKKSKGKKAASRGPNSVSEISEAPLATQIVTNQALAATLRVKRGSRARKAATKARATESQTPNADQGAQAKIASAQTNVSALETQVAAAVQALADDYLAQLSLEPTTRTRGKRNRKSKHLNGDERSGSNYRRIPWGRRPAPPRDVAILQERANKLVKYLLVKDQTKIPIKRSDMLRDVIQEYDEYFPEIIERASYTLEKMFRVNLKEIDKQSSLYILISTQESSAGILGTTKDTPKLGLLMVILSVIFMNGNKASEAVIWEVLRKLGLRPGVRHSLFGEVRKLITDEFVKQKYLEYKRVPNSRPPEYEFFWGLRSYHETSKMKVLKFACRVQKKDPKDWAVQYREAVEMEVQAAAVAVAEAEARAEIYSPCLQIPLINCSSPSHGAKVHPWNLCPHSSQGSYGQSAEGVM

SEQ ID NO: 189689 - protein, 71 aa, Artificial Sequence
  derived and/or modified sequence
MHTLLAATKDSLAMDPPVVNRPKKSKTKKAPIKTITKAAPAAPPVPAANEIATNKPKITWQALNLPVITQI

SEQ ID NO: 189690 - protein, 64 aa, Artificial Sequence
  derived and/or modified sequence
MHTLLAATKDSLAMDPPVVNRPKKSKTKKAPIKTITKAAPAAPPVPAANEIATNKPKITWQALN

SEQ ID NO: 189691 - DNA, 2121 bp, Artificial Sequence
  derived and/or modified sequence
atggacagaagaaacgactacggctacagagtgcccctgttccagggccccctgcccccccccggcagcctgggcctgcccttcccccccgacatccagaccgagaccaccgaggaggacagcgtgctgctgatgcacaccctgctggccgccaccaaggacagcctggccatggacccccccgtggtgaacagacccaagaagagcaagaccaagaaggcccccatcaagaccatcaccaaggccgcccccgccgccccccccgtgcccgccgccaacgagatcgccaccaacaagcccaagatcacctggcaggccctgaacctgcccgtgatcacccagatcagccaggccctgcccaccaccgaggtgaccaacacccaggccagcagcgtgaccgcccagcccaagaaggccaacaagatgaagagagtgaccgccaaggccgcccagggcagccagagccccaccggccacgagggcggcaccatccagctgaagagccccctgcaggtgctgaagctgcccgtgatcagccagaacatccacgcccccatcgccaacgagagcgccagcagccaggccctgatcaccagcatcaagcccaagaaggccagcaaggccaagaaggccgccaacaaggccatcgccagcgccaccgaggtgagcctggccgccaccgccacccacaccgccaccacccagggccagatcaccaacgagaccgccagcatccacaccaccgccgccagcatcagaaccaagaaggccagcaaggccagaaagaccatcgccaaggtgatcaacaccgacaccgagcacatcgaggccctgaacgtgaccgacgccgccaccagacagatcgaggccagcgtggtggccatcagacccaagaagagcaagggcaagaaggccgccagcagaggccccaacagcgtgagcgagatcagcgaggcccccctggccacccagatcgtgaccaaccaggccctggccgccaccctgagagtgaagagaggcagcagagccagaaaggccgccaccaaggccagagccaccgagagccagacccccaacgccgaccagggcgcccaggccaagatcgccagcgcccagaccaacgtgagcgccctggagacccaggtggccgccgccgtgcaggccctggccgacgactacctggcccagctgagcctggagcccaccaccagaaccagaggcaagagaaacagaaagagcaagcacctgaacggcgacgagagaagcggcagcaactacagaagaatcccctggggcagaagacccgccccccccagagacgtggccatcctgcaggagagagccaacaagctggtgaagtacctgctggtgaaggaccagaccaagatccccatcaagagaagcgacatgctgagagacgtgatccaggagtacgacgagtacttccccgagatcatcgagagagccagctacaccctggagaagatgttcagagtgaacctgaaggagatcgacaagcagagcagcctgtacatcctgatcagcacccaggagagcagcgccggcatcctgggcaccaccaaggacacccccaagctgggcctgctgatggtgatcctgagcgtgatcttcatgaacggcaacaaggccagcgaggccgtgatctgggaggtgctgagaaagctgggcctgagacccggcgtgagacacagcctgttcggcgaggtgagaaagctgatcaccgacgagttcgtgaagcagaagtacctggagtacaagagagtgcccaacagcagaccccccgagtacgagttcttctggggcctgagaagctaccacgagaccagcaagatgaaggtgctgaagttcgcctgcagagtgcagaagaaggaccccaaggactgggccgtgcagtacagagaggccgtggagatggaggtgcaggccgccgccgtggccgtggccgaggccgaggccagagccgagatctacagcccctgcctgcagatccccctgatcaactgcagcagccccagccacggcgccaaggtgcacccctggaacctgtgcccccacagcagccagggcagctacggccagagcgccgagggcgtgatgtag

SEQ ID NO: 189692 - DNA, 2121 bp, Artificial Sequence
  derived and/or modified sequence
atggacagacgcaacgactacgggtatcgtgtcccgttgttccaaggacccctgcctcctccaggctccctgggcctgcccttcccacccgacatccagaccgaaactaccgaggaggatagcgtgttacttatgcacaccctcctggcggcaaccaaggattctttggcaatggaccctcccgtggtcaatcgcccaaaaaagagcaagacgaagaaggctcctattaagaccattactaaggcagcccctgccgctccaccggtgcccgccgccaacgagatcgctacaaataagccaaagatcacatggcaagccctgaaccttcccgttattacacaaatcagccaggccctaccaaccaccgaagtgaccaacactcaagctagcagcgtcacagcacagcctaaaaaagcaaataaaatgaagagagttacagccaaggccgcgcaagggtctcagtctcccacaggccatgagggtggcacaatccagctaaagtccccactgcaggtattgaaactgcctgtcatctctcaaaacatccacgcccccatagctaacgagagtgcttcctcacaagccctgatcaccagcattaaacctaaaaaagcttcaaaggcaaaaaaggccgccaacaaggctatcgccagcgcgacagaagtcagtctcgccgcaacagctacccatacagccaccactcagggccagattacgaacgagacggcttctattcataccactgcagcttcgattaggactaaaaaagctagcaaagcccggaaaacgatcgccaaagtgattaataccgacaccgagcacattgaggcattaaatgtaacggatgccgccaccagacagattgaggcttcggtggtagcaattcgtccaaaaaagagcaaaggaaagaaggcagcatctcgaggccccaacagcgtttctgaaatcagtgaggcgcctctggcaacccaaattgtgactaaccaagcccttgccgcaacactgcgtgtgaaacgcgggtccagagcacgaaaggcagctaccaaagcccgcgctaccgagtcgcaaacaccgaacgccgatcagggtgcccaggccaagattgccagcgcccaaaccaacgtgtcagccctggagacccaagtggcagccgcagtgcaggccctggccgacgactaccttgcccagctctcgctagagcctaccaccaggacccgcggcaaaagaaataggaagtcaaagcacctgaacggagatgaaaggagcgggtctaattacagaaggattccttgggggagacgccccgcccctccaagggatgtggcgatcctgcaggagagggccaacaaacttgtgaaatatctgctcgtgaaagaccagacaaaaatcccgataaagagatcggatatgctgagagatgtcatccaagaatatgatgaatacttcccggagatcattgagcgcgcttcttatacgttagagaaaatgtttcgcgtgaatctcaaggagatcgataagcagagctcgttatatattctgatttccacccaggaatcttccgcaggcatactgggaactactaaggatacacccaaattagggctgctgatggtcatcttgtcagtgattttcatgaacggaaacaaggcctctgaagccgtgatctgggaggtgctaagaaaacttggactcaggcctggggtaagacacagtctgttcggagaggttagaaaactgatcacagatgagtttgtaaagcagaaatatttggagtataagagggtacctaatagccgacctccggagtacgaatttttctggggcctgcggtcttatcacgagactagcaaaatgaaagttctgaaattcgcctgcagagtgcaaaaaaaagatcccaaggactgggccgtccagtacagagaggctgtggaaatggaagtgcaggcagccgcagtggccgtggcggaagccgaagccagagccgagatatatagtccttgccttcaaatcccattaattaactgcagttctccttcccacggcgctaaagtgcacccttggaacctgtgcccccattcttctcagggctcctatgggcagtccgcagagggcgtgatgtag

SEQ ID NO: 189693 - DNA, 2121 bp, Artificial Sequence
  derived and/or modified sequence
atggatcgtagaaacgattatggctatcgggtgcccttgttccaaggtcccctacctcctccagggagcttagggctcccttttccgccagacatacagacagaaactacagaagaagattccgtgctgttaatgcacacattgcttgccgcgaccaaagactcccttgcaatggatcccccagtggtgaataggcctaaaaagagcaaaacaaaaaaggcaccaatcaagacaattacaaaggctgcaccagccgcaccgcccgtccccgcagccaatgagattgctacaaataagcctaagattacgtggcaggcgttgaatctgcccgttatcactcagatatcccaggcactgccaacaacggaggttaccaacactcaggccagcagtgttaccgctcagcccaaaaaggccaacaaaatgaaaagggtcacagccaaagctgcacagggatcccaatctcctaccggccacgaggggggcacaatacagctcaaatcgccgctgcaggtccttaagctccctgttatcagccagaatatccacgcacccatcgcaaacgagtctgcttctagccaagcgctgatcacatcgatcaaacctaaaaaggccagtaaggctaagaaggctgcaaataaggctatcgccagcgcaactgaggtaagtctggctgccacagccactcacaccgccaccacacaaggccagatcactaatgaaactgcgagtattcataccaccgccgctagtatcaggaccaaaaaggcatccaaagcaaggaagactatagccaaagttatcaatacggacaccgaacacatagaagctctgaacgtcaccgacgctgctacgcgccagatcgaggccagtgttgttgctattagaccaaagaaatcaaagggcaagaaagctgcctcaagagggcctaacagtgtgtccgagatcagcgaggctccattagctactcagattgttactaaccaggccctggccgcaacactcagggtaaagagaggctctcgggcacgcaaagccgccaccaaagccagggctacagaatcccagacccctaatgctgaccagggggcgcaggcaaaaatcgctagcgcgcaaacaaatgttagcgcactggaaacgcaggtggccgcagccgtacaggctcttgctgacgattatctcgcccagctctctctggagccgacaactcgcacccggggtaaacgaaatagaaaatcaaaacacctgaacggagacgagcggagcggaagtaactaccggcgcattccgtggggacgccgacctgctccacctcgcgacgtcgccatcctgcaggagcgggccaacaagctggtgaaatacctcctcgtgaaggatcagaccaagatcccaattaagcggtctgacatgttgcgggacgtaattcaggaatatgacgaatacttccctgaaatcatcgagagagcctcatacaccctggagaaaatgtttcgagtaaacttgaaggagatagataagcagagcagcctttatatcttaatttcaacccaggagagctcagctggtatcctcggcaccactaaggacacacctaaattaggcctgctgatggtcattctcagtgtcatcttcatgaatggcaacaaagcgtctgaagcagtgatctgggaggtcttgcgcaaactgggcctgaggcccggcgtccgccattcactgtttggggaggttagaaagctcataactgacgaatttgtgaagcagaagtacctcgaatacaagagagtccctaattcccggccacctgagtacgaatttttttgggggttacgatcttatcatgagaccagtaaaatgaaagttctgaaatttgcttgtagggtgcagaagaaggatccaaaggactgggccgtccaatacagagaggcggtggaaatggaagttcaagctgctgcagtggctgtggctgaagccgaggcacgcgcggaaatctatagcccttgtctccaaattcccctgattaactgttcaagcccctcacacggcgcgaaggtacatccttggaatctctgtcctcactctagtcagggcagctatggccagtctgcggagggcgtgatgtag

SEQ ID NO: 189694 - DNA, 2121 bp, Artificial Sequence
  derived and/or modified sequence
atggacagaagaaatgactatggctacagagtgcccctcttccagggccccctgcccccacctggcagcctgggcctgcccttccccccagacatccagacagagaccacagaagaagattctgtgctgctgatgcacaccctgctggccgccaccaaggacagcctggccatggacccccctgtggtgaaccggcccaagaagagcaagaccaagaaggcccccatcaagaccatcaccaaggccgccccagctgcccctcctgtgcctgctgccaatgaaattgccaccaacaagcccaagatcacctggcaggccctgaacctgcccgtcatcacccagatcagccaggccctgcccaccacagaggtgaccaacacccaggccagctctgtgacagcccagcccaagaaggccaacaagatgaagagggtgacagccaaggccgcccagggcagccagagccccactggacatgaaggaggcaccatccagctgaagagccccctgcaggtgctgaagctgcccgtcatcagccagaacatccacgcccccatcgccaatgaaagtgccagcagccaggccctgatcaccagcatcaagcccaagaaggccagcaaggccaagaaggccgccaacaaggccatcgccagcgccacagaggtgtccctggccgccacagccacccacacagccaccacccagggccagatcaccaatgaaacagccagcatccacaccacagctgccagcatccgcaccaagaaggccagcaaggccaggaagaccatcgccaaggtgatcaacacagacacagagcacatcgaggccctgaatgtgacagatgctgccacccggcagatcgaggcctctgtggtggccatccggcccaagaagagcaagggcaagaaggccgccagccggggccccaacagcgtgtctgagatcagcgaggcccccctggccacccagatcgtgaccaaccaggccctggccgccaccctgcgggtgaagaggggcagccgggccaggaaggccgccaccaaggcccgggccacagagagccagaccccaaatgctgaccagggcgcccaggccaagatcgccagcgcccagaccaacgtgtctgccctggagacccaggtggccgctgctgtgcaggccctggctgatgactacctggcccagctgagcctggagcccaccaccaggacccggggcaagaggaacaggaagagcaagcacctgaatggagatgagaggagcggcagcaactaccgccgcatcccctggggcagaagacctgcccccccaagagatgtggccatcctgcaggagcgggccaacaagctggtgaagtacctgctggtgaaggaccagaccaagatccccatcaagagaagtgacatgctgagagatgtgatccaggagtatgatgagtacttccctgagatcatcgagcgggccagctacaccctggagaagatgttccgggtgaacctgaaggagattgacaagcagagcagcctgtacatcctgatcagcacccaggagagcagcgctggcatcctgggcaccaccaaggacacccccaagctgggcctgctgatggtgatcctgagcgtcatcttcatgaatggaaacaaggccagcgaggccgtcatctgggaggtgctgaggaagctgggcctgcggcctggggtgcgccacagcctgtttggagaggtgaggaagctgatcacagatgaatttgtgaagcagaagtacctggagtacaagagggtgcccaacagccggcccccagaatatgagttcttctggggcctgcggagctaccacgagaccagcaagatgaaggtgctgaagtttgcctgccgggtgcagaagaaggaccccaaggactgggccgtgcagtaccgggaggccgtggagatggaggtgcaggccgctgctgtggccgtggccgaggccgaggcccgggcagagatctacagcccctgcctgcagatccccctcatcaactgcagcagccccagccacggggccaaggtgcacccctggaacctgtgcccccacagcagccagggcagctatggccagagcgctgagggcgtgatgtag

SEQ ID NO: 189695 - DNA, 2121 bp, Artificial Sequence
  derived and/or modified sequence
atggaccggcggaacgactacggctaccgggtgcccctgttccagggcccgcttccaccaccagggagcttggggctgccgttcccacctgacatccagaccgaaacgaccgaagaggattctgttctgttaatgcatacacttttggcggccacgaaagattccctcgctatggacccgccggtggtgaatagacccaagaagtccaaaaccaaaaaagctccgatcaagacaataacaaaagcagccccagctgcaccccccgtgcctgcagcgaacgagattgctaccaataagccgaagataacctggcaagccctgaatcttccagttattacccagatctcccaggccctcccaaccaccgaggtcaccaatactcaggccagcagcgtcacagctcagcccaagaaggcgaataaaatgaaaagggtgacagcaaaggctgcccaaggcagccagtccccgactggtcacgagggaggaactattcaactaaaaagccccctgcaggtgctaaaactccctgttatatcacagaatatacacgctcccattgcgaacgaatccgctagtagccaggccctcatcacttctattaagccaaaaaaagcctcaaaagcgaaaaaggccgccaacaaggctatcgccagtgcaaccgaggtgtcccttgcagcaacagcaacacacaccgctactacacaggggcagatcactaacgaaaccgccagcatccacacaacggccgcatcgatcagaacgaagaaggccagcaaagccaggaagaccatcgcaaaagtcattaacacagacacggaacatatcgaggcgctgaacgtcactgatgccgcgaccagacaaatcgaagctagcgtagtcgccatcaggcctaaaaaatccaaaggcaagaaggcggcgtctcgcggtccaaactcagtgtctgagatcagtgaagcccctctggccactcaaatcgtgactaaccaagccctagccgccacactgagagtgaaaagggggagccgtgctagaaaagcggcaaccaaagcgcgcgctacagagtcccaaacgcctaacgccgatcagggtgcgcaagcaaaaattgctagtgcccagacaaatgtctctgcgctggaaactcaggtcgctgccgccgtgcaggctctggcggacgactatctggcacagttgagtctggagccaacaactcgcacgcgtggaaagaggaatagaaaatccaagcatctgaacggtgacgagcggtccgggtcaaattataggcgaatcccttggggccggcgccccgctcccccaagggatgtggccattttacaggaacgtgcaaataagctggtgaaatacctattggtgaaagatcagaccaaaatcccgatcaaacgcagcgatatgctccgggacgttatacaggagtacgatgaatactttcctgaaattatcgaacgagcgagttatacattagagaaaatgtttcgagttaacctgaaggagattgacaaacagtcttcactgtatattctcatttccacccaagagagctccgccggcatcttgggcactaccaaggacactcctaagcttggcctgctgatggtgatcctgtcagtcatctttatgaacggtaacaaggcttctgaggccgtcatatgggaagtactgcggaaattaggccttcgacctggcgtgcgacatagcctgtttggcgaagtgcgtaaacttatcactgacgaattcgtgaagcagaagtatctggagtacaaacgggtgcccaattcaagacctcctgaatacgaatttttctggggccttcgcagttaccacgaaacctccaaaatgaaagtcttgaaatttgcttgccgcgtgcagaagaaagaccctaaagattgggcggtgcagtacagagaagccgtggaaatggaggtccaggccgccgctgtggctgtggccgaagctgaggcaagggccgaaatatactctccttgcctgcagatacccctaatcaattgctcttctccaagccatggggccaaagtacatccctggaatctgtgtcctcattcttctcaggggtcgtatggccagtcagcggaaggcgtaatgtag

SEQ ID NO: 189696 - DNA, 2121 bp, Artificial Sequence
  derived and/or modified sequence
atggaccggcggaacgactacggctaccgggtgcccctgttccagggccctctgccacccccaggctcgctaggcttgcccttcccacccgacatccagaccgagactaccgaggaggacagtgtcttgctaatgcatactctgctggccgcaaccaaagactcccttgcaatggatccccccgtggttaacaggccgaagaaaagcaaaaccaaaaaagctccgattaagactataactaaagctgccccagcagcaccacccgttcccgccgcaaacgaaattgccacaaataagcccaaaattacctggcaggcccttaatctgccagtgattacgcaaatatcccaggctttacccaccacagaggtcaccaacacccaggcatccagtgtgactgctcagccaaaaaaggctaacaagatgaagagggtcacagccaaggccgcccaaggaagccaatcacccaccggccacgagggtggcacaatccagctgaaatctccactgcaggtcctgaaactgccagtaatcagtcagaacattcacgctcctatagctaacgagtccgcctcttctcaggcgcttatcaccagcattaagcctaagaaagccagcaaagctaagaaggcagccaataaggccatcgcctctgccaccgaggtatcgctggccgcaacggccacgcacaccgccactacacagggccaaatcactaatgagacggcaagcatccatacaaccgccgctagcattcgtaccaaaaaagctagtaaggctcgtaaaactattgcaaaggtcatcaacacggatactgagcatattgaggcactgaacgtcactgatgccgcaaccaggcagatagaggcctcagtggtagctattcggcctaagaagtcaaaagggaaaaaggctgcttctcggggcccaaacagtgtgagcgagatctcagaagctccattggctactcagatcgtaactaatcaagctctcgcagccaccctgagagtcaagagaggttcaagagctcgaaaagctgccaccaaggctcgagccactgaatcacagacacctaacgcagatcaaggtgcacaggccaaaattgcaagtgctcagacaaatgtgagtgctctggaaacccaggtggccgcagcagtacaggccttggctgatgattacctcgcacagctttccctcgagcctacaactaggactaggggcaaacggaataggaagagcaagcatctcaacggtgatgagagaagtggctctaattataggcgtattccgtggggcagacggccggctcctccccgagacgtggccatactccaggagagggccaataaactggtgaagtacttgcttgtaaaggaccaaaccaagatacctattaagagaagcgatatgctgagggatgttatccaggaatatgatgaatatttcccagaaatcattgaacgcgctagttacacattggagaaaatgtttcgggtgaatctgaaggagatcgacaagcagtcaagcttgtacatcctgatcagcacgcaggagtcctctgctggaatactaggcacaaccaaggacacccccaagctggggctgctgatggtcatcctttcggttattttcatgaatgggaataaggcatcagaggctgtcatatgggaggtattgcggaagctcggattacggcccggcgtccgtcattccttgtttggggaggtgcgaaagttgatcactgatgaatttgtgaagcagaagtaccttgagtacaagcgggtgccgaacagcagacctccagaatacgagtttttctggggcctcagatcataccacgagacttctaagatgaaggtgcttaaatttgcttgccgcgtccagaagaaagaccctaaggactgggccgttcagtaccgcgaggctgtagaaatggaagttcaggcggccgccgtcgccgtagccgaggcggaagcccgagccgagatctactccccatgtctgcaaatcccattgattaactgtagttcgccaagtcacggggcaaaggtacatccctggaacttgtgcccacacagtagccaaggctcctatggacaatcagctgaaggcgtgatgtag

SEQ ID NO: 189697 - DNA, 2121 bp, Artificial Sequence
  derived and/or modified sequence
atggacagacggaacgattatggctatcgcgtgcccctgttccaagggcctctcccacctccaggcagcctggggctgcccttcccccctgacatccagactgagactaccgaggaagatagcgtgttactgatgcacacgttactagctgctaccaaggacagtctggctatggatcctccggtggtgaataggcccaagaagagcaagacaaagaaggcaccaatcaagacaattactaaagctgcaccagctgcaccgccagtccccgcagcaaatgaaatcgccacgaataagccgaaaattacctggcaagcactgaacctcccagtgatcacccagatctcccaggctctcccaacgacggaagtgactaatacacaggcatcttctgttactgcacagccaaagaaagcaaataaaatgaagagggtgaccgcgaaagctgcgcaaggctcacagtcccccaccgggcatgaaggtggcaccatccagttaaaatccccactccaggtcctgaaactgcccgtaatcagccaaaacatacacgccccaatcgccaacgagtccgctagttcacaggctttgatcacatcaatcaaacccaagaaggcctccaaggccaaaaaggccgctaataaagctatagccagtgccaccgaggtaagcctagctgccacggcaacccatacggcgacaactcagggccagatcaccaacgaaactgcaagcattcataccacagctgctagcattcgcaccaaaaaggcctctaaggccaggaaaactatcgctaaggtcatcaacactgacacagaacatatagaggcacttaacgtgaccgatgctgccacccgccagattgaagcctcggtggtcgctataagaccaaagaagtctaagggtaagaaggcggcatctcggggtcccaatagtgtgtcagaaatcagcgaggccccattagctacacaaattgtcaccaatcaggccctggcggctacactgcgagtgaagcgaggtagtagagcccgtaaggccgcaaccaaggccagagctactgagtcccagactccaaacgcagatcagggcgctcaggccaagatcgcttccgcacagactaatgtaagtgcccttgaaacccaagtcgctgctgccgtgcaggccctagctgatgattatctagctcagctgtcccttgagcctactacacgcacccgcggtaagagaaaccgcaaaagtaaacacttgaatggggatgaaaggtccgggtccaactatcgtcgaatcccatggggaaggcgtccggcacctccgagggatgtggccatcctgcaagaacgagccaacaaactggtgaaatatctactcgtcaaagatcagaccaagatcccaattaaaagaagtgatatgctgagggacgtgattcaggaatatgacgaatattttcctgagattatcgaaagagcatcatatactctcgaaaagatgttccgcgtaaacctgaaggaaatagacaaacagagttcgctttacattctaatctcgacccaggaatcttcagcgggaatcctaggaacaaccaaggacacaccaaaactaggtctgttgatggtgattctatccgtcatcttcatgaatgggaataaggcaagtgaagccgtgatatgggaggttctgcgtaaactgggattaaggcccggagttaggcattccctcttcggcgaagtgaggaagctgattaccgacgagttcgtgaaacagaagtacctggagtataaacgcgtaccaaactccagaccacccgagtatgagtttttttggggcctcagaagttaccatgaaacaagcaagatgaaagtgctgaagtttgcgtgccgagtgcagaagaaggatccgaaggactgggcagtccagtatcgtgaggctgtcgagatggaggtgcaggcagcagcggttgcggtcgccgaagccgaagccagagccgaaatatattcaccttgtctgcaaattccactcattaactgtagttcccccagccacggagcaaaggtccatccttggaacctttgccctcacagtagccaggggagttacggacagtcagccgagggagtcatgtag

SEQ ID NO: 189698 - DNA, 2121 bp, Artificial Sequence
  derived and/or modified sequence
atggacagacggaatgactatggctatcgcgtccctctgttccagggcccattaccgcctcccggttccctcggcctgccctttcctcctgatattcaaacagagactaccgaggaggactccgttctgctgatgcacacactcctggctgcaaccaaagactctctcgccatggatcctcccgtggtcaaccggccaaaaaaatcgaagacgaagaaagctcccataaagactattaccaaggccgcaccagcagctccccctgtgcctgcggctaacgaaattgctactaataagcccaaaatcacctggcaggccttaaatttaccagtcattactcaaatctcccaggcgctgccgaccacagaggttacgaacactcaggcctcatctgtgacagcccagccgaagaaagcaaataagatgaaacgagtcactgccaaggctgcacaggggtcacaatcccctacaggtcacgaaggaggcactatccagctcaagagccccctccaggtcctgaagctgccagtgattagccagaatattcacgcacccatcgcaaacgaatctgctagcagccaggcactcataaccagcatcaaacctaagaaggcttcaaaggccaagaaggccgcaaacaaggccattgcctctgccactgaagtctcattggccgcaacagcaacacacaccgcgaccacacagggtcagataaccaacgagacagcctccattcacactacagcagctagtatccggacaaagaaggccagcaaagcacggaagactattgccaaggtgattaataccgatactgagcacatcgaggccctgaatgtgacggatgccgcaacaaggcaaatagaggcctccgtagtcgccatccgcccaaaaaaatctaagggaaagaaagccgcttcaagggggccaaactcagtgtcagaaatttccgaggcacccctggccacccagattgtcaccaatcaagcactagccgctactttacgagtgaagcgcggtagccgggctcgaaaagcggcaactaaggccagagcaaccgaaagccagactccaaatgccgatcagggggcacaagccaaaattgcctccgcacagactaatgtctccgcactggagacccaagtggcagctgccgtgcaggccctggccgacgattacctggctcagctgtctttggaacctaccacacgcacccggggaaaacgcaacaggaagtctaaacacctgaacggagatgagcgcagcggctctaactacaggcgcattccctgggggaggcggcctgctcccccacgcgacgtggcaatactacaggagagggccaacaagctcgtaaagtacctcctggtgaaggatcaaaccaagatccctattaaacggagcgatatgctccgcgatgtcatacaggaatatgatgaatatttccccgagatcattgagcgagctagttacactttggagaagatgttccgggtcaatctaaaagagattgacaagcagagttctctttacattttgatatccacgcaagagtcatcagccggtattctggggaccaccaaagatacgcccaagctgggcctactgatggttattttatcggtgatctttatgaacggcaacaaggcaagcgaagcagttatttgggaagtgctgcggaagctggggttgcgaccgggagtaaggcactcactctttggggaagtgaggaaattgattaccgacgagttcgtgaaacagaaatacctcgaatataaacgggtgcccaacagccgcccacctgaatatgagttcttttggggattacggtcataccacgagacttcaaaaatgaaggttttgaagttcgcctgcagagtccagaagaaagatcccaaagattgggccgtccagtacagagaagccgtcgaaatggaggtgcaagcagcagccgtcgccgtggctgaagccgaggccagggccgagatatacagcccctgcctccagatacctctcataaactgttctagtccgtcccacggagccaaggtacacccttggaatctgtgtccccacagttcccagggctcgtacggccaatctgccgagggtgtaatgtag

SEQ ID NO: 189699 - DNA, 2326 bp, Artificial Sequence
  derived and/or modified sequence
gggggataggctcagacacaaggagaggcttggagagagcagacgccttctggattcaagaagacgaggcccattcccctcaggctcacctgttactcggcctcccagaaagatggataggagaaatgactacggatatagggtgcctctatttcagggccctctgcctcccccggggagcctggggcttcccttccctccagatatacagactgagaccacagaagaggacagtgtcctgctgatgcataccctgttggcggcaaccaaggactccctggccatggacccaccagttgtcaaccggcctaagaaaagcaagaccaagaaggcccctataaagactattactaaggctgcacctgctgcccctccagtcccagctgccaatgagattgccaccaacaagcccaaaataacttggcaggctttaaacctgccagtcattacccagatcagccaggctttacctaccactgaggtaaccaatactcaggcttcttcagtcactgctcagcctaagaaagccaacaagatgaagagagttactgccaaggcagcccaaggctcccaatccccaactggccatgagggtggcactatacagctgaagtcacccttgcaggtcctaaagctaccagtcatctcacagaatattcacgctccaattgccaatgagtcagccagttcccaagccttgataacctctatcaagcctaagaaagcttccaaggctaagaaggctgcaaataaggccatagctagtgccaccgaggtctcgctggctgcaactgccacccatacagctaccacccaaggccaaattaccaatgagacagccagtatccacaccacagcagcctccatccgaaccaagaaagcctccaaagccaggaagacaattgctaaggtcataaatactgacactgagcatatagaggctctaaatgtcactgacgcagctaccaggcagattgaggcctcagtagtggctatcaggcccaaaaaatccaagggcaagaaggctgccagcaggggcccaaattctgtctctgagatctctgaggccccacttgccactcagatagtcacaaaccaagccctggcagccaccctgcgggtcaagagagggtctagggctcggaaggctgccactaaggctcgggcaactgaaagccagactccaaatgctgaccaaggggcccaggccaagatagcctctgctcagaccaacgtaagtgcccttgagactcaggttgctgctgctgtccaggccctggcagatgactatctggctcagttgagcctggagcccacaaccaggacccggggcaaaagaaaccgaaagtccaagcatctgaatggggatgagagaagtggcagtaattacaggcggatcccatggggccggaggcctgcaccaccgcgagatgtggccattttacaagaaagggctaataagttggtgaaatacctgttggttaaggaccagacaaagatccccatcaaacgctcagacatgctgagggatgtcatccaagaatatgatgaatatttcccagaaatcattgaacgagcaagctacactctggagaagatgtttcgagtcaatctgaaagaaattgataagcaaagtagcttgtatattctcatcagcactcaggaatcctctgcaggcatactgggaacgaccaaggacacacccaagctgggtctcctcatggtgattctgagtgtcatttttatgaatggcaacaaggccagtgaggctgtcatctgggaggtgctgcgcaagttggggctgcgccctggggtgaggcattcactctttggggaagtgaggaagctcatcacagacgagtttgtgaagcagaagtacctggagtacaagagggtccctaacagcagaccacctgaatatgagttcttctggggcttgcgctcctaccacgagactagcaagatgaaagtcctcaagtttgcatgcagggtgcagaagaaagaccccaaggactgggctgtgcagtaccgcgaggcagtggagatggaagtccaagctgcagctgtggctgtggctgaggctgaagccagggctgagatttattccccatgtttacagataccgctaataaattgcagtagtccttcccatggagccaaagtacatccttggaatctttgtccacacagcagtcaaggcagttatggccaatcagctgagggtgtcatgtgatggaaaaatctgtttgctgttcctgctttattgtttgctttctgtgtgctgtcatattttggtatcagagttacattaaatttgcaaaatgaa

SEQ ID NO: 189700 - DNA, 2306 bp, Artificial Sequence
  derived and/or modified sequence
ataggctcagacacaaggagaggcttggagagagcagacgccttctggattcaagaagacgaggctcacctgttactcggcctcccagaaagatggataggagaaatgactacggatatagggtgcctctatttcagggccctctgcctcccccggggagcctggggcttcccttccctccagatatacagactgagaccacagaagaggacagtgtcctgctgatgcataccctgttggcggcaaccaaggactccctggccatggacccaccagttgtcaaccggcctaagaaaagcaagaccaagaaggcccctataaagactattactaaggctgcacctgctgcccctccagtcccagctgccaatgagattgccaccaacaagcccaaaataacttggcaggctttaaacctgccagtcattacccagatcagccaggctttacctaccactgaggtaaccaatactcaggcttcttcagtcactgctcagcctaagaaagccaacaagatgaagagagttactgccaaggcagcccaaggctcccaatccccaactggccatgagggtggcactatacagctgaagtcacccttgcaggtcctaaagctaccagtcatctcacagaatattcacgctccaattgccaatgagtcagccagttcccaagccttgataacctctatcaagcctaagaaagcttccaaggctaagaaggctgcaaataaggccatagctagtgccaccgaggtctcgctggctgcaactgccacccatacagctaccacccaaggccaaattaccaatgagacagccagtatccacaccacagcagcctccatccgaaccaagaaagcctccaaagccaggaagacaattgctaaggtcataaatactgacactgagcatatagaggctctaaatgtcactgacgcagctaccaggcagattgaggcctcagtagtggctatcaggcccaaaaaatccaagggcaagaaggctgccagcaggggcccaaattctgtctctgagatctctgaggccccacttgccactcagatagtcacaaaccaagccctggcagccaccctgcgggtcaagagagggtctagggctcggaaggctgccactaaggctcgggcaactgaaagccagactccaaatgctgaccaaggggcccaggccaagatagcctctgctcagaccaacgtaagtgcccttgagactcaggttgctgctgctgtccaggccctggcagatgactatctggctcagttgagcctggagcccacaaccaggacccggggcaaaagaaaccgaaagtccaagcatctgaatggggatgagagaagtggcagtaattacaggcggatcccatggggccggaggcctgcaccaccgcgagatgtggccattttacaagaaagggctaataagttggtgaaatacctgttggttaaggaccagacaaagatccccatcaaacgctcagacatgctgagggatgtcatccaagaatatgatgaatatttcccagaaatcattgaacgagcaagctacactctggagaagatgtttcgagtcaatctgaaagaaattgataagcaaagtagcttgtatattctcatcagcactcaggaatcctctgcaggcatactgggaacgaccaaggacacacccaagctgggtctcctcatggtgattctgagtgtcatttttatgaatggcaacaaggccagtgaggctgtcatctgggaggtgctgcgcaagttggggctgcgccctggggtgaggcattcactctttggggaagtgaggaagctcatcacagacgagtttgtgaagcagaagtacctggagtacaagagggtccctaacagcagaccacctgaatatgagttcttctggggcttgcgctcctaccacgagactagcaagatgaaagtcctcaagtttgcatgcagggtgcagaagaaagaccccaaggactgggctgtgcagtaccgcgaggcagtggagatggaagtccaagctgcagctgtggctgtggctgaggctgaagccagggctgagatttattccccatgtttacagataccgctaataaattgcagtagtccttcccatggagccaaagtacatccttggaatctttgtccacacagcagtcaaggcagttatggccaatcagctgagggtgtcatgtgatggaaaaatctgtttgctgttcctgctttattgtttgctttctgtgtgctgtcatattttggtatcagagttacattaaatttgcaaaatgaa

SEQ ID NO: 189701 - protein, 340 aa, Artificial Sequence
  derived and/or modified sequence
MRKELQLSLSVTLLLVCGFLYQFTLKSSCLFCLPSFKSHQGLEALLSHRRGIVFLETSERMEPPHLVSCSVESAAKIYPEWPVVFFMKGLTDSTPMPSNSTYPAFSFLSAIDNVFLFPLDMKRLLEDTPLFSWYNQINASAERNWLHISSDASRLAIIWKYGGIYMDTDVISIRPIPEENFLAAQASRYSSNGIFGFLPHHPFLWECMENFVEHYNSAIWGNQGPELMTRMLRVWCKLEDFQEVSDLRCLNISFLHPQRFYPISYREWRRYYEVWDTEPSFNVSYALHLWNHMNQEGRAVIRGSNTLVENLYRKHCPRTYRDLIKGPEGSVTGELGPGNK

SEQ ID NO: 189702 - DNA, 1023 bp, Artificial Sequence
  derived and/or modified sequence
atgagaaaggagctgcagctgagcctgagcgtgaccctgctgctggtgtgcggcttcctgtaccagttcaccctgaagagcagctgcctgttctgcctgcccagcttcaagagccaccagggcctggaggccctgctgagccacagaagaggcatcgtgttcctggagaccagcgagagaatggagcccccccacctggtgagctgcagcgtggagagcgccgccaagatctaccccgagtggcccgtggtgttcttcatgaagggcctgaccgacagcacccccatgcccagcaacagcacctaccccgccttcagcttcctgagcgccatcgacaacgtgttcctgttccccctggacatgaagagactgctggaggacacccccctgttcagctggtacaaccagatcaacgccagcgccgagagaaactggctgcacatcagcagcgacgccagcagactggccatcatctggaagtacggcggcatctacatggacaccgacgtgatcagcatcagacccatccccgaggagaacttcctggccgcccaggccagcagatacagcagcaacggcatcttcggcttcctgccccaccaccccttcctgtgggagtgcatggagaacttcgtggagcactacaacagcgccatctggggcaaccagggccccgagctgatgaccagaatgctgagagtgtggtgcaagctggaggacttccaggaggtgagcgacctgagatgcctgaacatcagcttcctgcacccccagagattctaccccatcagctacagagagtggagaagatactacgaggtgtgggacaccgagcccagcttcaacgtgagctacgccctgcacctgtggaaccacatgaaccaggagggcagagccgtgatcagaggcagcaacaccctggtggagaacctgtacagaaagcactgccccagaacctacagagacctgatcaagggccccgagggcagcgtgaccggcgagctgggccccggcaacaagtag

SEQ ID NO: 189703 - DNA, 1023 bp, Artificial Sequence
  derived and/or modified sequence
atgcgcaaagaattacagctctctttgtcagtgacccttttgttggtgtgtggcttcctgtatcaattcacacttaaaagcagttgtctgttttgtttgccgtcctttaagagccaccagggattggaggccctgttgtctcatcgccgtgggatcgtgttcttggagaccagcgagagaatggagccacctcacttggtttcttgctccgtggagtccgcagccaagatctaccctgagtggccagtggtgttttttatgaagggtctcaccgacagcaccccaatgccaagcaattccacataccccgctttttctttcctgtctgccatcgataacgtgtttttgttcccgttggatatgaagaggttgctggaagatactccgttgttctcatggtataatcagataaatgcgtccgccgaaaggaactggctgcacatcagtagcgacgcaagccggctggcaatcatctggaaatatggtggtatttacatggatacagatgtcatttccatccgccctataccagaagaaaatttcctagcagcccaggcatccaggtacagtagcaatgggatcttcggtttcctgccccatcatccttttctgtgggagtgcatggaaaatttcgttgagcactataattctgctatttggggtaaccagggccccgagctgatgaccaggatgcttagggtgtggtgcaagctggaagattttcaggaggtttccgatctgcgctgcctgaacataagctttctacatccacagcggttctatccgatctcataccgtgagtggcggcgatactacgaggtctgggacacagagccctcttttaacgtgtcttatgcactgcatctctggaaccacatgaaccaggagggcagagctgtcatcagaggctccaataccctggttgaaaatctctaccggaagcactgcccacggacatatcgggatttaattaagggtccagaaggcagtgttaccggggagctcgggccaggaaataagtag

SEQ ID NO: 189704 - DNA, 1023 bp, Artificial Sequence
  derived and/or modified sequence
atgaggaaggagctgcagctgagcctgtctgtgaccctgctgctggtgtgtggcttcctgtaccagttcaccctgaagagcagctgcctcttctgcctgcccagcttcaagagccaccagggcctggaggccctgctgagccacagaagaggcatcgtgttcctggagaccagcgagaggatggagcccccccacctggtgtcctgcagcgtggagagcgctgccaagatctacccagagtggcctgtggtgttcttcatgaagggcctgacagacagcacccccatgcccagcaacagcacctacccagccttctccttcctgagcgccatcgacaacgtgttcctgttccccctggacatgaagaggctgctggaggacacccccctcttctcctggtacaaccagatcaatgccagcgctgagaggaactggctgcacatcagcagtgatgccagccggctggccatcatctggaagtatggaggcatctacatggacacagatgtgatcagcatccggcccatccctgaggagaacttcctggccgcccaggccagccgctacagcagcaatggcatcttcggcttcctgccccaccaccccttcctgtgggagtgcatggagaactttgtggagcactacaacagcgccatctggggcaaccagggccctgagctgatgaccaggatgctgcgggtgtggtgcaagctggaggacttccaggaggtgtctgacctgcgctgcctgaacatctccttcctgcacccccagcgcttctaccccatctcctaccgggagtggaggcgctactatgaggtgtgggacacagagcccagcttcaacgtgtcctatgccctgcacctgtggaaccacatgaaccaggagggccgggctgtgatccggggcagcaacaccctggtggagaacctgtacaggaagcactgccccaggacctacagagacctgatcaagggccctgagggctctgtgactggagagctgggccctggcaacaagtag

SEQ ID NO: 189705 - DNA, 1771 bp, Artificial Sequence
  derived and/or modified sequence
atttctaagacctcaaatactggttaactgcatttgcagctagaagttaggctctgattcactgttttgtattttctaaaagggttatatgtaatttgaaagatagacctgccaagacgtgagatctgtgttctccttggttagagctaacatttttggtgaggaaagcactgcaggagcaggctggcacagagaagaggacatgcggaaggagctccagctctccctgtcagtcaccttgctgcttgtctgtggcttcctctaccagttcaccctgaagtccagctgcctcttctgtttgccttctttcaagtcccaccaggggctggaagccctcctgagccacagacgtggcattgtgtttctagagacctcagagagaatggagccaccccatttggtctcctgttccgtagagtctgctgccaagatttatcctgagtggcctgtggtgttctttatgaagggtcttactgattccacaccgatgccctcaaactccacatacccagctttttccttcctgtcagcaatagacaacgttttcctcttccctttggatatgaaaaggctgcttgaagacacaccattgttttcatggtacaatcaaatcaacgccagcgcagagagaaactggctccacatcagctcggatgcatcccgcctggccatcatctggaaatacggtggcatctacatggacaccgatgtcatctccatcaggcccatccctgaggagaactttttggctgcgcaggcttctcggtactctagtaatggaatatttgggttcctcccccaccacccctttttgtgggaatgcatggaaaactttgttgaacactataattcagccatttggggcaaccaaggccctgagttgatgacaaggatgttgagggtatggtgtaaacttgaagacttccaggaggtgagcgacctcaggtgtctgaacatatccttcttacacccccaaagattttaccccatctcctatcgagagtggaggcgctactatgaagtgtgggatacagagccaagcttcaatgtctcttatgccctgcatttgtggaaccacatgaaccaggaggggcgggctgtgattagaggaagcaacacactggtggaaaatctctatcgcaagcactgtcccaggacttacagggacctgattaaaggcccagaggggtcagtgactggggagctgggtccaggtaacaaataaagctaacactcgtttgctgctgctgcagtgtggaaatggacatttcctggagtgccacattttcacttgatctccactgtctcttggcggggtgggcagagggttgcctctcaaatgtcagttaggattagctttctctgtctgtaatagaaaaatcccaaatgatactggctataaaacatacacccatggtccatttgactgcttgacctccaacccaccatgtttgcatttcaggcagtaggatgaagaaaagaggaaaggtgcacttgctttattttgtgaagacttcctgcaagtaccgtataacactttctcttacattgcactgactgagatgtagctgcaagagaggctgggaagtttaaggaggaagaaaaaatgggtactgggataggcagctaacagttttgctacatgttctatttaatacagtaagattaattccaggacctgttagagcattgactgaggtaaaaagagacttgatttctagtcctgattttgacattcattaatgcattcagtcaataaatattaactgag

SEQ ID NO: 189706 - DNA, 1023 bp, Artificial Sequence
  derived and/or modified sequence
atgcggaaggagctgcagctgagcctgagcgtgaccctgctgctggtgtgcggcttcttataccagttcacactgaaatcatcttgtctgttctgtctccccagcttcaagagccatcaggggctagaagccttacttagccacaggcgcggtatcgtgtttctggaaacatccgagaggatggaaccgcctcatctcgtgtcctgtagtgtggaatctgcagccaaaatttaccccgaatggcccgtggtgtttttcatgaaaggtctcacagactctacacccatgccatcaaatagtacttacccagcatttagctttttatcagctatcgataatgtgttcctgttcccccttgatatgaaaaggctccttgaggatactccccttttctcatggtacaaccagattaacgcaagtgccgagaggaactggttgcatatttcttccgatgcaagtcgattggctattatttggaaatacggaggaatctacatggatacagatgtgatatccatccggcccatccctgaagagaattttctggctgctcaagcctccaggtatagctctaatggaatcttcggatttctcccacatcatcccttcctgtgggagtgcatggaaaatttcgtggaacactataattcagccatctggggaaatcagggtcccgagctaatgacgagaatgctccgcgtctggtgtaagctggaggacttccaggaagtgagcgacctgcgatgtcttaacatctcatttttgcaccctcagcgcttttaccccatctcctatagggagtggcgcagatactatgaagtgtgggatactgaacccagcttcaatgtcagctacgctctacatctttggaaccatatgaatcaggaaggtcgtgcagtgatacgggggtctaacacgctcgtagagaacctctaccgcaaacattgcccacgcacatatcgggatctcataaaaggacctgagggctccgttactggcgaactggggcccgggaataagtag

SEQ ID NO: 189707 - DNA, 1023 bp, Artificial Sequence
  derived and/or modified sequence
atgcgcaaggaactgcagctcagtctgagtgtgacacttctcctggtgtgtggttttctgtatcagttcacgctgaaatcatcatgcctattctgcctgccatctttcaaatcccaccagggactggaagctctactctcacatagacgtggaatcgtgtttctggaaactagcgagcggatggagccacctcatttagtatcatgttctgtcgagtccgccgctaaaatctacccagagtggcctgttgttttcttcatgaagggcctcacagatagcacaccaatgccatcaaattccacctatcccgctttctccttcctctccgctatagacaatgtgtttctgtttcccctcgatatgaagcggcttctggaggacactccattgttctcttggtacaaccagatcaacgcaagcgccgagcgcaattggctccacatctcaagtgatgcttcccggctggctatcatatggaaatacggaggcatttatatggataccgacgtgatatcaatccgacctatcccagaggagaattttctcgccgctcaggcctcacgatactcttcaaatgggattttcgggttcctaccccatcacccttttctttgggagtgtatggagaattttgtcgagcattacaacagtgccatctgggggaaccagggaccagagctgatgacccgaatgctgagagtttggtgcaagttagaagattttcaggaggtctctgatctgagatgtcttaacatttccttcctgcatcctcagcgcttctacccgattagctaccgtgagtggcggagatattacgaagtgtgggacacggagccatcattcaatgtgtcttatgctctgcacctgtggaatcatatgaatcaagaaggacgcgctgtcattcgcggatctaacaccctagtggaaaatttatacaggaagcactgccccagaacatatagagacctgataaaaggacccgaaggctctgtgacgggcgagctcggaccaggcaataaatag

SEQ ID NO: 189708 - protein, 248 aa, Artificial Sequence
  derived and/or modified sequence
MAAGMYLEHYLDSIENLPFELQRNFQLMRDLDQRTEDLKAEIDKLATEYMSSARSLSSEEKLALLKQIQEAYGKCKEFGDDKVQLAMQTYEMVDKHIRRLDTDLARFEADLKEKQIESSDYDSSSSKGKKSRTQKEKKAARARSKGKNSDEEAPKTAQKKLKLVRTSPEYGMPSVTFGSVHPSDVLDMPVDPNEPTYCLCHQVSYGEMIGCDNPDCSIEWFHFACVGLTTKPRGKWFCPRCSQERKKK

SEQ ID NO: 189709 - DNA, 747 bp, Artificial Sequence
  derived and/or modified sequence
atggccgccggcatgtacctggagcactacctggacagcatcgagaacctgcccttcgagctgcagagaaacttccagctgatgagagacctggaccagagaaccgaggacctgaaggccgagatcgacaagctggccaccgagtacatgagcagcgccagaagcctgagcagcgaggagaagctggccctgctgaagcagatccaggaggcctacggcaagtgcaaggagttcggcgacgacaaggtgcagctggccatgcagacctacgagatggtggacaagcacatcagaagactggacaccgacctggccagattcgaggccgacctgaaggagaagcagatcgagagcagcgactacgacagcagcagcagcaagggcaagaagagcagaacccagaaggagaagaaggccgccagagccagaagcaagggcaagaacagcgacgaggaggcccccaagaccgcccagaagaagctgaagctggtgagaaccagccccgagtacggcatgcccagcgtgaccttcggcagcgtgcaccccagcgacgtgctggacatgcccgtggaccccaacgagcccacctactgcctgtgccaccaggtgagctacggcgagatgatcggctgcgacaaccccgactgcagcatcgagtggttccacttcgcctgcgtgggcctgaccaccaagcccagaggcaagtggttctgccccagatgcagccaggagagaaagaagaagtag

SEQ ID NO: 189710 - DNA, 747 bp, Artificial Sequence
  derived and/or modified sequence
atggctgctggcatgtatctggagcactacctggacagcatagagaacctgccatttgaactccaacggaacttccagctgatgcgggatttggatcaaaggacagaggacctgaaagccgaaatcgacaaactcgccacagaatacatgtccagcgccagatcgctgtcctccgaagaaaaactcgccctgctgaaacaaatccaagaggcttacggcaaatgtaaggaattcggggacgataaggtgcagctggctatgcagacttacgagatggtcgataagcacatacgacggctggatacagatctggctcggttcgaagccgaccttaaggagaaacagattgagtcatctgactatgacagcagctcctcgaaaggaaagaagtctagaactcagaaagaaaaaaaagcagccagggcgaggtctaaaggtaagaactccgatgaggaggcccccaaaaccgcgcagaagaagctcaagcttgtccgcacctcgcctgaatatggcatgcccagcgtaacctttggctccgtgcaccccagcgatgtcctggacatgcctgtggacccaaacgagcccacctattgtctatgtcaccaagtctcctacggcgagatgatcggatgtgacaatcccgactgctcaattgagtggttccacttcgcatgcgtgggattgaccactaagccgcgggggaagtggttttgcccccgctgctcacaggagaggaaaaagaaatag

SEQ ID NO: 189711 - DNA, 747 bp, Artificial Sequence
  derived and/or modified sequence
atggctgctggcatgtacctggagcactacctggacagcattgagaacctgccctttgagctgcagaggaacttccagctgatgagggacctggaccagaggacagaggacctgaaggccgagattgacaagctggccacagagtacatgagcagcgcccggagcctgagcagcgaggagaagctggccctgctgaagcagatccaggaggcctacggcaagtgcaaggagtttggagatgacaaggtgcagctggccatgcagacctatgagatggtggacaagcacatccggcggctggacacagacctggccaggtttgaagctgacctgaaggagaagcagatcgagagcagtgactatgacagcagcagcagcaagggcaagaagagcaggacccagaaggagaagaaggccgcccgggcccggagcaagggcaagaacagtgatgaggaggcccccaagacagcccagaagaagctgaagctggtgaggaccagcccagaatatggcatgcccagcgtgacctttggatctgtgcaccccagtgatgtgctggacatgcctgtggaccccaatgagcccacctactgcctgtgccaccaggtgtcctatggagagatgattggctgtgacaacccagactgcagcattgagtggttccactttgcctgtgtgggcctgaccaccaagccccggggcaagtggttctgcccccgctgcagccaggagaggaagaagaagtag

SEQ ID NO: 189712 - DNA, 1709 bp, Artificial Sequence
  derived and/or modified sequence
acagtcacttccggggcggatcggaagttgctttgttttgcttcgagatggctgcggggatgtatttggaacattatctggacagtattgaaaaccttccctttgaattacagagaaactttcagctcatgagggacctagaccaaagaacagaggacctgaaggctgaaattgacaagttggccactgagtatatgagtagtgcccgcagcctgagctccgaggaaaaattggcccttctcaaacagatccaggaagcctatggcaagtgcaaggaatttggtgacgacaaggtgcagcttgccatgcagacctatgagatggtggacaaacacattcggcggctggacacagacctggcccgttttgaggctgatctcaaggagaaacagattgagtcaagtgactatgacagctcttccagcaaaggcaaaaagagccggactcaaaaggagaagaaagctgctcgtgctcgttccaaagggaaaaactcggatgaagaagcccccaagactgcccagaagaagttaaagctcgtgcgcacaagtcctgagtatgggatgccctcagtgacctttggcagtgtccacccctctgatgtgttggatatgcctgtggatcccaacgaacccacctattgcctttgtcaccaggtctcctatggagagatgattggctgtgacaaccctgattgttccattgagtggttccattttgcctgtgtggggctgacaaccaagcctcgggggaaatggttttgcccacgctgctcccaagaacggaagaagaaatagataagggccttggattccaacacagtttcttccacatcccctgacttgggctagtgggcagaggaatgcctgtgctggggccaggggttcagggaggagtggatggcacagtgctgtcatcccttctcctcccctctccccactcccggtgctgaggctgcatcagaccctggtagggaggggtgccgcagccactaacggtatgtgctctccttcagccctctcccttcggagggacgtggtcttgcccactgtccttttgcctccatgctgaggtcggtgctgtatttcagagggagggtccttttcattctccttgctttgtatttaaggactggggcatagcatgggggcagtcccccagacctcttcattccccctcctgtggtgagggctaggtgtgatcaacacttttcttctccattcccttcctgcttttttcatggtgggggatccaccaggtcatctaggctctggccctagttgaaggggcaccccttcctctgtgccaagaggattcatcctgggagagggggcaaggtggaatgcagataactcacatgtaaaaggaacttgggtaggtaaataaaagctatacatgttggcctgctgtgtttattgtagagacactgttttagtaaacatgctgagcattcattttgcgtcctctgggttggatgcaatgtgagaggatggcatgccagaattaggacacgacatgaaaccagagtggtgcctctgtccgagaacttgtaagttctcaacttgggaaagacagaggtgctggagggtaggcctcagaccagggggtctccaaaactttgtaaatcatgcatcttttctccataaaacatctttcacttaatttccaataaatgatgtatttgtgctatacatacgtactgctatactata

SEQ ID NO: 189713 - DNA, 747 bp, Artificial Sequence
  derived and/or modified sequence
atggccgccggcatgtacctggagcactacctggacagcatcgagaatctcccattcgaactgcagcgtaattttcaattaatgcgagacctggatcagaggacagaagaccttaaggccgagattgataagctagctaccgaatatatgagctcagcccggtcgctgagctccgaagagaagttagccctcctcaaacagatccaagaggcatatggcaagtgcaaagagtttggcgatgataaggtccagctcgctatgcagacgtacgaaatggtggacaaacacataaggagattggacacagatctggcaaggtttgaagcagatctgaaggagaaacagatcgaaagctccgattatgattcttcttcttcaaagggaaagaagtcgcgtacccagaaagagaaaaaagcagccagagctcgtagcaagggcaagaacagtgacgaggaggcccctaagaccgctcagaaaaagttgaaacttgtccgcacttccccggaatatggcatgccctccgtgaccttcgggtctgtgcatcccagcgacgtgctggatatgccagtcgatcccaatgaaccaacctattgtctttgccaccaagtttcttatggagaaatgataggctgtgataatcctgattgttctatagaatggtttcatttcgcttgcgtgggtctcactacaaagccacgtggcaaatggttctgtccaaggtgctcccaagaaaggaagaagaaatag

SEQ ID NO: 189714 - DNA, 747 bp, Artificial Sequence
  derived and/or modified sequence
atggctgcgggaatgtatctggagcattaccttgattccatagagaatcttccctttgagttacagcgcaatttccagttgatgcgggacttggatcagagaacggaggatttgaaggcggaaatagacaaactggcgactgaatatatgagttctgcccgtagcttatcctccgaggaaaagctggcattgttgaagcagatacaagaagcatacggcaaatgcaaagagtttggagacgataaggtccagttggctatgcaaacgtatgaaatggtagacaaacacatacgtcgcctcgacactgacctcgcacgatttgaggccgatctgaaggagaaacagatcgagtctagtgactacgactctagttcctccaagggcaaaaagtctcgaacccagaaggagaagaaagccgctcgggctagatccaaaggcaagaacagtgacgaggaggcgcctaagacagcccagaagaaactcaagctagtcagaacctcccccgagtacggcatgccctctgtgacattcgggtcagtgcatccatccgacgtcctcgacatgccagtggacccaaacgaaccaacttactgcctgtgtcaccaggtttcttatggcgagatgataggatgcgacaatcctgactgttcaatagagtggtttcatttcgcgtgcgtgggtctaactacgaaacccagaggcaaatggttttgccccaggtgctcccaggagagaaagaaaaagtag

SEQ ID NO: 189715 - protein, 651 aa, Artificial Sequence
  derived and/or modified sequence
MADSAELKQMVMSLRVSELQVLLGYAGRNKHGRKHELLTKALHLLKAGCSPAVQMKIKELYRRRFPQKIMTPADLSIPNVHSSPMPATLSPSTIPQLTYDGHPASSPLLPVSLLGPKHELELPHLTSALHPVHPDIKLQKLPFYDLLDELIKPTSLASDNSQRFRETCFAFALTPQQVQQISSSMDISGTKCDFTVQVQLRFCLSETSCPQEDHFPPNLCVKVNTKPCSLPGYLPPTKNGVEPKRPSRPINITSLVRLSTTVPNTIVVSWTAEIGRNYSMAVYLVKQLSSTVLLQRLRAKGIRNPDHSRALIKEKLTADPDSEIATTSLRVSLLCPLGKMRLTIPCRALTCSHLQCFDATLYIQMNEKKPTWVCPVCDKKAPYEHLIIDGLFMEILKYCTDCDEIQFKEDGTWAPMRSKKEVQEVSASYNGVDGCLSSTLEHQVASHHQSSNKNKKVEVIDLTIDSSSDEEEEEPSAKRTCPSLSPTSPLNNKGILSLPHQASPVSRTPSLPAVDTSYINTSLIQDYRHPFHMTPMPYDLQGLDFFPFLSGDNQHYNTSLLAAAAAAVSDDQDLLHSSRFFPYTSSQMFLDQLSAGGSTSLPTTNGSSSGSNSSLVSSNSLRESHSHTVTNRSSTDTASIFGIIPDIISLD

SEQ ID NO: 189716 - protein, 653 aa, Artificial Sequence
  derived and/or modified sequence
MFTLQDSYVKQMVMSLRVSELQVLLGYAGRNKHGRKHELLTKALHLLKAGCSPAVQMKIKELYRRRFPQKIMTPADLSIPNVHSSPMPATLSPSTIPQLTYDGHPASSPLLPVSLLGPKHELELPHLTSALHPVHPDIKLQKLPFYDLLDELIKPTSLASDNSQRFRETCFAFALTPQQVQQISSSMDISGTKCDFTVQVQLRFCLSETSCPQEDHFPPNLCVKVNTKPCSLPGYLPPTKNGVEPKRPSRPINITSLVRLSTTVPNTIVVSWTAEIGRNYSMAVYLVKQLSSTVLLQRLRAKGIRNPDHSRALIKEKLTADPDSEIATTSLRVSLLCPLGKMRLTIPCRALTCSHLQCFDATLYIQMNEKKPTWVCPVCDKKAPYEHLIIDGLFMEILKYCTDCDEIQFKEDGTWAPMRSKKEVQEVSASYNGVDGCLSSTLEHQVASHHQSSNKNKKVEVIDLTIDSSSDEEEEEPSAKRTCPSLSPTSPLNNKGILSLPHQASPVSRTPSLPAVDTSYINTSLIQDYRHPFHMTPMPYDLQGLDFFPFLSGDNQHYNTSLLAAAAAAVSDDQDLLHSSRFFPYTSSQMFLDQLSAGGSTSLPTTNGSSSGSNSSLVSSNSLRESHSHTVTNRSSTDTASIFGIIPDIISLD

SEQ ID NO: 189717 - DNA, 2309 bp, Artificial Sequence
  derived and/or modified sequence
gcgggggcgggccggggcggggccaggccggctagaggggcgggtctagcggcggcccccggcgaagttcactgcgcttgcgctgacagacgcaagatggcggacagtgcggaactaaagcaaatggttatgagccttagagtttctgaactccaagtactgttgggctacgccgggagaaacaagcacggacgcaaacacgaacttctcacaaaagccctgcatttgctaaaggctggctgtagtcctgctgtgcaaatgaaaattaaggaactctataggcggcggttcccacagaaaatcatgacgcctgcagacttgtccatccccaacgtacattcaagtcctatgccagcaactttgtctccatctaccattccacaactcacttacgatggtcaccctgcatcatcgccattactccctgtttctcttctgggacctaaacatgaactggaactcccacatcttacatcagctcttcacccagtccatccggatataaaacttcaaaaattaccattttatgatttactggatgaactgataaaacccaccagtctagcatcagacaacagtcagcgctttcgagaaacctgttttgcatttgccttgacaccacaacaagtgcagcaaatcagtagttccatggatatttctgggaccaaatgtgacttcacagtacaggtccagttaaggttttgtttatcagaaaccagttgtccacaagaagatcacttcccacccaatctttgtgtgaaagtgaatacaaaaccttgcagccttccaggttaccttccacctacaaaaaatggcgtggaaccaaagcgacccagccgaccaattaatatcacctcacttgtccgactgtccacaacagtaccaaacacgattgttgtttcttggactgcagaaattggaagaaactattccatggcagtatatcttgtaaaacagttgtcctcaacagttcttcttcagaggttacgagcaaagggaataaggaatccggatcattctagagctttaattaaagagaagttgactgcggatccagacagtgaaatagctacaaccagcctaagggtttctctactatgtccacttggtaaaatgcggctgacaattccgtgtcgggcccttacatgttctcatctacaatgttttgacgcaactctttacattcagatgaatgagaaaaaaccaacctgggtttgtcctgtctgtgataagaaggctccatatgaacaccttattattgatggcttgtttatggaaatcctaaagtactgtacagactgtgatgaaatacaatttaaggaggatggcacttgggcaccgatgagatcaaaaaaggaagtacaggaagtttctgcctcttacaatggagtcgatggatgcttgagctccacattggagcatcaggtagcgtctcaccaccagtcctcaaataaaaacaagaaagtagaagtgattgacctaaccatagacagttcatctgatgaagaggaagaagagccatctgccaagaggacctgtccttccctatctcccacatcaccactaaataataaaggcattttaagtcttccacatcaagcatctccagtatcccgcaccccaagccttcctgctgtagacacaagctacattaatacctccctcatccaagactataggcatcctttccacatgacacccatgccttacgacttacaaggattagatttctttcctttcttatcaggagacaatcagcattacaacacctccttgcttgccgctgcagcagcagcagtttcagatgatcaagacctcctacactcgtctcggtttttcccgtatacctcctcacagatgtttcttgatcagttaagtgcaggaggcagtacttctctgccaaccaccaatggaagcagtagtggcagtaacagcagcctggtttcttccaacagcctaagggaaagccatagccacaccgtcacaaacaggagcagcacggacacggcatccatctttggcatcataccagacattatttcattggactgattcccaggccctgctgctcccatccccaccccagatcgaatgaacttggcagaaagaagagaactttgtgctctgttttaccttactctgtttagaaaagtatacaagcgtgttttttttcctttttttagggaaaaaattaaaagaaatgtacagagaacaaaactatattttcagttttacttttgtatataaatctaagactgcctgtgtgataaaacacttgtttaaaaaaaaaaaaaaaaaaaaaaaaaaaa

SEQ ID NO: 189718 - DNA, 1956 bp, Artificial Sequence
  derived and/or modified sequence
atggcggactcagccgagttgaagcagatggtgatgagcttacgggttagcgaactgcaggttttactaggatacgccggacgcaacaagcacggcaggaagcatgaactgctgacaaaagcactgcacctcctgaaggctggctgtagcccagcggttcaaatgaaaatcaaggaactttatagaaggcgatttccccaaaagattatgacacctgccgatctcagtatccctaacgtgcactcatcccctatgcccgcgaccctgtctccctcaacaattccacagctgacgtatgacgggcaccctgcatcaagtcctctgcttccagtgtctctcttaggccctaaacacgagctcgagctgcctcacctgacgagcgccctccaccccgtccacccggatatcaagttacagaaactgccattttacgacttactggacgagctgattaagccgactagccttgcttccgacaactcacagaggttccgagagacgtgcttcgcctttgctcttacaccacagcaggttcagcagatcagcagcagtatggatatcagtggaaccaagtgcgatttcaccgtccaggtccagctcaggttctgcttgagtgaaacatcatgtcctcaggaggatcacttccctccgaacctctgcgtgaaggttaacaccaagccctgttctctcccagggtacctgccccctaccaaaaacggggtggagccaaaaaggccctctcggccaattaacattactagtctagttcggctttccacgactgtgccgaataccatcgtggtgtcctggactgcagagatcggaaggaattatagtatggctgtttatttggtcaagcaattaagttccacagtcctgctccaaagattgcgggcaaaggggatacggaatcctgaccacagcagggccctaatcaaggaaaaactgaccgccgaccccgattccgagattgcaacaacatccctgagagtgagtctcctgtgccccctggggaaaatgcgactgactatcccgtgcagggcccttacttgctcacacttgcaatgtttcgatgcgacgctgtacatccagatgaacgaaaagaaacctacatgggtctgccccgtgtgcgataaaaaggcaccgtatgagcacttaatcatcgacggcttgtttatggagattctcaaatactgtaccgattgcgacgaaatccagttcaaggaagatggtacttgggccccaatgagatcaaaaaaagaagttcaggaggtgtcggcaagttataatggtgtcgacggctgcctttcctcgacgctcgagcaccaggttgcctctcatcaccaatcctctaataagaacaaaaaagtggaagtaatagatctgacaattgactcctccagcgatgaagaagaggaggagcctagcgccaaacggacatgcccatctctttcaccaacgtcaccacttaataacaaagggatcttgtccttgcctcatcaggctagccctgtatctaggacaccaagtttgccagctgtcgacacgagctacatcaacacaagcttgatccaagactacagacaccccttccacatgactcccatgccgtacgatttacaaggactggactttttcccttttctatcgggtgacaaccaacattacaacacttcccttctagcagccgccgccgccgccgtgagcgacgaccaagatcttcttcattcatctcgattctttccatacacatcttcacagatgttcctagaccagctgtcagctgggggttccacctctctgcccactacaaacgggtccagttcagggagtaattcgtccttggtgagcagtaattctctccgagaatcccattcacatacggtaacgaaccgaagtagcactgacaccgccagcattttcggcataatccctgatattattagtcttgattag

SEQ ID NO: 189719 - DNA, 1962 bp, Artificial Sequence
  derived and/or modified sequence
atgtttaccctgcaggatagttacgttaagcagatggtaatgagcttgagggtgagcgaactgcaagtcttacttggatacgccggacggaataagcacggacggaaacacgaactcctcacaaaagcccttcatttgctgaaggccggatgctcaccagccgtgcagatgaagatcaaggagctgtaccgacggcgctttccacagaaaatcatgaccccagccgaccttagcatccccaacgtgcatagcagtcccatgcccgctacattgagcccatcaaccattcctcagttaacatacgacggacatcctgcgagctctccccttttgccggtgtccctgctcggacctaaacatgaactcgaattgccacatctgacatctgcactacacccggtccaccccgacatcaagctccagaagctccccttttacgacctgcttgatgagctgattaagcccacatccttagcgagtgacaactcccagagattccgcgaaacctgctttgctttcgcccttacgcctcaacaggtgcaacagatttccagcagtatggacatttcaggcacaaagtgcgactttacagtccaagtgcagttgagattttgcctaagtgagacctcgtgtccgcaagaggatcatttcccccctaacttatgtgtaaaggtaaacaccaagccctgttcattaccaggataccttcctcccacaaaaaatggcgtagagccaaaaagacctagccggcccataaatattacatctctggttcggctgtctaccacggtgccaaatacgatcgtcgtgagttggaccgccgaaatcggaagaaactattcgatggccgtgtatctggttaagcagcttagcagtacagtgctactgcagaggctgcgtgctaaaggtatacgcaatcctgaccacagtcgcgcactgattaaagagaaattgaccgcagacccagactccgagatcgctactacttcattaagggttagtcttctttgcccacttggtaaaatgcggctgaccatcccttgtcgggctctgacttgttcccacttacagtgtttcgatgcaactctgtacattcaaatgaacgagaagaagcccacatgggtgtgtcctgtgtgcgataagaaagcgccgtacgagcaccttattatcgacggtcttttcatggagatcctcaaatactgtacagattgcgacgaaatccagtttaaagaagatgggacatgggctcccatgcggagtaagaaagaggtgcaagaggtcagcgcctcgtacaatggcgtcgatggctgtctcagttctactctggaacatcaggttgctagtcaccaccagagttctaataagaataaaaaggtagaagtgatcgatctgaccatagacagctcgtccgacgaggaagaggaagaaccatctgcaaaacgtacctgcccatcgctaagcccaacaagtccgctcaacaacaaggggatcctatccttgcctcaccaggccagtcccgtttccaggacccctagcctgccagccgtggacaccagctatatcaacaccagcctcatacaagactatcgacatcccttccacatgacccctatgccatacgatctgcaaggactggacttctttcctttcctctctggggacaaccagcattacaacacctcgctgcttgccgccgcagcagccgcagtgtccgatgaccaggatctgctgcacagtagcagatttttcccttacactagttctcagatgtttctggaccagctcagcgctggtgggtccacatccctgcccacaacaaatggaagttcatccggttccaactcctcactcgtgtcttcaaatagtttacgagaaagccactcgcatacagtcaccaaccgctcctccactgacacagcctctatatttggtatcattcctgatatcatctcactggattag

SEQ ID NO: 189720 - DNA, 1956 bp, Artificial Sequence
  derived and/or modified sequence
atggctgacagcgctgagctgaagcagatggtgatgagcctgcgggtgtctgagctgcaggtgctgctgggctacgccggcaggaacaagcacggcaggaagcatgagctgctgaccaaggccctgcacctgctgaaggccggctgcagccctgctgtgcagatgaagatcaaggagctgtacagaagacgcttcccccagaagatcatgaccccagctgacctgagcatccccaacgtgcacagcagccccatgcctgccaccctgagccccagcaccatcccccagctgacctatgatggccacccagccagcagccccctgctgcctgtgtccctgctgggccccaagcatgagctggagctgccccacctgaccagcgccctgcaccctgtgcacccagacatcaagctgcagaagctgcccttctatgacctgctggatgagctgatcaagcccaccagcctggccagtgacaacagccagcgcttccgggagacctgctttgcctttgccctgaccccccagcaggtgcagcagatcagcagctccatggacatcagcggcaccaagtgtgacttcaccgtgcaggtgcagctgcgcttctgcctgtctgagaccagctgcccccaggaggaccacttcccccccaacctgtgtgtgaaggtgaacaccaagccctgcagcctgcccggctacctgccccccaccaagaatggagtggagcccaagaggcccagccggcccatcaacatcaccagcctggtgcggctgagcaccaccgtgcccaacaccatcgtggtgtcctggacagctgagatcggcaggaactacagcatggctgtgtacctggtgaagcagctgagcagcacagtgctgctgcagaggctgcgggccaagggcatcagaaatccagaccacagccgggccctgatcaaggagaagctgacagctgaccctgacagcgagatcgccaccaccagcctgcgggtgtccctgctgtgccccctgggcaagatgaggctgaccatcccctgccgggccctgacctgcagccacctgcagtgctttgatgccaccctgtacatccagatgaatgagaagaagcccacctgggtgtgccctgtgtgtgacaagaaggccccctatgagcacctgatcattgatggcctcttcatggagatcctgaagtactgcacagactgtgatgagatccagttcaaggaggatggcacctgggcccccatgaggagcaagaaggaggtgcaggaggtgtctgccagctacaacggggtggatggctgcctgagcagcaccctggagcaccaggtggccagccaccaccagagcagcaacaagaacaagaaggtggaggtgattgacctgaccatcgacagcagcagtgatgaggaggaggaggagcccagcgccaagaggacctgccccagcctgagccccaccagccccctgaacaacaagggcatcctgagcctgccccaccaggccagccctgtgtccaggacccccagcctgcctgctgtggacaccagctacatcaacaccagcctcatccaggactaccgccaccccttccacatgacccccatgccctatgacctgcagggcctggacttcttccccttcctgagcggggacaaccagcactacaacaccagcctgctggccgctgctgctgctgctgtgtctgatgaccaggacctgctgcacagcagccgcttcttcccctacaccagcagccagatgttcctggaccagctgtctgctgggggcagcaccagcctgcccaccaccaacggcagcagcagcggcagcaacagcagcctggtgagcagcaacagcctgcgggagagccacagccacacagtgaccaacagaagcagcacagacacagccagcatcttcggcatcatcccagacatcatcagcctggactag

SEQ ID NO: 189721 - DNA, 1962 bp, Artificial Sequence
  derived and/or modified sequence
atgttcaccctgcaggacagctatgtgaagcagatggtgatgagcctgcgggtgtctgagctgcaggtgctgctgggctacgccggcaggaacaagcacggcaggaagcatgagctgctgaccaaggccctgcacctgctgaaggccggctgcagccctgctgtgcagatgaagatcaaggagctgtacagaagacgcttcccccagaagatcatgaccccagctgacctgagcatccccaacgtgcacagcagccccatgcctgccaccctgagccccagcaccatcccccagctgacctatgatggccacccagccagcagccccctgctgcctgtgtccctgctgggccccaagcatgagctggagctgccccacctgaccagcgccctgcaccctgtgcacccagacatcaagctgcagaagctgcccttctatgacctgctggatgagctgatcaagcccaccagcctggccagtgacaacagccagcgcttccgggagacctgctttgcctttgccctgaccccccagcaggtgcagcagatcagcagctccatggacatcagcggcaccaagtgtgacttcaccgtgcaggtgcagctgcgcttctgcctgtctgagaccagctgcccccaggaggaccacttcccccccaacctgtgtgtgaaggtgaacaccaagccctgcagcctgcccggctacctgccccccaccaagaatggagtggagcccaagaggcccagccggcccatcaacatcaccagcctggtgcggctgagcaccaccgtgcccaacaccatcgtggtgtcctggacagctgagatcggcaggaactacagcatggctgtgtacctggtgaagcagctgagcagcacagtgctgctgcagaggctgcgggccaagggcatcagaaatccagaccacagccgggccctgatcaaggagaagctgacagctgaccctgacagcgagatcgccaccaccagcctgcgggtgtccctgctgtgccccctgggcaagatgaggctgaccatcccctgccgggccctgacctgcagccacctgcagtgctttgatgccaccctgtacatccagatgaatgagaagaagcccacctgggtgtgccctgtgtgtgacaagaaggccccctatgagcacctgatcattgatggcctcttcatggagatcctgaagtactgcacagactgtgatgagatccagttcaaggaggatggcacctgggcccccatgaggagcaagaaggaggtgcaggaggtgtctgccagctacaacggggtggatggctgcctgagcagcaccctggagcaccaggtggccagccaccaccagagcagcaacaagaacaagaaggtggaggtgattgacctgaccatcgacagcagcagtgatgaggaggaggaggagcccagcgccaagaggacctgccccagcctgagccccaccagccccctgaacaacaagggcatcctgagcctgccccaccaggccagccctgtgtccaggacccccagcctgcctgctgtggacaccagctacatcaacaccagcctcatccaggactaccgccaccccttccacatgacccccatgccctatgacctgcagggcctggacttcttccccttcctgagcggggacaaccagcactacaacaccagcctgctggccgctgctgctgctgctgtgtctgatgaccaggacctgctgcacagcagccgcttcttcccctacaccagcagccagatgttcctggaccagctgtctgctgggggcagcaccagcctgcccaccaccaacggcagcagcagcggcagcaacagcagcctggtgagcagcaacagcctgcgggagagccacagccacacagtgaccaacagaagcagcacagacacagccagcatcttcggcatcatcccagacatcatcagcctggactag

SEQ ID NO: 189722 - DNA, 1956 bp, Artificial Sequence
  derived and/or modified sequence
atggccgacagcgccgagctgaagcagatggtgatgagcctgcgggtgagtgagctccaggtcctgctcgggtacgccggccggaacaaacatggccgcaagcatgaactcctcaccaaggcgctgcaccttctgaaagctggatgctccccagccgtgcagatgaaaattaaagaactctaccggcgccgcttcccccagaaaatcatgactcccgctgacctttccattcctaatgtgcactcttctcctatgcctgcaacactgtctcctagcaccatcccccaactcacatatgacggacaccccgcttccagccctctgctgcctgtgtcattgcttgggcccaagcatgagctcgagctgccacatttaacctctgccctgcacccggtgcatccggacattaaattgcagaagcttcccttttacgatctgctggacgaactgataaagcctaccagcctggcctcagacaattcacagcgctttcgggaaacctgcttcgccttcgcccttactcctcagcaggtgcagcagataagttcgtctatggacatctctggcaccaaatgcgatttcacagtgcaggttcagctgcgattttgcctgtccgagacctcctgtccgcaggaggatcatttccccccgaatctctgcgtgaaagtgaacaccaaaccttgtagcttacccggataccttccaccaaccaaaaatggggtggagccgaaaagaccctcaagaccgatcaatatcactagtctggtgcgtctgagcacaactgtgcccaatacaatcgtggtctcttggacagccgaaattggacgaaattactcaatggcggtttatttagtcaaacagctctcctccaccgtgctgcttcaacgcctgagggccaaggggatcagaaatcccgaccattccagggccctgattaaggaaaagctcacggctgatcctgacagcgaaattgccactacatccctaagagtaagcctgttatgcccactcgggaaaatgcggctcaccattccttgccgagctttgacctgcagccacctgcagtgcttcgacgctaccctgtatattcaaatgaatgagaaaaagcctacgtgggtctgcccagtgtgcgacaagaaggccccgtatgagcaccttattatagacggactttttatggagatccttaagtactgcacggactgtgatgagatacagtttaaggaagatggcacctgggccccaatgagatcaaagaaggaggtgcaagaagtctcggcttcatataacggggtggatgggtgcttgtcaagtaccctcgaacatcaggtggcaagccatcatcagagctctaacaaaaacaaaaaagtggaggttatcgacttaaccatcgactcttcatcagacgaagaggaagaagaacccagcgcaaaacggacctgtccgagcttgtcccccaccagtcccctgaacaacaagggtattcttagcctgccgcatcaggcctccccggtgagtcgtactccctcacttccagctgtggatacaagttacattaatacgtcgctgattcaggattacaggcatccttttcacatgacaccaatgccatatgaccttcagggtttagatttctttcctttcctgagtggtgataatcagcattataatacctcattgttggctgctgctgctgctgctgtcagtgatgaccaggatctgctccactccagccggttctttccctatacctcctcccagatgttcttggaccagctgagcgccggggggagcacctccctgcctaccaccaatggatcctcctctggatcgaacagcagtctggtgtcctcaaattccctccgggagagccatagccatactgtcactaaccggtcttccactgacacagcgagcatattcgggataattccagatatcatatctctggactag

SEQ ID NO: 189723 - DNA, 1962 bp, Artificial Sequence
  derived and/or modified sequence
atgttcaccctgcaggacagctacgtgaagcagatggtgatgagcctccgggtgtccgagctacaggtgctgcttggctatgcaggccggaataagcatggacgtaagcacgagcttctcacaaaggccctgcatcttctgaaagcgggctgttctcccgcagtccagatgaaaatcaaggaactgtatcgaagacgctttccccaaaagattatgaccccggccgatctatccatccctaacgtccactcttcaccaatgcccgccaccctttcgccgtctactattccacagctcacctacgatggacatcctgctagctctccactgctgccagtgtccctcctcggtcccaagcatgaactggaattgccccatctcacgtctgcactgcatcctgttcatcctgacattaaactacagaaactccctttctatgacctgctggatgaactgatcaaacccaccagtctggcatcagataactctcaaagattcagggagacctgtttcgcctttgcgctgacccctcagcaagtgcaacaaatcagttcatctatggatatctcaggtaccaaatgcgactttactgtccaggttcaactgcgcttttgcttgtctgaaacatcctgcccacaggaggaccactttcctcctaacttgtgtgttaaagtcaataccaagccgtgttccctacctggatacctgccgccaactaagaacggagtggagcctaagaggccgtcgagacccatcaacattacatctttggtgagactatccactactgtgcctaacacgatcgtggtgagttggactgcggaaataggtagaaattactctatggccgtctacttggttaaacagctttcctccaccgtattactacagcgtctgcgagccaaggggatcaggaatcccgatcattctcgggctttgattaaagaaaagctgaccgccgatccggatagcgaaatagcgacaaccagtcttcgggtctccctcctgtgccccctgggcaagatgaggctaaccatcccgtgcagggctcttacctgttcccacctgcaatgtttcgatgctaccctgtatatacagatgaacgaaaaaaaaccgacttgggtatgtcccgtgtgcgataaaaaagccccatacgagcatctgatcatcgatggcttattcatggagatcctcaagtactgtacggattgtgacgagattcagtttaaagaagacggcacatgggcccccatgcggagcaagaaggaggttcaagaggttagtgcctcgtacaatggcgttgatggatgtctgtctagcaccctggaacatcaagtagcctcacatcatcaatccagtaataaaaataagaaggtagaagtcattgatctcactattgattcgtcctcagatgaggaggaagaggagccttctgctaaacggacatgtcctagtctcagtccaacctccccactgaataacaaaggaatactgtctctcccccaccaggcctctcccgtgagtagaacaccctcgctgcctgctgtcgacaccagttacattaatacatcgcttatacaagattataggcacccctttcacatgacgcctatgccttacgacctgcagggcctcgacttctttccctttttaagcggcgataatcagcactacaacaccagtctacttgcggctgcggccgctgcagtgtcagatgatcaggatctgttacactcgtctcgattctttccatacacgtcctcccagatgttcttggatcagctgagtgccggaggcagcacttcactgcctaccactaacggtagctccagtggcagtaattcatcactcgtgagctctaatagtctgcgggagtcccatagtcacaccgtgacaaaccggagtagtaccgatacagcctccattttcgggattatccccgacattattagcctggactag

SEQ ID NO: 189724 - DNA, 1956 bp, Artificial Sequence
  derived and/or modified sequence
atggccgactccgcggaacttaagcaaatggtcatgtcccttagggtatcagagctgcaagtacttctggggtatgcaggcaggaataagcatggaaggaaacatgagctgctgactaaagccttgcatctgttaaaggctggttgtagccccgcagtgcaaatgaagattaaagaactttataggcgcaggtttccccagaagatcatgacacccgctgacctcagcatccctaatgtgcacagcagccctatgccagccaccctgtctccctcaaccattccccaactgacgtacgatggccaccccgctagctcgcctctgctccctgtcagtctgctgggccctaaacacgagcttgagctcccgcacctcaccagcgccttacatccagtgcacccagatatcaagctccagaaacttcctttctacgatcttctagacgagctcattaagcccacatcactcgcttctgacaactcccaaagattcagggaaacttgtttcgcgtttgctctgacccctcagcaggtgcagcagattagctcctctatggacatatctggtactaagtgcgacttcacggtgcaagtgcagctacgattctgcctatccgaaaccagctgcccccaggaggatcacttcccccctaacctgtgcgttaaggtcaacacaaaaccctgctccttgccaggttacttacctcccaccaagaacggcgtggaacccaaacgacccagcagacccataaatattacctcactggttaggttgagcaccaccgttccaaatacaatcgtcgtttcttggacggccgaaattggaaggaattactccatggcggtgtatcttgtgaaacagttgtcctctactgtactgcttcagaggctacgcgcaaagggcattagaaatccggaccacagccgagcgttgatcaaggaaaaattgacagccgaccctgactccgagatcgccacaacttcactgagggtgtctctgttatgtccgctagggaaaatgcgtctgaccatcccttgcagagctctcacatgcagccacctgcagtgtttcgacgccactctgtacatccagatgaatgagaagaagccaacatgggtttgtccagtgtgcgataaaaaggcaccctacgagcacttaatcatcgatggcctgtttatggagatactaaagtactgcacagattgcgacgagattcagtttaaggaggatgggacctgggctcctatgaggtccaagaaggaagtgcaggaggttagcgcttcttataatggggtagacggttgtttgtcctctaccctggagcatcaggtggcatcgcaccatcagagctcaaataagaacaagaaggtggaggttatcgatctcacaatcgattcatcgtccgatgaagaggaggaagaaccctctgcgaagagaacctgcccctcgctctcccctacctctcctctgaataataagggcatcctgtcattgccccatcaggcatcacctgtgtctaggacgcccagtttacccgctgtggatactagttacattaatactagtctaatccaggactacaggcaccccttccacatgaccccaatgccctatgatcttcaggggctggactttttcccctttctgagtggcgacaatcagcactataacacttccttgttggccgcagcggcagccgctgtgtcggatgaccaagatcttctgcattcctctcgatttttcccttacaccagctctcagatgtttctcgaccaattgagcgccggtggttccacttcattgcctaccaccaacggatctagttcaggctctaacagttcactggtgtcgtccaattcactgcgagagtcccactctcataccgtaacaaatcggagtagtactgacactgctagtatattcggtattattcccgatataattagtctcgactag

SEQ ID NO: 189725 - DNA, 1962 bp, Artificial Sequence
  derived and/or modified sequence
atgtttacattgcaagactcctacgtgaagcaaatggtgatgtccttacgggtaagcgaattacaagttctgctgggatatgcaggaagaaacaaacacggcagaaaacacgagttgctgactaaagctctgcaccttctgaaagcaggatgttcccccgcagtacagatgaagatcaaggagctgtaccgcagacgctttcctcagaagatcatgacaccggctgatcttagcatccccaacgtgcactccagtcctatgcctgctaccctcagccctagtaccatccctcagctgacatatgatgggcatccagcatctagcccactcctccccgtctcactgctgggaccaaagcacgaacttgagctccctcatctgacctcagcactccaccccgtgcacccggatataaagttgcagaaactccccttttacgatcttcttgatgaactaatcaagcccacatcactggcctctgataattcccagagatttcgggagacgtgttttgcttttgctctgaccccacagcaggtgcagcagatctcctcaagcatggacatatccggcactaagtgcgattttacagtccaggtgcagctccggttctgtcttagcgaaacctcctgtccccaggaagatcatttcccaccaaatctttgcgtgaaggtcaacaccaaaccttgtagcctacccggatacctccctccaaccaaaaacggtgtagagcccaagaggccttccagaccgatcaatatcacatctctggtacgcctgagcactacagtgccaaacactatcgttgtcagctggacagcagagattggcagaaactacagcatggccgtttacctggttaaacagttatcttcgaccgtgctcctgcaaagactgcgggctaagggaatccgaaaccccgaccattctagagctctgataaaggagaagttgaccgccgaccccgattccgagattgcaactacctccttgagagtgtctctcctttgtcccctgggcaagatgcggcttacaattccttgtcgagccctcacgtgctctcatctgcagtgttttgatgctacgttgtacattcagatgaatgaaaaaaaaccaacatgggtatgtcctgtctgcgacaagaaggcaccttacgaacatctgatcattgatgggttattcatggagatcctgaaatattgcaccgattgtgatgagatccagtttaaagaagacggaacctgggcccctatgagaagtaaaaaagaggtacaagaggtcagtgccagctataacggggtggacggatgtctcagttcgaccctggaacatcaggttgcatctcaccaccagtcttcaaataaaaataaaaaggtggaagtgatcgacttgacaattgacagcagctccgacgaggaggaagaagaaccaagcgccaagaggacgtgtccatcgctctccccaacatcaccacttaacaacaagggaatcctctccttgcctcatcaagcaagtccggtgtcaagaaccccctcactgccggctgtggacacaagttatatcaacacttccttgattcaggactaccgccacccctttcatatgacccccatgccatacgatttgcagggactggactttttcccctttctcagcggagacaaccagcactataatacatcgttgctggctgcagcagctgcagcagtaagtgatgaccaggaccttctacatagcagccgattttttccttatacttccagccagatgtttcttgaccagctgtccgccggtggatcaacctccctgccgactacaaacggaagctctagtggatccaacagctcactcgtatctagtaacagcttgcgggaaagccattcccacacggtcacgaacagaagtagcaccgacacagcgtcaatattcgggatcatcccagacattatctccttggattag

SEQ ID NO: 189726 - DNA, 2278 bp, Artificial Sequence
  derived and/or modified sequence
ggggcgggccggggcggggccaggccggctagaggggcgggtctagcggcggcccccggcgaagttcactgcgcttgcgctgacagacgcaagatggcggacagtgcggaactaaagcaaatggttatgagccttagagtttctgaactccaagtactgttgggctacgccgggagaaacaagcacggacgcaaacacgaacttctcacaaaagccctgcatttgctaaaggctggctgtagtcctgctgtgcaaatgaaaattaaggaactctataggcggcggttcccacagaaaatcatgacgcctgcagacttgtccatccccaacgtacattcaagtcctatgccagcaactttgtctccatctaccattccacaactcacttacgatggtcaccctgcatcatcgccattactccctgtttctcttctgggacctaaacatgaactggaactcccacatcttacatcagctcttcacccagtccatccggatataaaacttcaaaaattaccattttatgatttactggatgaactgataaaacccaccagtctagcatcagacaacagtcagcgctttcgagaaacctgttttgcatttgccttgacaccacaacaagtgcagcaaatcagtagttccatggatatttctgggaccaaatgtgacttcacagtacaggtccagttaaggttttgtttatcagaaaccagttgtccacaagaagatcacttcccacccaatctttgtgtgaaagtgaatacaaaaccttgcagccttccaggttaccttccacctacaaaaaatggcgtggaaccaaagcgacccagccgaccaattaatatcacctcacttgtccgactgtccacaacagtaccaaacacgattgttgtttcttggactgcagaaattggaagaaactattccatggcagtatatcttgtaaaacagttgtcctcaacagttcttcttcagaggttacgagcaaagggaataaggaatccggatcattctagagctttaattaaagagaagttgactgcggatccagacagtgaaatagctacaaccagcctaagggtttctctactatgtccacttggtaaaatgcggctgacaattccgtgtcgggcccttacatgttctcatctacaatgttttgacgcaactctttacattcagatgaatgagaaaaaaccaacctgggtttgtcctgtctgtgataagaaggctccatatgaacaccttattattgatggcttgtttatggaaatcctaaagtactgtacagactgtgatgaaatacaatttaaggaggatggcacttgggcaccgatgagatcaaaaaaggaagtacaggaagtttctgcctcttacaatggagtcgatggatgcttgagctccacattggagcatcaggtagcgtctcaccaccagtcctcaaataaaaacaagaaagtagaagtgattgacctaaccatagacagttcatctgatgaagaggaagaagagccatctgccaagaggacctgtccttccctatctcccacatcaccactaaataataaaggcattttaagtcttccacatcaagcatctccagtatcccgcaccccaagccttcctgctgtagacacaagctacattaatacctccctcatccaagactataggcatcctttccacatgacacccatgccttacgacttacaaggattagatttctttcctttcttatcaggagacaatcagcattacaacacctccttgcttgccgctgcagcagcagcagtttcagatgatcaagacctcctacactcgtctcggtttttcccgtatacctcctcacagatgtttcttgatcagttaagtgcaggaggcagtacttctctgccaaccaccaatggaagcagtagtggcagtaacagcagcctggtttcttccaacagcctaagggaaagccatagccacaccgtcacaaacaggagcagcacggacacggcatccatctttggcatcataccagacattatttcattggactgattcccaggccctgctgctcccatccccaccccagatcgaatgaacttggcagaaagaagagaactttgtgctctgttttaccttactctgtttagaaaagtatacaagcgtgttttttttcctttttttagggaaaaaattaaaagaaatgtacagagaacaaaactatattttcagttttacttttgtatataaatctaagactgcctgtgtgataaaacacttgttt

SEQ ID NO: 189727 - DNA, 2932 bp, Artificial Sequence
  derived and/or modified sequence
ttgttgtgggcgcctctggcgggggtggcgggggaagagatagggagtccggaggtaggggctgcagctgtctcatgggctcggctttttcaccttccagttagcctccctgccccccatggggagctggggctgggggcagggtgctctcgtaggggggattgggaaagctccccgtggccgcttcctcttcctcctttgcagtcccgggctcctgtcaggcgctcttctcagacccccgggaacttggcttcggccgccccgcccctccgtggatcccagtagcccccgccccggactcggctttccccggctgctcgcttgtcaggaagcgcctggggtgccccgcttgtgggaagcgcgatcccggggcgatagggtggggatctgggggagaagctctggtaaagtttagcgagccccgggccggcgttggggttcggctgagaggtagtgagcgggacgttactctttctctctgattccgggcagccgaggggagaaaccccctcgaagagtgtgtctttggaagcagtgttgggagggggggatgcagctacctctctcccttcttttgccttagctggtgtggagggtgagaggagcctttgggggtctctgcacacaccatgatggcgatgctgtagctgatggagaacaaccaaatgccagatttgattctgtagagtttttcctgtggaatatcctcaccgaaagagcttttctcctaataacttcacaatgtttacactccaagattcgtatgttaagcaaatggttatgagccttagagtttctgaactccaagtactgttgggctacgccgggagaaacaagcacggacgcaaacacgaacttctcacaaaagccctgcatttgctaaaggctggctgtagtcctgctgtgcaaatgaaaattaaggaactctataggcggcggttcccacagaaaatcatgacgcctgcagacttgtccatccccaacgtacattcaagtcctatgccagcaactttgtctccatctaccattccacaactcacttacgatggtcaccctgcatcatcgccattactccctgtttctcttctgggacctaaacatgaactggaactcccacatcttacatcagctcttcacccagtccatccggatataaaacttcaaaaattaccattttatgatttactggatgaactgataaaacccaccagtctagcatcagacaacagtcagcgctttcgagaaacctgttttgcatttgccttgacaccacaacaagtgcagcaaatcagtagttccatggatatttctgggaccaaatgtgacttcacagtacaggtccagttaaggttttgtttatcagaaaccagttgtccacaagaagatcacttcccacccaatctttgtgtgaaagtgaatacaaaaccttgcagccttccaggttaccttccacctacaaaaaatggcgtggaaccaaagcgacccagccgaccaattaatatcacctcacttgtccgactgtccacaacagtaccaaacacgattgttgtttcttggactgcagaaattggaagaaactattccatggcagtatatcttgtaaaacagttgtcctcaacagttcttcttcagaggttacgagcaaagggaataaggaatccggatcattctagagctttaattaaagagaagttgactgcggatccagacagtgaaatagctacaaccagcctaagggtttctctactatgtccacttggtaaaatgcggctgacaattccgtgtcgggcccttacatgttctcatctacaatgttttgacgcaactctttacattcagatgaatgagaaaaaaccaacctgggtttgtcctgtctgtgataagaaggctccatatgaacaccttattattgatggcttgtttatggaaatcctaaagtactgtacagactgtgatgaaatacaatttaaggaggatggcacttgggcaccgatgagatcaaaaaaggaagtacaggaagtttctgcctcttacaatggagtcgatggatgcttgagctccacattggagcatcaggtagcgtctcaccaccagtcctcaaataaaaacaagaaagtagaagtgattgacctaaccatagacagttcatctgatgaagaggaagaagagccatctgccaagaggacctgtccttccctatctcccacatcaccactaaataataaaggcattttaagtcttccacatcaagcatctccagtatcccgcaccccaagccttcctgctgtagacacaagctacattaatacctccctcatccaagactataggcatcctttccacatgacacccatgccttacgacttacaaggattagatttctttcctttcttatcaggagacaatcagcattacaacacctccttgcttgccgctgcagcagcagcagtttcagatgatcaagacctcctacactcgtctcggtttttcccgtatacctcctcacagatgtttcttgatcagttaagtgcaggaggcagtacttctctgccaaccaccaatggaagcagtagtggcagtaacagcagcctggtttcttccaacagcctaagggaaagccatagccacaccgtcacaaacaggagcagcacggacacggcatccatctttggcatcataccagacattatttcattggactgattcccaggccctgctgctcccatccccaccccagatcgaatgaacttggcagaaagaagagaactttgtgctctgttttaccttactctgtttagaaaagtatacaagcgtgttttttttcctttttttagggaaaaaattaaaagaaatgtacagagaacaaaactatattttcagttttacttttgtatataaatctaagactgcctgtgtgataaaacacttgttt

SEQ ID NO: 189728 - DNA, 1956 bp, Artificial Sequence
  derived and/or modified sequence
atggccgacagcgccgagctgaagcagatggtgatgagcctgagagtgagcgagctgcaggtgctgctgggctacgccggcagaaacaagcacggcagaaagcacgagctgctgaccaaggccctgcacctgctgaaggccggctgcagccccgccgtgcagatgaagatcaaggagctgtacagaagaagattcccccagaagatcatgacccccgccgacctgagcatccccaacgtgcacagcagccccatgcccgccaccctgagccccagcaccatcccccagctgacctacgacggccaccccgccagcagccccctgctgcccgtgagcctgctgggccccaagcacgagctggagctgccccacctgaccagcgccctgcaccccgtgcaccccgacatcaagctgcagaagctgcccttctacgacctgctggacgagctgatcaagcccaccagcctggccagcgacaacagccagagattcagagagacctgcttcgccttcgccctgaccccccagcaggtgcagcagatcagcagcagcatggacatcagcggcaccaagtgcgacttcaccgtgcaggtgcagctgagattctgcctgagcgagaccagctgcccccaggaggaccacttcccccccaacctgtgcgtgaaggtgaacaccaagccctgcagcctgcccggctacctgccccccaccaagaacggcgtggagcccaagagacccagcagacccatcaacatcaccagcctggtgagactgagcaccaccgtgcccaacaccatcgtggtgagctggaccgccgagatcggcagaaactacagcatggccgtgtacctggtgaagcagctgagcagcaccgtgctgctgcagagactgagagccaagggcatcagaaaccccgaccacagcagagccctgatcaaggagaagctgaccgccgaccccgacagcgagatcgccaccaccagcctgagagtgagcctgctgtgccccctgggcaagatgagactgaccatcccctgcagagccctgacctgcagccacctgcagtgcttcgacgccaccctgtacatccagatgaacgagaagaagcccacctgggtgtgccccgtgtgcgacaagaaggccccctacgagcacctgatcatcgacggcctgttcatggagatcctgaagtactgcaccgactgcgacgagatccagttcaaggaggacggcacctgggcccccatgagaagcaagaaggaggtgcaggaggtgagcgccagctacaacggcgtggacggctgcctgagcagcaccctggagcaccaggtggccagccaccaccagagcagcaacaagaacaagaaggtggaggtgatcgacctgaccatcgacagcagcagcgacgaggaggaggaggagcccagcgccaagagaacctgccccagcctgagccccaccagccccctgaacaacaagggcatcctgagcctgccccaccaggccagccccgtgagcagaacccccagcctgcccgccgtggacaccagctacatcaacaccagcctgatccaggactacagacaccccttccacatgacccccatgccctacgacctgcagggcctggacttcttccccttcctgagcggcgacaaccagcactacaacaccagcctgctggccgccgccgccgccgccgtgagcgacgaccaggacctgctgcacagcagcagattcttcccctacaccagcagccagatgttcctggaccagctgagcgccggcggcagcaccagcctgcccaccaccaacggcagcagcagcggcagcaacagcagcctggtgagcagcaacagcctgagagagagccacagccacaccgtgaccaacagaagcagcaccgacaccgccagcatcttcggcatcatccccgacatcatcagcctggactag

SEQ ID NO: 189729 - DNA, 1962 bp, Artificial Sequence
  derived and/or modified sequence
atgttcaccctgcaggacagctacgtgaagcagatggtgatgagcctgagagtgagcgagctgcaggtgctgctgggctacgccggcagaaacaagcacggcagaaagcacgagctgctgaccaaggccctgcacctgctgaaggccggctgcagccccgccgtgcagatgaagatcaaggagctgtacagaagaagattcccccagaagatcatgacccccgccgacctgagcatccccaacgtgcacagcagccccatgcccgccaccctgagccccagcaccatcccccagctgacctacgacggccaccccgccagcagccccctgctgcccgtgagcctgctgggccccaagcacgagctggagctgccccacctgaccagcgccctgcaccccgtgcaccccgacatcaagctgcagaagctgcccttctacgacctgctggacgagctgatcaagcccaccagcctggccagcgacaacagccagagattcagagagacctgcttcgccttcgccctgaccccccagcaggtgcagcagatcagcagcagcatggacatcagcggcaccaagtgcgacttcaccgtgcaggtgcagctgagattctgcctgagcgagaccagctgcccccaggaggaccacttcccccccaacctgtgcgtgaaggtgaacaccaagccctgcagcctgcccggctacctgccccccaccaagaacggcgtggagcccaagagacccagcagacccatcaacatcaccagcctggtgagactgagcaccaccgtgcccaacaccatcgtggtgagctggaccgccgagatcggcagaaactacagcatggccgtgtacctggtgaagcagctgagcagcaccgtgctgctgcagagactgagagccaagggcatcagaaaccccgaccacagcagagccctgatcaaggagaagctgaccgccgaccccgacagcgagatcgccaccaccagcctgagagtgagcctgctgtgccccctgggcaagatgagactgaccatcccctgcagagccctgacctgcagccacctgcagtgcttcgacgccaccctgtacatccagatgaacgagaagaagcccacctgggtgtgccccgtgtgcgacaagaaggccccctacgagcacctgatcatcgacggcctgttcatggagatcctgaagtactgcaccgactgcgacgagatccagttcaaggaggacggcacctgggcccccatgagaagcaagaaggaggtgcaggaggtgagcgccagctacaacggcgtggacggctgcctgagcagcaccctggagcaccaggtggccagccaccaccagagcagcaacaagaacaagaaggtggaggtgatcgacctgaccatcgacagcagcagcgacgaggaggaggaggagcccagcgccaagagaacctgccccagcctgagccccaccagccccctgaacaacaagggcatcctgagcctgccccaccaggccagccccgtgagcagaacccccagcctgcccgccgtggacaccagctacatcaacaccagcctgatccaggactacagacaccccttccacatgacccccatgccctacgacctgcagggcctggacttcttccccttcctgagcggcgacaaccagcactacaacaccagcctgctggccgccgccgccgccgccgtgagcgacgaccaggacctgctgcacagcagcagattcttcccctacaccagcagccagatgttcctggaccagctgagcgccggcggcagcaccagcctgcccaccaccaacggcagcagcagcggcagcaacagcagcctggtgagcagcaacagcctgagagagagccacagccacaccgtgaccaacagaagcagcaccgacaccgccagcatcttcggcatcatccccgacatcatcagcctggactag

SEQ ID NO: 189730 - protein, 433 aa, Artificial Sequence
  derived and/or modified sequence
MAELRPSGAPGPTAPPAPGPTAPPAFASLFPPGLHAIYGECRRLYPDQPNPLQVTAIVKYWLGGPDPLDYVSMYRNVGSPSANIPEHWHYISFGLSDLYGDNRVHEFTGTDGPSGFGFELTFRLKRETGESAPPTWPAELMQGLARYVFQSENTFCSGDHVSWHSPLDNSESRIQHMLLTEDPQMQPVQTPFGVVTFLQIVGVCTEELHSAQQWNGQGILELLRTVPIAGGPWLITDMRRGETIFEIDPHLQERVDKGIETDGSNLSGVSAKCAWDDLSRPPEDDEDSRSICIGTQPRRLSGKDTEQIRETLRRGLEINSKPVLPPINPQRQNGLAHDRAPSRKDSLESDSSTAIIPHELIRTRQLESVHLKFNQESGALIPLCLRGRLLHGRHFTYKSITGDMAITFVSTGVEGAFATEEHPYAAHGPWLQL

SEQ ID NO: 189731 - protein, 484 aa, Artificial Sequence
  derived and/or modified sequence
MAELRPSGAPGPTAPPAPGPTAPPAFASLFPPGLHAIYGECRRLYPDQPNPLQVTAIVKYWLGGPDPLDYVSMYRNVGSPSANIPEHWHYISFGLSDLYGDNRVHEFTGTDGPSGFGFELTFRLKRETGESAPPTWPAELMQGLARYVFQSENTFCSGDHVSWHSPLDNSESRIQHMLLTEDPQMQPVQTPFGVVTFLQIVGVCTEELHSAQQWNGQGILELLRTVPIAGGPWLITDMRRGETIFEIDPHLQERVDKGIETDGSNLSGVSAKCAWDDLSRPPEDDEDSRSICIGTQPRRLSGKDTEQIRETLRRGLEINSKPVLPPINPQRQNGLAHDRAPSRKDSLESDSSTAIIPHELIRTRQLESVHLKFNQESGALIPLCLRGRLLHGRHFTYKSITGDMAITFVSTGVEGAFATEEHPYAAHGPWLQILLTEEFVEKMLEDLEDLTSPEEFKLPKEYSWPEKKLKVSILPDVVFDSPLH

SEQ ID NO: 189732 - DNA, 1455 bp, Artificial Sequence
  derived and/or modified sequence
atggccgagctgagacccagcggcgcccccggccccaccgccccccccgcccccggccccaccgccccccccgccttcgccagcctgttcccccccggcctgcacgccatctacggcgagtgcagaagactgtaccccgaccagcccaaccccctgcaggtgaccgccatcgtgaagtactggctgggcggccccgaccccctggactacgtgagcatgtacagaaacgtgggcagccccagcgccaacatccccgagcactggcactacatcagcttcggcctgagcgacctgtacggcgacaacagagtgcacgagttcaccggcaccgacggccccagcggcttcggcttcgagctgaccttcagactgaagagagagaccggcgagagcgccccccccacctggcccgccgagctgatgcagggcctggccagatacgtgttccagagcgagaacaccttctgcagcggcgaccacgtgagctggcacagccccctggacaacagcgagagcagaatccagcacatgctgctgaccgaggacccccagatgcagcccgtgcagacccccttcggcgtggtgaccttcctgcagatcgtgggcgtgtgcaccgaggagctgcacagcgcccagcagtggaacggccagggcatcctggagctgctgagaaccgtgcccatcgccggcggcccctggctgatcaccgacatgagaagaggcgagaccatcttcgagatcgacccccacctgcaggagagagtggacaagggcatcgagaccgacggcagcaacctgagcggcgtgagcgccaagtgcgcctgggacgacctgagcagaccccccgaggacgacgaggacagcagaagcatctgcatcggcacccagcccagaagactgagcggcaaggacaccgagcagatcagagagaccctgagaagaggcctggagatcaacagcaagcccgtgctgccccccatcaacccccagagacagaacggcctggcccacgacagagcccccagcagaaaggacagcctggagagcgacagcagcaccgccatcatcccccacgagctgatcagaaccagacagctggagagcgtgcacctgaagttcaaccaggagagcggcgccctgatccccctgtgcctgagaggcagactgctgcacggcagacacttcacctacaagagcatcaccggcgacatggccatcaccttcgtgagcaccggcgtggagggcgccttcgccaccgaggagcacccctacgccgcccacggcccctggctgcagatcctgctgaccgaggagttcgtggagaagatgctggaggacctggaggacctgaccagccccgaggagttcaagctgcccaaggagtacagctggcccgagaagaagctgaaggtgagcatcctgcccgacgtggtgttcgacagccccctgcactag

SEQ ID NO: 189733 - DNA, 1455 bp, Artificial Sequence
  derived and/or modified sequence
atggccgagctccgaccctctggagccccaggacccacagcacccccagcccctggacccaccgccccccccgcctttgcgagtctgtttccacccggattgcacgccatttatggtgaatgtagacgtttgtacccagatcagcctaatcccctgcaagtgaccgcaatcgttaaatactggctcggtgggccggacccccttgactacgtctcaatgtatcgcaatgttgggtctccgtccgccaacatccccgagcactggcattatatttccttcgggctttccgatctctatggggacaaccgggtgcatgagtttaccggcacagacggaccgtccggttttggattcgagctcaccttcaggcttaagcgggagaccggagaaagcgccccacctacctggccggcggaactgatgcaaggcctagcaaggtacgtgtttcagtctgagaacacattttgttccggcgaccacgtctcctggcactcacccttagacaactccgagtcacggatccagcatatgcttttaacagaggacccacaaatgcagcccgtgcagactcccttcggcgtcgtgacattcctgcagatagtaggtgtttgcactgaggagcttcattcggctcagcagtggaacggccaggggatcctggagttactccgcactgtgccaatcgccggcgggccgtggctcataactgacatgcgtcgcggtgagactatatttgaaatcgatccgcatctgcaggagcgagtggataagggaattgagacagatggatctaatctgtctggggtcagcgctaagtgcgcttgggatgatctctcaagacccccagaagacgatgaggactctcggtctatttgcatagggactcagcccagaaggctgtcaggcaaagacactgagcagatcagggagaccctgcggaggggcctcgaaattaacagcaagccagtccttcctcccatcaatccacaacgacaaaatggactggcacacgatcgggctcccagtagaaaagacagtctcgaaagcgactcgtccaccgccatcataccccacgagctaatccgcacacgccagctggagagcgtgcacctaaagttcaaccaggagtctggagcattaatacctctgtgtctcagaggtagacttctgcatggacggcatttcacctacaaaagcataacaggcgatatggctatcaccttcgtctctaccggcgtcgagggcgcattcgcaacggaggaacatccgtacgcagcccacggaccttggctgcagattttgttgactgaggagttcgtggagaagatgctggaggatctggaggatctgacaagcccggaagaattcaaacttcctaaggagtatagctggcctgaaaagaaactcaaagtgagcattcttcctgacgtcgtgtttgattccccactgcactag

SEQ ID NO: 189734 - DNA, 1455 bp, Artificial Sequence
  derived and/or modified sequence
atggccgagctgcggcccagcggggcccctggccccacagcccccccagcccctggccccacagcccccccagcctttgccagcctcttccccccaggcctgcacgccatctacggggagtgccggcggctgtacccagaccagcccaaccccctgcaggtgacagccatcgtgaagtactggctgggcggccctgaccccctggactatgtgtccatgtacagaaatgtgggcagccccagcgccaacatccctgagcactggcactacatcagctttggcctgagtgacctgtatggagacaacagagtgcatgagttcaccggcacagatggccccagcggcttcggctttgagctgaccttccggctgaagcgggagaccggggagagcgccccacccacctggccagctgagctgatgcagggcctggcccgctacgtgttccagagcgagaacaccttctgcagcggggaccacgtgtcctggcacagccccctggacaacagcgagagccgcatccagcacatgctgctgacagaggacccccagatgcagcctgtgcagacccccttcggcgtggtgaccttcctgcagatcgtgggcgtgtgcacagaggagctgcacagcgcccagcagtggaatggccagggcatcctggagctgctgaggacagtgcccatcgccggcggcccctggctgatcacagacatgagaagaggagagaccatctttgaaattgacccccacctgcaggagcgggtggacaagggcattgaaacagatggcagcaacctgtctggagtgtctgccaagtgtgcctgggatgacctgagccggcccccagaagatgatgaggacagccgcagcatctgcatcggcacccagccccggcggctgagcggcaaggacacagagcagatccgggagaccctgcggcggggcctggagatcaacagcaagcctgtgctgccccccatcaacccccagaggcagaatggcctggcccatgaccgggcccccagcaggaaggacagcctggagagtgacagcagcacagccatcatcccccatgagctgatccgcacccggcagctggagagcgtgcacctgaagttcaaccaggagagcggggccctgatccccctgtgcctgcggggccgcctgctgcacggccgccacttcacctacaagagcatcactggagacatggccatcacctttgtgtccactggagtggagggcgcctttgccacagaggagcacccctatgctgcccacggcccctggctgcagatcctgctgacagaggagtttgtggagaagatgctggaggacctggaggacctgaccagccctgaggagttcaagctgcccaaggagtacagctggccagagaagaagctgaaggtgtccatcctgcctgatgtggtgtttgacagccccctgcactag

SEQ ID NO: 189735 - DNA, 1455 bp, Artificial Sequence
  derived and/or modified sequence
atggccgagctgcggcccagcggcgcccccggccccaccgccccccctgcccccgggcctaccgcccctcctgcattcgcgagcctcttcccaccaggactccatgctatttatggtgagtgcaggcggttgtaccctgatcaacccaaccccctgcaggtcacggctatagttaagtactggttgggtgggcccgaccctctagactatgtgtctatgtatagaaatgtcggatcaccaagcgccaatataccagaacactggcactatatttcatttggtctctccgacctgtacggggataatcgcgtgcacgagttcactggtacggacggcccaagcggattcggcttcgagttaacattcagactaaagcgagagacaggggagtctgctcctcctacatggcctgccgagctaatgcagggactcgctaggtacgtgttccagtccgagaacacattttgcagcggtgaccacgtttcttggcatagccccctggacaattctgaatcgagaatccagcatatgctgctcaccgaagacccccagatgcagcctgtgcagacccccttcggcgtggtgaccttcctacagattgtgggcgtctgcacagaggaactacactccgcacaacagtggaatgggcaaggtatactggagttgctgcggactgtccctatcgcaggaggcccctggctgattaccgatatgaggaggggcgaaaccatcttcgaaatcgaccctcacctgcaggagagggtcgacaaagggatcgaaaccgacgggagcaacctgagcggtgtatccgcgaagtgcgcctgggatgatttgagcagaccccccgaggacgatgaagattcccggtctatatgtatcggtactcaacctagaaggctatccgggaaagataccgagcaaatacgcgagaccctgcgccggggactggagataaattccaagcccgtgctcccacccattaacccacagcggcagaacgggcttgctcatgatagggctccgtcgcgaaaggattccctagagagcgattcctccaccgccatcattccacacgagctgatccgaactagacaactcgaaagtgtgcatttgaagttcaaccaggagtcaggcgctctgatccccctgtgcctgcgtgggaggcttctccacggcaggcactttacctataagtcgatcacaggagatatggccatcacctttgtaagcacaggcgtggaaggagccttcgccacagaggagcacccctatgccgcgcatggaccatggcttcagattttgttaactgaagagtttgttgaaaaaatgctcgaagacctcgaggatttgacttctccagaggagttcaagttacccaaagaatacagctggccagaaaagaaacttaaggtgagcatcctgccagacgtcgtctttgatagcccgctccactag

SEQ ID NO: 189736 - DNA, 1455 bp, Artificial Sequence
  derived and/or modified sequence
atggccgaactgaggccgagcggtgccccaggcccaacagcgcctcccgctcccggacctactgcccctccagcgtttgcgagcttgtttcctccaggccttcatgccatatacggcgaatgtagaaggctgtatccagaccagccgaacccgttacaggtaactgctatagtgaaatactggctcggaggacccgatccactggactatgtaagcatgtacaggaatgttggcagtccatccgcaaatattcccgagcactggcattatatctcgtttggcctttctgatctgtacggtgacaatagagttcacgaattcaccgggacagacggtcccagcggcttcgggttcgaactgaccttccgtctcaagcgggaaacaggcgaatccgctcctcccacatggcctgccgaattaatgcagggtctggctcggtacgtctttcagtccgaaaacacattttgtagtggagaccacgtgtcatggcattcccctcttgataacagtgagtctcgcatccaacacatgctgctcacagaggacccgcagatgcaaccagtgcagacacccttcggcgtggtaacgttcctccagattgtgggcgtttgtaccgaggagctgcattcagcgcagcagtggaatggccaaggaatcctagagttactgaggacggtgccaatcgctggaggcccatggctgattaccgatatgcgacgaggtgaaaccattttcgagatcgatccccatctgcaagagcgggtggataagggcattgaaacggacggaagcaacttgtccggggtctccgctaagtgtgcttgggatgacctgtcaagacccccagaggatgacgaggactctaggagcatttgtataggcactcaaccccgtagactgtcaggcaaggatacagaacagatccgagaaactctgcgacggggactggagattaactccaaaccagtgctgccccctataaaccctcagcggcaaaacggactagcacatgatcgcgctccgtcgaggaaagactccctggagtctgactcctccaccgccatcattccccacgaactcatccggaccagacagttagagtctgtccacctgaaattcaaccaagaatccggcgctctgataccactgtgcctgcggggtcggcttcttcacggcaggcacttcacgtacaagagcattaccggcgacatggctatcacctttgtgagcactggtgtggaaggagccttcgcgactgaggagcacccctacgctgcacacggtccatggctccaaatcttactaactgaagaattcgtggagaagatgcttgaggacctcgaagatctgacttctcccgaggaattcaagctgccaaaagagtattcgtggccagagaagaagctcaaggtcagtattctgcccgatgtcgtcttcgactcaccactgcactag

SEQ ID NO: 189737 - DNA, 5001 bp, Artificial Sequence
  derived and/or modified sequence
gacagcctgggcggacagtgcgccgtgcgcaggcgcggagctagacctcgctgcagcccccatcgcctcggggagtctcacccaccgagtccgcccgctggcccgtcagtgctctccccgtcgtttgccctctccagttcccccagtgcctgccctacgcaccccgatggcggagctgcggcctagcggcgcccccggccccaccgcgcccccggcccctggcccgactgcccccccggccttcgcttcgctctttcccccgggactgcacgccatctacggagagtgccgccgcctttaccctgaccagccgaacccgctccaggttaccgctatcgtcaagtactggttgggtggcccagaccccttggactatgttagcatgtacaggaatgtggggagcccttctgctaacatccccgagcactggcactacatcagcttcggcctgagtgatctctatggtgacaacagagtccatgagtttacaggaacagatggacctagtggttttggctttgagttgacctttcgtctgaagagagaaactggggagtctgccccaccaacatggcccgcagagttaatgcagggcttggcacgatacgtgttccagtcagagaacaccttctgcagtggggaccatgtgtcctggcacagccctttggataacagtgagtcaagaattcagcacatgctgctgacagaggacccacagatgcagcccgtgcagacaccctttggggtagttaccttcctccagatcgttggtgtctgcactgaagagctacactcagcccagcagtggaacgggcagggcatcctggagctgctgcggacagtgcctattgctggcggcccctggctgataactgacatgcggaggggagagaccatatttgagatcgatccacacctgcaagagagagttgacaaaggcatcgagacagatggctccaacctgagtggtgtcagtgccaagtgtgcctgggatgacctgagccggccccccgaggatgacgaggacagccggagcatctgcatcggcacacagccccggcgactctctggcaaagacacagagcagatccgggagaccctgaggagaggactcgagatcaacagcaaacctgtccttccaccaatcaaccctcagcggcagaatggcctcgcccacgaccgggccccgagccgcaaagacagcctggaaagtgacagctccacggccatcattccccatgagctgattcgcacgcggcagcttgagagcgtacatctgaaattcaaccaggagtccggagccctcattcctctctgcctaaggggcaggctcctgcatggacggcactttacatataaaagtatcacaggtgacatggccatcacgtttgtctccacgggagtggaaggcgcctttgccactgaggagcatccttacgcggctcatggaccctggttacaaattctgttgaccgaagagtttgtagagaaaatgttggaggatttagaagatttgacttctccagaggaattcaaacttcccaaagagtacagctggcctgaaaagaagctgaaggtctccatcctgcctgacgtggtgttcgacagtccgctacactagcctgggctgggccctgcagtggccagcagggagcccagctgctccccagtgacttccagtgtaacagttgtgtcaacgagatctccacaaataaaaggacaagtgtgaggaagactgcgcagtgccaccccgcagcccagtggggtgccatgcacaggccacaggccctccacctcacctccagctcaggggccgcaccccgccgctggctaagccttgtgacccatcaggccagtgagtgggcaaatgcggaccctccctgcctgcagcctgcacagattctggtttgaggtttgactctggaccctggctgtgcccctaggtggagacagccctctttctcacctaccccctgccgcacagcccagcaggagggaggcggacagccagatgcagagcgagtggatgcacttcccagctcatctctggaagcctttgctactcaagctcctctggccgcggaacaattcctctgatcatgtttggttttcttcttccttattttattttgtagaaaccgggtggtattttattgctctgcaaagatgtccagaagccatgtatataatgttttttaaacagaacttcattccccgttgaactttcgcattctctgacagaggcctagggctgtatctctccctgggctgccaccagagaaggtgcttggtgttcgcctgccagcccagagccctggaggagccggctgcacagagaggcttttcttcccagctgggcctggtggagcccggggcagggggagagtagagacactcccttgtgcagctttgagcctagtttagctggggccagggaggggtgctactgttttccaagtgaatgggtctcaaagacttggtgaccccagcctcatcttctaggccttttccacccaaccaggcctacctgggagagggtgaggttcagcacatcacacaccatccccactgtcattcagggcctgggtctccagctctgtaaccagtcctgtcccatttcctcagtccctgggcctcccagccttcaggctgtagggctgccttactaaaattgaaaaatccacctcttaacatctctttcactttggttttgctaacactgctctctgctgccctcccatcctccctgtatccattcatgccctatctttcattctccactcctaatccctctcctttctggcatcctggcctctcgtggtcctcagcccctcacccccagtactgcagatctcacagtttgccttccagaagccagcctatctctagcccatggttttggagttcctctcgggttatctcccacgcctgacctggaaccagcaagcccctttcctgccttcttacccccaactctagggatgggactgttacaatacttcaagatcactctttacacctcttcaaagcaaagtcatgacaatgcagggctcctcattgctcccatctgcctctgctgcacacacaggcaccagcagggatgccacaggagtgcccacagggtgcaggactccactgatgagagatccagccaaagagctgcccccaggggtatgagggcaccagctgggttctccagggagcaggagttggacctccatggagccactaggcctggcctcctctacacatccccagggctatctggttaattccatcaagctcagagttaaaaggcatatcagcctggagtatttgggagagactggctgcagatccccgccagccaagatgcaagccactcgggacctgatgtcggcagctgtgcctctactgccctgaggacttaccagagggagccctactggccttcccccaccacagcagccctgcctgtgaagctcttgtttctgacatttcacaggcagagaggtgccatcagttcgcctccattccttgccaccatgaccagcctctccctgaactctctcttgctcgggacctgcctgagggctccctgctgcagttcgccgtacttccatctgctgggtgcctccatcgttggttgggtggggatggggcattttctgagctaagctttgtcattagtttgtgaagcacctggtcagcaacctgccccagacctggagggtctttgtggactgaaggtagacaccagccagcatggtggccctgttctgggggagcagggtaaggcaggaggaagtgggtgagctccgagatgatgagcacatgaagcctgtggccccttcgtacctgcaatatgtcaggagcctcacgctcacccaagatcctgcaggggccaggctccatctcactggctctgagggcaggacagggtatcacacatttctcaccaggcctcctttcctatgggcattggtgcctcccagaggtttcttgggctgctggctggtgagagaggacccttaaagaagatcaagccaagctgaccttggaccctgtccagcacagcttctggcacaggatgcttggtgaatgtaccctttctttccctccctgcagctctgagggagcccctgaccttgtagtgggtggaggaggtaaggggcctccctccctaaatctgcctcttctgcaagctacttggagacttgcctagttgtacccacccctccaggtccctggtgctagagcttctgagaagggcctttccctttcctctttgcctgctatataaggcaggctcctgtggctctgctggctcagtgtgggctgcaggaggactgcagactcagctgcaattctgaggggggtttgggaggcttgtgcgaggtctcaggcctgtgtggggagctggtgcctcttcctgcccgtatctttctcttccaagggcagtgctccaaggcagggactggagaagccaaggggagagtctaaaagggctagagcatttttaaaaatagacacagggtcttgggactggggtttcggattgagttgcaagcagggagaaaacctgaaggtcggtgcccctatggggctgaccagtagagaatttcctttactgtatttttgtgtctggtcttccctttctggcttctaggacatccatgccaggtgaggtgcctgggtccctgttacaagtcaggagccctgtagggagacccctccttttgtacaagtacctgaatgctgcgacaagcagatttttgtaaaattttatattagtttttaatgtcagtggcgactcggttcctggggctgcagccagcctgggacttttgtaagaatttttgggtgactcacttagatgtcgtttccttcttgccccctcttcctctctgtaatctaagtgcattaaacatctttgcagaagtgcctgggttgtgtgctcatttctggctgcctgaagtagtggagccggaagcccggggccctggcagagggagtgggttg

SEQ ID NO: 189738 - protein, 284 aa, Artificial Sequence
  derived and/or modified sequence
MEPGMLGPHNLPHHEPISFGIDQILSGPETPGGGLGLGRGGQGHGENGAFSGGYHGASGYGPAGSLAPLPGSSGVGPGGVIRVPAHRPLPVPPPAGGAPAVPGPSGLGGAGGLAGLTFPWMDSGRRFAKDRLTAALSPFSGTRRIGHPYQNRTPPKRKKPRTSFSRSQVLELERRFLRQKYLASAERAALAKALRMTDAQVKTWFQNRRTKWRRQTAEEREAERHRAGRLLLHLQQDALPRPLRPPLPPDPLCLHNSSLFALQNLQPWAEDNKVASVSGLASVV

SEQ ID NO: 189739 - DNA, 1415 bp, Artificial Sequence
  derived and/or modified sequence
atccaaccaaggcctcagtgaggtcccacgtgtcccccgtggcgagatttcgccctcccgccgttgaggaggaagagtgtgagaacagacttcctaggcaccgggcgccgttccccagccgcttcttacgcagccgggaaaccacaacgagatttggtcttcgagagcatttaggcggggaccacaacgaatccgggagttggccagaaggatccatcgagaggcgaagagtgggggctgggggaggaggcacctgcggaggaagccggtgaggcggaggcagcccaaaggcggaggccgcccaaaggcggaggccagcaaggatggaggcgcgctgcgctctcgcccttctctgggacgcgccgcataggccacccctaccaaaaccggacccctccgaagcggaagaagccgcgcacgtccttctcccgctcacaggtgctggagttggagcggcgcttcctgcgccagaagtacctggcctctgcggagagggcggcgctggccaaggccttgcgcatgaccgacgcacaggtcaaaacgtggttccagaaccgacgcaccaagtggcggcgccagacggcggaggagcgcgaggccgagcggcaccgcgcgggccggctgctcctgcatctgcagcaggacgcgttgccacggccgctgcggccgccgctgcccccggaccctctctgcctgcacaactcgtcgctcttcgcgctgcagaacctgcagccctgggccgaggacaacaaagtggcttcagtgtccgggctcgcctcggtggtgtgagcgacgcccgtccgatcggcgtggagcgccgggcccggagcggtggagcgcgcggctgcctgcgtccatggtctagtggcagccgggcgcgtgaggagcggcaggccttgaggctgtcgtcgagggctcctccaccaccggccggctcccaagccagcgttgcgcagatgcacggccagctcagaggcggcctttcccgccatttttcacttcactgccgttacgccctcgctggaacctgaggcgccgagagggcgggacctgcaggacagtagccaatgaggtgcggggagggggccgggctggccaatgggagctgctttcctgagggactcgaaattctccggcgggtggtcgggagctggggctctgaggggctctagcggcgttgcgcgcggtgccggctgggtctgtaccaaaggtgtgaaggaaagaagacaccgaccacggcgaagcaatagagggggtgctggagcgcgagaggctggctgattgtgaccgaaaccagagggttgtccaccccgggcatctcatccctcaactgtaaaataatcgctaaggattccttcctgactttgaaaaaaaaaaaaaaaaaaaaaaaaaaaaaaaaaaaaaaaaaaaaaaaa

SEQ ID NO: 189740 - DNA, 855 bp, Artificial Sequence
  derived and/or modified sequence
atggagcctggtatgctggggccacacaatttgccccatcatgagcccatctcttttgggatcgatcagattctctccgggcccgagaccccgggagggggcctgggactcgggagagggggtcagggccatggtgaaaacggagcctttagtggcgggtaccatggcgcaagcggttacggacctgcaggctctttggccccgttacccggaagttctggggttggtccggggggagtcatccgcgtcccggcccacagacccctacccgtgcccccgcctgccggcggtgcacccgccgtgcccgggcctagtggcctggggggagccggtggtctggccggtcttaccttcccctggatggactccgggaggagattcgcgaaagaccggctgacagccgctctgtctcccttctcagggactaggcggatcggccacccataccagaatcgtacaccacccaagagaaagaaaccacgcacatcattctctaggtcacaagtcttggagctcgagagaagattcctgcgccaaaagtatctggcgtctgccgagcgcgccgctctggcaaaggctctcaggatgactgacgcccaagtgaagacctggttccagaataggcgcacaaagtggaggaggcagacagcagaggaacgcgaagccgagcggcacagggctggcaggttattgctgcacctgcagcaggacgccctgcctagacccttgcgaccaccactaccaccagatccgctgtgccttcacaatagctccctctttgccttacagaatttacagccatgggcggaggataacaaggttgcctctgtttctgggctcgcatctgtggtctag

SEQ ID NO: 189741 - DNA, 855 bp, Artificial Sequence
  derived and/or modified sequence
atggagcccggcatgctgggcccccacaacctgccccaccacgagcccatcagctttggaattgaccagatcctgagcggccctgagaccccaggcggcggcctgggcctgggccggggcggccagggccacggggagaatggagccttcagcggcggctaccatggagccagcggctacggccctgctggcagcctggcccccctgcccggcagcagtggagtgggccctggaggagtcatccgggtgcctgcccaccggcccctgcctgtgcccccacctgctggaggagccccagctgtgcccggccccagcggcctgggcggggccggcggcctggccggcctgaccttcccctggatggattctggaagaagatttgccaaggaccggctgacagctgccctgagccccttcagcggcaccaggagaattggccacccctaccagaacagaacaccacccaagaggaagaagcccaggaccagcttcagccgcagccaggtgctggagctggagcggcgcttcctgcggcagaagtacctggccagcgctgagcgggccgccctggccaaggccctgaggatgacagatgcccaggtgaagacctggttccagaacagaaggaccaagtggaggcggcagacagctgaggagcgggaggccgagcggcacagagctggccgcctgctgctgcacctgcagcaggatgccctgccccggcccctgcggccccccctgcccccagaccccctgtgcctgcacaacagcagcctgtttgccctgcagaacctgcagccctgggccgaggacaacaaggtggcctctgtgtctggcctggcctctgtggtgtag

SEQ ID NO: 189742 - DNA, 855 bp, Artificial Sequence
  derived and/or modified sequence
atggagcccggcatgctgggcccccacaacctgccccaccacgagccaatcagttttggcatagaccagattctgtctggccctgaaacgcctggtggagggctcggtttagggagagggggacagggccatggagaaaacggcgccttcagtggaggctaccatggcgccagcgggtatggccctgccggctctctggctcctttacccggatctagtggcgttggaccaggcggagttattagagtcccagctcatagaccccttcctgttccccctccagctggaggtgcccccgctgtgccaggtccttctggcttaggcggtgccggtggtctcgcgggcctgactttcccctggatggatagcgggcgcaggttcgcgaaggaccgcctgacggccgctctctcacctttcagcggcacccggagaattggccacccctatcagaaccgcaccccccccaagcgtaagaagccaagaacttccttctctcgatcccaggttctcgagcttgagagacgatttcttcgccagaaatacttagcatctgccgaacgggccgctcttgcgaaggctttgcgcatgaccgatgcccaggtgaaaacctggttccagaaccgaagaacaaagtggaggcggcaaaccgccgaggaacgcgaggccgagcggcacagagccggacggctgctgctgcacctgcaacaggacgcgctgcctcgcccactgagacctccactaccacctgacccactgtgcctgcacaattcgtctctcttcgctctgcaaaatctgcagccttgggcggaggacaataaggttgcctctgtgtctggcctggccagcgtagtctag

SEQ ID NO: 189743 - DNA, 855 bp, Artificial Sequence
  derived and/or modified sequence
atggaacccggaatgttagggccacacaatctacctcatcatgagcccatcagtttcgggatcgaccagatcttatccgggcctgagacgcccggtggcggtctgggcctcggccgagggggtcaaggccacggggaaaatggcgctttctccggtggttaccatggtgctagcgggtatggccctgcagggtccctggccccactgcccggatcatcaggagtcggacctggaggcgttattcgagtacctgcacaccggccactccccgtgccccctcctgcaggtggcgcacccgcagtgccaggcccatccggcttgggtggtgcagggggactagctgggctgacttttccatggatggacagcggcaggcgcttcgcgaaggacagactgactgcagcgctgtccccattctcaggtactaggagaattggccacccctaccaaaatcggacaccgcctaagcgcaagaaaccgaggacctccttttctcgaagccaggtgctggaactagaacgcagatttctaagacagaaatatttggcttccgctgagcgcgctgcactcgccaaagctctgcgcatgacagacgctcaggtaaagacatggtttcaaaaccggagaacgaagtggaggcgtcaaaccgctgaggaaagagaagctgagagacaccgggctggtaggctgctgctccaccttcagcaggacgctttaccgagaccactgcgaccacccctcccgccagatcctctctgcttacacaactccagtctgttcgctctccagaatttgcagccttgggccgaagataacaaagttgcttccgtgagcggcctggcatcagtcgtctag

SEQ ID NO: 189744 - DNA, 2137 bp, Artificial Sequence
  derived and/or modified sequence
ccacccgggacttgggcagcggcgccggcagcccagcgtctatttgcgcttaagagccagcaaggaagctccaggggccccagctggccgtgctcccccgggatgcaagtccctgcgctgacgcccggcagcggctggcacgggcgcggctgctccgggtgcacagggatgctgctgtttcggggaccccggcgccctgccttggccagccccgcgggcccctgaggccactctccggagcgcgccgccgctgggcttctggcgctgcctgaggcatcctccccaaccaccgaacctccggcggttctcctcggcccagaccgatggagccggggatgctgggtccacacaacctcccacaccacgagccaatcagcttcggcatcgatcagatcctgagcggccccgaaaccccagggggcggtctaggcctgggtcgcgggggccagggtcatggggagaatggggcgttctcgggtggataccacggagcctcgggctacggtcccgccggctcacttgccccgctgcccggcagctccggagtgggcccaggcggcgtgatccgcgtccctgcgcaccgcccgctgcctgtgccgccgcccgctgggggggcgcctgcagtgcctgggccctcgggtttgggcggcgccggaggcctagcgggactcaccttcccctggatggacagcggccgccgctttgccaaggaccggctcacggctgcgctctcgcccttctctgggacgcgccgcataggccacccctaccaaaaccggacccctccgaagcggaagaagccgcgcacgtccttctcccgctcacaggtgctggagttggagcggcgcttcctgcgccagaagtacctggcctctgcggagagggcggcgctggccaaggccttgcgcatgaccgacgcacaggtcaaaacgtggttccagaaccgacgcaccaagtggcggcgccagacggcggaggagcgcgaggccgagcggcaccgcgcgggccggctgctcctgcatctgcagcaggacgcgttgccacggccgctgcggccgccgctgcccccggaccctctctgcctgcacaactcgtcgctcttcgcgctgcagaacctgcagccctgggccgaggacaacaaagtggcttcagtgtccgggctcgcctcggtggtgtgagcgacgcccgtccgatcggcgtggagcgccgggcccggagcggtggagcgcgcggctgcctgcgtccatggtctagtggcagccgggcgcgtgaggagcggcaggccttgaggctgtcgtcgagggctcctccaccaccggccggctcccaagccagcgttgcgcagatgcacggccagctcagaggcggcctttcccgccatttttcacttcactgccgttacgccctcgctggaacctgaggcgccgagagggcgggacctgcaggacagtagccaatgaggtgcggggagggggccgggctggccaatgggagctgctttcctgagggactcgaaattctccggcgggtggtcgggagctggggctctgaggggctctagcggcgttgcgcgcggtgccggctgggtctgtaccaaaggtgtgaaggaaagaagacaccgaccacggcgaagcaatagagggggtgctggagcgcgagaggctggctgattgtgaccgaaaccagagggttgtccaccccgggcatctcatccctcaactgtaaaataatcgctaaggattccttcctgactttgagcctcacgttgtcatgtgtgttcagcctgctggccacatcctccggcaacacgcccgggcaggaggcgagtcggatacttacacacccaacgaaagagaaaatctggctccggtgtcacatagggacagagaagggagaggaggaaacagtggacaaagttaatgggcccagtggagttagggtgaagagaatttggaaaataatttggaagtgacaagcttaagaagaatcaaaggtaattccaagactggaaatgtgcagcatcaggaaatcaatggtgctgtggatgatgaaagggaaattgggaagactggagcaaaattaactgtataggcaaaactaaatgttatacctagagagaataaatcctggagaagtg

SEQ ID NO: 189745 - DNA, 855 bp, Artificial Sequence
  derived and/or modified sequence
atggagcccggcatgctgggcccccacaacctgccccaccacgagcccatcagcttcggcatcgaccagatcctgagcggccccgagacccccggcggcggcctgggcctgggcagaggcggccagggccacggcgagaacggcgccttcagcggcggctaccacggcgccagcggctacggccccgccggcagcctggcccccctgcccggcagcagcggcgtgggccccggcggcgtgatcagagtgcccgcccacagacccctgcccgtgcccccccccgccggcggcgcccccgccgtgcccggccccagcggcctgggcggcgccggcggcctggccggcctgaccttcccctggatggacagcggcagaagattcgccaaggacagactgaccgccgccctgagccccttcagcggcaccagaagaatcggccacccctaccagaacagaaccccccccaagagaaagaagcccagaaccagcttcagcagaagccaggtgctggagctggagagaagattcctgagacagaagtacctggccagcgccgagagagccgccctggccaaggccctgagaatgaccgacgcccaggtgaagacctggttccagaacagaagaaccaagtggagaagacagaccgccgaggagagagaggccgagagacacagagccggcagactgctgctgcacctgcagcaggacgccctgcccagacccctgagaccccccctgccccccgaccccctgtgcctgcacaacagcagcctgttcgccctgcagaacctgcagccctgggccgaggacaacaaggtggccagcgtgagcggcctggccagcgtggtgtag

SEQ ID NO: 189746 - protein, 405 aa, Artificial Sequence
  derived and/or modified sequence
MFVQEEKIFAGKVLRLHICASDGAEWLEEATEDTSVEKLKERCLKHCAHGSLEDPKSITHHKLIHAASERVLSDARTILEENIQDQDVLLLIKKRAPSPLPKMADVSAEEKKKQDQKAPDKEAILRATANLPSYNMDRAAVQTNMRDFQTELRKILVSLIEVAQKLLALNPDAVELFKKANAMLDEDEDERVDEAALRQLTEMGFPENRATKALQLNHMSVPQAMEWLIEHAEDPTIDTPLPGQAPPEAEGATAAASEAAAGASATDEEARDELTEIFKKIRRKREFRADARAVISLMEMGFDEKEVIDALRVNNNQQNAACEWLLGDRKPSPEELDKGIDPDSPLFQAILDNPVVQLGLTNPKTLLAFEDMLENPLNSTQWMNDPETGPVMLQISRIFQTLNRT

SEQ ID NO: 189747 - DNA, 1218 bp, Artificial Sequence
  derived and/or modified sequence
atgttcgtgcaggaggagaagatcttcgccggcaaggtgctgagactgcacatctgcgccagcgacggcgccgagtggctggaggaggccaccgaggacaccagcgtggagaagctgaaggagagatgcctgaagcactgcgcccacggcagcctggaggaccccaagagcatcacccaccacaagctgatccacgccgccagcgagagagtgctgagcgacgccagaaccatcctggaggagaacatccaggaccaggacgtgctgctgctgatcaagaagagagcccccagccccctgcccaagatggccgacgtgagcgccgaggagaagaagaagcaggaccagaaggcccccgacaaggaggccatcctgagagccaccgccaacctgcccagctacaacatggacagagccgccgtgcagaccaacatgagagacttccagaccgagctgagaaagatcctggtgagcctgatcgaggtggcccagaagctgctggccctgaaccccgacgccgtggagctgttcaagaaggccaacgccatgctggacgaggacgaggacgagagagtggacgaggccgccctgagacagctgaccgagatgggcttccccgagaacagagccaccaaggccctgcagctgaaccacatgagcgtgccccaggccatggagtggctgatcgagcacgccgaggaccccaccatcgacacccccctgcccggccaggccccccccgaggccgagggcgccaccgccgccgccagcgaggccgccgccggcgccagcgccaccgacgaggaggccagagacgagctgaccgagatcttcaagaagatcagaagaaagagagagttcagagccgacgccagagccgtgatcagcctgatggagatgggcttcgacgagaaggaggtgatcgacgccctgagagtgaacaacaaccagcagaacgccgcctgcgagtggctgctgggcgacagaaagcccagccccgaggagctggacaagggcatcgaccccgacagccccctgttccaggccatcctggacaaccccgtggtgcagctgggcctgaccaaccccaagaccctgctggccttcgaggacatgctggagaaccccctgaacagcacccagtggatgaacgaccccgagaccggccccgtgatgctgcagatcagcagaatcttccagaccctgaacagaacctag

SEQ ID NO: 189748 - DNA, 1218 bp, Artificial Sequence
  derived and/or modified sequence
atgtttgtacaggaggagaagatcttcgcggggaaggtacttcgcctgcatatctgtgcctctgacggcgcagagtggctggaggaggcaacagaggatacaagtgtagagaagcttaaagagcggtgtcttaaacactgcgctcatggttcgctggaagatcccaagtcaataactcaccataaacttatccacgcagcatcggaacgtgtgctgtccgacgctcgtactattctcgaagaaaatatacaggatcaagacgtgctcctgttaatcaagaaacgggccccttctccactgccaaagatggctgacgtgagcgctgaggagaagaaaaagcaggatcagaaagcgccagacaaggaagcaattctcagagctactgccaacctgccgtcatataatatggatagggctgccgtgcagacaaacatgcgggattttcaaacagaattgcgcaaaattcttgtctctctgatcgaggtagcacagaagttgctcgccttgaaccccgacgccgtggaactgttcaaaaaagccaacgcaatgctggacgaggatgaggatgagagagtggacgaggctgctcttcgtcaactgacggaaatgggctttccagagaatcgtgccactaaagcacttcagcttaaccacatgtctgtgccccaggctatggaatggttaatcgaacacgcagaagaccccactatcgacactcctctcccaggtcaggcgcctcctgaagccgagggggccacagctgccgcctcggaagcggccgcaggggcatccgccactgacgaagaggccagagacgagctaacagagatctttaagaagatcagaagaaaacgggaattccgcgctgatgctagggccgtaatctccctgatggaaatggggtttgatgagaaagaggtcatagacgccctgcgggtgaataataaccagcagaatgctgcatgcgaatggttacttggcgaccggaagccctcgcctgaggagctggataaaggcattgatcccgacagcccactgtttcaggcaatactcgacaaccccgtggtccagttgggccttaccaaccctaagaccttgctcgcctttgaggatatgctggagaatccactgaattccacacagtggatgaatgacccggagacagggccagtgatgttacagattagccgtatttttcagacgctgaacaggacttag

SEQ ID NO: 189749 - DNA, 1218 bp, Artificial Sequence
  derived and/or modified sequence
atgtttgtgcaggaggagaagatctttgctgggaaggtgctgcggctgcacatctgtgccagtgatggagctgagtggctggaggaggccacagaggacacctctgtggagaagctgaaggagcgctgcctgaagcactgtgcccacggcagcctggaggaccccaagagcatcacccaccacaagctgattcatgctgccagcgagcgggtgctgagtgatgcccggaccatcctggaggagaacatccaggaccaggatgtgctgctgctgatcaagaagagggcccccagccccctgcccaagatggctgatgtgtctgctgaggagaagaagaagcaggaccagaaggccccagacaaggaggccatcctgcgggccacagccaacctgcccagctacaacatggacagagctgctgtgcagaccaacatgagggacttccagacagagctgaggaagatcctggtgtccctcatcgaggtggcccagaagctgctggccctgaacccagatgctgtggagctgttcaagaaggccaatgccatgctggatgaagatgaagatgagcgggtggatgaagctgccctgcggcagctgacagagatgggcttcccagaaaatagagccaccaaggccctgcagctgaaccacatgtctgtgccccaggccatggagtggctgattgaacatgctgaggaccccaccatcgacacccccctgcccggccaggcccctcctgaggccgagggcgccacagctgctgccagcgaggccgctgctggggccagcgccacagatgaggaggccagagatgagctgacagagatcttcaagaagatccggaggaagcgggagttccgggcagatgcccgggctgtgatcagcctgatggagatgggctttgatgagaaggaggtgattgatgccctgcgggtgaacaacaaccagcagaatgctgcctgtgagtggctgctgggggacaggaagcccagccctgaggagctggacaagggcatcgaccctgacagccccctcttccaggccatcctggacaaccctgtggtgcagctgggcctgaccaaccccaagaccctgctggcctttgaggacatgctggagaaccccctgaacagcacccagtggatgaatgaccctgagaccggccctgtgatgctgcagatcagccgcatcttccagaccctgaacagaacatag

SEQ ID NO: 189750 - DNA, 1218 bp, Artificial Sequence
  derived and/or modified sequence
atgttcgtgcaggaggagaagatcttcgccggcaaggtgctgcggcttcatatttgtgctagcgacggagcagagtggttggaagaagcaacagaagacacatcagttgagaagctgaaggaacgctgtctgaaacactgcgcacacggatcactggaggatcccaaatcaataacacatcacaagctgattcatgcagctagcgaacgcgtcctttctgacgcccgcacaatactggaggagaatatccaggatcaggatgtgttgctgctgatcaagaaacgcgctccgtctccactgccaaagatggctgacgtgagtgcagaggaaaagaaaaagcaagatcagaaagcacccgacaaggaggctattctgcgagcaaccgcaaacttaccttcatataacatggacagagccgcggttcagaccaacatgcgggacttccaaaccgaattacgtaaaattctagtcagcctaatcgaggtggcccagaaacttctggcgcttaaccctgatgctgtggaactcttcaagaaagctaatgctatgctggatgaagacgaagatgagagagtggacgaggccgccctaagacagctgactgagatgggttttcctgagaacagagccacgaaagcgctgcagctgaatcacatgagcgtgccccaggctatggaatggttgattgagcacgccgaagaccctacaatcgataccccactgccaggacaagcacctcccgaagcagaaggagccaccgccgctgcttcagaggctgcggctggcgcgagtgcaaccgatgaagaagctagggatgaactgaccgaaattttcaagaaaattcgccggaagcgggagtttcgggcggatgcaagagctgttatttctctgatggaaatgggcttcgacgaaaaagaggtgatcgacgcccttcgagtaaataataaccagcagaatgctgcctgcgaatggttactcggagatcgaaagccctccccagaagagctcgacaaaggaatcgatccagactctccgctgttccaggcaatactggataacccagtggttcagctcgggttaacaaatcctaaaaccctcctggcatttgaggacatgctggagaaccctctgaattcaactcagtggatgaacgaccccgaaaccggaccagtgatgttacaaatatcacgcatcttccagacgctgaatcgtacgtag

SEQ ID NO: 189751 - DNA, 1218 bp, Artificial Sequence
  derived and/or modified sequence
atgttcgttcaagaggagaagatctttgcgggaaaggtgctgcgcttgcatatctgcgcctcggatggagcggaatggctcgaagaggctacggaagacacgagtgtggaaaagctaaaggagaggtgtctaaagcactgcgcccacggctctctggaagatccgaagtctattacacaccacaagctcattcatgcagcttcagagcgcgtgttgtccgacgctcgaaccatactagaggagaacattcaggatcaggatgtactactactgatcaaaaaacgcgctccatcaccgctcccaaagatggcagacgtgagcgctgaagagaagaaaaaacaagaccagaaagcaccagacaaagaagctattctgcgcgctacggctaacctaccatcttacaacatggacagagcagccgttcaaacaaacatgcgggacttccagacagaactgagaaaaatcctggtctctttgattgaggtagctcaaaagttgcttgccctgaacccggatgctgttgaactattcaaaaaggccaacgccatgttggacgaagatgaggatgagagggttgatgaggccgcactgcggcagttgacagaaatgggatttcccgagaatagagcaaccaaggcccttcagctaaaccacatgagcgtgcctcaagcaatggagtggcttattgagcatgctgaggaccccacaatcgacacccccctccctggacaggctccacccgaggcagagggcgcaacggctgccgcatctgaagccgctgccggagcctcagcgacagatgaggaagccagggatgagctgaccgagatcttcaaaaagatccgaaggaagcgggaatttcgtgccgacgctcgagcggttatttccctgatggagatggggttcgatgaaaaggaggtcatcgacgctctgcgcgtgaacaacaaccagcaaaacgctgcgtgcgaatggcttcttggcgaccgaaaaccatctcctgaggagctggacaaaggaatcgatccagactcacctctatttcaagccatactcgacaacccagtggtgcagctcgggttgaccaatccaaaaactctgctcgcatttgaggatatgctggaaaaccccttgaactccactcagtggatgaacgaccccgagaccggccctgtcatgctgcaaatcagtaggatctttcaaaccctgaatcgaacttag

SEQ ID NO: 189752 - DNA, 1867 bp, Artificial Sequence
  derived and/or modified sequence
ccgcgacggcgcgcccccggcggctgctgcggcggcgggagcgaggcgaccgctgaggccgcggagagtgacggcggcccggccgacgggagccggggcggggcggcggcccagcgaaggagcgcgcgggcggtctggccccgccccctccccgcccgccttcccggtgaccttcaggggcccgggtggcgggcgcaggcccctgcggcggcggcgggatgttcgtgcaggaggagaagatcttcgcgggcaaggtgctgcggctgcacatctgcgcgtccgacggcgccgagtggctggaggaggccaccgaggacacctcggtggagaagctcaaggagcgctgcctcaagcactgtgctcatgggagcttagaagatcccaaaagtataacccatcataaattaatccacgctgcctcagagagggtgctgagtgatgccaggaccatcctggaagagaacatccaggaccaagatgtcctattattgataaaaaagcgtgctccatcaccacttcccaagatggctgatgtctcagcagaagaaaagaaaaaacaagaccagaaagctccagataaagaggccatactgcgggccaccgccaacctgccctcctacaacatggaccgggccgcggtccagaccaacatgagagacttccagacagaactccggaagatactggtgtctctcatcgaggtggcgcagaagctgttagcgctgaacccagatgcagtggaattgtttaagaaggcgaatgcaatgctggacgaggacgaggatgagcgtgtggacgaggctgccctgcggcagctcacggagatgggctttccggagaacagagccaccaaggcccttcagctgaaccacatgtcggtgcctcaggccatggagtggctaattgaacacgcagaagacccgaccatagacacgcctcttcctggccaagctcccccagaggccgagggggccacagcagctgcctccgaggctgccgcgggagccagcgccaccgatgaggaggccagagatgagctgacggaaatcttcaagaagatccggaggaaaagggagtttcgggctgatgctcgggccgtcatttccctgatggagatggggttcgacgagaaagaggtgatagatgccctcagagtgaacaacaaccagcagaatgccgcgtgcgagtggctgctgggggaccggaagccctctccggaggagctggacaagggcatcgaccccgacagtcctctctttcaggccatcctggataacccggtggtgcagctgggcctgaccaacccgaaaacattgctagcatttgaagacatgctggagaacccactgaacagcacccagtggatgaatgatccagaaacggggcctgtcatgctgcagatctctagaatcttccagacactaaatcgcacgtaggtggcgttgttccactcggctatcaggccacagcagccccctggtgcggcccgagaccgggcagagtggacctcacctggaaactcaccttcagcgcctcagccctggactgttagaggtgctgcagctgctcctgctctctgatcttattgcttataaactttggtgacggtagtgtgtaaggccgtatttttagcatctgacaggtgtttacaaaaaagtggttgtcgcactgggaagtggagtgatggcctcgtctccagtgctcctctgggctcttgagttgctgcttgaattgccgtgtagacatttgcttggagagtccacttgttatttgacggaggtaggtttcaacccagagttaatgtcaagcatgctaatttaactagtcactcacagatgacttttctttaataaagtcccttttccta

SEQ ID NO: 189753 - protein, 977 aa, Artificial Sequence
  derived and/or modified sequence
MAQFYYKRNVNAPYRDRIPLRIVRAESELSPSEKAYLNAVEKGDYASVKKSLEEAEIYFKININCIDPLGRTALLIAIENENLELIELLLSFNVYVGDALLHAIRKEVVGAVELLLNHKKPSGEKQVPPILLDKQFSEFTPDITPIILAAHTNNYEIIKLLVQKGVSVPRPHEVRCNCVECVSSSDVDSLRHSRSRLNIYKALASPSLIALSSEDPFLTAFQLSWELQELSKVENEFKSEYEELSRQCKQFAKDLLDQTRSSRELEIILNYRDDNSLIEEQSGNDLARLKLAIKYRQKEFVAQPNCQQLLASRWYDEFPGWRRRHWAVKMVTCFIIGLLFPVFSVCYLIAPKSPLGLFIRKPFIKFICHTASYLTFLFLLLLASQHIDRSDLNRQGPPPTIVEWMILPWVLGFIWGEIKQMWDGGLQDYIHDWWNLMDFVMNSLYLATISLKIVAFVKYSALNPRESWDMWHPTLVAEALFAIANIFSSLRLISLFTANSHLGPLQISLGRMLLDILKFLFIYCLVLLAFANGLNQLYFYYEETKGLTCKGIRCEKQNNAFSTLFETLQSLFWSIFGLINLYVTNVKAQHEFTEFVGATMFGTYNVISLVVLLNMLIAMMNNSYQLIADHADIEWKFARTKLWMSYFEEGGTLPTPFNVIPSPKSLWYLIKWIWTHLCKKKMRRKPESFGTIGRRAADNLRRHHQYQEVMRNLVKRYVAAMIRDAKTEEGLTEENFKELKQDISSFRFEVLGLLRGSKLSTIQSANASKESSNSADSDEKSDSEGNSKDKKKNFSLFDLTTLIHPRSAAIASERHNISNGSALVVQEPPREKQRKVNFVTDIKNFGLFHRRSKQNAAEQNANQIFSVSEEVARQQAAGPLERNIQLESRGLASRGDLSIPGLSEQCVLVDHRERNTDTLGLQVGKRVCPFKSEKVVVEDTVPIIPKEKHAKEEDSSIDYDLNLPDTVTHEDYVTTRL

SEQ ID NO: 189754 - DNA, 2934 bp, Artificial Sequence
  derived and/or modified sequence
atggcccagttctactacaagagaaacgtgaacgccccctacagagacagaatccccctgagaatcgtgagagccgagagcgagctgagccccagcgagaaggcctacctgaacgccgtggagaagggcgactacgccagcgtgaagaagagcctggaggaggccgagatctacttcaagatcaacatcaactgcatcgaccccctgggcagaaccgccctgctgatcgccatcgagaacgagaacctggagctgatcgagctgctgctgagcttcaacgtgtacgtgggcgacgccctgctgcacgccatcagaaaggaggtggtgggcgccgtggagctgctgctgaaccacaagaagcccagcggcgagaagcaggtgccccccatcctgctggacaagcagttcagcgagttcacccccgacatcacccccatcatcctggccgcccacaccaacaactacgagatcatcaagctgctggtgcagaagggcgtgagcgtgcccagaccccacgaggtgagatgcaactgcgtggagtgcgtgagcagcagcgacgtggacagcctgagacacagcagaagcagactgaacatctacaaggccctggccagccccagcctgatcgccctgagcagcgaggaccccttcctgaccgccttccagctgagctgggagctgcaggagctgagcaaggtggagaacgagttcaagagcgagtacgaggagctgagcagacagtgcaagcagttcgccaaggacctgctggaccagaccagaagcagcagagagctggagatcatcctgaactacagagacgacaacagcctgatcgaggagcagagcggcaacgacctggccagactgaagctggccatcaagtacagacagaaggagttcgtggcccagcccaactgccagcagctgctggccagcagatggtacgacgagttccccggctggagaagaagacactgggccgtgaagatggtgacctgcttcatcatcggcctgctgttccccgtgttcagcgtgtgctacctgatcgcccccaagagccccctgggcctgttcatcagaaagcccttcatcaagttcatctgccacaccgccagctacctgaccttcctgttcctgctgctgctggccagccagcacatcgacagaagcgacctgaacagacagggccccccccccaccatcgtggagtggatgatcctgccctgggtgctgggcttcatctggggcgagatcaagcagatgtgggacggcggcctgcaggactacatccacgactggtggaacctgatggacttcgtgatgaacagcctgtacctggccaccatcagcctgaagatcgtggccttcgtgaagtacagcgccctgaaccccagagagagctgggacatgtggcaccccaccctggtggccgaggccctgttcgccatcgccaacatcttcagcagcctgagactgatcagcctgttcaccgccaacagccacctgggccccctgcagatcagcctgggcagaatgctgctggacatcctgaagttcctgttcatctactgcctggtgctgctggccttcgccaacggcctgaaccagctgtacttctactacgaggagaccaagggcctgacctgcaagggcatcagatgcgagaagcagaacaacgccttcagcaccctgttcgagaccctgcagagcctgttctggagcatcttcggcctgatcaacctgtacgtgaccaacgtgaaggcccagcacgagttcaccgagttcgtgggcgccaccatgttcggcacctacaacgtgatcagcctggtggtgctgctgaacatgctgatcgccatgatgaacaacagctaccagctgatcgccgaccacgccgacatcgagtggaagttcgccagaaccaagctgtggatgagctacttcgaggagggcggcaccctgcccacccccttcaacgtgatccccagccccaagagcctgtggtacctgatcaagtggatctggacccacctgtgcaagaagaagatgagaagaaagcccgagagcttcggcaccatcggcagaagagccgccgacaacctgagaagacaccaccagtaccaggaggtgatgagaaacctggtgaagagatacgtggccgccatgatcagagacgccaagaccgaggagggcctgaccgaggagaacttcaaggagctgaagcaggacatcagcagcttcagattcgaggtgctgggcctgctgagaggcagcaagctgagcaccatccagagcgccaacgccagcaaggagagcagcaacagcgccgacagcgacgagaagagcgacagcgagggcaacagcaaggacaagaagaagaacttcagcctgttcgacctgaccaccctgatccaccccagaagcgccgccatcgccagcgagagacacaacatcagcaacggcagcgccctggtggtgcaggagccccccagagagaagcagagaaaggtgaacttcgtgaccgacatcaagaacttcggcctgttccacagaagaagcaagcagaacgccgccgagcagaacgccaaccagatcttcagcgtgagcgaggaggtggccagacagcaggccgccggccccctggagagaaacatccagctggagagcagaggcctggccagcagaggcgacctgagcatccccggcctgagcgagcagtgcgtgctggtggaccacagagagagaaacaccgacaccctgggcctgcaggtgggcaagagagtgtgccccttcaagagcgagaaggtggtggtggaggacaccgtgcccatcatccccaaggagaagcacgccaaggaggaggacagcagcatcgactacgacctgaacctgcccgacaccgtgacccacgaggactacgtgaccaccagactgtag

SEQ ID NO: 189755 - DNA, 2934 bp, Artificial Sequence
  derived and/or modified sequence
atggcccagttttactacaaacgaaacgtgaatgcaccgtaccgcgacagaatcccactgcggatagtgcgagccgagagtgagctctctcccagcgagaaggcatacctcaacgcggtggaaaaaggggattacgcctcagtaaagaagtcattagaggaggcagaaatttatttcaagattaacattaattgtatcgatccacttgggagaactgctctcctgatcgccattgagaacgagaacctggaactgattgaattactgctcagcttcaacgtgtatgtcggcgacgcactgctgcacgccattaggaaagaggttgttggagcggtggaactgcttctaaaccacaaaaaaccctcaggcgaaaagcaagtgccacctatcttgctggacaaacagttttctgagtttacccccgacatcactcccatcatccttgctgctcacacgaacaactacgaaataattaagttgctggtacagaaaggagtcagcgtgcctaggccccacgaggtgcgatgcaattgtgtggaatgcgtgagtagctcggatgtcgattcactccgccattcacgatccagactcaatatctacaaagccctagcatcaccatccctgatagcccttagctctgaagatcccttcctgaccgccttccaactctcatgggaactgcaggagctgagcaaagtcgagaacgagtttaagagcgaatacgaagaactctcaagacagtgtaaacagtttgccaaggaccttcttgaccagaccagatccagcagggagcttgagattatattgaattaccgggatgacaacagcctgattgaggaacagtctggtaatgatctggcccgtcttaaactagccatcaagtataggcagaaagagttcgttgcacagccgaattgccagcagctcctcgctagtcggtggtacgacgaatttccgggatggcggcgtcgccactgggctgttaagatggtaacctgcttcatcatagggctgctgttccctgtgtttagtgtatgttacctgattgctcctaagtccccccttggtctttttatcaggaagccttttattaaattcatttgtcacaccgcctcttatctaacgtttctctttttgcttctccttgcctcccagcacatagataggtctgaccttaacagacaggggccccctcccaccatcgtcgagtggatgattctgccctgggtgcttggatttatttggggggagatcaagcaaatgtgggacggagggttgcaagattatatccatgattggtggaacctcatggacttcgtgatgaactctctctacctcgctacaatatctcttaagatagtggcttttgttaagtattccgctctgaacccgcgagaatcttgggacatgtggcaccctacgcttgtggctgaagcccttttcgccatcgcaaacatcttctcctccctgcggctgatttctcttttcacagccaactcccacctgggacccctgcagatatctttagggcgaatgctgctggacatcttaaaattcctttttatatactgcctggttctgctcgcatttgctaatggactgaatcagctttacttttactatgaagagaccaaagggctgacttgtaagggaatccggtgtgaaaaacaaaacaatgctttttcaactctcttcgaaactctgcagtcactgttttggagcatttttggcttgatcaacctgtatgtaactaacgtcaaagcccagcacgagtttaccgagtttgtaggtgcaacaatgttcgggacctataacgtgatatctttggtggttctgttgaatatgttaattgccatgatgaacaattcctaccagctgatagccgaccacgccgacatcgaatggaaatttgctagaactaagctatggatgtcctacttcgaggaaggcggaacccttcctacccccttcaatgtgataccctcacccaagtctttgtggtatcttattaagtggatctggacccatctgtgtaagaagaaaatgcggaggaaacccgagtcatttgggactatagggaggagagctgcagacaatcttaggaggcaccaccagtatcaggaggtgatgaggaacctggtgaagagatatgtggctgcaatgatacgcgacgcgaaaacagaggagggcctcacagaggagaattttaaggagctgaaacaagacatatccagcttccggttcgaggtgctgggactcctccggggaagtaagctgagcacaattcagagcgctaatgcttctaaggaaagttcaaactccgcggactccgatgagaaatctgatagcgaggggaacagtaaggacaagaaaaagaattttagcctatttgatctcaccacactcattcaccctcgctctgctgcaatcgccagtgagaggcacaacatcagtaacgggtccgcacttgtcgtgcaggagcctccaagggaaaaacagcgaaaggtaaactttgtcaccgatatcaagaactttggactatttcatagacgatcaaaacaaaatgccgccgaacaaaatgccaaccaaatctttagcgtgtctgaggaagttgctaggcagcaggccgccggtcctctggagagaaacattcagctggaatccagagggctcgccagcaggggagacctgagcatacccggtctttcggaacagtgtgtccttgtggatcatcgggagcgcaacaccgacacactgggcttacaggtggggaaaagggtttgtccgtttaagagcgagaaagttgtcgtggaagacactgtcccaatcattcccaaagagaaacacgcaaaggaggaggattcttcgatcgattacgatctgaatttgcccgatactgttacccacgaggattacgtcaccacacgattgtag

SEQ ID NO: 189756 - DNA, 2934 bp, Artificial Sequence
  derived and/or modified sequence
atggcccagttctactacaagagaaatgtgaatgccccctacagagaccgcatccccctgcgcatcgtgcgggcagagagcgagctgagccccagcgagaaggcctacctgaatgctgtggagaagggggactatgcctctgtgaagaagagcctggaggaggccgagatctacttcaagatcaacatcaactgcatcgaccccctgggccgcacagccctgctgattgccattgaaaatgaaaacctggagctgattgagctgctgctgtccttcaacgtgtatgtgggagatgccctgctgcacgccatcaggaaggaggtggtgggcgctgtggagctgctgctgaaccacaagaagcccagcggggagaagcaggtgccccccatcctgctggacaagcagttcagcgagttcaccccagacatcacccccatcatcctggccgcccacaccaacaactatgagatcatcaagctgctggtgcagaagggcgtgtctgtgccccggccccatgaggtgcgctgcaactgtgtggagtgtgtgagcagcagtgatgtggacagcctgcggcacagccgcagccggctgaacatctacaaggccctggccagccccagcctgattgccctgagcagcgaggaccccttcctgacagccttccagctgtcctgggagctgcaggagctgagcaaggtggagaatgagttcaagtcagaatatgaggagctgagccggcagtgcaagcagtttgccaaggacctgctggaccagaccaggagcagccgggagctggagatcatcctgaactacagagatgacaacagcctcatcgaggagcagagcggaaatgacctggcccggctgaagctggccatcaagtaccggcagaaggagtttgtggcccagcccaactgccagcagctgctggccagccgctggtatgatgagttccctggctggaggagaagacactgggccgtgaagatggtgacctgcttcatcatcggcctgctcttccctgtgttttctgtgtgctacctgattgcccccaagagccccctgggcctcttcatcaggaagcccttcatcaagttcatctgccacacagccagctacctgaccttcctgttcctgctgctgctggccagccagcacatcgacagaagtgacctgaaccggcagggccccccacccaccatcgtggagtggatgatcctgccctgggtgctgggcttcatctggggcgagatcaagcagatgtgggatggcggcctgcaggactacatccatgactggtggaacctgatggactttgtgatgaacagcctgtacctggccaccatcagcctgaagatcgtggcctttgtgaagtacagcgccctgaacccccgggagagctgggacatgtggcaccccaccctggtggccgaggccctgtttgccatcgccaacatcttcagcagcctgcggctcatcagcctcttcaccgccaacagccacctgggccccctgcagatcagcctgggccgcatgctgctggacatcctgaagttcctgttcatctactgcctggtgctgctggcctttgccaacggcctgaaccagctgtacttctactatgaggagaccaagggcctgacctgcaagggcatccgctgtgagaagcagaacaatgccttcagcaccctgtttgagaccctgcagagcctcttctggagcatcttcggcctcatcaacctgtatgtgaccaacgtgaaggcccagcacgagttcacagaatttgtgggcgccaccatgtttggcacctacaacgtcatcagcctggtggtgctgctgaacatgctgattgccatgatgaacaacagctaccagctgattgctgaccatgctgacatcgagtggaagtttgcccggaccaagctgtggatgagctactttgaggagggcggcaccctgcccacccccttcaacgtcatccccagccccaagagcctgtggtacctgatcaagtggatctggacccacctgtgcaagaagaagatgaggaggaagccagagagctttggcaccatcggccggcgggctgctgacaacctgcggcggcaccaccagtaccaggaggtgatgaggaacctggtgaagagatatgtggccgccatgatcagagatgccaagacagaggagggcctgacagaggagaacttcaaggagctgaagcaggacatcagcagcttccgctttgaggtgctgggcctgctgcggggcagcaagctgagcaccatccagagcgccaatgccagcaaggagagcagcaacagcgctgacagtgatgagaagagtgacagcgagggcaacagcaaggacaagaagaagaacttcagcctgtttgacctgaccaccctcatccaccccaggtctgctgccatcgccagcgagcggcacaacatcagcaatggaagtgccctggtggtgcaggagcccccccgggagaagcagaggaaggtgaactttgtgacagacatcaagaactttggcctcttccaccggcgcagcaagcagaatgctgctgagcagaatgccaaccagatcttctctgtgtctgaggaggtggcccggcagcaggccgccggccccctggagaggaacatccagctggagagccggggcctggccagcagaggagacctgagcatccctggcctgtctgagcagtgtgtgctggtggaccaccgggagaggaacacagacaccctgggcctgcaggtgggcaagagggtgtgccccttcaagtctgagaaggtggtggtggaggacacagtgcccatcatccccaaggagaagcacgccaaggaggaggacagcagcattgattatgacctgaacctgcctgacacagtgacccatgaggactatgtgaccacccggctgtag

SEQ ID NO: 189757 - DNA, 2934 bp, Artificial Sequence
  derived and/or modified sequence
atggcccagttctactacaagcggaacgtgaacgccccctaccgggatagaattcccctccggatcgtcagggccgagtcggagcttagcccatcagagaaagcctatcttaatgctgtggagaaaggcgactatgcaagtgtgaagaagtctttggaggaggcagaaatatactttaagatcaatattaactgcattgatccattgggcaggactgcacttctaatagcaattgagaacgaaaacttggaactgattgagctgctactgagcttcaatgtgtatgttggggatgctctgctacacgcaatcaggaaggaggtcgtcggcgcagtcgagcttcttctcaatcacaagaagcctagcggggagaagcaggtgccacctattctcttggacaagcagttctccgagttcacccctgacatcacacccattatattggcggctcacaccaacaactacgaaattatcaagctcctggtgcaaaaaggagttagtgtacccagaccacacgaggtgcgctgcaattgcgttgaatgcgtctcaagcagcgatgttgattcactgagacactctcgcagcagactgaacatctacaaagcgctggcttcacccagcctcatagctctgtccagtgaagatccattccttaccgcctttcagctttcgtgggagcttcaggagcttagtaaggtcgagaacgaatttaaatccgagtatgaggagctgtcccggcagtgtaaacagttcgctaaggacctactggaccagaccaggtcatcgagagagctggagattatactgaattacagagatgataatagccttatcgaggaacaatcgggaaacgatctggcccgtctgaaactggcaattaagtatagacaaaaggaattcgtcgcccaaccaaactgccagcagctcctggctagtcgctggtacgatgagttcccaggctggaggcgccgccattgggccgtgaaaatggtcacttgttttatcattggactgttgtttcccgtcttctctgtatgttatctcattgccccgaaaagcccccttgggctctttatccgtaaaccgttcatcaaattcatttgccacacagcttcttacctgacatttctgtttctcctcctgttggcgtcgcagcacattgacagaagcgatcttaaccgtcagggacctcctcctacgattgtggaatggatgattctgccttgggttctgggatttatttggggagagatcaagcagatgtgggatgggggtctgcaggactatatccacgactggtggaaccttatggatttcgtgatgaatagtttgtacttggctacaatttcattgaaaatagttgcattcgtgaaatattcagccttgaaccctcgggagtcctgggatatgtggcaccctacgttggtggccgaggccctgttcgctatcgccaacatcttcagttctctccggcttatttcactcttcacagcgaattctcacttaggcccactccaaatatcactgggccggatgctgctggacatcctaaagtttctcttcatttactgcctggtgctgttagcatttgcaaacggactcaaccagctgtacttttattatgaagaaaccaagggtctgacctgtaagggcatccgatgcgaaaagcagaacaatgctttctctacactgtttgagactcttcagagcttgttctggtcaatttttggactgatcaacctgtacgttaccaacgtgaaagcgcagcacgagttcaccgaatttgtgggggcaacgatgttcggcacctacaacgttatctctctcgtcgttcttctcaacatgctcattgccatgatgaataatagctatcagttgatagccgatcatgctgatatcgaatggaaattcgcacgcactaagttgtggatgtcatatttcgaggagggcggtactctgcctactccattcaatgtgattccgagcccaaagtccctatggtatcttatcaaatggatttggacacacctttgtaagaagaaaatgaggcggaagcctgagagttttggtaccattggccggagagcggcagataacctgcggagacatcaccaatatcaggaggtgatgcgcaatctcgtcaaaagatatgtcgccgcgatgatcagagacgcaaaaacggaggagggtctaacagaggagaattttaaggagctaaagcaggacattagctctttccgctttgaagtcttagggctccttcgaggaagcaagttgtccaccatacaatcggcaaatgcaagcaaagagtcaagtaactccgctgactcagacgagaaaagcgattcagaaggcaattcaaaagacaagaagaaaaatttcagcctgttcgacctcactactctgattcatccacggtctgctgcaattgccagcgagcggcacaacatctccaacggaagtgcattggtggttcaggagccgccgagggagaaacagcgcaaggtgaactttgtgactgacatcaaaaattttggcctttttcaccggcgctcaaaacagaacgctgcggagcagaacgctaaccaaattttttcggtctccgaggaggtagcaaggcagcaggctgccggccctctggaacgaaacatccagttagaatctcggggcctggccagtagaggtgacctgtcaattccaggccttagtgagcaatgcgtcctggtggatcacagggagcgcaataccgacacacttgggctgcaggtaggtaaacgcgtctgcccctttaagagcgaaaaggtggttgttgaggacactgtgcccatcatccccaaggagaaacacgcaaaggaggaagactccagcattgactacgacctgaatttgccagatacagtgacccacgaggactacgttactaccaggctgtag

SEQ ID NO: 189758 - DNA, 2934 bp, Artificial Sequence
  derived and/or modified sequence
atggctcaattctactataagcgcaacgtaaacgccccataccgagacaggataccacttcgcatcgtgcgcgcagagagcgaactgagccctagtgagaaggcctacctgaacgccgtagaaaagggtgactacgcctccgtaaagaaatccctggaggaggcggagatctacttcaagatcaatatcaactgcattgatccattgggtcgaactgcattgttaatcgccatcgaaaacgaaaatttagagctgattgaactgctgctgtcgttcaatgtgtacgtcggagatgccctgttacacgctattcggaaagaagtggtcggcgcagtggaattactgttaaatcacaaaaaaccgtccggtgagaaacaggtgcccccaatactgctggacaagcagttttcagagttcactccagacatcacccctattatcctggccgctcacaccaacaattatgaaattattaagctattagtacagaagggtgtcagcgtgccccgtccacacgaggtgcgctgtaactgtgtggaatgcgttagttcatctgatgtagacagcctacggcactcgaggagcaggctcaacatctataaagctctggcatccccgtctttgattgctctgtcttcagaagaccctttcctgacagcgttccaactgagttgggagctccaggaactctccaaagtggaaaatgagttcaagtctgagtatgaggagctgtctcgccaatgtaagcagtttgccaaggacctgttggaccaaaccaggagcagccgagaattggaaatcatcttaaactacagggacgacaatagccttatcgaggaacagtccggcaacgatctggcacgtctgaaactcgctatcaaataccgccagaaagagtttgtggcacaaccgaattgccagcagctcctcgcctctcgctggtatgacgagtttcccggttggcgcaggcgccactgggcggtgaaaatggtaacctgtttcatcatcgggctattgttccctgtgttctctgtgtgttacctgatcgcacccaaatctcccctagggcttttcatccggaagcccttcattaaattcatatgccatacggcatcctatctgacatttttgtttctcctgcttcttgcctcgcagcatatcgaccgaagcgaccttaataggcagggtcccccaccaacaattgttgagtggatgattctgccatgggtgctgggattcatttggggggagatcaaacaaatgtgggatggtggcctgcaggactacattcatgactggtggaacctgatggactttgtcatgaattctctctacttagcaacgatctcattgaaaatcgtggcttttgtcaaatatagtgcactcaatccacgggagtcatgggacatgtggcacccaacactggtcgccgaagccctgtttgccattgccaacatcttttcctccctgcgactcatttccctttttaccgcaaactcacacctcggcccactccagatttcattagggagaatgctgcttgacatcctgaagtttctgttcatatattgcctggtactgttggctttcgctaatgggctgaaccaactgtatttctactatgaagaaactaagggcttgacctgcaaaggaatcagatgcgagaaacagaataacgctttctctactttatttgaaaccctgcagtctttgttttggtcaattttcggactaattaacctgtacgtgaccaatgtgaaggcccaacatgagttcacggagttcgtgggagctacaatgtttggcacttataacgtaatctctctggttgtgcttctgaatatgttgattgccatgatgaacaattcatatcagctgatcgccgatcatgcagatatagagtggaagttcgcacggacgaaactttggatgagttactttgaggaaggcggaacactacccactcctttcaatgtcattcccagcccgaagagcctatggtatctaataaaatggatttggacacacttatgcaaaaagaagatgcgtcgcaaacctgaatcattcggtacgataggacgccgagccgcagacaatctgcgacgccaccaccagtaccaagaggtcatgagaaatttagttaaacgatacgtggctgctatgattcgggacgcaaagaccgaggagggactgactgaagagaatttcaaggaactgaaacaggatatatcttccttccgatttgaggttctcggacttctgcgaggctctaaattatcaacaatccagtctgccaacgccagcaaggagtcctctaattcggcggactctgatgagaagagtgattcggaaggcaacagcaaggataaaaagaagaacttttcgctgtttgatctcacgacactgattcatccacgctccgccgctattgcatccgagcgtcataacatatcaaatggcagcgccctggttgtccaggaaccgccacgagaaaaacaacgcaaggtgaatttcgtgaccgatatcaaaaatttcggactctttcacagacggagcaaacagaacgccgcagagcaaaatgctaaccagatttttagcgtgtctgaagaagtcgccagacagcaggcagccggacctttggaacgaaatatccagttagagagtcggggtctggcttctcgcggagatctgtccattcccggactttccgagcagtgcgtcctggtcgatcatcgggagaggaacacagataccctcggattgcaggttggaaagagggtgtgcccattcaaatccgaaaaggtcgttgtagaggacaccgtgccaatcattccaaaggaaaagcatgcgaaggaggaagactccagtattgattatgacttgaaccttcccgacacggtcacccacgaggattacgtgactaccagactttag

SEQ ID NO: 189759 - DNA, 4059 bp, Artificial Sequence
  derived and/or modified sequence
agtcgcccagagaagcgggagtgggagaagctttgagagttgcaggggactacttttttccggtcgggcggcgggcctcatgggtgcttgtttaccgggctgggagcagggcattcaaaagctgggtgtcggagcgcactgaagtccaacacgcctgcagagaccgccctaagcctggaggtgtgtctggcttgcatccagaaccacagggtggattctcgccaccgacttggctggatgacggctggctggtggtgagctcccctgcccactggctgacctcaagcagttggccccggtaggtggaggctattcgagggggacaagctggggacgcagcgtcagctcctgccagcgcgcgggtctcctccacctccaagcagtgtggtgcgtgggacgcgcatcttcccggactatccctttccagcgcggtctgtgcggaccccgagcccggcagccaccagggacggagggcggggtgcctttctctgggctcatccgctgtcagccgtgggaactcttaactttatccagagggatctgtgcaggcgggggtgggagaggttctcctcccctggcggttacctccccctcccgggccgcccctcccccgcctcccatggcttcgctttcagagcatcctcactccgcccagttcggtgccagctgcgtgggctccagcttcgatcgttttccttggaatgctccaaaactcagcagcgactaagggaattccattggaatttgccgggcgtgctctcaccccgcacggcacccgcgccgtcagtcctcggatcccatcacttcagcccgaagattgcaactttgcagagacgaagaaatagcatggcatgaaacatggctcagttctattacaaaagaaatgttaatgctccctatagagaccgcatccctctaaggatagtaagagcagaatcagaactctcgccatcagaaaaagcctacttgaatgctgtggaaaagggagattatgccagtgtcaagaaatccctagaggaagctgaaatttattttaaaatcaatattaattgcattgatcctctcggaagaactgctctcctcattgcaattgaaaatgagaacttggagctcatcgaactactcttaagctttaatgtctatgttggagatgctctattacatgctatcagaaaagaagtcgtcggagctgttgagctgttattgaaccacaaaaaacctagtggagaaaaacaggtgcctcctatactccttgataagcagttctctgaattcactccagacattacaccaatcattttggcagcccatacaaataattatgagataataaaactcttggttcagaaaggagtctcagtgcctcgaccccacgaggtccgctgtaactgtgtggaatgcgtgtccagttcagatgtggacagcctccgtcactcacgctccagactcaacatctacaaggccttggccagtccctctctcattgcactgtcaagcgaagatccttttctcacagcctttcagttaagttgggaacttcaggaactgagcaaggtggaaaatgaattcaagtcggagtatgaagagctgtcacggcagtgcaaacaatttgctaaggacctactggatcagacgagaagttccagagaactggaaatcattcttaattaccgagatgacaatagtctcatagaagaacaaagtggaaatgatcttgcaagactaaaattggccattaagtaccgtcaaaaagagtttgttgcccagcccaattgtcaacagctgctggcatctcgctggtacgatgagtttccaggctggaggagaagacactgggcagtgaagatggtgacatgtttcataataggacttctttttcctgtcttctctgtgtgctacctgatagctcccaaaagcccacttggactgttcatcaggaagccatttatcaagtttatctgccacacagcctcctatttgacttttttgttcctgctgctgcttgcctctcagcacatcgacaggtcagacttgaacaggcaaggtccaccaccaaccatcgtcgagtggatgatattaccgtgggtcctgggcttcatatggggagaaattaaacagatgtgggatggcggacttcaggactacatccatgattggtggaatctaatggactttgtaatgaactccttatatttagcaacaatctccttgaaaattgttgcatttgtaaagtacagtgcccttaatccacgagaatcatgggacatgtggcatcccactctggtggcagaggctttatttgctattgcaaacatcttcagttctctgcgtctgatctcactgtttactgcaaattctcacctgggacctctgcaaatatctctgggaagaatgctcctggacattttgaagtttctattcatatactgccttgtgttgctagcatttgcaaatggcctaaatcaattgtacttctattatgaagaaacgaaagggttaacctgcaaaggcataagatgtgaaaagcagaataatgcattttcaacgttatttgagacactgcagtccctgttttggtcaatatttgggctcatcaatttatatgtgaccaatgtcaaagcacagcatgaatttactgagtttgttggtgccaccatgtttgggacatacaatgtcatctctctggttgttctactcaacatgttaatagctatgatgaataattcttaccaactgattgctgaccatgcagatatagaatggaaatttgcacgaacaaagctttggatgagttattttgaagaaggaggtactctgcctactcccttcaatgtcatcccgagccccaagtctctctggtacctgatcaaatggatctggacacacttgtgcaagaaaaagatgagaagaaagccagaaagttttggaacaatagggaggcgagctgctgataacttgagaagacatcaccaataccaagaagttatgaggaacctggtgaagcgatacgttgctgcaatgattagagatgctaaaactgaagaaggcctgaccgaagagaactttaaggaactaaagcaagacatttctagtttccgctttgaagtcctgggattactaagaggaagcaaactttccacaatacaatctgcgaatgcctcgaaggagtcttcaaattcggcagactcagatgaaaagagtgatagcgaaggtaatagcaaggacaagaaaaagaatttcagcctttttgatttaaccaccctgattcatccgagatcagcagcaattgcctctgaaagacataacataagcaatggctctgccctggtggttcaggagccgcccagggagaagcagagaaaagtgaattttgtgaccgatatcaaaaactttgggttatttcatagacgatcaaaacaaaatgctgctgagcaaaatgcaaaccaaatcttctctgtttcagaagaagttgctcgtcaacaggctgcaggaccacttgagagaaatattcaactggaatctcgaggattagcttcacggggtgacctgagcattcccggtctcagtgaacaatgtgtgttagtagaccatagagaaaggaatacggacacactggggttacaggtaggaaagagagtgtgtccattcaagtcagagaaggtggtggtggaggacacggttcctataataccaaaggagaaacatgcaaaagaagaggactctagtatagactatgatctaaacctcccagacacagtcacccacgaagattacgtgaccacaagattgtgatacttgaaggaggaagcgtttaccatacacatacgtattttccgtagtgctctgggtgggggaaaatgtttaaattgtattagcaaatgctaacttacactttatagcgtttatcagctgtggcatattacctgtaacatgtttaaataaggcaaaggcaatcaaaaacctttttgttttgtagcctgcttttgctttcacaatttgtcttacaattgtttttgttaataaataaatgcaccttgtattcttgtactgttgcaataa

SEQ ID NO: 189760 - protein, 530 aa, Artificial Sequence
  derived and/or modified sequence
MGSNSGQAGRHIYKSLADDGPFDSVEPPKRPTSRLIMHSMAMFGREFCYAVEAAYVTPVLLSVGLPSSLYSIVWFLSPILGFLLQPVVGSASDHCRSRWGRRRPYILTLGVMMLVGMALYLNGATVVAALIANPRRKLVWAISVTMIGVVLFDFAADFIDGPIKAYLFDVCSHQDKEKGLHYHALFTGFGGALGYLLGAIDWAHLELGRLLGTEFQVMFFFSALVLTLCFTVHLCSISEAPLTEVAKGIPPQQTPQDPPLSSDGMYEYGSIEKVKNGYVNPELAMQGAKNKNHAEQTRRAMTLKSLLRALVNMPPHYRYLCISHLIGWTAFLSNMLFFTDFMGQIVYRGDPYSAHNSTEFLIYERGVEVGCWGLCINSVFSSLYSYFQKVLVSYIGLKGLYFTGYLLFGLGTGFIGLFPNVYSTLVLCSLFGVMSSTLYTVPFNLITEYHREEEKERQQAPGGDPDNSVRGKGMDCATLTCMVQLAQILVGGGLGFLVNTAGTVVVVVITASAVALIGCCFVALFVRYVD

SEQ ID NO: 189761 - protein, 471 aa, Artificial Sequence
  derived and/or modified sequence
MGSNSGQAGRHIYKSLADDGPFDSVEPPKRPTSRLIMHSMAMFGREFCYAVEAAYVTPVLLSVGLPSSLYSIVWFLSPILGFLLQPVVGSASDHCRSRWGRRRPYILTLGVMMLVGMALYLNGATVVAGFGGALGYLLGAIDWAHLELGRLLGTEFQVMFFFSALVLTLCFTVHLCSISEAPLTEVAKGIPPQQTPQDPPLSSDGMYEYGSIEKVKNGYVNPELAMQGAKNKNHAEQTRRAMTLKSLLRALVNMPPHYRYLCISHLIGWTAFLSNMLFFTDFMGQIVYRGDPYSAHNSTEFLIYERGVEVGCWGLCINSVFSSLYSYFQKVLVSYIGLKGLYFTGYLLFGLGTGFIGLFPNVYSTLVLCSLFGVMSSTLYTVPFNLITEYHREEEKERQQAPGGDPDNSVRGKGMDCATLTCMVQLAQILVGGGLGFLVNTAGTVVVVVITASAVALIGCCFVALFVRYVD

SEQ ID NO: 189762 - protein, 298 aa, Artificial Sequence
  derived and/or modified sequence
MGSNSGQAGRHIYKSLADDGPFDSVEPPKRPTSRLIMHSMAMFGREFCYAVEAAYVTPVLLSVGLPSSLYSIVWFLSPILGFLLQPVVGSASDHCRSRWGRRRPYILTLGVMMLVGMALYLNGATVVAALIANPRRKLVWAISVTMIGVVLFDFAADFIDGPIKAYLFDVCSHQDKEKGLHYHALFTGTRRAMTLKSLLRALVNMPPHYRYLCISHLIGWTAFLSNMLFFTDFMGQIVYRGDPYSAHNSTEFLIYERGVEVGCWGLCINSVFSSLYSCKSFSLLRMSSKSFWSSTTWI

SEQ ID NO: 189763 - DNA, 1593 bp, Artificial Sequence
  derived and/or modified sequence
atgggcagcaacagcggccaggccggcagacacatctacaagagcctggccgacgacggccccttcgacagcgtggagccccccaagagacccaccagcagactgatcatgcacagcatggccatgttcggcagagagttctgctacgccgtggaggccgcctacgtgacccccgtgctgctgagcgtgggcctgcccagcagcctgtacagcatcgtgtggttcctgagccccatcctgggcttcctgctgcagcccgtggtgggcagcgccagcgaccactgcagaagcagatggggcagaagaagaccctacatcctgaccctgggcgtgatgatgctggtgggcatggccctgtacctgaacggcgccaccgtggtggccgccctgatcgccaaccccagaagaaagctggtgtgggccatcagcgtgaccatgatcggcgtggtgctgttcgacttcgccgccgacttcatcgacggccccatcaaggcctacctgttcgacgtgtgcagccaccaggacaaggagaagggcctgcactaccacgccctgttcaccggcttcggcggcgccctgggctacctgctgggcgccatcgactgggcccacctggagctgggcagactgctgggcaccgagttccaggtgatgttcttcttcagcgccctggtgctgaccctgtgcttcaccgtgcacctgtgcagcatcagcgaggcccccctgaccgaggtggccaagggcatccccccccagcagaccccccaggacccccccctgagcagcgacggcatgtacgagtacggcagcatcgagaaggtgaagaacggctacgtgaaccccgagctggccatgcagggcgccaagaacaagaaccacgccgagcagaccagaagagccatgaccctgaagagcctgctgagagccctggtgaacatgcccccccactacagatacctgtgcatcagccacctgatcggctggaccgccttcctgagcaacatgctgttcttcaccgacttcatgggccagatcgtgtacagaggcgacccctacagcgcccacaacagcaccgagttcctgatctacgagagaggcgtggaggtgggctgctggggcctgtgcatcaacagcgtgttcagcagcctgtacagctacttccagaaggtgctggtgagctacatcggcctgaagggcctgtacttcaccggctacctgctgttcggcctgggcaccggcttcatcggcctgttccccaacgtgtacagcaccctggtgctgtgcagcctgttcggcgtgatgagcagcaccctgtacaccgtgcccttcaacctgatcaccgagtaccacagagaggaggagaaggagagacagcaggcccccggcggcgaccccgacaacagcgtgagaggcaagggcatggactgcgccaccctgacctgcatggtgcagctggcccagatcctggtgggcggcggcctgggcttcctggtgaacaccgccggcaccgtggtggtggtggtgatcaccgccagcgccgtggccctgatcggctgctgcttcgtggccctgttcgtgagatacgtggactag

SEQ ID NO: 189764 - DNA, 1593 bp, Artificial Sequence
  derived and/or modified sequence
atgggatctaattcaggccaggctggacgccatatatataagtccctggcagatgacggacctttcgatagcgtggaaccaccaaagcgccccacgtcccgtctgataatgcactctatggctatgttcggccgtgaattttgctatgccgtggaggccgcttatgtgacccccgtactgctttcagtggggctaccgtcttccctttacagcatagtatggtttctgtctccgattctcgggtttttgctgcaacctgtcgtgggatctgcgagtgaccactgccgttcaaggtgggggagacgtagaccctacatcttgacactcggagttatgatgttggtgggcatggccctttacctaaatggcgcgacagtggtggcagccttaatcgcaaatcccagacgtaagctcgtctgggccatttcagttacgatgattggtgtggtcttattcgacttcgccgctgatttcatcgacggaccaataaaagcctatcttttcgatgtctgtagccaccaggacaaggaaaaagggctgcattatcacgccttattcactggttttggcggcgctcttggctacctcctgggagctattgactgggcacatctggaactgggcagattgctaggaacggagttccaggtgatgttctttttttcagcactagtactcactctgtgctttactgttcacttgtgttcgatctccgaggcgccactgacggaagtcgctaaaggaatccctccccaacagactccccaggacccacctctcagcagtgatgggatgtacgagtacggatccatcgaaaaagtgaaaaatggctatgttaatcccgaacttgcgatgcaaggcgctaagaacaagaaccatgccgagcaaacaaggagagcaatgaccctcaaatccctccttagggccttggtcaacatgccccctcactatcgatacctgtgcatatcacatctgatcggctggaccgctttcctttctaatatgctgttctttactgacttcatgggtcagatcgtctacaggggagatccttacagtgcgcacaactccaccgagttcctgatttacgagaggggtgtagaagtcggatgctggggattgtgtatcaattccgtcttctcttcgctgtactcctatttccagaaggtgctggtctcatatatcgggctcaaaggcctgtactttactggctacctactctttggattgggtactggttttatcgggttgttcccaaatgtttattcgactctggtgctgtgttccttgttcggtgtgatgtcctcaacgctgtacaccgtgcccttcaacttgattactgaatatcatcgggaagaggagaaggaacgccaacaagcgcctggcggtgatcctgataatagcgtcaggggcaaggggatggattgtgccacactcacttgtatggtgcaactcgcccagatccttgtgggcgggggactcgggttcctagttaatactgccggcaccgttgtcgtcgtggtaattacagcctcagctgttgccttgatcggatgctgcttcgttgccctcttcgtacgatacgtagactag

SEQ ID NO: 189765 - DNA, 1593 bp, Artificial Sequence
  derived and/or modified sequence
atgggcagcaacagcggccaggccggccgccacatctacaagagcctggctgatgatggcccctttgacagcgtggagccccccaagaggcccaccagccgcctcatcatgcacagcatggccatgtttggccgggagttctgctatgctgtggaggccgcctacgtgacccctgtgctgctgtctgtgggcctgcccagcagcctgtacagcatcgtgtggttcctgagccccatcctgggcttcctgctgcagcctgtggtgggcagcgccagtgaccactgccgcagccgctggggcagaagaagaccctacatcctgaccctgggcgtgatgatgctggtgggcatggccctgtacctgaatggagccaccgtggtggccgccctgattgccaaccccaggaggaagctggtgtgggccatctctgtgaccatgattggagtggtgctgtttgattttgctgctgacttcattgatggccccatcaaggcctacctgtttgatgtgtgcagccaccaggacaaggagaagggcctgcactaccacgccctcttcaccggctttggaggagccctgggctacctgctgggcgccatcgactgggcccacctggagctgggccgcctgctgggcacagagttccaggtgatgttcttcttcagcgccctggtgctgaccctgtgcttcaccgtgcacctgtgcagcatcagcgaggcccccctgacagaggtggccaagggcatccccccccagcagaccccccaggacccccccctgagcagtgatggcatgtatgaatatggcagcattgagaaggtgaagaatggctacgtgaaccctgagctggccatgcagggcgccaagaacaagaaccacgccgagcagacccggcgggccatgaccctgaagagcctgctgcgggccctggtgaacatgccaccccactaccgctacctgtgcatcagccacctgattggctggacagccttcctgagcaacatgctgttcttcacagacttcatgggccagatcgtgtacagaggagacccctacagcgcccacaacagcacagagttcctgatctatgagcggggcgtggaggtgggctgctggggcctgtgcatcaacagcgtcttcagcagcctgtacagctacttccagaaggtgctggtgtcctacatcggcctgaagggcctgtacttcaccggctacctgctgtttggcctgggcaccggcttcatcggcctcttccccaacgtgtacagcaccctggtgctgtgcagcctgtttggagtgatgagcagcaccctgtacacagtgcccttcaacctgatcacagagtaccaccgggaggaggagaaggagcggcagcaggcccctggaggagaccctgacaacagcgtgcggggcaagggcatggactgtgccaccctgacctgcatggtgcagctggcccagatcctggtgggcggcggcctgggcttcctggtgaacacagctggcaccgtggtggtggtggtgatcacagccagcgctgtggccctgattggctgctgctttgtggccctgtttgtgcgctacgtggactag

SEQ ID NO: 189766 - DNA, 1593 bp, Artificial Sequence
  derived and/or modified sequence
atgggcagcaacagcggccaggccggccggcacatctacaagagcttggcagacgatggcccattcgatagcgtggagcctcccaagcggccgacatctcggctgatcatgcactccatggccatgttcggtcgagagttctgctatgccgtcgaggctgcttatgtgacgcccgtcctgctgtctgttgggttgccttcctctctgtatagcatagtatggttcctgtcccccattctcggatttttactccagcccgtcgtggggtctgcatccgatcactgccgaagtcgctggggtagaagaagaccctacatcttaaccttaggagtgatgatgctggtgggtatggcgctttatcttaacggggccaccgtggttgctgcacttattgccaacccccggagaaagttagtttgggcgatttcagtgaccatgatcggagttgtgctattcgacttcgcggccgacttcatcgatggtccaattaaggcatacttgtttgacgtgtgttcccaccaggacaaagagaaaggcttgcattatcatgcactttttaccggatttgggggcgcccttgggtaccttctaggagccatcgactgggcccacctagaactgggtcgtttactgggcacagagttccaggttatgttcttcttctcagctcttgtgctgactctttgctttaccgtacacctatgctccatttccgaagcaccattgacagaggttgccaaaggcatcccaccgcagcagacaccacaagaccccccattatctagcgacggtatgtatgaatacgggtctatcgagaaggtaaagaacggctacgtgaatcctgagctcgccatgcagggggccaaaaataagaatcacgccgagcagacgaggagggctatgactctgaagtcactgctgagggcactggtgaacatgccccctcattataggtatctgtgcatctcccatctaatcggctggacagccttcctctcgaatatgctgttcttcactgacttcatgggtcaaatcgtatatcgtggagacccatactcagcccacaattcaactgagttcctgatttatgaacggggggttgaggtcggatgctggggtctgtgtataaacagcgtattctctagcctgtactcctatttccagaaggtgctcgttagctacattgggctgaaaggactgtacttcaccgggtacctgctgttcggccttgggacaggttttataggcctttttcctaacgtgtattctactctcgttctctgtagcctcttcggtgttatgagctcaacactgtatacagtgcccttcaacctcattactgagtaccacagggaagaggaaaaggaacggcagcaagcacctggtggcgatcccgacaacagcgtgagagggaaagggatggattgcgccactctgacctgcatggtgcaactggcccaaattctcgtgggcggcggcctgggcttcctcgtcaataccgcagggaccgttgtagttgtggtgatcactgcctccgccgttgcgctgatagggtgttgcttcgtggccctgttcgtgcgttatgtagattag

SEQ ID NO: 189767 - DNA, 1593 bp, Artificial Sequence
  derived and/or modified sequence
atggggagcaattccgggcaggccggtcgtcacatttataagtcactcgccgatgacggcccttttgacagcgtagaaccccctaagcggcctacatccaggttgataatgcacagcatggcgatgtttggtcgggaattctgctatgcggtcgaagcggcttacgtgacccctgtgctcttaagtgtcggactgccatcgagcctgtattcgatcgtatggttcctgtcccctatcctggggtttctactgcagcccgtggttggtagcgcatctgaccactgtcgcagcagatggggacggcgtaggccctacatcttgaccctcggcgtcatgatgctcgttggcatggcactgtatttgaatggcgctactgtggtcgctgcacttattgcgaatccgagaagaaagttagtttgggcgatcagtgtcactatgatcggcgtcgttcttttcgactttgccgcagactttatcgatgggcctatcaaagcgtacctgtttgatgtgtgttctcaccaggacaaagagaaagggctgcactaccacgctctgtttactgggtttggcggtgctctggggtacttactcggagccatcgattgggcacacttagagctgggaaggctactgggaacagaatttcaggttatgttctttttctccgccctcgtactaacactgtgtttcacagtccacttgtgcagcatctcagaggctccattgaccgaggtggcaaagggcattcccccacaacagactccgcaagacccacctcttagctccgacggcatgtacgaatatggatctattgagaaagtcaagaatggctatgtgaatccagaactggcaatgcagggcgcaaagaataagaatcacgcagagcaaacccgccgagctatgactctgaagtcattgctgcgggctttggtgaatatgccaccccactaccggtacctctgtatttcacatctgatcggatggacagccttcttgtcaaacatgctattttttacagattttatgggacagatcgtgtacaggggagacccctactctgcgcataattctactgagttcctgatttatgaacgtggcgtggaggtcgggtgctggggtctgtgtattaattcagtgttctcatcactgtattcctacttccaaaaggtgctggtctcctacattggactcaaggggctgtactttaccgggtacctgctcttcggactgggtaccggatttattgggcttttcccaaacgtctattcgaccttagtgctgtgttcactttttggggtgatgtcctcaactctgtacacggttccattcaaccttatcaccgagtaccaccgggaagaggagaaggaacgccaacaggcccctggaggtgacccggacaacagtgtgcgaggaaaaggtatggattgtgcaacactgacttgcatggtgcagctggctcagattctagttggtggcggactgggatttctggtcaacactgccggtacagttgtagtggtcgtcataacagcttccgcagtagcgttgattgggtgttgcttcgtggctctattcgttcgctatgtcgattag

SEQ ID NO: 189768 - DNA, 1772 bp, Artificial Sequence
  derived and/or modified sequence
ggcaggaaagaatttgagcccctcccccagcctgaccatctctgttggttgctcggccaggctccacgtcaaatccagtttgaaacacagaccctaggaccacgcaggaggtggtgggctcgcaggaaggttcctctcccagtggccatgggtagcaacagtgggcaggctggccgccacatctataaatccctagctgatgatggcccctttgactctgtggagccgcctaaaagacccaccagcagactcatcatgcacagcatggccatgttcggaagagagttctgctacgcggtggaggcagcgtatgtgaccccagtcctgctcagcgtaggtctgcccagcagcctgtacagcattgtgtggttcctcagccccatcctgggattcctgctgcagcccgtggtcggatcggccagcgaccactgccggtccaggtggggccgccggagaccctacatcctcaccctgggagtcatgatgctcgtgggcatggctctgtacctcaatggggctactgttgtagcagctttgattgctaacccaaggaggaagctggtttgggccataagtgtcaccatgataggtgtcgttctctttgattttgctgccgacttcattgatgggcccatcaaagcctacttatttgatgtctgctcccatcaggacaaggagaagggcctccactaccatgccctcttcacaggttttggaggtgccctgggttaccttttgggtgctatagactgggcccatctggagctgggaagactgttgggtacagaattccaggtcatgttcttcttctctgcattggtgctcactttgtgttttactgttcatctgtgcagtatctctgaagccccacttacagaggttgcaaagggcattcccccacagcaaacccctcaggaccctccattgtcatcagatggaatgtacgagtatggttctatcgagaaagttaaaaatggttacgtaaatccagagctggcaatgcagggagcaaaaaacaaaaatcatgctgaacagactcgcagggcaatgacattaaagtcactgctgagagcactggtgaacatgcctcctcactaccgctacctttgcatcagccacctcattggatggacagccttcctgtccaacatgctgttcttcacagatttcatgggccagattgtgtaccgcggggatccctatagtgcacacaactccacagagtttctcatctacgaaagaggagtcgaggttggatgttggggcttgtgcatcaactccgtgttttcctcactttattcttactttcagaaagttttggtatcctacattggattaaagggtctttacttcacgggatatttgctgtttggcctggggacgggatttattgggctcttcccgaatgtctactccaccctggtcctgtgcagcctgtttggtgtaatgtccagcaccctgtacactgtgccctttaacctcattactgagtaccaccgcgaggaagaaaaggagaggcagcaggccccaggaggggacccagacaacagcgtgagagggaagggcatggactgcgccaccctcacatgcatggtgcagctggctcagatcctggtcggaggtggcctgggctttctggtcaacacagccgggaccgttgtcgtcgtggtgatcacagcgtctgcggtggcactgataggctgttgctttgtcgctctctttgttagatatgtggattaggtcaataaagagacaatgaccctaacctcaga

SEQ ID NO: 189769 - protein, 237 aa, Artificial Sequence
  derived and/or modified sequence
MTSEITYAEVRFKNEFKSSGINTASSAASKERTAPHKSNTGFPKLLCASLLIFFLLLAISFFIAFVIFFQKYSQLLEKKTTKELVHTTLECVKKNMPVEETAWSCCPKNWKSFSSNCYFISTESASWQDSEKDCARMEAHLLVINTQEEQDFIFQNLQEESAYFVGLSDPEGQRHWQWVDQTPYNESSTFWHPREPSDPNERCVVLNFRKSPKRWGWNDVNCLGPQRSVCEMMKIHL

SEQ ID NO: 189770 - DNA, 714 bp, Artificial Sequence
  derived and/or modified sequence
atgacatccgagatcacatatgcagaagtccgtttcaaaaacgagttcaagagtagcggaattaacaccgctagcagtgctgctagcaaggaacgaaccgcccctcataaatccaacacagggttccctaagctcttgtgcgctagtcttctcatcttcttcctgctgctggccattagtttcttcatagcattcgtaatcttctttcagaagtattcccagctgttggaaaagaagactacaaaggaattggtccatactacccttgaatgcgtgaaaaaaaatatgccagtagaagagactgcatggagctgctgccccaaaaattggaagtcattcagcagtaactgctatttcatctcaaccgagtctgccagttggcaggactccgagaaagattgcgcacgaatggaagcacacttgctcgtgatcaacacccaggaagaacaggactttatcttccaaaacctccaggaagagagtgcttactttgttggattaagcgatcccgaggggcagaggcactggcaatgggtggaccagaccccctacaacgagagtagtactttctggcacccgcgggagcctagtgaccctaacgagagatgcgtggtcctgaattttcggaagagtcccaagcgatgggggtggaacgatgtgaactgcttgggtcctcagcgatccgtttgtgagatgatgaagatccacctttag

SEQ ID NO: 189771 - DNA, 714 bp, Artificial Sequence
  derived and/or modified sequence
atgaccagcgagatcacctacgccgaggtgcgcttcaagaatgagttcaagagcagcggcatcaacacagccagcagcgctgccagcaaggagaggacagccccccacaagagcaacacaggcttccccaagctgctgtgtgccagcctgctgatcttcttcctgctgctggccatctccttcttcatcgcctttgtgatcttcttccagaagtacagccagctgctggagaagaagaccaccaaggagctggtgcacaccaccctggagtgtgtgaagaagaacatgcctgtggaggagacagcctggagctgctgccccaagaactggaagagcttcagcagcaactgctacttcatcagcacagagagcgcctcctggcaggacagcgagaaggactgtgccaggatggaggcccacctgctggtgatcaacacccaggaggagcaggacttcatcttccagaacctgcaggaggagagcgcctactttgtgggcctgagtgaccctgagggccagaggcactggcagtgggtggaccagaccccctacaatgaaagcagcaccttctggcacccccgggagcccagcgaccccaatgaaagatgtgtggtgctgaacttcaggaagagccccaagcgctggggctggaatgatgtgaactgcctgggcccccagaggtctgtgtgtgagatgatgaagatccacctgtag

SEQ ID NO: 189772 - DNA, 714 bp, Artificial Sequence
  derived and/or modified sequence
atgaccagcgagatcacctacgccgaggtgcggttcaagaacgagttcaaatcatcaggaatcaacaccgctagcagtgcagcctcaaaggaacgcaccgccccccacaagtccaacactggctttcctaagttgctgtgtgcctccctgttgatttttttcttgctcctggccatttccttcttcatcgcattcgtcatctttttccaaaaatatagccaactccttgagaaaaagacgaccaaggaactggtccacacgacactggagtgcgtgaagaagaatatgcccgttgaagaaaccgcttggtcctgctgccctaagaattggaagagttttagttcaaactgctactttattagcactgagtcagccagctggcaggactcagagaaggactgcgctagaatggaggcacacctgctcgttatcaacacccaggaggagcaagactttatcttccagaacttgcaggaggagtctgcttatttcgtggggctaagcgatcccgagggacagcgtcattggcaatgggtggaccagactccatataatgagagtagcactttttggcacccgagagagccttccgatcctaacgagcgatgcgtggtgttaaacttccgtaagagccccaagcggtggggatggaacgatgtaaattgcctgggcccacagcgcagcgtttgcgagatgatgaagatccacctgtag

SEQ ID NO: 189773 - DNA, 714 bp, Artificial Sequence
  derived and/or modified sequence
atgactagcgaaatcacctacgctgaggtgaggttcaaaaatgagttcaagagcagcggcattaacaccgcctcttcagccgcttccaaggagcgcactgcaccccataagtcgaatacagggttccccaagctactgtgcgccagccttcttatctttttcttgctgctcgccatatcgttctttatcgcgttcgtgatcttttttcagaaatacagtcagttgctggaaaagaaaaccactaaagaattggtgcacactaccttggagtgcgtgaagaaaaacatgcccgttgaggagacggcctggtcatgttgtcccaagaattggaaaagcttttctagcaattgttatttcattagtaccgagagcgctagctggcaggacagcgaaaaggattgcgccagaatggaggcgcatctgctagttatcaatactcaggaggaacaggatttcatatttcagaatctccaggaggagtctgcttatttcgtgggtctctcagatccggaaggacagcgccactggcaatgggtagatcaaaccccttacaacgaaagttctacgttctggcacccacgggagccctctgatccaaatgaacgatgcgtggtcttgaatttccggaagagcccaaagcgatggggttggaatgacgtgaactgtcttgggcctcagagatcagtgtgtgagatgatgaagatacatctgtag

SEQ ID NO: 189774 - DNA, 1281 bp, Artificial Sequence
  derived and/or modified sequence
ctgtgattctcactatactggtcctgaggaaagggcttctgtgaactgcggtttttagtttttattgtggttcttagttctcatgagacccctcttgaggatatgtgcctatctggtgcctctgctctccactagttgagtgaaaggaaggaggtaatttaccaccatgtttggttcctgtttataagatgttttaagaaagatctgaaacagattttctgaagaaagcagaagctctcttcccattatgacttcggaaatcacttatgctgaagtgaggttcaaaaatgaattcaagtcctcaggcatcaacacagcctcttctgcagcttccaaggagaggactgcccctcacaaaagtaataccggattccccaagctgctttgtgcctcactgttgatatttttcctgctattggcaatctcattctttattgcttttgtcattttctttcaaaaatattctcagcttcttgaaaaaaagactacaaaagagctggttcatacaacattggagtgtgtgaaaaaaaatatgcccgtggaagagacagcctggagctgttgcccaaagaattggaagtcatttagttccaactgctactttatttctactgaatcagcatcttggcaagacagtgagaaggactgtgctagaatggaggctcacctgctggtgataaacactcaagaagagcaggatttcatcttccagaatctgcaagaagaatctgcttattttgtggggctctcagatccagaaggtcagcgacattggcaatgggttgatcagacaccatacaatgaaagttccacattctggcatccacgtgagcccagtgatcccaatgagcgctgcgttgtgctaaattttcgtaaatcacccaaaagatggggctggaatgatgttaattgtcttggtcctcaaaggtcagtttgtgagatgatgaagatccacttatgaactgaacattctccatgaacaggtggttggattggtatctgtcattgtagggatagataataagctcttcttattcatgtgtaagggaggtccatagaatttaggtggtctgtcaactattctacttatgagagaattggtctgtacattgactgattcactttttcataaagtgagcatttattgagcattttttcatgtgccagagcctgtactggaggcccccattgtgcacacatggagagaacatgagtctctcttaatttttatctggttgctaaagaattatttaccaataaaattatatgatgtggtgtctc

SEQ ID NO: 189775 - DNA, 714 bp, Artificial Sequence
  derived and/or modified sequence
atgaccagcgagatcacctacgccgaggtgagattcaagaacgagttcaagagcagcggcatcaacaccgccagcagcgccgccagcaaggagagaaccgccccccacaagagcaacaccggcttccccaagctgctgtgcgccagcctgctgatcttcttcctgctgctggccatcagcttcttcatcgccttcgtgatcttcttccagaagtacagccagctgctggagaagaagaccaccaaggagctggtgcacaccaccctggagtgcgtgaagaagaacatgcccgtggaggagaccgcctggagctgctgccccaagaactggaagagcttcagcagcaactgctacttcatcagcaccgagagcgccagctggcaggacagcgagaaggactgcgccagaatggaggcccacctgctggtgatcaacacccaggaggagcaggacttcatcttccagaacctgcaggaggagagcgcctacttcgtgggcctgagcgaccccgagggccagagacactggcagtgggtggaccagaccccctacaacgagagcagcaccttctggcaccccagagagcccagcgaccccaacgagagatgcgtggtgctgaacttcagaaagagccccaagagatggggctggaacgacgtgaactgcctgggcccccagagaagcgtgtgcgagatgatgaagatccacctgtag

SEQ ID NO: 189776 - protein, 108 aa, Artificial Sequence
  derived and/or modified sequence
MASNIFGTPEENQASWAKSAGAKSSGGREDLESSGLQRRNSSEASSGDFLDLKGEGDIHENVDTDLPGSLGQSEEKPVPAAPVPSPVAPAPVPSRRNPPGGKSSLVLG

SEQ ID NO: 189777 - protein, 154 aa, Artificial Sequence
  derived and/or modified sequence
MTTTTTFKGVDPNSRNSSRVLRPPGGGSNFSLGFDEPTEQPVRKNKMASNIFGTPEENQASWAKSAGAKSSGGREDLESSGLQRRNSSEASSGDFLDLKGEGDIHENVDTDLPGSLGQSEEKPVPAAPVPSPVAPAPVPSRRNPPGGKSSLVLG

SEQ ID NO: 189778 - DNA, 465 bp, Artificial Sequence
  derived and/or modified sequence
atgaccaccaccaccaccttcaagggcgtggaccccaacagcagaaacagcagcagagtgctgagaccccccggcggcggcagcaacttcagcctgggcttcgacgagcccaccgagcagcccgtgagaaagaacaagatggccagcaacatcttcggcacccccgaggagaaccaggccagctgggccaagagcgccggcgccaagagcagcggcggcagagaggacctggagagcagcggcctgcagagaagaaacagcagcgaggccagcagcggcgacttcctggacctgaagggcgagggcgacatccacgagaacgtggacaccgacctgcccggcagcctgggccagagcgaggagaagcccgtgcccgccgcccccgtgcccagccccgtggcccccgcccccgtgcccagcagaagaaacccccccggcggcaagagcagcctggtgctgggctag

SEQ ID NO: 189779 - DNA, 465 bp, Artificial Sequence
  derived and/or modified sequence
atgactacaaccacaacatttaaaggcgtagacccaaattcacgtaacagtagtagagtcttgaggcctccaggtggtggttccaatttttccctcggcttcgatgagccaactgagcagcctgtccgcaagaacaagatggcttcaaacatcttcgggaccccagaggaaaatcaagcgagttgggcaaagtcggcgggggcgaaatcatccggcggccgcgaagacttagagtcctcaggcctgcagcgcagaaacagtagcgaggctagcagtggcgatttcctagatcttaagggggaaggcgacattcatgaaaatgtggacacggatctgcccgggtccctgggccagtctgaagaaaaaccagttccggcagccccagttccatcccctgtcgctcctgccccagtgccaagccgaagaaacccccccgggggcaagagttccctggtcctcggttag

SEQ ID NO: 189780 - DNA, 465 bp, Artificial Sequence
  derived and/or modified sequence
atgaccaccaccaccaccttcaagggcgtggaccccaacagcaggaacagcagccgggtgctgcggcccccaggcggcggcagcaacttcagcctgggctttgatgagcccacagagcagcctgtgaggaagaacaagatggccagcaacatcttcggcaccccagaggagaaccaggcctcctgggccaagtctgctggggccaagagcagcggcggccgggaggacctggagagcagcggcctgcagaggaggaacagcagcgaggccagcagcggggacttcctggacctgaagggggagggggacatccatgaaaatgtggacacagacctgcccggcagcctgggccagagcgaggagaagcctgtgcctgctgcccctgtgcccagccctgtggccccagcccctgtgcccagcagaagaaaccccccaggcggcaagagcagcctggtgctgggctag

SEQ ID NO: 189781 - DNA, 465 bp, Artificial Sequence
  derived and/or modified sequence
atgaccaccaccaccaccttcaagggcgtggaccccaacagccggaatagttccagggtactgaggcccccgggagggggaagtaacttctccctgggctttgatgagcccacagagcagccagtgagaaaaaacaagatggccagtaatatcttcggaacccccgaagagaatcaggccagctgggcaaaatcagcaggcgccaagtcctctggggggcgggaagatctggagagctctggcctgcaacggcggaacagcagtgaggcttcctcaggcgatttccttgatcttaaaggagagggcgatattcatgaaaatgtcgatactgatttgcctgggtcattgggacagtcagaggagaaaccagttcccgctgctcccgtcccatccccagtggcacccgcaccagtgccttccaggcgtaacccccccgggggtaaaagttctcttgttctgggctag

SEQ ID NO: 189782 - DNA, 465 bp, Artificial Sequence
  derived and/or modified sequence
atgacaaccacaaccactttcaagggcgtcgatccaaattccaggaatagttcccgggtccttagaccccctggtggcggtagcaatttctcactcgggttcgatgaacctactgaacagcctgtccgaaaaaataaaatggcctcaaatatctttggtacacctgaagaaaatcaggctagttgggcgaagtcggctggtgctaaatcaagcgggggaagagaagatttggaaagctccggcttgcaacgtaggaatagctcagaagcctcttctggggacttcctggacctgaagggcgaaggtgacattcacgagaacgtggacacggacttgcctggctcgctcgggcaaagtgaggaaaagcccgtgccggcagcccctgtgcctagccctgtcgcgcctgctcctgttcctagtagacgaaatccccctggagggaagagttcgctggttcttggctag

SEQ ID NO: 189783 - protein, 426 aa, Artificial Sequence
  derived and/or modified sequence
MSGGVYGGDEVGALVFDIGSFSVRAGYAGEDCPKADFPTTVGLLAAEEGGGLELEGDKEKKGKIFHIDTNALHVPRDGAEVMSPLKNGMIEDWECFRAILDHTYSKHVKSEPNLHPVLMSEAPWNTRAKREKLTELMFEQYNIPAFFLCKTAVLTAFANGRSTGLVLDSGATHTTAIPVHDGYVLQQGIVKSPLAGDFISMQCRELFQEMAIDIIPPYMIAAKEPVREGAPPNWKKKEKLPQVSKSWHNYMCNEVIQDFQASVLQVSDSPYDEQVAAQMPTVHYEMPNGYNTDYGAERLRIPEGLFDPSNVKGLSGNTMLGVGHVVTTSIGMCDIDIRPGLYGSVIVTGGNTLLQGFTDRLNRELSQKTPPSMRLKLIASNSTMERKFSPWIGGSILASLGTFQQMWISKQEYEEGGKQCVERKCP

SEQ ID NO: 189784 - DNA, 1281 bp, Artificial Sequence
  derived and/or modified sequence
atgagcggcggcgtgtacggcggcgacgaggtgggcgccctggtgttcgacatcggcagcttcagcgtgagagccggctacgccggcgaggactgccccaaggccgacttccccaccaccgtgggcctgctggccgccgaggagggcggcggcctggagctggagggcgacaaggagaagaagggcaagatcttccacatcgacaccaacgccctgcacgtgcccagagacggcgccgaggtgatgagccccctgaagaacggcatgatcgaggactgggagtgcttcagagccatcctggaccacacctacagcaagcacgtgaagagcgagcccaacctgcaccccgtgctgatgagcgaggccccctggaacaccagagccaagagagagaagctgaccgagctgatgttcgagcagtacaacatccccgccttcttcctgtgcaagaccgccgtgctgaccgccttcgccaacggcagaagcaccggcctggtgctggacagcggcgccacccacaccaccgccatccccgtgcacgacggctacgtgctgcagcagggcatcgtgaagagccccctggccggcgacttcatcagcatgcagtgcagagagctgttccaggagatggccatcgacatcatccccccctacatgatcgccgccaaggagcccgtgagagagggcgccccccccaactggaagaagaaggagaagctgccccaggtgagcaagagctggcacaactacatgtgcaacgaggtgatccaggacttccaggccagcgtgctgcaggtgagcgacagcccctacgacgagcaggtggccgcccagatgcccaccgtgcactacgagatgcccaacggctacaacaccgactacggcgccgagagactgagaatccccgagggcctgttcgaccccagcaacgtgaagggcctgagcggcaacaccatgctgggcgtgggccacgtggtgaccaccagcatcggcatgtgcgacatcgacatcagacccggcctgtacggcagcgtgatcgtgaccggcggcaacaccctgctgcagggcttcaccgacagactgaacagagagctgagccagaagaccccccccagcatgagactgaagctgatcgccagcaacagcaccatggagagaaagttcagcccctggatcggcggcagcatcctggccagcctgggcaccttccagcagatgtggatcagcaagcaggagtacgaggagggcggcaagcagtgcgtggagagaaagtgcccctag

SEQ ID NO: 189785 - DNA, 1537 bp, Artificial Sequence
  derived and/or modified sequence
aattggccgctgagagtcccgccccgccagggatcccgggagctgtccggccgcctcggtgctgatcccgccaccgcccacgggccgctagcagcgcagcgggcactatgagcgggggcgtctacggcggagatgaggtgggggcgctggtctttgacattggctccttctcagtccgcgctgggtacgctggggaggactgtcccaaggctgacttccccaccacagtggggctgctggccgcggaggaggggggcgggctggagctggagggggacaaagagaagaaagggaagatcttccacatcgacaccaatgccctgcacgtgcctcgggatggagcggaggtcatgtcgcccctcaagaatggcatgatcgaggactgggagtgcttccgagccatcctggatcacacctacagcaaacacgtcaagtctgagccaaacctgcacccagtgctcatgtccgaggctccgtggaacacacgggccaagcgggagaagctgacagagctgatgttcgagcagtacaacattcctgccttcttcttatgcaagacggctgtgctcaccgcctttgcaaacgggcggtccactggcctcgtgctggacagtggagccacccacaccacggccattccagtacatgacggctacgttctgcagcaaggcatcgtcaagtcccctctggcaggggacttcatctccatgcagtgccgggagctgttccaggagatggccattgacatcatcccaccttacatgatcgcagccaaggagcctgtccgggagggtgcccccccaaactggaagaagaaggagaagctaccccaggtctccaagtcctggcataactacatgtgtaatgaggtgatccaggacttccaggcctccgtgctgcaggtctcagactccccctacgatgaacaggtggctgcacaaatgcccacagtgcactacgagatgcccaatggctacaatacagactacggcgccgagcgactccgcatccctgagggcctgtttgatccctcgaacgtcaagggcctgtcggggaacaccatgttgggtgtgggccacgtggtgaccaccagcatcggcatgtgtgacattgatattcgcccgggcctgtacgggagtgtcattgtcaccggcgggaacacactgctgcagggcttcactgacaggctcaatcgagagctttcccagaagaccccaccgagcatgcgactgaaactcattgccagcaacagcaccatggagcgcaagttcagcccctggatcgggggttccatcctggcctcactgggcactttccagcagatgtggatctccaagcaggaatatgaggagggcgggaagcagtgcgtggagcgaaagtgcccctgatggcactcctccccacacacctgctcccaagctcagatggaagtcccttaacccccatgccacattgcccccctcctcctttccctcttgtcctcattaatggtgatgtttctgggttgaaagaagtaaaaatgttttaagaaaaaaaa

SEQ ID NO: 189786 - DNA, 1281 bp, Artificial Sequence
  derived and/or modified sequence
atgagcgggggcgtttatggaggtgacgaggtcggggctctcgtgttcgatataggttctttcagtgtgcgtgccggttacgccggggaagattgcccaaaggccgattttccgactacagtcgggctactggcggcagaggaggggggtgggcttgagttggaaggagataaagaaaagaagggcaaaatattccacatcgataccaatgctttacacgttcctcgggatggcgccgaggtgatgtcccctctcaagaatgggatgatagaggactgggagtgctttcgtgccatactggaccatacttattcaaagcacgtcaagagtgagccaaatctgcatcctgtgctcatgtccgaggctccgtggaacacccgagcgaagcgggagaagttaaccgaactaatgtttgagcaatacaatattcctgcattcttcctctgtaagacggccgtgctcacagcattcgctaacggtagatcgaccgggctcgtgctagactccggcgcgacccacacaacagcaatccccgtacacgacgggtatgtgctgcagcagggtatcgttaagagccccttggccggcgattttatcagcatgcagtgccgggaactgtttcaggagatggccattgatatcatccccccttacatgattgccgcaaaagaacctgtgagagaaggcgctccacccaactggaagaaaaaagaaaagctgcctcaggtaagcaaatcctggcataattatatgtgtaacgaagtcatccaggatttccaagcttcagttctgcaggtatccgattccccctacgacgagcaggtggctgcccagatgcctactgtgcactatgagatgcccaacggctacaataccgattatggagcagaaagactgcgcatcccagagggattgtttgacccaagcaacgtgaagggtctttctggcaataccatgttgggcgtgggacacgtcgtcaccacttccatcggaatgtgtgatatcgatatacggcccggcttatatggatctgtgatcgtgaccggcggcaacacgttgctgcagggcttcactgaccgactgaaccgggaactcagccagaaaactcctccttcaatgcggctgaagttgattgctagtaactcaaccatggaacgtaaatttagcccctggatcgggggaagtatcttggcttcgcttggaacgtttcagcagatgtggataagcaaacaggagtacgaagagggaggtaagcagtgcgtggagcgtaaatgcccctag

SEQ ID NO: 189787 - DNA, 1281 bp, Artificial Sequence
  derived and/or modified sequence
atgtctgggggcgtgtatggaggagatgaggtgggcgccctggtgtttgacatcggcagcttctctgtgcgggccggctacgccggggaggactgccccaaggctgacttccccaccaccgtgggcctgctggccgctgaggagggcggcggcctggagctggagggggacaaggagaagaagggcaagatcttccacatcgacaccaatgccctgcacgtgcccagagatggagctgaggtgatgagccccctgaagaatggcatgattgaggactgggagtgcttccgggccatcctggaccacacctacagcaagcacgtgaagtctgagcccaacctgcaccctgtgctgatgtctgaggccccctggaacacccgggccaagcgggagaagctgacagagctgatgtttgagcagtacaacatcccagccttcttcctgtgcaagacagctgtgctgacagcctttgccaacggccgcagcacaggcctggtgctggacagcggggccacccacaccacagccatccctgtgcatgatggctacgtgctgcagcagggcatcgtgaagagccccctggccggggacttcatctccatgcagtgccgggagctgttccaggagatggccatcgacatcatccccccctacatgattgctgccaaggagcctgtgcgggagggcgccccacccaactggaagaagaaggagaagctgccccaggtgtccaagtcctggcacaactacatgtgcaatgaagtcatccaggacttccaggcctctgtgctgcaggtgtctgacagcccctatgatgagcaggtggccgcccagatgcccaccgtgcactatgagatgcccaacggctacaacacagattatggagctgagcggctgcgcatccctgagggcctgtttgaccccagcaatgtgaagggcctgagcggcaacaccatgctgggcgtgggccacgtggtgaccaccagcatcggcatgtgtgacatcgacatccggcccggcctgtatggcagcgtcatcgtgactggaggcaacaccctgctgcagggcttcacagaccggctgaaccgggagctgagccagaagaccccacccagcatgaggctgaagctgattgccagcaacagcaccatggagaggaagttcagcccctggattggaggcagcatcctggccagcctgggcaccttccagcagatgtggatcagcaagcaggagtatgaggagggcggcaagcagtgtgtggagaggaagtgcccctag

SEQ ID NO: 189788 - DNA, 1281 bp, Artificial Sequence
  derived and/or modified sequence
atgagcggcggcgtgtacggcggcgacgaggtgggcgccctggtgtttgatattggttccttctccgtgcgtgccggctatgcgggagaggattgccccaaggctgacttccccaccactgtggggctgttagccgcagaggaggggggggggctcgaactggaaggtgacaaagaaaagaaaggcaagatcttccacatcgacacaaacgccctgcacgtgccccgtgacggagccgaggttatgtcccctcttaagaatggtatgattgaggactgggagtgtttccgggcgatccttgaccacacctactccaagcacgtgaaatcggagcctaacttgcaccctgttctaatgtccgaagcgccatggaacacaagagctaagagggaaaagctgaccgaactcatgttcgaacagtacaacatccccgcttttttcctctgtaagacagcagtactgacggcattcgccaacgggaggtcgaccgggctagtactagatagtggagctacccacacaactgccatccccgtccacgacggatacgtcctgcagcaaggcattgtgaagtcccctttagccggggactttatttccatgcagtgtagagagctgttccaggaaatggcaattgacataattccaccttacatgatcgctgccaaggaacccgtgcgggaaggggcccctccgaactggaagaagaaagaaaagcttccgcaggtgagtaaaagttggcacaactacatgtgtaatgaagtcatccaagacttccaggcgtccgtcttgcaggtctccgatagtccatatgacgaacaggtagctgctcagatgcccacagttcactatgagatgcccaatggttataatacagattacggcgccgagcgtcttcgtatacccgaggggctcttcgatccttcgaatgtcaagggtcttagcggaaataccatgctgggtgtgggacatgtagtgacaacctctatcggaatgtgcgatatagacataaggcccgggttgtacggctccgtaatcgtgacgggcggcaacacactccttcaagggttcacagatagattgaaccgggagttgtcccaaaaaacccctccctcaatgcgtctcaagctcatagccagtaattccaccatggaaagaaagttttccccttggattggcgggtccatcctggcgagcctaggtacctttcagcaaatgtggatcagcaaacaggaatatgaggagggcggcaaacagtgcgtcgaaaggaagtgcccctag

SEQ ID NO: 189789 - DNA, 1281 bp, Artificial Sequence
  derived and/or modified sequence
atgtctggcggtgtgtacggtggagatgaagtgggggcacttgtgttcgacattggcagcttttctgtgagggccggatacgcaggcgaggactgtccaaaggcggatttcccaacgactgtgggcctcctcgcggcagaggaggggggaggtctggagcttgagggcgataaggagaagaaaggtaagatttttcatatagatacaaatgctctacatgtcccacgggatggggcagaggtaatgtccccactgaaaaatggaatgatcgaggactgggaatgcttccgggcaatattggaccacacatactctaaacacgtgaagtccgagccgaatctgcatcccgttttaatgtctgaagccccatggaacacaagagcgaaaagggagaagctcacagaactgatgttcgagcagtacaatatccccgctttttttttgtgtaagaccgccgtgctcactgcgttcgcgaatgggaggagtaccgggcttgtcctggacagcggggcaacacatactacggccattccagttcatgacggctacgttcttcaacagggtattgttaagtcaccccttgccggtgacttcatctctatgcagtgcagagaattattccaagagatggccatcgacattattccgccttatatgatcgccgctaaagaacctgttcgagagggcgctcctcccaattggaagaagaaggaaaaactacctcaggtgagcaaaagctggcacaattacatgtgtaatgaggtcatacaggacttccaggcttcagttctccaggtctctgactcaccatatgatgaacaagtggcagcccagatgcctacagttcactacgagatgcctaatgggtacaataccgattacggagccgagaggctaagaatccccgaggggctgttcgacccatccaatgtgaaaggactttctggcaacaccatgttgggggttggtcatgtggtaaccacaagtataggcatgtgcgatatcgatatacgacccggtctttacggcagcgtcattgttacagggggaaatacgctactccagggcttcacagatcggctcaatagggagctctcgcagaaaaccccacctagtatgagactgaaattaattgcatcaaactccacgatggagcggaagttctccccatggattggaggctctatactcgcaagcctcggaacttttcaacagatgtggatctctaaacaggaatacgaggagggcggtaagcagtgcgtggagcgaaagtgtccctag

SEQ ID NO: 189790 - DNA, 1281 bp, Artificial Sequence
  derived and/or modified sequence
atgtccggcggagtgtatggaggcgatgaagttggcgccctggtctttgatattggctccttctcggttcgggcaggatacgccggtgaagattgccccaaggccgatttcccaaccaccgtgggtctactagccgctgaagaagggggcggactggaactcgaaggagacaaagaaaaaaaagggaaaatctttcatatcgatacaaatgcattgcacgtgccaagagacggcgccgaagtgatgagcccacttaaaaatggcatgatagaggactgggaatgcttccgggctatcctcgatcacacttactctaaacacgtgaagtccgagccaaacttacatcctgtgttaatgtcagaggcgccgtggaacaccagagcaaaacgtgaaaaactgactgagttgatgttcgaacagtacaacatacccgcgtttttcttgtgcaagacggcagtgctgaccgccttcgcaaatggacgctcaaccggcttggtgcttgattccggcgcaacccacacaaccgccatccccgtccatgacggttacgtgttgcagcagggtattgtcaagagtcctctggcaggggacttcatcagcatgcagtgccgagagctcttccaggaaatggctatagacatcatccctccttacatgattgcagctaaggaacctgtgcgtgaaggcgccccgccgaactggaaaaagaaggaaaagctgccccaggtgagcaagagctggcacaattacatgtgtaacgaggtgattcaagatttccaggcctcagtattacaggtgagcgactcaccctacgacgaacaagtcgccgcccaaatgccaaccgtgcactatgaaatgccaaacggttataacacagattacggggcagaaagactacgaattcctgaaggtctctttgacccatcaaatgttaaaggattgagtgggaatacaatgttgggagtgggtcacgtcgtcactacttcaatcggcatgtgtgatatcgacattagacccggactgtatgggtcagtgatcgtaaccgggggcaatacacttctccaagggtttactgaccgtttaaatagggaactatctcagaagactccgccatcaatgaggttaaagctcatcgcctctaattctacaatggaaagaaagttcagcccctggatcggcggcagtatattggcctctctgggtactttccagcagatgtggattagcaaacaggagtacgaggaaggcggcaaacagtgtgtcgaaagaaaatgtccatag

SEQ ID NO: 189791 - DNA, 1281 bp, Artificial Sequence
  derived and/or modified sequence
atgagtggcggagtgtatgggggggatgaagtcggagctctcgtgtttgatattggctctttctccgtaagggcaggctatgcaggcgaggattgtcccaaggccgattttccaactacagtagggttactggctgcagaggaggggggaggtcttgaactggagggtgataaagaaaagaaaggtaaaatttttcacattgatacgaatgcactccacgtcccacgcgatggtgctgaggtgatgtccccgctgaagaacgggatgattgaagactgggaatgcttccgtgcgatccttgaccatacatatagtaaacatgtaaaatcagagcccaaccttcaccccgtcctgatgtcagaggctccttggaacacccgcgcaaagagagaaaagctcaccgaactaatgtttgaacaatataatattcctgcattcttcctatgtaagacagccgtcttaacagccttcgcaaacggccgctccaccggccttgtgttagattccggcgccacacatactaccgcgattccagtccacgacggatatgttctacagcagggaattgtcaaaagtcctttggccggcgattttatcagtatgcagtgcagagaactctttcaagagatggccattgatatcatcccaccatacatgatcgctgccaaggagccagtgagagagggggcaccccctaattggaagaaaaaggaaaaactaccgcaagtaagcaagagctggcacaattacatgtgtaatgaagttatccaggactttcaggcaagcgtgttgcaagtctcagacagcccttatgatgagcaagtagcggctcaaatgccaaccgttcactatgaaatgcccaacggatacaacaccgactatggggcagaacgcctcaggattcctgaaggtctctttgacccatcaaatgttaaaggattgagtgggaatacaatgttgggagtgggtcacgtcgtcactacttcaatcggcatgtgtgatatcgacattagacccggactgtatgggtcagtgatcgtaaccgggggcaatacacttctccaagggtttactgaccgtttaaatagggaactatctcagaagactccgccatcaatgaggttaaagctcatcgcctctaattctacaatggaaagaaagttcagcccctggatcggcggcagtatattggcctctctgggaacctttcaacaaatgtggattagtaaacaggagtacgaagaaggaggaaagcagtgtgttgagcgtaagtgcccatag

SEQ ID NO: 189792 - RNA, 1281 nt, Artificial Sequence
  derived and/or modified sequence
auguccggcggaguguauggaggcgaugaaguuggcgcccuggucuuugauauuggcuccuucucgguucgggcaggauacgccggugaagauugccccaaggccgauuucccaaccaccgugggucuacuagccgcugaagaagggggcggacuggaacucgaaggagacaaagaaaaaaaagggaaaaucuuucauaucgauacaaaugcauugcacgugccaagagacggcgccgaagugaugagcccacuuaaaaauggcaugauagaggacugggaaugcuuccgggcuauccucgaucacacuuacucuaaacacgugaaguccgagccaaacuuacauccuguguuaaugucagaggcgccguggaacaccagagcaaaacgugaaaaacugacugaguugauguucgaacaguacaacauacccgcguuuuucuugugcaagacggcagugcugaccgccuucgcaaauggacgcucaaccggcuuggugcuugauuccggcgcaacccacacaaccgccauccccguccaugacgguuacguguugcagcaggguauugucaagaguccucuggcaggggacuucaucagcaugcagugccgagagcucuuccaggaaauggcuauagacaucaucccuccuuacaugauugcagcuaaggaaccugugcgugaaggcgccccgccgaacuggaaaaagaaggaaaagcugccccaggugagcaagagcuggcacaauuacauguguaacgaggugauucaagauuuccaggccucaguauuacaggugagcgacucacccuacgacgaacaagucgccgcccaaaugccaaccgugcacuaugaaaugccaaacgguuauaacacagauuacggggcagaaagacuacgaauuccugaaggucucuuugacccaucaaauguuaaaggauugagugggaauacaauguugggagugggucacgucgucacuacuucaaucggcaugugugauaucgacauuagacccggacuguaugggucagugaucguaaccgggggcaauacacuucuccaaggguuuacugaccguuuaaauagggaacuaucucagaagacuccgccaucaaugagguuaaagcucaucgccucuaauucuacaauggaaagaaaguucagccccuggaucggcggcaguauauuggccucucuggguacuuuccagcagauguggauuagcaaacaggaguacgaggaaggcggcaaacagugugucgaaagaaaauguccauag

SEQ ID NO: 189793 - RNA, 1281 nt, Artificial Sequence
  derived and/or modified sequence
augaguggcggaguguaugggggggaugaagucggagcucucguguuugauauuggcucuuucuccguaagggcaggcuaugcaggcgaggauugucccaaggccgauuuuccaacuacaguaggguuacuggcugcagaggaggggggaggucuugaacuggagggugauaaagaaaagaaagguaaaauuuuucacauugauacgaaugcacuccacgucccacgcgauggugcugaggugauguccccgcugaagaacgggaugauugaagacugggaaugcuuccgugcgauccuugaccauacauauaguaaacauguaaaaucagagcccaaccuucaccccguccugaugucagaggcuccuuggaacacccgcgcaaagagagaaaagcucaccgaacuaauguuugaacaauauaauauuccugcauucuuccuauguaagacagccgucuuaacagccuucgcaaacggccgcuccaccggccuuguguuagauuccggcgccacacauacuaccgcgauuccaguccacgacggauauguucuacagcagggaauugucaaaaguccuuuggccggcgauuuuaucaguaugcagugcagagaacucuuucaagagauggccauugauaucaucccaccauacaugaucgcugccaaggagccagugagagagggggcacccccuaauuggaagaaaaaggaaaaacuaccgcaaguaagcaagagcuggcacaauuacauguguaaugaaguuauccaggacuuucaggcaagcguguugcaagucucagacagcccuuaugaugagcaaguagcggcucaaaugccaaccguucacuaugaaaugcccaacggauacaacaccgacuauggggcagaacgccucaggauuccugaaggucucuuugacccaucaaauguuaaaggauugagugggaauacaauguugggagugggucacgucgucacuacuucaaucggcaugugugauaucgacauuagacccggacuguaugggucagugaucguaaccgggggcaauacacuucuccaaggguuuacugaccguuuaaauagggaacuaucucagaagacuccgccaucaaugagguuaaagcucaucgccucuaauucuacaauggaaagaaaguucagccccuggaucggcggcaguauauuggccucucugggaaccuuucaacaaauguggauuaguaaacaggaguacgaagaaggaggaaagcaguguguugagcguaagugcccauag

SEQ ID NO: 189794 - protein, 495 aa, Artificial Sequence
  derived and/or modified sequence
MPQLLQNINGIIEAFRRYARTEGNCTALTRGELKRLLEQEFADVIVKPHDPATVDEVLRLLDEDHTGTVEFKEFLVLVFKVAQACFKTLSESAEGACGSQESGSLHSGASQELGEGQRSGTEVGRAGKGQHYEGSSHRQSQQGSRGQNRPGVQTQGQATGSAWVSSYDRQAESQSQERISPQIQLSGQTEQTQKAGEGKRNQTTEMRPERQPQTREQDRAHQTGETVTGSGTQTQAGATQTVEQDSSHQTGRTSKQTQEATNDQNRGTETHGQGRSQTSQAVTGGHAQIQAGTHTQTPTQTVEQDSSHQTGSTSTQTQESTNGQNRGTEIHGQGRSQTSQAVTGGHTQIQAGSHTETVEQDRSQTVSHGGAREQGQTQTQPGSGQRWMQVSNPEAGETVPGGQAQTGASTESGRQEWSSTHPRRCVTEGQGDRQPTVVGEEWVDDHSRETVILRLDQGNLHTSVSSAQGQDAAQSEEKRGITARELYSYLRSTKP

SEQ ID NO: 189795 - protein, 141 aa, Artificial Sequence
  derived and/or modified sequence
MPQLLQNINGIIEAFRRYARTEGNCTALTRGELKRLLEQEFADVIVKPHDPATVDEVLRLLDEDHTGTVEFKEFLVLVFKVAQACFKTLSESAEGACGSQESGSLHSGASQELGFRPRVRPLALRGSAAMTGKLSPRARKE

SEQ ID NO: 189796 - DNA, 426 bp, Artificial Sequence
  derived and/or modified sequence
atgccccagctgctgcagaacatcaacggcatcatcgaggccttcagaagatacgccagaaccgagggcaactgcaccgccctgaccagaggcgagctgaagagactgctggagcaggagttcgccgacgtgatcgtgaagccccacgaccccgccaccgtggacgaggtgctgagactgctggacgaggaccacaccggcaccgtggagttcaaggagttcctggtgctggtgttcaaggtggcccaggcctgcttcaagaccctgagcgagagcgccgagggcgcctgcggcagccaggagagcggcagcctgcacagcggcgccagccaggagctgggcttcagacccagagtgagacccctggccctgagaggcagcgccgccatgaccggcaagctgagccccagagccagaaaggagtag

SEQ ID NO: 189797 - DNA, 1488 bp, Artificial Sequence
  derived and/or modified sequence
atgccccaactgctccagaatattaacggcatcattgaggcctttagacggtacgcccggaccgagggcaactgtaccgctctgactcgcggcgaattgaagaggctgttggaacaggaatttgcggacgtcatcgtcaagccgcatgatccagcaacagttgacgaggtgttaaggctgctcgatgaagaccacaccgggacagttgagtttaaggaatttctggtcctcgtgtttaaggtcgcacaggcctgttttaaaaccttgtcagagagtgccgaaggagcttgcggttcacaggagtctggttccctccattctggcgcttcccaggagctcggtgaaggacaaaggtctggcacagaggtcggacgagcaggcaaggggcaacattacgaggggagctcacaccggcaaagccaacaggggtccagaggtcaaaaccgccccggagtgcagacccagggacaggccactgggtcagcatgggtctcttcctatgaccgccaggctgaatctcagtcacaggagagaataagcccacagattcagttaagtgggcagacggagcagacccagaaagccggtgagggaaagaggaaccagacaaccgagatgcgccccgagcggcaaccccagacccgagagcaggatcgcgcccatcaaaccggagagactgtcactgggtccggaacccagacccaggccggtgcgacacaaacagtggaacaagactcaagccatcagacagggcgcacttctaagcagacacaggaagccactaacgaccaaaaccgaggcaccgagacccatggacaaggccgcagtcagacatcccaggctgtgaccggcgggcacgcccaaatccaggctggaacgcatacacagacccctacccaaactgttgagcaggattcatctcaccaaaccggtagtacctctacccagacacaggaaagcacgaatggtcagaaccggggcacggagattcacggccagggcagatcacagacctcgcaggctgttactggcggccacacgcagattcaagcaggctcacacaccgagacagtggaacaagataggagccagactgtcagccacggaggcgcacgtgagcagggtcagacgcaaacccagccgggtagcggacagcgatggatgcaggtttccaatcccgaagccggggaaacggtccccggcggccaggctcaaacaggcgcatctacagagtccggtagacaggaatggagctctacacatcccaggcggtgcgttacggaggggcagggagacagacagcctacagtggtgggtgaagagtgggttgatgatcattctagggagaccgttatcttgcgtcttgatcagggcaatctgcacactagcgtgagcagcgcacagggccaggatgctgctcagtcagaagagaagagggggatcactgcaagggaactgtacagctacttgagatccacaaagccctag

SEQ ID NO: 189798 - DNA, 426 bp, Artificial Sequence
  derived and/or modified sequence
atgccccagctcttgcagaatataaacggaattattgaggcgttccgccggtatgcccgcacggagggcaactgtactgcccttacgcggggtgagctcaagcgcctgctggagcaggagttcgccgatgtaattgtcaaaccccacgatccagccacagtggacgaagttctgcgtctgctcgatgaagatcacaccgggacagtggagtttaaggaatttctcgtgcttgtttttaaggtcgcccaggcctgcttcaagacactgtctgaatccgccgaaggcgcttgcggatctcaggagagtggctcgttacactcaggggcctcacaggaactaggcttccggccacgcgtaaggccattggctctgcgcgggagcgctgccatgacaggcaaacttagccccagggctcgaaaagagtag

SEQ ID NO: 189799 - DNA, 1488 bp, Artificial Sequence
  derived and/or modified sequence
atgccccagctgctgcagaacatcaatggcatcatcgaggccttccgccgctatgccaggacagagggcaactgcacagccctgaccagaggagagctgaagaggctgctggagcaggagtttgctgatgtgattgtgaagccccatgaccctgccaccgtggatgaggtgctgcggctgctggatgaggaccacacaggcaccgtggagttcaaggagttcctggtgctggtgttcaaggtggcccaggcctgcttcaagaccctgtctgagagcgctgagggcgcctgtggcagccaggagagcggcagcctgcacagcggggccagccaggagctgggggagggccagaggtctggaacagaggtgggccgggccggcaagggccagcactatgagggcagcagccaccggcagagccagcagggcagccggggccagaacagacctggggtgcagacccagggccaggccactggaagtgcctgggtgagcagctatgaccggcaggccgagagccagagccaggagcgcatcagcccccagatccagctgagcggccagacagagcagacccagaaggccggggagggcaagaggaaccagaccacagagatgaggcctgagcggcagccccagacccgggagcaggaccgggcccaccagacaggagagaccgtgacaggcagcggcacccagacccaggccggggccacccagacagtggagcaggacagcagccaccagacaggccgcaccagcaagcagacccaggaggccaccaatgaccagaacagaggaacagagacccacggccagggccgcagccagaccagccaggccgtgactggaggccacgcccagatccaggccggcacccacacccagacccccacccagacagtggagcaggacagcagccaccagacaggcagcaccagcacccagacccaggagagcaccaacggccagaacagaggaacagagatccacggccagggccgcagccagaccagccaggccgtgactggaggccacacccagatccaggccggcagccacacagaaacagtggagcaggacaggagccagacagtgagccacggcggggcccgggagcagggccagacccagacccagcccggcagcggccagcgctggatgcaggtgagcaaccctgaggccggggagaccgtgcctgggggccaggcccagacaggagccagcacagagagcggccggcaggagtggagcagcacccacccccggcgctgtgtgacagagggccagggcgaccggcagcccaccgtggtgggggaggagtgggtggatgaccacagccgggagaccgtcatcctgcggctggaccagggcaacctgcacacctctgtgagcagcgcccagggccaggatgctgcccagagcgaggagaagaggggcatcacagcccgggagctgtacagctacctgcggagcaccaagccctag

SEQ ID NO: 189800 - DNA, 426 bp, Artificial Sequence
  derived and/or modified sequence
atgccccagctgctgcagaacatcaatggcatcatcgaggccttccgccgctatgccaggacagagggcaactgcacagccctgaccagaggagagctgaagaggctgctggagcaggagtttgctgatgtgattgtgaagccccatgaccctgccaccgtggatgaggtgctgcggctgctggatgaggaccacacaggcaccgtggagttcaaggagttcctggtgctggtgttcaaggtggcccaggcctgcttcaagaccctgtctgagagcgctgagggcgcctgtggcagccaggagagcggcagcctgcacagcggggccagccaggagctgggcttccggccccgggtgcggcccctggccctgcggggcagcgctgccatgaccgggaagctgagcccccgggccaggaaggagtag

SEQ ID NO: 189801 - DNA, 1488 bp, Artificial Sequence
  derived and/or modified sequence
atgccccagctgctgcagaacatcaacggcatcatcgaggccttcagaagatacgctaggacagaggggaactgcacagcgctcactcgaggagagctgaaacgcttgcttgaacaggaatttgcagacgtgatcgttaagccacatgacccagctactgttgatgaggtcctgagattactggatgaagaccatactggcactgtggaatttaaggaattcctcgtcctcgtgtttaaggtggcacaagcttgcttcaagacactgtcggagagtgccgaaggggcatgcggatcacaggaatctggttcactccacagtggagcatcccaagagcttggagagggacagcgatctgggaccgaagtggggagagccgggaaggggcagcattacgagggttcctctcaccggcaatcccagcaggggtctcgggggcagaatcgtcctggtgtgcaaactcaaggccaagccacaggatctgcttgggtgtcatcttatgacaggcaggccgaaagccaatcacaggaaagaatttcccctcaaattcagttgtcaggccagactgaacagacacaaaaggcaggtgaaggaaagcgaaaccagaccaccgagatgaggcccgagcggcaacctcagacccgcgagcaggatagagcccatcaaactggtgagacagtgaccgggtcagggacccagacccaggccggagcaacacagacggttgaacaggattctagccatcagactggaagaacctcaaaacagacacaagaagccactaacgaccagaatcgcggcacggaaacacatggccagggccgctctcagaccagtcaagctgtgacaggtggccacgcgcagatccaagccggcacacatacacagacccctacacagaccgtcgagcaggactctagccaccaaacgggctcaacaagtacccagactcaggaatctaccaatgggcagaatcgtggcactgagatccacggccagggaagaagtcagacatctcaggcagtgacaggtgggcatacccagattcaggccggctcacacaccgagaccgtggaacaggatcgatcccaaacggtttcacatgggggagcccgcgagcagggtcagacccagactcaacctgggtctggacagcgatggatgcaggtctctaacccggaggctggcgaaacggtcccaggaggccaggcgcaaaccggcgctagcaccgagagcggtagacaggagtggtcatccacacaccccagacgctgtgttactgaggggcagggcgacaggcagcccacagtagtgggtgaagagtgggttgacgatcacagccgcgagaccgtcatcttacgtctggaccaaggtaaccttcatacttctgtctcttccgctcagggccaggacgccgctcagagcgaggagaaacgtggtataactgccagggagctgtattcttatcttagaagtacgaaaccatag

SEQ ID NO: 189802 - DNA, 426 bp, Artificial Sequence
  derived and/or modified sequence
atgccccagctgctgcagaacatcaacggcatcatcgaggccttccgcaggtatgcccggacggagggtaattgcaccgcccttacccgaggggagctgaagcggctcctggaacaagagttcgccgatgtcatcgtgaaaccccacgaccccgctacagtagacgaagtgcttcgtctgctcgacgaagaccacaccggaacagtggaatttaaagagttcctcgtactcgtgtttaaagtcgcacaagcctgctttaagacgctatccgaaagcgccgagggggcatgcggatcccaggagtcaggatcccttcattccggcgccagtcaggagctcggcttcagaccacgggtgcggccactggctctccggggctcagccgcaatgactggaaaactgagcccccgggctaggaaagagtag

SEQ ID NO: 189803 - DNA, 1488 bp, Artificial Sequence
  derived and/or modified sequence
atgccacagcttctccagaacattaatggtatcatcgaagccttcagacgttacgccaggactgagggaaattgcaccgccttgactagaggggaattgaagagactgctggaacaggagttcgccgacgtcatcgttaaaccacacgatcctgccactgtcgacgaagtgttacgcctgctggatgaggatcataccggcacagtggagttcaaggagtttctcgtcctggtgttcaaagtcgcgcaggcctgtttcaagactctgtcggagagcgccgaaggagcttgcgggtcccaggagagcggcagcctacatagtggagcctcccaggagctgggtgaaggccagaggagtggcacagaagtgggcagggctggtaaaggccagcactacgaaggcagctcacaccggcagagtcagcaaggatctagagggcagaatagaccaggagtccagacacaggggcaagccactggctcagcttgggtctcgtcctacgaccgccaggccgaatcacagagtcaagaaagaatttccccgcagatccagttgagcggccagactgaacagactcagaaagccggtgagggaaagcggaaccagaccaccgagatgcggccagaacggcagccacagacaagggagcaagatagggctcaccagacaggagagactgtaaccggatccggcacacagacccaagcgggagctactcagactgtggagcaggattcaagccatcaaaccggaaggactagcaaacagactcaggaagcaaccaacgatcagaacagaggcaccgaaacacacggccagggcagatcccagacgagtcaagccgtcaccggtggacacgcccaaatccaggctggcacccatacccagacacccacccagaccgtcgagcaggacagcagtcaccagactggtagcacgtcaacccaaactcaggagtccacaaacggccagaatcgcggaactgagatccatggacagggtcgatcccaaacatcccaggctgtaaccggagggcacacacagatccaggccggaagccacacagagaccgttgaacaagatcggtcccagaccgtgtcccatggcggagcgcgtgaacaaggccagacccagactcagcctgggtccgggcagaggtggatgcaagtatctaatcccgaagcaggcgaaacagtccctggcggacaggcccagaccggggcttcaactgaaagcggaagacaggagtggtcctctacccaccccaggcgctgcgtcacagagggccagggagataggcagcctacagtggtaggcgaggaatgggtggatgatcattcccgggaaacggtaatccttcggctggaccagggcaatttacatactagtgtgtcttctgcccaggggcaggacgcggcacaaagcgaggaaaagcgcggtataaccgcacgtgaattgtactcatatttgaggtctaccaagccatag

SEQ ID NO: 189804 - DNA, 426 bp, Artificial Sequence
  derived and/or modified sequence
atgcctcagctccttcagaatatcaacggaataattgaggcattccggcgttacgccagaacggagggcaattgcacggctctgacaaggggcgagcttaaacgcttgctggaacaggagtttgcggatgtcatcgtgaaacctcatgacccggctacagtggacgaggtgcttcgattgttggatgaggaccatacaggcactgtagagtttaaggaatttctcgtgcttgtgttcaaagtggctcaggcatgtttcaagacactgagcgaatccgccgagggggcttgtggcagtcaagagtctggcagcctgcactctggagcatcacaggagctggggttcaggcccagagtgcgtcctctcgccttaaggggttctgctgcaatgaccggaaagttgtctcccagagcacggaaggagtag

SEQ ID NO: 189805 - DNA, 871 bp, Artificial Sequence
  derived and/or modified sequence
actcctcacaccacttaacagccacttgtttcatcccacctgggcattaggttgacttcaaagatgcctcagttactgcaaaacattaatgggatcatcgaggccttcaggcgctatgcaaggacggagggcaactgcacagcgctcacccgaggggagctgaaaagactcttggagcaagagtttgccgatgtgattgtgaaaccccacgatccagcaactgtggatgaggtcctgcgtctgctggatgaagaccacacagggactgtggaattcaaggaattcctggtcttagtgtttaaagttgcccaggcctgtttcaagacactgagcgagagtgctgagggagcctgcggctctcaagagtctggaagcctccactctggggcctcgcaggagctggggttcagacccagggtcaggccactggctctgcgtgggtcagcagctatgacaggcaagctgagtcccagagccaggaaagaataagcccgcagatacaactctctgggcagacagagcagacccagaaagctggagaaggcaagaggaatcagacaacagagatgaggccagagagacagccacagaccagggaacaggacagagcccaccagacaggtgagactgtgactggatctggaactcagacccaggcaggtgccacccagactgtggagcaggacagcagccaccagacaggaagaaccagcaagcagacacaggaggccaccaatgaccagaacagagggactgagacccacggtcaaggcaggagccagaccagccaggctgtgacaggaggacatgctcagatacaggcagggacacacacccagacacccacccagaccgtggagcaggacagcag

SEQ ID NO: 189806 - DNA, 1902 bp, Artificial Sequence
  derived and/or modified sequence
actcctcacaccacttaacagccacttgtttcatcccacctgggcattaggttgacttcaaagatgcctcagttactgcaaaacattaatgggatcatcgaggccttcaggcgctatgcaaggacggagggcaactgcacagcgctcacccgaggggagctgaaaagactcttggagcaagagtttgccgatgtgattgtgaaaccccacgatccagcaactgtggatgaggtcctgcgtctgctggatgaagaccacacagggactgtggaattcaaggaattcctggtcttagtgtttaaagttgcccaggcctgtttcaagacactgagcgagagtgctgagggagcctgcggctctcaagagtctggaagcctccactctggggcctcgcaggagctgggcgaaggacagagaagtggcactgaagtgggaagggcggggaaagggcagcattatgaggggagcagccacagacagagccagcagggttccagagggcagaacaggcctggggttcagacccagggtcaggccactggctctgcgtgggtcagcagctatgacaggcaagctgagtcccagagccaggaaagaataagcccgcagatacaactctctgggcagacagagcagacccagaaagctggagaaggcaagaggaatcagacaacagagatgaggccagagagacagccacagaccagggaacaggacagagcccaccagacaggtgagactgtgactggatctggaactcagacccaggcaggtgccacccagactgtggagcaggacagcagccaccagacaggaagaaccagcaagcagacacaggaggccaccaatgaccagaacagagggactgagacccacggtcaaggcaggagccagaccagccaggctgtgacaggaggacatgctcagatacaggcagggacacacacccagacacccacccagaccgtggagcaggacagcagccaccagacaggaagcaccagcacccagacacaggagtccaccaatggccagaacagagggactgagatccacggtcaaggcaggagccagaccagccaggctgtgacaggaggacacactcagatacaggcagggtcacacaccgagactgtggagcaggacagaagccaaactgtaagccacggaggggctagagaacagggacagacccagacgcagccaggcagtggtcaaagatggatgcaagtgagcaaccctgaggcaggagagacagtaccgggaggacaggcccagactggggcaagcactgagtcaggaaggcaggagtggagcagcactcacccaaggcgctgtgtgacagaagggcagggagacagacagcccacagtggttggtgaggaatgggttgatgaccactcaagggagacagtgatcctcaggctggaccagggcaacttgcataccagtgtttcctcagcacagggccaggatgcagcccagtcagaagagaagcgaggcatcacagctagagagctgtattcctacttgagaagcaccaagccatgacttccccgactccaatgtccagtactggaagaagacagctggagagagtttggcttgtcctgcatggccaatccagtgggtgcatccctggacatcagctcttcattatgcagcttcccttttaggtctttctcaatgagataatttctgcaaggagctttctatcctgaactcttctttcttacctgctttgcggtgcagaccctctcaggagcaggaagactcagagcaagtcacccctttgtactgaattgtcctcatcttgtggggggtttcaggactatttttatctctgacatctctctattgccccatctaccctaatgcatcaataaaaccttaagccactgg

SEQ ID NO: 189807 - DNA, 1488 bp, Artificial Sequence
  derived and/or modified sequence
atgccccagctgctgcagaacatcaacggcatcatcgaggccttcagaagatacgccagaaccgagggcaactgcaccgccctgaccagaggcgagctgaagagactgctggagcaggagttcgccgacgtgatcgtgaagccccacgaccccgccaccgtggacgaggtgctgagactgctggacgaggaccacaccggcaccgtggagttcaaggagttcctggtgctggtgttcaaggtggcccaggcctgcttcaagaccctgagcgagagcgccgagggcgcctgcggcagccaggagagcggcagcctgcacagcggcgccagccaggagctgggcgagggccagagaagcggcaccgaggtgggcagagccggcaagggccagcactacgagggcagcagccacagacagagccagcagggcagcagaggccagaacagacccggcgtgcagacccagggccaggccaccggcagcgcctgggtgagcagctacgacagacaggccgagagccagagccaggagagaatcagcccccagatccagctgagcggccagaccgagcagacccagaaggccggcgagggcaagagaaaccagaccaccgagatgagacccgagagacagccccagaccagagagcaggacagagcccaccagaccggcgagaccgtgaccggcagcggcacccagacccaggccggcgccacccagaccgtggagcaggacagcagccaccagaccggcagaaccagcaagcagacccaggaggccaccaacgaccagaacagaggcaccgagacccacggccagggcagaagccagaccagccaggccgtgaccggcggccacgcccagatccaggccggcacccacacccagacccccacccagaccgtggagcaggacagcagccaccagaccggcagcaccagcacccagacccaggagagcaccaacggccagaacagaggcaccgagatccacggccagggcagaagccagaccagccaggccgtgaccggcggccacacccagatccaggccggcagccacaccgagaccgtggagcaggacagaagccagaccgtgagccacggcggcgccagagagcagggccagacccagacccagcccggcagcggccagagatggatgcaggtgagcaaccccgaggccggcgagaccgtgcccggcggccaggcccagaccggcgccagcaccgagagcggcagacaggagtggagcagcacccaccccagaagatgcgtgaccgagggccagggcgacagacagcccaccgtggtgggcgaggagtgggtggacgaccacagcagagagaccgtgatcctgagactggaccagggcaacctgcacaccagcgtgagcagcgcccagggccaggacgccgcccagagcgaggagaagagaggcatcaccgccagagagctgtacagctacctgagaagcaccaagccctag

SEQ ID NO: 189808 - protein, 374 aa, Artificial Sequence
  derived and/or modified sequence
MVLWESPRQCSSWTLCEGFCWLLLLPVMLLIVARPVKLAAFPTSLSDCQTPTGWNCSGYDDRENDLFLCDTNTCKFDGECLRIGDTVTCVCQFKCNNDYVPVCGSNGESYQNECYLRQAACKQQSEILVVSEGSCATDAGSGSGDGVHEGSGETSQKETSTCDICQFGAECDEDAEDVWCVCNIDCSQTNFNPLCASDGKSYDNACQIKEASCQKQEKIEVMSLGRCQDNTTTTTKSEDGHYARTDYAENANKLEESAREHHIPCPEHYNGFCMHGKCEHSINMQEPSCRCDAGYTGQHCEKKDYSVLYVVPGPVRFQYVLIAAVIGTIQIAVICVVVLCITRKCPRSNRIHRQKQNTGHYSSDNTTRASTRLI

SEQ ID NO: 189809 - DNA, 1125 bp, Artificial Sequence
  derived and/or modified sequence
atggtgctgtgggagagccccagacagtgcagcagctggaccctgtgcgagggcttctgctggctgctgctgctgcccgtgatgctgctgatcgtggccagacccgtgaagctggccgccttccccaccagcctgagcgactgccagacccccaccggctggaactgcagcggctacgacgacagagagaacgacctgttcctgtgcgacaccaacacctgcaagttcgacggcgagtgcctgagaatcggcgacaccgtgacctgcgtgtgccagttcaagtgcaacaacgactacgtgcccgtgtgcggcagcaacggcgagagctaccagaacgagtgctacctgagacaggccgcctgcaagcagcagagcgagatcctggtggtgagcgagggcagctgcgccaccgacgccggcagcggcagcggcgacggcgtgcacgagggcagcggcgagaccagccagaaggagaccagcacctgcgacatctgccagttcggcgccgagtgcgacgaggacgccgaggacgtgtggtgcgtgtgcaacatcgactgcagccagaccaacttcaaccccctgtgcgccagcgacggcaagagctacgacaacgcctgccagatcaaggaggccagctgccagaagcaggagaagatcgaggtgatgagcctgggcagatgccaggacaacaccaccaccaccaccaagagcgaggacggccactacgccagaaccgactacgccgagaacgccaacaagctggaggagagcgccagagagcaccacatcccctgccccgagcactacaacggcttctgcatgcacggcaagtgcgagcacagcatcaacatgcaggagcccagctgcagatgcgacgccggctacaccggccagcactgcgagaagaaggactacagcgtgctgtacgtggtgcccggccccgtgagattccagtacgtgctgatcgccgccgtgatcggcaccatccagatcgccgtgatctgcgtggtggtgctgtgcatcaccagaaagtgccccagaagcaacagaatccacagacagaagcagaacaccggccactacagcagcgacaacaccaccagagccagcaccagactgatctag

SEQ ID NO: 189810 - DNA, 1125 bp, Artificial Sequence
  derived and/or modified sequence
atggtgctttgggaatccccgagacagtgttcctcctggaccctctgcgaggggttctgctggctcctgctccttcccgtgatgctcctgatcgtggcgcggccagttaagctggcggctttccctacctcgcttagtgactgccagacacccacgggttggaattgtagcggttatgacgatagagaaaatgacctgttcctttgtgacactaacacctgcaaatttgacggcgaatgccttcgaattggggacacagtaacatgcgtgtgtcagttcaaatgcaacaatgactacgtgccggtgtgtgggagcaatggggagtcctaccaaaatgaatgttacttgcgccaagcggcgtgtaaacaacagtctgagattctggtcgtatccgagggcagctgtgccaccgatgccggctcaggttcaggcgatggagttcacgagggcagcggcgagacttctcagaaagagacgtcaacctgcgacatttgccagttcggcgcagagtgtgatgaggatgcagaggacgtctggtgtgtgtgcaatattgattgcagtcagactaattttaaccccctgtgtgcctctgatggcaagtcttatgataatgcctgtcagattaaagaggcctcctgccagaaacaagaaaagattgaggtgatgtcactcggcaggtgccaggacaacaccaccactactaccaagtccgaggatgggcattacgcccgtacagactatgcagaaaacgcgaataagttagaggagagcgcccgcgaacaccacattccgtgcccagaacactacaacggcttttgtatgcacgggaaatgcgagcatagtatcaacatgcaggagccctcgtgtcggtgtgacgcaggctacacagggcagcactgcgagaaaaaagattattccgtgctatacgtagtgccgggccccgtaagatttcagtatgttctgattgcggcagttattgggaccattcagattgccgtcatatgcgtcgtggtcttatgcataaccagaaagtgccccaggtctaacaggatacaccgccagaaacagaataccgggcactattcatcggataacacaacaagagcgtccacgcggctaatctag

SEQ ID NO: 189811 - DNA, 1125 bp, Artificial Sequence
  derived and/or modified sequence
atggtgctgtgggagagcccccggcagtgcagctcctggaccctgtgtgagggcttctgctggctgctgctgctgcctgtgatgctgctgattgtggcccggcctgtgaagctggccgccttccccaccagcctgagtgactgccagacccccaccggctggaactgcagcggctatgatgacagagaaaatgacctcttcctgtgtgacaccaacacctgcaagtttgatggagaatgtctgagaattggagacacagtgacctgtgtgtgccagttcaagtgcaacaatgactatgtgcctgtgtgtggcagcaatggagagagctaccagaatgaatgctacctgcggcaggccgcctgcaagcagcagagcgagatcctggtggtgtctgagggcagctgtgccacagatgctggcagcggcagcggagatggagtgcatgagggcagcggggagaccagccagaaggagaccagcacctgtgacatctgccagtttggagcagaatgtgatgaagatgctgaagatgtgtggtgtgtgtgcaacatcgactgcagccagaccaacttcaaccccctgtgtgccagtgatggcaagagctatgacaatgcctgccagatcaaggaggccagctgccagaagcaggagaagattgaggtgatgagcctgggccgctgccaggacaacaccaccaccaccaccaagtcagaagatggccactacgccaggacagattatgcagaaaatgccaacaagctggaggagagcgcccgggagcaccacatcccctgcccagagcactacaacggcttctgcatgcatggaaaatgtgagcacagcatcaacatgcaggagcccagctgccgctgtgatgctggctacacaggccagcactgtgagaagaaggactacagcgtgctgtatgtggtgcccggccctgtgcgcttccagtatgtgctgattgctgctgtgattggcaccatccagattgctgtgatctgtgtggtggtgctgtgcatcaccaggaagtgccccaggagcaaccgcatccaccggcagaagcagaacacaggccactacagcagtgacaacaccacccgggccagcaccaggctcatctag

SEQ ID NO: 189812 - DNA, 1125 bp, Artificial Sequence
  derived and/or modified sequence
atggtgctgtgggagagcccccggcagtgcagcagctggaccctgtgcgaaggattctgctggctgctgcttctgccagtgatgctgctcattgttgctcgtcctgtgaaactcgccgccttcccaacttctctgagcgactgccaaaccccaaccggctggaactgttctgggtacgacgatagggaaaacgatctattcctgtgcgacacaaacacctgtaaatttgacggagaatgcttgcgtattggagataccgtaacatgcgtgtgccagttcaaatgtaataacgactatgtgccagtgtgtgggtccaacggagaatcgtatcagaatgaatgttatctccgccaagccgcttgtaaacagcagagcgaaattctcgtggtctcagagggttcttgcgccacagacgcgggcagcggcagcggtgatggtgtgcacgaaggaagcggagagactagccaaaaagaaacctctacctgtgatatttgccagttcggtgcagagtgtgacgaagacgctgaggatgtctggtgcgtctgtaatatagattgttcccagaccaacttcaacccactgtgcgcttctgacgggaagtcatacgacaatgcctgccagatcaaggaagcatcttgccagaaacaggaaaagatcgaggtgatgagcctggggcgctgccaggacaataccaccaccactactaaatccgaagacgggcactatgccaggactgactacgctgaaaacgcgaacaagttggaagagtctgcccgggagcatcatatcccctgccccgaacactacaacggtttttgcatgcacgggaaatgcgagcacagcatcaacatgcaagagccatcatgtcgttgcgacgcaggttacacaggccagcactgcgagaaaaaagattattcggtcttgtacgtagtccctggcccagttcgctttcagtacgtattgattgccgcggtgattgggactatccaaatcgccgtcatttgcgttgtagtgttgtgcatcactcgcaagtgtccacgatctaatagaatccaccggcagaaacaaaacaccggccattactctagcgacaatactacacgcgcttccactcggctgatctag

SEQ ID NO: 189813 - DNA, 1125 bp, Artificial Sequence
  derived and/or modified sequence
atggtgctgtgggagtcacccaggcaatgtagcagctggactctgtgtgagggattctgttggttgcttctcctacctgtgatgctactgatcgttgcgagacctgtgaaactggctgcctttccaacaagtctgtccgattgccaaacaccaacaggctggaactgctctgggtacgacgacagagagaacgacctatttctctgtgacaccaacacatgcaaattcgatggcgagtgcctcaggatcggcgatactgtcacctgtgtgtgccaatttaagtgtaataacgattacgttcccgtgtgcggctcaaacggtgagtcataccagaacgagtgctatctacgtcaggccgcttgcaaacaacagtccgaaatcctcgtagtttccgagggtagctgcgcaacagacgcaggcagcggttccggagacggtgttcacgaggggtctggcgagacgagccaaaaggagacttccacctgcgacatttgccaattcggagccgagtgtgatgaggacgcggaggatgtctggtgtgtgtgtaacatcgattgtagccaaacaaacttcaatcccctgtgcgccagcgatgggaagtcatatgacaacgcctgtcagattaaggaggcgtcctgccaaaaacaggagaagatagaagtgatgagtttggggcgttgtcaagacaacactaccacaaccaccaagtctgaggatggccattatgccaggaccgattacgctgaaaacgctaacaagttggaggagtctgccagagagcaccatattccttgcccagaacattacaacggtttttgcatgcatgggaagtgcgaacacagcatcaacatgcaggaaccatcctgtcgatgcgacgccggttacacaggccagcactgtgaaaagaaagactatagcgttctgtacgttgtcccgggacctgtaaggtttcagtacgtgctgatcgccgctgtaattggcactattcagatcgctgtcatctgtgtcgtggttctgtgtatcacccggaagtgtccacgctccaaccgcatacaccgccagaagcagaatacaggacactactcctcagataataccacacgagcttctacaaggctcatctag

SEQ ID NO: 189814 - DNA, 2604 bp, Artificial Sequence
  derived and/or modified sequence
aaacctgcgaacgcttgggctgggtcggagctgcggggggcctgggaggagagaggggagaagagagaaggaaggagagcgcctgccgggatggctgagctgcctcggcgagcagccttggggttgcacgctcttgtgggagatgctgctgttgcttccaggtcggcaagagcggttctaacaccatcgcctctcaccctctttcctgtaaatccctagagaaacgtccctggcctctccgccgcgacattcccagcctgcatccccctacagcctaggcggcgcgctcccgcacgctggagcgccggtcgccagcaggacgccctctcccgcgccgactcgcccctctctgccctgctgctgctgctcctctgacacctccgcccccaccatctccagctcggagagacgccacccagccgcggcccgcactcgcggcccggggtcacgcgcggaagaggggcgctagtccggaccccgccttcggtagggggcgtcctggagcggagagtgaggcgaatggtatatgagtgtgcgggtagcccaccctgaagcccgagcttctcatttgagccatccccgcctagccccactcgggccagcgcctggcgagcgagcccatctgtggcttccgcggccgcctcctccttgcatccttgcacctcctcgtcgacccctccctcccgggacctgcatcctgctccaccaatcagagcccgactgcctcttcccacgtgaccccgggcgggctgaggacctgctgcttcccaaacgccagagggatgcgggcggcagagctcgagaggcggctgccgggctgcggggcgccttgactctccctccaccctgcctcctcgggctccactcgtctgcccctggactcccgtctcctcctgtcctccggcttcccagagctccctccttatggcagcagcttcccgcgtctccggcgcagcttctcagcggacgaccctctcgctccggggctgagcccagtccctggatgttgctgaaactctcgagatcatgcgcgggtttggctgctgcttccccgccgggtgccactgccaccgccgccgcctctgctgccgccgtccgcgggatgctcagtagcccgctgcccggcccccgcgatcctgtgttcctcggaagccgtttgctgctgcagagttgcacgaactagtcatggtgctgtgggagtccccgcggcagtgcagcagctggacactttgcgagggcttttgctggctgctgctgctgcccgtcatgctactcatcgtagcccgcccggtgaagctcgctgctttccctacctccttaagtgactgccaaacgcccaccggctggaattgctctggttatgatgacagagaaaatgatctcttcctctgtgacaccaacacctgtaaatttgatggggaatgtttaagaattggagacactgtgacttgcgtctgtcagttcaagtgcaacaatgactatgtgcctgtgtgtggctccaatggggagagctaccagaatgagtgttacctgcgacaggctgcatgcaaacagcagagtgagatacttgtggtgtcagaaggatcatgtgccacagatgcaggatcaggatctggagatggagtccatgaaggctctggagaaactagtcaaaaggagacatccacctgtgatatttgccagtttggtgcagaatgtgacgaagatgccgaggatgtctggtgtgtgtgtaatattgactgttctcaaaccaacttcaatcccctctgcgcttctgatgggaaatcttatgataatgcatgccaaatcaaagaagcatcgtgtcagaaacaggagaaaattgaagtcatgtctttgggtcgatgtcaagataacacaactacaactactaagtctgaagatgggcattatgcaagaacagattatgcagagaatgctaacaaattagaagaaagtgccagagaacaccacataccttgtccggaacattacaatggcttctgcatgcatgggaagtgtgagcattctatcaatatgcaggagccatcttgcaggtgtgatgctggttatactggacaacactgtgaaaaaaaggactacagtgttctatacgttgttcccggtcctgtacgatttcagtatgtcttaatcgcagctgtgattggaacaattcagattgctgtcatctgtgtggtggtcctctgcatcacaaggaaatgccccagaagcaacagaattcacagacagaagcaaaatacagggcactacagttcagacaatacaacaagagcgtccacgaggttaatctaaagggagcatgtttcacagtggctggactaccgagagcttggactacacaatacagtattatagacaaaagaataagacaagagatctacacatgttgccttgcatttgtggtaatctacaccaatgaaaacatgtactacagctatatttgattatgtatggatatatttgaaatagtatacattgtcttgatgttttttctgtaatgtaaataaactatttatatcacacaatatagttttttctttcccatgtatttgttatatataataaatactcagtgatgagaaaaaa

SEQ ID NO: 189815 - protein, 395 aa, Artificial Sequence
  derived and/or modified sequence
MCDQTFLVNVFGSCDKCFKQRALRPVFKKSQQLSYCSTCAEIMATEGLHENETLASLKSEAESLKGKLEEERAKLHDVELHQVAERVEALGQFVMKTRRTLKGHGNKVLCMDWCKDKRRIVSSSQDGKVIVWDSFTTNKEHAVTMPCTWVMACAYAPSGCAIACGGLDNKCSVYPLTFDKNENMAAKKKSVAMHTNYLSACSFTNSDMQILTASGDGTCALWDVESGQLLQSFHGHGADVLCLDLAPSETGNTFVSGGCDKKAMVWDMRSGQCVQAFETHESDINSVRYYPSGDAFASGSDDATCRLYDLRADREVAIYSKESIIFGASSVDFSLSGRLLFAGYNDYTINVWDVLKGSRVSILFGHENRVSTLRVSPDGTAFCSGSWDHTLRVWA

SEQ ID NO: 189816 - protein, 353 aa, Artificial Sequence
  derived and/or modified sequence
MATEGLHENETLASLKSEAESLKGKLEEERAKLHDVELHQVAERVEALGQFVMKTRRTLKGHGNKVLCMDWCKDKRRIVSSSQDGKVIVWDSFTTNKEHAVTMPCTWVMACAYAPSGCAIACGGLDNKCSVYPLTFDKNENMAAKKKSVAMHTNYLSACSFTNSDMQILTASGDGTCALWDVESGQLLQSFHGHGADVLCLDLAPSETGNTFVSGGCDKKAMVWDMRSGQCVQAFETHESDINSVRYYPSGDAFASGSDDATCRLYDLRADREVAIYSKESIIFGASSVDFSLSGRLLFAGYNDYTINVWDVLKGSRVSILFGHENRVSTLRVSPDGTAFCSGSWDHTLRVWA

SEQ ID NO: 189817 - protein, 283 aa, Artificial Sequence
  derived and/or modified sequence
MATEGLHENETLASLKSEAESLKGKLEEERAKLHDVELHQVAERVEALGQFVMKTRRTLKGHGNKVLCMDWCKDKRRIVSSSQDGKVIVWDSFTTNKILTASGDGTCALWDVESGQLLQSFHGHGADVLCLDLAPSETGNTFVSGGCDKKAMVWDMRSGQCVQAFETHESDINSVRYYPSGDAFASGSDDATCRLYDLRADREVAIYSKESIIFGASSVDFSLSGRLLFAGYNDYTINVWDVLKGSRVSILFGHENRVSTLRVSPDGTAFCSGSWDHTLRVWA

SEQ ID NO: 189818 - protein, 193 aa, Artificial Sequence
  derived and/or modified sequence
MSKLLILILTASGDGTCALWDVESGQLLQSFHGHGADVLCLDLAPSETGNTFVSGGCDKKAMVWDMRSGQCVQAFETHESDINSVRYYPSGDAFASGSDDATCRLYDLRADREVAIYSKESIIFGASSVDFSLSGRLLFAGYNDYTINVWDVLKGSRVSILFGHENRVSTLRVSPDGTAFCSGSWDHTLRVWA

SEQ ID NO: 189819 - DNA, 1188 bp, Artificial Sequence
  derived and/or modified sequence
atgtgtgatcaaaccttcctggtgaatgttttcggtagttgcgataagtgcttcaagcagagagccttaagacctgtcttcaagaagtcacaacagcttagctactgttcgacatgtgctgagattatggcaacagagggcctgcatgagaacgaaaccttagccagtttgaaatcggaagcagagtccttaaaagggaagctggaggaggagagagctaagctgcatgatgtggaattgcatcaagtggcggagagagttgaggccctagggcagttcgtgatgaaaaccagacggactctgaagggccacggaaacaaggtcttgtgcatggactggtgcaaggataagcgccgcatagtatcatcttcccaggatggaaaagtgattgtctgggatagctttaccaccaacaaagaacacgcggttaccatgccctgtacctgggtcatggcttgcgcctacgccccctccggctgtgccattgcttgcggagggttggataataagtgttccgtatatcccctgacttttgataagaatgagaatatggccgccaagaaaaaatctgtggccatgcacaccaattatctgagtgcatgttcctttaccaattctgatatgcagattctgactgccagcggcgatgggacctgcgccctctgggatgttgagagcggtcaacttctccagagttttcacggacatggagcggatgtgctttgtctagatctggcccctagtgaaaccggaaatacattcgtgagtgggggttgtgataagaaggccatggtttgggacatgcgcagcgggcagtgtgtgcaggcttttgaaacccacgagtctgatatcaactcagtgcgctactatccaagtggagatgccttcgccagcggatccgacgatgccacttgcagattgtatgacctgagagccgatcgggaggttgccatctactcaaaagaatcaatcatttttggagcaagctcagtcgacttcagcctgtctggtcggttgctgttcgcaggctataatgattacacaattaatgtctgggatgtgttaaaggggtcccgggtcagcattctattcggccacgagaatcgggttagcacactgagggtgagcccagatggcaccgccttctgctcaggcagttgggatcacaccttgagggtatgggcttag

SEQ ID NO: 189820 - DNA, 3091 bp, Artificial Sequence
  derived and/or modified sequence
ctcacctctcaccatctgctctgtggctcccagtgctgactctggaagctttatcttgggtaaaagatgtgtgatcagacctttctcgttaatgtatttggctcatgtgacaaatgtttcaaacaacgagctctgagaccagttttcaagaagtctcaacaactcagctactgttcaacatgtgcagaaattatggcaaccgaggggctgcacgagaacgagacgctggcgtcgctgaagagcgaggccgagagcctcaagggcaagctggaggaggagcgagccaagctgcacgatgtggagctgcaccaggtggcggagcgggtggaggccctggggcagtttgtcatgaagaccagaaggaccctcaaaggccacgggaacaaagtcctgtgcatggactggtgcaaagataagaggaggatcgtgagctcgtcacaggatgggaaggtgatcgtgtgggattccttcaccacaaacaaggagcacgcggtcaccatgccctgcacgtgggtgatggcatgtgcttatgccccatcgggatgtgccattgcttgtggtggtttggataataagtgttctgtgtaccccttgacgtttgacaaaaatgaaaacatggctgccaaaaagaagtctgttgctatgcacaccaactacctgtcggcctgcagcttcaccaactctgacatgcagatcctgacagcgagcggcgatggcacatgtgccctgtgggacgtggagagcgggcagctgctgcagagcttccacggacatggggctgacgtcctctgcttggacctggccccctcagaaactggaaacaccttcgtgtctgggggatgtgacaagaaagccatggtgtgggacatgcgctccggccagtgcgtgcaggcctttgaaacacatgaatctgacatcaacagtgtccggtactaccccagtggagatgcctttgcttcagggtcagatgacgctacgtgtcgcctctatgacctgcgggcagatagggaggttgccatctattccaaagaaagcatcatatttggagcatccagcgtggacttctccctcagtggtcgcctgctgtttgctggatacaatgattacactatcaacgtctgggatgttctcaaagggtcccgggtctccatcctgtttggacatgaaaaccgcgttagcactctacgagtttcccccgatgggactgctttctgctctggatcatgggatcataccctcagagtctgggcctaatcatcttctgacagtgcactcatgtatacctgagaatttgaaatcttcacatgtaaatagatattacttctagaggagcttagagtttattgcagtgtagcttaggggagcaacccatggctcacaggtcactaagcgtctccaatatgactattaaaactgtcacctctggaaatacactagtgtgagccttcagcactgcgagaataccttcaagtacagtatttttcttttggaacactttttaaaatgtatctgtttttaaggttattctaaattatagtagcctcaactcattctgtcaccagtagaattcagcagttaatatattccatattatttctttgaatcaattcattttcagagcactttaaagtctgatatttctcgatgtgcactgtgatgcctggaaccttcctctggaagtgctgattttatggactgaggactggtgactggtctgtgatagaagcaaattccaattccaaatgtaattagacaaaaatcatttttttagaatgtgtttttattgtaaaagtatctttttcagcttcctgttctattgtcttttttcagatacaacatttttgtctatggtgaactgctgtaaatgacgcagagaaatgcctaaaaaggacaggtggtttgactcatggatgatgatgatgtcactgtgccacttggacagggcgttttctctgaattgaagggaaagccaatggtgtttgtaaacaaatgcttctgagagcaaagaaaagtcttctgtgtgggaacacaagatagtaaacttatttaaaaacctattagtagaattagtggaaacacttaggttaaagtgaatcttgtccatataaattatattcatggccgggcgcggtggctcacgcttgtaatcccagcactttgggaggccgaggcgggcggatcacgaggtcaggagttcgagaccacggtgaaaccctgtctctactaaaaaatacaaaaaattagccgggcgtggtggcgggcgcctgtagtcccagctactcggagaggctgaggcaggagaatggcgtgaacccgggaggtggagcttgcagtgagccgaggtcgagccactgcagcctgggtgacaaagcgagactccgtctcaaaaaaaaaaaaaaattatattcatatgtattgcattgcaattataattacatatgcagattgattgatagtcatgaataataacgtctgctcctcttacatagaaaaacgatattaaaagaagatcttctctttatttgagactcagaattccttctagaagaaggaagtgctttttgttataggatcccttcttttcctttttttgtttttttgtaagatgtagatgcttattctttgctttagaaaacttctcacttaaaaagatggcatgcacctaggggaataaaaggtcacctcagacaccaggtgtcattcctggtgaggcctgcctcgtcggtggcctggggtctgccggcaggttctggctgcacctgaaggctgcgtgcaccttgtcccctggacaggtctcctttcctggccctgctccagcccagcccttcttctagtggtagctctggctttgcaggcccagctccaggccctgctcctcagagagactcttccagagctggagctgggcacagccataagacaggactggaccagatgctcctgtaaacatccaggggtgtgccaggcccaccctcacaactgcttgttcaggtatcgtgatgggccactcggtccaaaatcagccaggccatcttttccatcatctcacttcaaataaacataataattatatttgatcatttgcagagca

SEQ ID NO: 189821 - DNA, 1188 bp, Artificial Sequence
  derived and/or modified sequence
atgtgtgaccagaccttcctggtgaatgtgtttggcagctgtgacaagtgcttcaagcagagggccctgcggcctgtgttcaagaagagccagcagctgagctactgcagcacctgtgccgagatcatggccacagagggcctgcatgaaaatgagaccctggccagcctgaagtctgaggccgagagcctgaagggcaagctggaggaggagcgggccaagctgcatgatgtggagctgcaccaggtggccgagcgggtggaggccctgggccagtttgtgatgaagaccaggaggaccctgaagggccacggcaacaaggtgctgtgcatggactggtgcaaggacaagaggcgcatcgtgagcagcagccaggacggcaaggtgattgtgtgggacagcttcaccaccaacaaggagcacgctgtgaccatgccctgcacctgggtgatggcctgtgcctatgcccccagcggctgtgccatcgcctgtggcggcctggacaacaagtgcagcgtgtaccccctgacctttgacaagaatgaaaacatggccgccaagaagaagtctgtggccatgcacaccaactacctgagcgcctgcagcttcaccaacagcgacatgcagatcctgacagccagcggagatggcacctgtgccctgtgggatgtggagagcggccagctgctgcagagcttccacggccacggggctgatgtgctgtgcctggacctggcccccagcgagaccggcaacacctttgtgtctgggggctgtgacaagaaggccatggtgtgggacatgaggagcggccagtgtgtgcaggcctttgagacccatgaaagtgacatcaacagcgtgcgctactaccccagcggagatgcctttgccagcggcagtgatgatgccacctgccgcctgtatgacctgcgggctgaccgggaggtggccatctacagcaaggagagcatcatctttggagccagctctgtggacttcagcctgagcggccgcctgctgtttgctggctacaatgactacaccatcaacgtgtgggatgtgctgaagggcagccgggtgtccatcctgtttggacatgaaaatagagtgtccaccctgcgggtgtccccagatggaacagccttctgcagcggctcctgggaccacaccctgcgggtgtgggcctag

SEQ ID NO: 189822 - DNA, 1188 bp, Artificial Sequence
  derived and/or modified sequence
atgtgcgaccagaccttcctggtgaacgtgttcggcagctgcgacaagtgcttcaagcagagggcactccgacccgtgttcaagaagagccaacagctgtcatactgctccacctgcgctgaaattatggcaacagaaggactccatgaaaatgaaactttggcaagcctaaagtctgaagcagagagcctgaagggcaagctggaagaggaacgggccaaactgcacgatgtggagcttcaccaggttgccgagagggtagaagcattgggccagtttgtgatgaagacgaggcggaccttgaaggggcacggtaacaaagtgctgtgcatggactggtgtaaggacaaacgacggatcgtttcaagctcccaggacggcaaagttatcgtgtgggactcattcactaccaacaaggagcatgcggtgactatgccttgcacttgggttatggcatgcgcttacgccccctccggctgcgcaattgcctgcgggggtttggataataaatgcagcgtttaccctctgaccttcgataaaaacgagaacatggccgcaaaaaaaaagtccgtcgctatgcacactaactatctgtcagcttgctcctttactaactctgacatgcagatcctgactgctagtggggacggtacatgtgcactctgggatgtcgaaagtggccagttgctccagtcatttcatggacacggggctgatgtgctgtgcctggacctggcacctagtgaaactggcaacactttcgtttcaggaggctgtgataagaaggccatggtttgggatatgcgctctgggcaatgcgtgcaggcattcgaaacccacgagagcgacattaattccgttcgttactatcctagcggcgacgctttcgcgagcggaagtgacgacgccacctgccggttgtatgacctgcgcgctgatcgggaggttgccatctattcaaaggaatctatcatatttggcgcttcgagcgtcgacttctctctaagtgggagattactgttcgctgggtataatgactataccattaacgtgtgggatgtgctcaagggctcacgtgtctctatcctcttcgggcatgagaaccgagtcagcacattaagggtatctcctgacggaactgccttctgctcgggcagctgggatcacacactccgagtgtgggcctag

SEQ ID NO: 189823 - DNA, 1188 bp, Artificial Sequence
  derived and/or modified sequence
atgtgcgaccagactttcttagtgaacgtatttggttcttgcgacaaatgctttaagcagcgggctttacggcctgttttcaagaaatcccagcagctctcatattgtagcacgtgcgctgaaatcatggccaccgaaggactgcacgaaaatgagacgctggcgagcctgaagtcagaggcggagtccctgaagggaaaactggaagaagagcgtgcaaaattacacgacgtcgaactgcaccaggtagcggagcgcgttgaggcccttggacagtttgttatgaagactcgacgcacgcttaagggacacggcaataaggtattgtgcatggattggtgcaaagataagcggaggatcgtgtcttcctcccaggatgggaaagtcatagtttgggactctttcacaacaaacaaagaacatgcggtaaccatgccatgcacttgggtgatggcgtgcgcctatgcaccgagcgggtgtgcgattgcatgcggaggactcgataacaaatgctcggtctaccctctgaccttcgacaaaaacgagaacatggccgcaaaaaagaagtcagtggcaatgcatactaactacctttcagcctgcagctttactaatagcgatatgcagattttgacggcatctggcgacggcacctgcgccctgtgggacgtggagagcggccagctgctgcagtctttccacgggcacggagcagacgtgctttgcctcgatcttgctcccagcgagacgggaaatacgtttgtgtccgggggatgcgataagaaggctatggtgtgggacatgcgcagcggccagtgcgtccaggctttcgagacgcacgaaagtgacatcaactccgtccggtactacccatccggggacgctttcgcatcaggctcggacgatgcaacatgccggctgtatgacctgagggctgatagggaggtggccatctactccaaggagtctatcatcttcggcgcttccagcgttgatttctcactgtccggaaggctcctgttcgccggttacaatgattacaccatcaacgtgtgggatgttctgaagggttcgcgggttagcatactctttggacatgagaacagagtgagtactctgcgggtgtcccccgacggcaccgcattctgcagcgggagttgggaccacacactgcgggtgtgggcctag

SEQ ID NO: 189824 - DNA, 1188 bp, Artificial Sequence
  derived and/or modified sequence
atgtgcgaccagaccttcctggtgaacgtgttcggcagctgcgacaagtgcttcaagcagagagccctgagacccgtgttcaagaagagccagcagctgagctactgcagcacctgcgccgagatcatggccaccgagggcctgcacgagaacgagaccctggccagcctgaagagcgaggccgagagcctgaagggcaagctggaggaggagagagccaagctgcacgacgtggagctgcaccaggtggccgagagagtggaggccctgggccagttcgtgatgaagaccagaagaaccctgaagggccacggcaacaaggtgctgtgcatggactggtgcaaggacaagagaagaatcgtgagcagcagccaggacggcaaggtgatcgtgtgggacagcttcaccaccaacaaggagcacgccgtgaccatgccctgcacctgggtgatggcctgcgcctacgcccccagcggctgcgccatcgcctgcggcggcctggacaacaagtgcagcgtgtaccccctgaccttcgacaagaacgagaacatggccgccaagaagaagagcgtggccatgcacaccaactacctgagcgcctgcagcttcaccaacagcgacatgcagatcctgaccgccagcggcgacggcacctgcgccctgtgggacgtggagagcggccagctgctgcagagcttccacggccacggcgccgacgtgctgtgcctggacctggcccccagcgagaccggcaacaccttcgtgagcggcggctgcgacaagaaggccatggtgtgggacatgagaagcggccagtgcgtgcaggccttcgagacccacgagagcgacatcaacagcgtgagatactaccccagcggcgacgccttcgccagcggcagcgacgacgccacctgcagactgtacgacctgagagccgacagagaggtggccatctacagcaaggagagcatcatcttcggcgccagcagcgtggacttcagcctgagcggcagactgctgttcgccggctacaacgactacaccatcaacgtgtgggacgtgctgaagggcagcagagtgagcatcctgttcggccacgagaacagagtgagcaccctgagagtgagccccgacggcaccgccttctgcagcggcagctgggaccacaccctgagagtgtgggcctag

SEQ ID NO: 189825 - protein, 1780 aa, Artificial Sequence
  derived and/or modified sequence
MESNFNQEGVPRPSYVFSADPIARPSEINFDGIKLDLSHEFSLVAPNTEANSFESKDYLQVCLRIRPFTQSEKELESEGCVHILDSQTVVLKEPQCILGRLSEKSSGQMAQKFSFSKVFGPATTQKEFFQGCIMQPVKDLLKGQSRLIFTYGLTNSGKTYTFQGTEENIGILPRTLNVLFDSLQERLYTKMNLKPHRSREYLRLSSEQEKEEIASKSALLRQIKEVTVHNDSDDTLYGSLTNSLNISEFEESIKDYEQANLNMANSIKFSVWVSFFEIYNEYIYDLFVPVSSKFQKRKMLRLSQDVKGYSFIKDLQWIQVSDSKEAYRLLKLGIKHQSVAFTKLNNASSRSHSIFTVKILQIEDSEMSRVIRVSELSLCDLAGSERTMKTQNEGERLRETGNINTSLLTLGKCINVLKNSEKSKFQQHVPFRESKLTHYFQSFFNGKGKICMIVNISQCYLAYDETLNVLKFSAIAQKVCVPDTLNSSQEKLFGPVKSSQDVSLDSNSNSKILNVKRATISWENSLEDLMEDEDLVEELENAEETQNVETKLLDEDLDKTLEENKAFISHEEKRKLLDLIEDLKKKLINEKKEKLTLEFKIREEVTQEFTQYWAQREADFKETLLQEREILEENAERRLAIFKDLVGKCDTREEAAKDICATKVETEEATACLELKFNQIKAELAKTKGELIKTKEELKKRENESDSLIQELETSNKKIITQNQRIKELINIIDQKEDTINEFQNLKSHMENTFKCNDKADTSSLIINNKLICNETVEVPKDSKSKICSERKRVNENELQQDEPPAKKGSIHVSSAITEDQKKSEEVRPNIAEIEDIRVLQENNEGLRAFLLTIENELKNEKEEKAELNKQIVHFQQELSLSEKKNLTLSKEVQQIQSNYDIAIAELHVQKSKNQEQEEKIMKLSNEIETATRSITNNVSQIKLMHTKIDELRTLDSVSQISNIDLLNLRDLSNGSEEDNLPNTQLDLLGNDYLVSKQVKEYRIQEPNRENSFHSSIEAIWEECKEIVKASSKKSHQIEELEQQIEKLQAEVKGYKDENNRLKEKEHKNQDDLLKEKETLIQQLKEELQEKNVTLDVQIQHVVEGKRALSELTQGVTCYKAKIKELETILETQKVECSHSAKLEQDILEKESIILKLERNLKEFQEHLQDSVKNTKDLNVKELKLKEEITQLTNNLQDMKHLLQLKEEEEETNRQETEKLKEELSASSARTQNLKADLQRKEEDYADLKEKLTDAKKQIKQVQKEVSVMRDEDKLLRIKINELEKKKNQCSQELDMKQRTIQQLKEQLNNQKVEEAIQQYERACKDLNVKEKIIEDMRMTLEEQEQTQVEQDQVLEAKLEEVERLATELEKWKEKCNDLETKNNQRSNKEHENNTDVLGKLTNLQDELQESEQKYNADRKKWLEEKMMLITQAKEAENIRNKEMKKYAEDRERFFKQQNEMEILTAQLTEKDSDLQKWREERDQLVAALEIQLKALISSNVQKDNEIEQLKRIISETSKIETQIMDIKPKRISSADPDKLQTEPLSTSFEISRNKIEDGSVVLDSCEVSTENDQSTRFPKPELEIQFTPLQPNKMAVKHPGCTTPVTVKIPKARKRKSNEMEEDLVKCENKKNATPRTNLKFPISDDRNSSVKKEQKVAIRPSSKKTYSLRSQASIIGVNLATKKKEGTLQKFGDFLQHSPSILQSKAKKIIETMSSSKLSNVEASKENVSQPKRAKRKLYTSEISSPIDISGQVILMDQKMKESDHQIIKRRLRTKTAK

SEQ ID NO: 189826 - protein, 341 aa, Artificial Sequence
  derived and/or modified sequence
MESNFNQEGVPRPSYVFSADPIARPSEINFDGIKLDLSHEFSLVAPNTEANSFESKDYLQVCLRIRPFTQSEKELESEGCVHILDSQTVVLKEPQCILGRLSEKSSGQMAQKFSFSKVFGPATTQKEFFQGCIMQPVKDLLKGQSRLIFTYGLTNSGKTYTFQGTEENIGILPRTLNVLFDSLQERLYTKMNLKPHRSREYLRLSSEQEKEEIASKSALLRQIKEVTVHNDSDDTLYGSLTNSLNISEFEESIKDYEQANLNMANSIKFSVWVSFFEIYNEYIYDLFVPELAKTKGELIKTKEELKKRENESDSLIQELETSNKKIITQNQRIKELINIID

SEQ ID NO: 189827 - protein, 206 aa, Artificial Sequence
  derived and/or modified sequence
MESNFNQEGVPRPSYVFSADPIARPSEINFDGIKLDLSHEFSLVAPNTEANSFESKDYLQVCLRIRPFTQSEKELESEGCVHILDSQTVVLKEPQCILGRLSEKSSGQMAQKFSFSKVFGPATTQKEFFQGCIMQPVKDLLKGQSRLIFTYGLTNSGKTYTFQGTEENIGILPRTLNVLFDSLQERLYTKMNLKPHRSREYLRLSS

SEQ ID NO: 189828 - DNA, 1026 bp, Artificial Sequence
  derived and/or modified sequence
atggagagcaacttcaaccaggagggcgtgcccagacccagctacgtgttcagcgccgaccccatcgccagacccagcgagatcaacttcgacggcatcaagctggacctgagccacgagttcagcctggtggcccccaacaccgaggccaacagcttcgagagcaaggactacctgcaggtgtgcctgagaatcagacccttcacccagagcgagaaggagctggagagcgagggctgcgtgcacatcctggacagccagaccgtggtgctgaaggagccccagtgcatcctgggcagactgagcgagaagagcagcggccagatggcccagaagttcagcttcagcaaggtgttcggccccgccaccacccagaaggagttcttccagggctgcatcatgcagcccgtgaaggacctgctgaagggccagagcagactgatcttcacctacggcctgaccaacagcggcaagacctacaccttccagggcaccgaggagaacatcggcatcctgcccagaaccctgaacgtgctgttcgacagcctgcaggagagactgtacaccaagatgaacctgaagccccacagaagcagagagtacctgagactgagcagcgagcaggagaaggaggagatcgccagcaagagcgccctgctgagacagatcaaggaggtgaccgtgcacaacgacagcgacgacaccctgtacggcagcctgaccaacagcctgaacatcagcgagttcgaggagagcatcaaggactacgagcaggccaacctgaacatggccaacagcatcaagttcagcgtgtgggtgagcttcttcgagatctacaacgagtacatctacgacctgttcgtgcccgagctggccaagaccaagggcgagctgatcaagaccaaggaggagctgaagaagagagagaacgagagcgacagcctgatccaggagctggagaccagcaacaagaagatcatcacccagaaccagagaatcaaggagctgatcaacatcatcgactag

SEQ ID NO: 189829 - DNA, 621 bp, Artificial Sequence
  derived and/or modified sequence
atggagagcaacttcaaccaggagggcgtgcccagacccagctacgtgttcagcgccgaccccatcgccagacccagcgagatcaacttcgacggcatcaagctggacctgagccacgagttcagcctggtggcccccaacaccgaggccaacagcttcgagagcaaggactacctgcaggtgtgcctgagaatcagacccttcacccagagcgagaaggagctggagagcgagggctgcgtgcacatcctggacagccagaccgtggtgctgaaggagccccagtgcatcctgggcagactgagcgagaagagcagcggccagatggcccagaagttcagcttcagcaaggtgttcggccccgccaccacccagaaggagttcttccagggctgcatcatgcagcccgtgaaggacctgctgaagggccagagcagactgatcttcacctacggcctgaccaacagcggcaagacctacaccttccagggcaccgaggagaacatcggcatcctgcccagaaccctgaacgtgctgttcgacagcctgcaggagagactgtacaccaagatgaacctgaagccccacagaagcagagagtacctgagactgagcagctag

SEQ ID NO: 189830 - DNA, 5343 bp, Artificial Sequence
  derived and/or modified sequence
atggaaagtaacttcaaccaagagggggtcccaagaccaagctacgttttcagtgccgacccaatcgcccgcccttcagaaataaatttcgatggcattaaactggacctgtcccacgagttttccctggtggccccaaacaccgaggccaactcttttgagagtaaggactacctgcaagtatgtttgaggatccgtccctttacccaatccgagaaagaattggaatcggagggatgtgttcacatcctcgatagccaaacggtcgttctgaaagagcctcagtgtattctgggtaggctgtctgagaaatctagcggtcagatggcccagaagttctcattttccaaggtcttcgggcccgccactactcaaaaggaatttttccagggctgtatcatgcagccggtcaaggatctgttaaagggccagagtagattaatcttcacatatggcctcactaatagtggaaagacctatacatttcagggcaccgaagaaaatattggcatcctgccaagaactttaaatgtgctgttcgactcattgcaggagagactctatacaaaaatgaacctcaaacctcaccgcagccgggagtacctccgcctttcctctgagcaagaaaaagaagaaatagcctccaaatcggcattgttgagacagatcaaggaggtcactgttcacaatgatagtgatgatacgctgtacggttcactaaccaattctctcaacatcagcgaattcgaagaatccataaaggactacgagcaagccaatttaaacatggccaattccatcaagttctccgtctgggtaagcttttttgaaatctataatgaatacatttacgacctgttcgtccccgtctccagtaaattccagaagcgcaagatgctgcggctgagtcaggacgttaagggctattccttcatcaaagacctacagtggatccaagtctccgatagcaaagaagcctaccggcttctcaaactgggtattaaacaccaaagtgtagccttcaccaagctgaataacgcttcaagccgcagtcatagcattttcacggtgaagatccttcaaatcgaagactcagagatgagcagagttatcagggtgagcgaactgtctttatgtgatctagcgggcagcgaacgtacaatgaaaactcagaacgaaggcgagagactccgggagacaggcaatataaataccagcctcttaacactcggcaaatgcatcaacgtgttgaagaacagcgagaagtctaagtttcaacagcacgtgccattccgcgagtcaaaacttacgcattattttcagagctttttcaacggaaagggcaagatttgcatgattgtaaatattagtcagtgttacctggcttatgacgaaacgttgaatgtgcttaagtttagtgccatcgctcagaaggtctgtgtgcctgacacactgaacagctcccaggaaaaactattcggcccagtgaaatcctctcaggacgtaagtttggactcgaacagcaactcaaagatcttgaacgtgaaacgggccacaatctcctgggagaatagcctggaggatctgatggaggatgaggatttagtcgaggagctcgaaaatgccgaagaaactcagaatgttgagaccaagcttctcgatgaagacttggataaaacgctggaggagaacaaggcttttatctcgcacgaggagaagagaaaattgctggacctcatcgaggatcttaagaagaaactgatcaacgagaagaaagagaagctgactttggaatttaaaattcgcgaagaagtgacacaggagttcacccagtattgggctcagagagaagccgatttcaaagaaacattattgcaggagcgcgagatcttggaagagaacgcggagcgacgcctcgcaatcttcaaggatctggtcgggaagtgcgacacaagagaggaggcagcgaaggacatttgcgccacaaaagtggagactgaggaggctactgcctgcctcgagttgaaatttaaccaaatcaaggccgagctggccaagacaaagggagagctgataaaaacgaaagaggagctgaagaaacgcgaaaacgagagcgattctctgatccaggagctggaaacatcaaataaaaagattattacacaaaatcaacgcatcaaagagttgatcaacataattgatcagaaggaggatactatcaacgaattccaaaacttgaagtcccacatggagaacaccttcaaatgtaatgataaggcagatactagctctctgataataaacaataaactgatctgtaatgaaactgtcgaggtgcccaaagacagcaagtcgaagatctgttccgaacgcaaaagagtcaatgagaatgagctccagcaagatgagccacctgcaaagaagggcagtatccacgtgagcagcgcgattactgaagaccagaaaaaatcagaggaggtccggcctaacattgccgaaatcgaagacatacgcgttttgcaggagaataacgaagggcttcgagcctttcttctaacaattgaaaacgagctgaagaacgaaaaagaggagaaagcagagctgaataaacagattgtgcatttccagcaggagctgtcacttagtgagaagaagaatctgacactctcaaaagaagttcagcaaattcagagcaattacgacatcgccatcgcggagctgcatgtccagaagtctaaaaatcaagaacaggaggagaaaatcatgaaattaagtaacgagatcgagaccgctacccggagtattactaataatgtaagccaaattaagcttatgcataccaaaatcgatgagctaagaacacttgactccgtcagccagatttctaatatagatctgctaaaccttagggacctctctaacggttcagaagaggataatctgccaaacactcagctggatctactggggaacgattacctcgtatccaagcaggttaaggaataccggattcaggagcccaaccgggaaaacagttttcactccagcattgaggctatttgggaagagtgtaaggaaattgtcaaagcatcgagtaagaagtctcaccagattgaagaattggagcagcaaatagaaaagctccaagctgaggtgaagggctacaaagacgagaataatagactaaaggagaaagagcataagaaccaggacgatctcctgaaagagaaggagactttaattcagcaacttaaggaggagcttcaggaaaagaatgttactctggatgtccagatccagcacgtggtggaggggaagcgagctctgagtgaactcactcagggggtgacatgctataaagcaaaaattaaggaattggagacgattctggagacccagaaggtggaatgtagccactcagcgaagttggaacaggacatcctggaaaaggagtcaattatcctcaaactggaacgtaacctgaaagagtttcaagagcacctgcaggatagcgtcaaaaatacgaaggatttaaacgtgaaggaactgaaactcaaagaggaaatcacccagctgaccaataatcttcaggacatgaagcatctcctccagctcaaagaggaggaggaggaaacaaacagacaggagacggagaaattaaaggaggaattaagcgcttcatctgctagaacacagaacctgaaagcggacctgcaacggaaagaagaagactacgccgatttaaaagagaaattaaccgacgctaaaaaacagatcaagcaggtccagaaggaggtgtctgttatgcgggacgaggataagcttctaaggataaagataaacgagctggaaaagaaaaagaaccagtgctcccaggagctcgacatgaagcagaggactattcagcagctcaaagagcagttgaacaaccaaaaagtagaggaggctatccagcaatacgagcgggcttgtaaggacctgaacgtaaaggagaagataatagaggacatgcgcatgactctcgaagaacaggaacagactcaggtagaacaagaccaggtgcttgaagccaaattagaggaagttgaacgactggcaaccgagctggagaaatggaaagagaagtgtaacgatttagaaacaaagaacaatcagcgcagcaataaggagcacgagaataatacggatgttctaggtaagcttaccaacctgcaggatgaactgcaggagtccgagcagaagtacaatgctgacagaaaaaaatggctggaggaaaaaatgatgctcataacccaggccaaggaagcagaaaacataagaaacaaggaaatgaaaaagtacgcggaggaccgcgagaggttcttcaagcaacagaatgagatggagattctcactgcccaactgactgagaaagactcagatctccaaaagtggagagaggagagggaccagctggtggccgcactggaaatccagcttaaggccctcattagttctaatgtccagaaagacaatgagatagagcagctgaagcgcataatttcggaaacatccaaaattgaaacccagattatggacatcaagcctaaaagaatctcaagtgcagacccagataaactgcagacagaaccgctgtccacgagctttgaaattagtaggaataagattgaagacgggagcgtcgtactcgactcctgcgaagtgtccacagaaaacgatcagagcacaagatttccgaaacccgaactggagatccagtttacccctctgcaaccgaataaaatggctgttaagcacccaggatgcactacccctgtaacagttaaaatccccaaggcccgcaaacgcaagtccaacgagatggaggaagacctggtcaaatgcgaaaataaaaaaaatgccacaccccggacaaatctgaagttcccaattagtgatgatcggaatagctcagtcaaaaaggaacagaaggtggcgatccgcccatcttcaaagaagacttatagtctgcgatcccaagcaagcattataggagtgaaccttgcaactaagaagaaggaagggacactgcagaaattcggggacttcctccagcacagcccctccatcttgcagtctaaggccaagaaaatcatagaaaccatgagcagctccaaattgtctaacgttgaagcctccaaggagaacgtatcacaaccaaaacgcgcaaaacgaaagctgtacaccagcgagatctcaagtcccatcgacatatctgggcaagtgattcttatggatcagaagatgaaggagtcagaccatcaaattatcaagcggcgccttagaacaaagaccgcgaagtag

SEQ ID NO: 189831 - DNA, 1026 bp, Artificial Sequence
  derived and/or modified sequence
atggaatcaaacttcaatcaagaaggtgtgccaaggccctcttatgtttttagtgcagacccaatcgctcgaccaagtgaaattaactttgatggtattaagctggatctcagtcatgaatttagcctggtcgcgccgaataccgaagccaactctttcgagagcaaagattatctgcaggtgtgtctcaggatacgccccttcacgcagagcgaaaaggagttagagtccgaggggtgtgtgcacattctggacagccagacagtggtgcttaaagaaccgcaatgtatacttgggagattgtccgagaagagcagcggccagatggcccagaagttcagctttagcaaggtgttcggcccagccaccactcagaaggaatttttccagggatgcattatgcaaccagttaaagacctacttaaggggcagagccgattgatttttacctatggattaaccaactctggaaaaacctacacatttcagggcacagaggaaaatataggtattttaccaaggaccctgaacgttctgttcgatagtctgcaggaacgcctctatacaaaaatgaatctgaaaccccacagaagccgcgagtatctgagactgtctagtgagcaggagaaagaggaaatcgcctcaaaaagtgcacttctcaggcagatcaaggaggtgactgtgcataacgactctgacgatacactgtacggttccctaacgaactcattaaacatctctgagtttgaagagtcgatcaaagactatgagcaagccaatctgaatatggccaattcaataaagttctctgtgtgggtatccttttttgagatctacaatgagtatatttatgatttatttgtgcctgaattggctaagacaaagggcgagttgattaagaccaaggaagaactgaaaaagcgcgaaaacgaatcggactccctcatacaagaacttgaaacctctaataaaaagattataacgcagaaccaacggatcaaagaattgattaacatcatagattag

SEQ ID NO: 189832 - DNA, 621 bp, Artificial Sequence
  derived and/or modified sequence
atggaaagcaattttaaccaagaaggcgtgccaaggccaagctatgttttttctgcagatcccattgcccggccatctgagatcaacttcgatgggatcaagctcgatctgtcccatgagttttctctcgttgcgcccaataccgaggctaactcctttgagtcgaaggactatttacaggtgtgccttcgcatccggccctttacccagtcagaaaaggagctggagtccgagggctgcgtgcacattctcgactctcagacagtggtcctgaaggaacctcaatgcatcctgggacgcctgagtgaaaaaagcagcggccaaatggcccaaaaattctctttctcaaaagttttcggccccgccaccactcagaaggaatttttccaagggtgtattatgcagcccgtcaaggatctcctcaaggggcagtcccggctgatctttacctacggactgacgaactctggcaaaacctacaccttccagggtactgaagagaacattgggatccttcctcgcaccctgaacgttctgttcgattctttgcaggaacgtctttatactaagatgaatctcaaaccacaccgtagtcgggagtatctccgtctcagttcttag

SEQ ID NO: 189833 - DNA, 5343 bp, Artificial Sequence
  derived and/or modified sequence
atggagagcaacttcaaccaggagggcgtgccccggcccagctatgtgttttctgctgaccccatcgcccggcccagcgagatcaactttgatggcatcaagctggacctgagccatgagttcagcctggtggcccccaacacagaggccaacagctttgagagcaaggactacctgcaggtgtgcctgcgcatccggcccttcacccagagcgagaaggagctggagagcgagggctgtgtgcacatcctggacagccagacagtggtgctgaaggagccccagtgcatcctgggccgcctgtctgagaagagcagcggccagatggcccagaagttctccttcagcaaggtgtttggacctgccaccacccagaaggagttcttccagggctgcatcatgcagcctgtgaaggacctgctgaagggccagagccgcctcatcttcacctacggcctgaccaacagcggcaagacctacaccttccagggcacagaagaaaatattggcatcctgcccaggaccctgaatgtgctgtttgacagcctgcaggagcggctgtacaccaagatgaacctgaagccccacaggagccgggagtacctgcggctgagcagcgagcaggagaaggaggagatcgccagcaagagcgccctgctgcggcagatcaaggaggtgacagtgcacaatgacagtgatgacaccctgtatggcagcctgaccaacagcctgaacatcagcgagtttgaggagagcatcaaggactatgagcaggccaacctgaacatggccaacagcatcaagttctctgtgtgggtgtccttctttgagatctacaatgagtacatctatgacctgtttgtgcctgtgagcagcaagttccagaagaggaagatgctgcggctgagccaggatgtgaagggctacagcttcatcaaggacctgcagtggatccaggtgtctgacagcaaggaggcctaccgcctgctgaagctgggcatcaagcaccagagcgtggccttcaccaagctgaacaatgccagcagccgcagccacagcatcttcaccgtgaagatcctgcagattgaagattctgagatgagcagggtcatccgggtgtctgagctgagcctgtgtgacctggccggcagcgagaggaccatgaagacccagaatgaaggagagcggctgcgggagaccggcaacatcaacaccagcctgctgaccctgggcaagtgcatcaacgtgctgaagaacagcgagaagagcaagttccagcagcacgtgcccttccgggagagcaagctgacccactacttccagagcttcttcaacgggaagggcaagatctgcatgattgtgaacatcagccagtgctacctggcctatgatgagaccctgaatgtgctgaagttcagcgccatcgcccagaaggtgtgtgtgcctgacaccctgaacagcagccaggagaagctgtttggacctgtgaagagcagccaggatgtgtccctggacagcaacagcaacagcaagatcctgaatgtgaagagggccaccatctcctgggagaacagcctggaggacctgatggaggatgaggacctggtggaggagctggagaatgctgaggagacccagaatgtggagaccaagctgctggatgaggacctggacaagaccctggaggagaacaaggccttcatcagccatgaggagaagaggaagctgctggacctgattgaggacctgaagaagaagctgatcaatgagaagaaggagaagctgaccctggagttcaagatccgggaggaggtgacccaggagttcacccagtactgggcccagcgggaggccgacttcaaggagaccctgctgcaggagcgggagatcctggaggagaatgctgagcggcggctggccatcttcaaggacctggtgggcaaatgtgacacccgggaggaggccgccaaggacatctgtgccaccaaggtggagacagaggaggccacagcctgcctggagctgaagttcaaccagatcaaggccgagctggccaagaccaagggggagctgatcaagaccaaggaggagctgaagaagcgggagaatgaaagtgacagcctcatccaggagctggagaccagcaacaagaagatcatcacccagaaccagaggatcaaggagctgatcaacatcatcgaccagaaggaggacaccatcaatgagttccagaacctgaagagccacatggagaacaccttcaagtgcaatgacaaggctgacaccagcagcctcatcatcaacaacaagctgatctgcaatgagaccgtggaggtgcccaaggacagcaagagcaagatctgcagcgagaggaagagggtgaatgaaaatgagctgcagcaggatgagcccccagccaagaagggcagcatccacgtgtcctctgccatcacagaggaccagaagaagtctgaggaggtgcggcccaacattgctgagattgaggacatccgggtgctgcaggagaacaatgaaggcctgcgggccttcctgctgaccattgaaaatgagctgaagaatgagaaggaggagaaggccgagctgaacaagcagatcgtgcacttccagcaggagctgagcctgtctgagaagaagaacctgaccctgagcaaggaggtgcagcagatccagagcaactatgacatcgccatcgccgagctgcacgtgcagaagagcaagaaccaggagcaggaggagaagatcatgaagctgagcaatgaaattgaaacagccaccaggagcatcaccaacaacgtgtcccagatcaagctgatgcacaccaagattgatgagctgcggaccctggacagcgtgtcccagatcagcaacatcgacctgctgaacctgcgggacctgagcaatggcagcgaggaggacaacctgcccaacacccagctggacctgctgggcaatgactacctggtgtccaagcaggtgaaggagtaccgcatccaggagcccaaccgggagaacagcttccacagcagcattgaggccatctgggaggagtgcaaggagatcgtgaaggccagcagcaagaagagccaccagatcgaggagctggagcagcagatcgagaagctgcaggccgaggtgaagggctacaaggatgagaacaaccggctgaaggagaaggagcacaagaaccaggatgacctgctgaaggagaaggagaccctcatccagcagctgaaggaggagctgcaggagaagaatgtgaccctggatgtgcagatccagcacgtggtggagggcaagagggccctgtctgagctgacccagggcgtgacctgctacaaggccaagatcaaggagctggagaccatcctggagacccagaaggtggagtgcagccacagcgccaagctggagcaggacatcctggagaaggagagcatcatcctgaagctggagaggaacctgaaggagttccaggagcacctgcaggacagcgtgaagaacaccaaggacctgaatgtgaaggagctgaagctgaaggaggagatcacccagctgaccaacaacctgcaggacatgaagcacctgctgcagctgaaggaggaggaggaggagaccaaccggcaggagacagagaagctgaaggaggagctgagcgccagcagcgcccggacccagaacctgaaggctgacctgcagaggaaggaggaggactatgctgacctgaaggagaagctgacagatgccaagaagcagatcaagcaggtgcagaaggaggtgtctgtgatgagagatgaggacaagctgctgcgcatcaagatcaatgagctggagaagaagaagaaccagtgcagccaggagctggacatgaagcagaggaccatccagcagctgaaggagcagctgaacaaccagaaggtggaggaggccatccagcagtatgaaagagcctgcaaggacctgaatgtgaaggagaagatcatcgaggacatgaggatgaccctggaggagcaggagcagacccaggtggagcaggaccaggtgctggaggccaagctggaggaggtggagcggctggccacagagctggagaagtggaaggagaagtgcaatgacctggagaccaagaacaaccagaggagcaacaaggagcacgagaacaacacagatgtgctgggcaagctgaccaacctgcaggatgagctgcaggagagcgagcagaagtacaatgctgacaggaagaagtggctggaggagaagatgatgctgatcacccaggccaaggaggccgagaacatccggaacaaggagatgaagaagtatgcagaagatcgggagcgcttcttcaagcagcagaatgagatggagatcctgacagcccagctgacagagaaggacagcgacctgcagaagtggagggaggagcgggaccagctggtggccgccctggagatccagctgaaggccctgatcagcagcaatgtgcagaaggacaatgaaattgagcagctgaagaggatcatcagcgagaccagcaagattgagacccagatcatggacatcaagcccaagaggatcagcagcgctgaccctgacaagctgcagacagagcccctgagcaccagctttgagatcagcaggaacaagattgaagatggctctgtggtgctggacagctgtgaggtgtccacagaaaatgaccagagcacccgcttccccaagccagagctggagatccagttcacccccctgcagcccaacaagatggctgtgaagcaccctggctgcaccacccctgtgacagtgaagatccccaaggccaggaagaggaagagcaatgagatggaggaggacctggtgaagtgtgagaacaagaagaatgccacccccaggaccaacctgaagttccccatcagtgatgacaggaacagctctgtgaagaaggagcagaaggtggccatccggcccagcagcaagaagacctacagcctgcggagccaggccagcatcattggagtgaacctggccaccaagaagaaggagggcaccctgcagaagtttggagacttcctgcagcacagccccagcatcctgcagagcaaggccaagaagatcatcgagaccatgagcagcagcaagctgagcaatgtggaggccagcaaagaaaatgtgtcccagcccaagagggccaagaggaagctgtacaccagcgagatcagcagccccatcgacatcagcggccaggtgatcctgatggaccagaagatgaaggagagtgaccaccagatcatcaagaggcggctgcggaccaagacagccaagtag

SEQ ID NO: 189834 - DNA, 1026 bp, Artificial Sequence
  derived and/or modified sequence
atggagagcaacttcaaccaggagggcgtgccccggcccagctatgtgttttctgctgaccccatcgcccggcccagcgagatcaactttgatggcatcaagctggacctgagccatgagttcagcctggtggcccccaacacagaggccaacagctttgagagcaaggactacctgcaggtgtgcctgcgcatccggcccttcacccagagcgagaaggagctggagagcgagggctgtgtgcacatcctggacagccagacagtggtgctgaaggagccccagtgcatcctgggccgcctgtctgagaagagcagcggccagatggcccagaagttctccttcagcaaggtgtttggacctgccaccacccagaaggagttcttccagggctgcatcatgcagcctgtgaaggacctgctgaagggccagagccgcctcatcttcacctacggcctgaccaacagcggcaagacctacaccttccagggcacagaagaaaatattggcatcctgcccaggaccctgaatgtgctgtttgacagcctgcaggagcggctgtacaccaagatgaacctgaagccccacaggagccgggagtacctgcggctgagcagcgagcaggagaaggaggagatcgccagcaagagcgccctgctgcggcagatcaaggaggtgacagtgcacaatgacagtgatgacaccctgtatggcagcctgaccaacagcctgaacatcagcgagtttgaggagagcatcaaggactatgagcaggccaacctgaacatggccaacagcatcaagttctctgtgtgggtgtccttctttgagatctacaatgagtacatctatgacctgtttgtgcctgagctggccaagaccaagggggagctgatcaagaccaaggaggagctgaagaagagagaaaatgaaagtgacagcctcatccaggagctggagaccagcaacaagaagatcatcacccagaaccagaggatcaaggagctgatcaacatcatcgactag

SEQ ID NO: 189835 - DNA, 621 bp, Artificial Sequence
  derived and/or modified sequence
atggagagcaacttcaaccaggagggcgtgccccggcccagctatgtgttttctgctgaccccatcgcccggcccagcgagatcaactttgatggcatcaagctggacctgagccatgagttcagcctggtggcccccaacacagaggccaacagctttgagagcaaggactacctgcaggtgtgcctgcgcatccggcccttcacccagagcgagaaggagctggagagcgagggctgtgtgcacatcctggacagccagacagtggtgctgaaggagccccagtgcatcctgggccgcctgtctgagaagagcagcggccagatggcccagaagttctccttcagcaaggtgtttggacctgccaccacccagaaggagttcttccagggctgcatcatgcagcctgtgaaggacctgctgaagggccagagccgcctcatcttcacctacggcctgaccaacagcggcaagacctacaccttccagggcacagaagaaaatattggcatcctgcccaggaccctgaatgtgctgtttgacagcctgcaggagcggctgtacaccaagatgaacctgaagccccacaggagccgggagtacctgcggctgagcagctag

SEQ ID NO: 189836 - DNA, 5343 bp, Artificial Sequence
  derived and/or modified sequence
atggagagcaacttcaaccaggagggcgtgccccggcccagctacgttttttctgccgaccctattgcccgacccagcgagatcaattttgatggcatcaagctagacctgagccatgagttctccctggtggcaccaaacacagaggccaatagtttcgagtctaaggattacctacaggtctgcctgcgcattcgcccattcactcaatccgagaaagagttggaaagcgagggatgcgtacatattctggactcccaaaccgttgtgttgaaagaacctcagtgcatactgggaaggttatccgaaaaatcctctggccagatggctcaaaaattcagcttctccaaggtcttcggacctgccaccacgcagaaagagttctttcaaggctgtatcatgcagcctgtcaaagatctgctgaaagggcagagccgcctgattttcacatatggcctcactaactcaggcaagacttatacgttccagggaaccgaggagaacatcggtatactccctagaaccctaaatgtgctattcgacagcctgcaagagcggctgtacacaaaaatgaacttgaagccgcatcgatcaagagagtatctgaggctgtccagtgagcaggaaaaagaggaaattgcttccaaaagcgcgctgcttcgccaaatcaaggaagtaacagtccacaatgactccgatgacacgctttacggatctctgaccaacagtctcaacatcagcgagtttgaggagtccatcaaggattatgaacaggccaaccttaatatggccaattcgatcaagttctccgtttgggtatccttcttcgaaatatacaacgaatatatttatgacctttttgtgcctgttagcagcaagtttcagaagagaaagatgctacgcttgagccaggacgtaaagggctactcattcatcaaggacctgcaatggatccaggtgtctgactccaaagaagcttacagactgcttaaacttggcattaagcaccagtcagtcgcttttaccaaacttaataacgcatcttcaaggagccatagcatcttcactgttaagatccttcagatcgaggactcggaaatgagccgcgtgatcagagtctccgagctgtctctctgtgatctcgccggcagcgagcgcacaatgaagacccagaacgagggcgaaaggctgcgcgagaccggaaacatcaacacttctttgttgactctagggaagtgcatcaacgtcctgaaaaattctgagaaatccaagttccagcagcacgtccccttcagggaatctaagctgacacactattttcagtccttcttcaatggcaagggcaaaatatgcatgatagtcaacatttcacaatgctacttagcatatgatgagaccctgaacgtgctcaaattcagcgcaatcgcacagaaagtgtgcgtccctgacacactgaactcgtcacaagaaaaactgtttggccccgtgaaaagtagtcaggacgtgtccttagactccaactctaacagtaagattctgaatgtgaaaagggctaccattagctgggaaaactcgctcgaggaccttatggaagacgaggatttggttgaagaactggagaacgccgaagagacacagaatgtggagacaaagctgctggatgaagatctggacaagaccctggaagagaataaggccttcatcagccatgaggaaaaacgaaagctgttagatctgatagaggacctgaaaaagaaactcattaacgagaagaaggaaaagcttacgctcgagtttaagattcgcgaagaggtcacgcaggagtttacacaatattgggcccagcgagaagctgatttcaaagagaccctgctgcaagagagggagatcctcgaggagaacgcagagaggagactggccatcttcaaagacctggttgggaagtgcgataccagggaggaagctgcgaaggatatttgtgctactaaggttgaaaccgaggaggcgacggcatgcctggaactgaagtttaaccagatcaaagctgagcttgccaagactaaaggcgaactgatcaagaccaaagaggaactcaaaaagagggaaaacgaaagcgactccctgattcaggaacttgaaacttctaataaaaagatcataacacagaaccaacgtatcaaagaactgataaatatcatcgatcagaaggaggatacaattaacgaatttcagaatcttaaatcccacatggagaacaccttcaagtgcaacgacaaggccgatacatcaagcctgatcatcaacaacaagctcatctgcaatgagaccgtggaagtgcctaaggactctaagtccaaaatctgttccgagcgtaaaagggtcaatgaaaatgagctccagcaggacgagcctcccgctaagaagggatctatacacgtgtcgtctgccataactgaagaccagaagaagtccgaggaagtgagaccaaatatcgctgagatagaagatattagggttttgcaggagaacaacgagggacttagagccttcctgcttacgatcgagaatgaactcaaaaacgagaaagaagaaaaagccgaacttaataagcaaatcgtgcatttccagcaggagctctcgctctctgagaaaaagaacctgacattgagcaaagaggttcaacagatccaatctaactatgatattgcaatcgcagagctccacgtgcagaaatccaaaaaccaggaacaagaggagaaaatcatgaaattgagtaacgaaatcgaaaccgccactagatccattactaacaacgtttcccaaataaagcttatgcacaccaagatcgacgagctaagaactctggatagcgtgagtcagatctcaaatatcgacctcctaaatttaagagatctgagcaacggctccgaggaagataaccttccaaacacacagctcgatctactgggtaacgactacctggtatctaaacaggtgaaggagtacaggatccaggagccaaatagggaaaatagtttccactcctccattgaagccatatgggaggagtgcaaagaaatagtcaaagcctcctctaagaagagccatcaaatagaggagctggagcagcagattgaaaagctacaggccgaagtcaagggttataaggatgagaataatcggctgaaggaaaaagaacacaagaaccaggatgacctgctaaaggagaaggagaccctgatccagcagttgaaagaagaactgcaggagaaaaatgtgacactggatgtccaaattcagcatgtggtggaaggcaaacgcgccctttccgaactcacccagggtgtgacttgctataaggcgaaaatcaaggagctcgaaactattctcgagacccagaaggttgaatgttcacactctgcaaaactggagcaagacatcctggagaaggagtcaattatcttgaaactggagcgtaacctgaaagagtttcaggaacacttgcaggactctgtcaagaacaccaaggatctgaacgtcaaagagctgaagttgaaagaagagattacccagttgacgaacaacttgcaggacatgaagcatttgttgcaattgaaggaggaggaggaggagactaacagacaagaaacagagaagctgaaggaggaactgtcagcgtccagcgccagaacacagaatctgaaagccgacctgcaacgcaaggaggaggactacgctgaccttaaagagaagctgaccgatgctaagaaacagatcaaacaggtgcaaaaagaggtctctgtaatgcgtgatgaagacaagctacttcgtattaagatcaatgaactggagaaaaagaagaatcaatgctctcaggagctcgatatgaagcagcgaacaatccagcaactcaaagaacaactgaacaaccaaaaagtggaagaagcaatacaacagtatgagcgggcatgcaaagacctcaacgtgaaagaaaagataattgaagacatgcggatgacccttgaagaacaggagcagactcaggtcgaacaggaccaggttctcgaggcgaagttagaagaggtggagcggctggctacggaactcgaaaagtggaaggaaaagtgcaatgacctggaaacaaaaaacaaccagaggtccaacaaggaacatgagaacaatacagacgtgttgggcaagttaacaaatctccaggatgaactgcaggagtctgagcaaaagtacaatgctgatagaaaaaagtggctggaggaaaaaatgatgctgatcacacaggccaaggaagctgagaacatacgaaacaaggagatgaaaaaatacgctgaagaccgcgagcggttttttaagcaacagaacgaaatggagatccttacagcccagctgacggagaaagattcggatctgcagaagtggcgggaggaacgcgatcagctggtcgctgctctggaaattcagctcaaagcactcatatcttcaaatgttcaaaaagacaacgagatcgagcagctgaaacgcataatcagcgaaacctcaaaaattgaaacccagataatggacatcaaaccaaagagaataagcagtgcggaccctgataaactgcagactgaaccattgtccacgtcgtttgagattagtcgaaacaagatagaggatggatcggttgtgttggattcttgtgaagtcagcaccgagaatgatcagagcaccaggtttccaaaacctgaactggagattcagttcaccccactgcagccaaataaaatggccgttaaacaccctggctgtacgacccctgttactgtgaagatacccaaagctaggaaaaggaagagtaacgagatggaggaggacctcgtcaagtgtgagaacaagaaaaacgcaacaccaaggacgaatcttaagttccccatcagtgatgataggaatagctcggtgaaaaaagagcagaaagtagccattcgcccttcttctaaaaagacctacagtctgaggtcccaagcctctatcataggcgtgaacctcgcaaccaagaagaaggagggcacactgcaaaaatttggggatttcctgcagcactccccgtcaattttgcaatccaaggccaagaagataatcgagaccatgtcatcttctaagctgtccaatgtggaggcctctaaggagaacgtttcccagccaaagcgagccaagcgaaaactgtatacatctgagatctcatctcctatagacatctcaggccaggtgattttaatggaccagaaaatgaaagaatctgaccatcagatcattaagcgaagactgcggacgaagaccgccaaatag

SEQ ID NO: 189837 - DNA, 1026 bp, Artificial Sequence
  derived and/or modified sequence
atggagagcaacttcaaccaggagggcgtgccccggcccagctacgtcttctcggccgacccaatcgcacggccatccgagataaatttcgacgggattaaacttgacctgtcacatgaattttcgttggttgccccgaacaccgaggccaattctttcgagtcaaaagactacctgcaggtatgccttcggatacggccattcacacagtctgagaaagagctcgaatccgaaggttgtgtgcacatcctcgatagtcagaccgtcgtgctgaaggaaccacagtgtattctgggcaggttgagcgagaaaagctctggacagatggcccaaaagtttagcttctcaaaagtattcggacctgctacgacccaaaaggagtttttccagggttgcataatgcagcctgtaaaagaccttctgaaggggcagtctcgattgattttcacatacggactgaccaactctgggaagacatatacttttcagggaaccgaagaaaacatcggcattttgcccagaactcttaatgttctttttgactctttacaggaaaggctgtacaccaagatgaacctcaagccgcataggtctagagagtatctgcggctcagtagcgagcaggaaaaagaggagatcgcttcaaagagcgccctgctccggcagattaaagaagtcaccgtccacaacgacagcgacgataccctgtatggctcccttaccaattctcttaacatttctgaattcgaggaatcaataaaggattacgaacaggctaacctgaacatggcaaatagcataaaatttagcgtgtgggtgtccttttttgagatctataacgagtacatttacgacctattcgtgccagaacttgctaaaacaaagggagaacttatcaaaacaaaggaggagctcaagaagagagagaatgaatccgactccttgattcaggagctcgagacttccaacaagaaaattattactcagaatcagcgcattaaggagcttatcaatattattgactag

SEQ ID NO: 189838 - DNA, 621 bp, Artificial Sequence
  derived and/or modified sequence
atggagagcaacttcaaccaggagggcgtgccccggcccagctacgtgttctcggccgatccgattgctagaccaagtgaaatcaatttcgacggcattaagttagatctcagccacgagttttctctggttgcaccgaataccgaagcaaatagcttcgagagtaaggattatctgcaagtgtgcctgagaatcaggcccttcacacaatcggagaaggagctggaaagcgaaggctgcgtacacatccttgattcacaaacggtggtcctcaaggagccccagtgcattttaggacggctctcagagaagagttccgggcagatggcacagaagtttagctttagtaaggtgtttggaccggccacaactcaaaaagagttctttcaagggtgtatcatgcagcccgtgaaagacctactcaaggggcagagtcggcttatttttacctatggtctcacgaatagcgggaagacgtacacatttcagggaaccgaggagaatatcggtatactgcctagaactctgaacgttctgttcgactctcttcaggagcggctttacaccaaaatgaacctgaagccacatcgatctcgcgaatatctccgcctcagctcctag

SEQ ID NO: 189839 - DNA, 5343 bp, Artificial Sequence
  derived and/or modified sequence
atggaatctaattttaaccaggagggagtgcccaggccttcgtatgtctttagcgccgacccaatagcccgaccttctgagatcaattttgacggcattaagctcgatctgagccacgagttttccttggtggcaccgaatacagaggcgaactctttcgagtccaaagactatctccaagtctgcctgaggataagaccattcactcagtctgagaaggagcttgaaagcgagggatgtgtgcatattctggactctcagacggtcgtgctgaaggaacctcaatgcatactaggacgcctgagtgagaagagcagcgggcagatggcccagaagttctcctttagcaaagtgttcggccctgccacaacccagaaagaattttttcaaggctgtatcatgcagccagtgaaggatctcctgaagggtcagtcaagattaattttcacatacggtcttaccaacagtggcaagacctataccttccagggtactgaggaaaacatcggcatcctgcccagaaccctgaatgtattgttcgatagtctgcaagaacgtctttacaccaagatgaaccttaaaccacacagaagtagggaatacctcagactctcttcagaacaagagaaggaggaaattgcaagcaagtccgcactcctccggcagatcaaggaggtcaccgttcacaacgactcggatgacacactgtacggctcgctgactaactctctgaacattagtgaattcgaagaatctatcaaggactacgaacaagcaaacctgaacatggcaaactcaatcaagttttccgtgtgggtgtccttcttcgagatatataatgaatacatctatgatctatttgtgcccgtttcatcgaagttccaaaaacgcaaaatgctgaggttgagccaggatgttaaagggtactcctttataaaggacctgcagtggattcaggtgtcagacagtaaagaggcgtatcgcttgctgaaactcgggatcaaacaccagtcagtggcattcacaaaactgaacaacgcatcttctaggagccacagtatttttacagttaaaatcctacagatagaggacagcgagatgagcagagttatccgagttagtgaactcagcctgtgtgatctggcgggaagcgaacgaaccatgaaaacccaaaatgaaggagagcgtctgcgcgagacgggtaacattaacacttccctcctgacactgggaaagtgcattaacgtgcttaagaacagtgagaaatctaagttccagcagcatgtacccttcagggaatccaagctcacccattacttccagagcttctttaatgggaaaggtaaaatctgtatgattgtgaacatttctcagtgctatctcgcatacgatgagactttgaacgttttaaaattctccgcgatcgctcagaaggtctgcgtgccggataccttgaacagttctcaggaaaaactgttcggcccagtcaagtcatctcaggacgtcagcctggattcaaatagtaacagtaagatccttaacgtaaagcgtgccaccatttcatgggagaatagcctggaggatctgatggaagacgaagacctggtcgaggagctggaaaacgccgaggaaacccagaacgttgagactaaactgctagacgaagacctggacaaaacactggaggaaaataaggcctttatttcccacgaggagaaacgaaagttgctggacttgatcgaggaccttaaaaagaaactaattaatgaaaagaaggaaaaactgacgctggagtttaagatccgtgaggaggttacccaggagtttacacagtattgggcacagagagaggctgacttcaaggagactcttttacaagagagagagatcctcgaagagaatgccgagcggagactggctatcttcaaagatttggttggtaagtgcgatactcgagaagaggctgctaaggacatttgcgccaccaaagtggaaaccgaagaagctaccgcctgcttggaactgaagttcaatcagatcaaagccgagttagcaaaaaccaagggagaactgatcaaaaccaaagaggaactgaaaaaacgagagaacgagtccgacagtctgattcaggaattagagacctccaataagaagatcatcacccagaatcagagaattaaggaacttattaatatcatagatcagaaggaggacacaatcaatgaattccaaaacctgaagtcacacatggaaaatactttcaagtgcaacgacaaagccgacacaagctccctgataatcaataataaactcatctgcaatgaaacggtggaagtgccaaaggattccaaaagtaaaatctgtagcgagagaaagagggttaatgaaaacgaattgcaacaggatgagccacccgcaaaaaagggaagtattcatgttagttcggccatcacagaggatcagaaaaaatccgaggaggtccggcctaatatcgccgaaatcgaagatatccgggtcttacaggagaacaacgagggtttgagagccttcttgttaacaatagaaaatgagcttaaaaacgaaaaggaagagaaggccgagcttaacaagcagattgttcactttcagcaggagctctccctctcagaaaaaaaaaatctgacccttagtaaggaggtgcaacagatccaatctaactatgacattgctatagcggagctgcacgttcagaagtcaaagaaccaggagcaggaggaaaaaatcatgaagctctccaacgaaattgagactgcaacacgctcaataaccaataatgtctcccagattaagctgatgcataccaagatagacgagctcaggacactggatagcgtgagtcaaattagtaatatcgacctgttgaatctccgcgatttatctaacggttctgaagaggacaacctgcctaatacccaacttgatttgctcggcaacgactatctagtgtcaaagcaagtaaaggagtaccgcatccaggagcctaatcgtgaaaatagctttcactcctctatcgaggctatctgggaggaatgcaaagagatagtgaaagcatcatccaagaagagtcaccagattgaggaactagaacagcagattgagaagctgcaggccgaggttaagggctacaaggacgagaataaccggctgaaggaaaaagagcacaagaaccaagatgacctgctcaaggaaaaagagacattaatccaacaactcaaggaggaattgcaggaaaaaaatgttactctcgacgtccagattcagcacgttgtggaagggaagcgagccttgagtgagctaactcagggagtcacctgctacaaggcgaagatcaaagagctggaaacgattctggagacgcaaaaagtcgagtgttcacatagtgctaaattggagcaagacattctggagaaggaaagcattatcctaaagctcgagcgtaacctaaaggaatttcaagagcatctgcaggactctgttaagaacacgaaggaccttaatgtaaaagagctcaagctgaaggaggagatcacacagctcacaaataatctgcaagacatgaagcacctcttacaattaaaagaagaggaagaagaaacaaacagacaagaaaccgagaaattgaaagaggaactgtcggcctcatctgctagaacgcaaaatctgaaagccgatctgcagcggaaagaagaggactacgctgacctcaaggagaaactcacggacgccaagaaacaaatcaagcaggtgcagaaagaggtgagcgtcatgcgggacgaggacaagttgctcagaatcaaaatcaatgagttggaaaaaaaaaaaaatcaatgttcacaggaacttgacatgaaacaacggacaattcagcaactgaaggaacaattgaataaccaaaaggtggaagaggcaatccagcagtacgagagggcctgtaaagatctcaatgtgaaagaaaaaatcatcgaagatatgcgcatgactctggaagagcaagaacagacccaagtcgagcaagatcaagtacttgaggcaaaacttgaggaggtggagcggctggccaccgagcttgagaaatggaaggagaaatgcaacgacctggagaccaaaaataaccagcgttctaataaggagcacgaaaacaataccgatgtgctaggcaagttgacgaacttgcaagacgaactgcaggaatctgaacaaaagtataatgccgatcggaaaaagtggttggaagagaaaatgatgctcattacgcaggcgaaagaagcggaaaacatccgcaacaaagaaatgaaaaaatatgccgaggacagggagcgtttctttaagcagcagaacgagatggagattctcactgcacagctgactgagaaggacagcgatctgcagaagtggagagaagagcgagaccaattagtcgcagctttggagattcagctgaaggcactaatatcttccaacgtgcagaaagataacgaaattgagcagttaaagcggataatctccgagactagcaaaattgaaacacagatcatggacatcaagcctaagcgaatcagctcagccgacccagacaaattgcagacagagccgctgagtacatcatttgaaatttcccgcaacaaaatcgaggatggttccgtggtgttagactcctgtgaggtcagcaccgaaaacgaccaatctactcggttcccaaagcccgaactggagatccagtttacgccgctccagccaaacaaaatggccgtgaaacacccaggatgcaccaccccggtgactgtgaaaataccaaaggccagaaagcggaaatccaacgaaatggaggaagatctggtcaaatgtgaaaataaaaaaaacgccactccacgtacaaacctgaagttccccatcagtgatgacagaaacagttccgtgaaaaaggaacagaaggtggccattcgcccttcctctaagaaaacctatagtctcagaagccaagcaagcatcattggcgtaaacctggctaccaaaaagaaggagggcaccctccagaagttcggcgactttctgcagcattcaccctcaattctgcagtctaaagcgaaaaagatcatcgagacgatgtcctcctccaagctaagcaatgtagaagcatctaaagaaaacgtctcacagcccaagagggcgaaacgaaagttatatacgtccgaaatttcatccccaatcgacatcagtggccaagtgatcctgatggatcagaaaatgaaggagtcggatcatcaaatcataaaacgcaggttaagaactaagaccgctaaatat

SEQ ID NO: 189840 - DNA, 1026 bp, Artificial Sequence
  derived and/or modified sequence
atggaaagcaatttcaaccaggaaggagttcctagacccagttacgttttcagcgctgatccaatcgcaagacccagcgaaatcaattttgatggcattaagcttgatctgtctcatgaattttctctggtggctccaaacaccgaggccaactctttcgagtcaaaggattatctgcaggtttgtttgcgcataagacctttcacccaaagtgaaaaggaattggaaagcgaaggatgcgtacatattctggactcccagacagtagtactgaaagaaccacagtgtattcttggtagacttagcgaaaagtcttcagggcagatggcacagaaattcagcttctccaaggtctttggcccagccacaacgcaaaaggagttcttccaaggatgcatcatgcagccggtcaaggatctgctgaaagggcagtcccgcttaatcttcacgtatggcttgactaattctggaaaaacatatacattccaaggcaccgaagagaacattgggatcttgccacgcacactgaatgtgctatttgactccctgcaggagaggctttataccaagatgaaccttaaaccccacaggtcacgagaatatttacggctgtcctcggaacaggaaaaggaagagatagcttctaaaagtgctctcctccggcagatcaaggaagtgactgtacacaacgactccgacgacacactgtatggcagccttactaactcgttgaatatcagtgagtttgaggagagcatcaaagattacgagcaagccaaccttaatatggctaatagcattaaattttccgtgtgggtgagcttctttgagatttacaacgagtacatctacgacttgtttgtgccagagctggcgaaaacaaagggagaactgatcaagactaaggaggagctgaagaagcgtgagaatgagtctgattctctgatccaagaattagaaacgtccaacaagaagatcattactcagaatcagcgcattaaggaactgataaatatcatcgactag

SEQ ID NO: 189841 - DNA, 621 bp, Artificial Sequence
  derived and/or modified sequence
atggagtctaacttcaatcaggagggtgtgccacgtccttcctatgtcttcagcgcagatccaattgccagaccaagcgagataaactttgacggcattaaactggatttatctcacgaattctcattagtggcgccaaatacggaagctaattcatttgagagtaaagactacttacaagtatgtctccgcatacggccattcacccagagtgagaaagaactcgaatccgagggatgcgttcacatcctggactcccagactgtggtgctgaaggagccacagtgcattttgggacggctgtcggagaaaagcagtgggcagatggcccagaagttttcattcagtaaagtttttggacctgccaccactcagaaagagtttttccagggctgcatcatgcagccagtaaaggacctgctcaaagggcaatcaaggcttatattcacctacgggctcaccaatagcgggaaaacctacacgttccaggggacagaagaaaacatcgggatattgcccaggacactgaatgttctctttgatagtctgcaggagaggctgtatactaaaatgaatcttaagccccacaggtcacgggagtacctacggctctcttcctag

SEQ ID NO: 189842 - DNA, 1045 bp, Artificial Sequence
  derived and/or modified sequence
tagtcaggcgaagtttgcagaatggaatctaattttaatcaagagggagtacctcgaccatcttatgtttttagtgctgacccaattgcaaggccttcagaaataaatttcgatggcattaagcttgatctgtctcatgaattttccttagttgctccaaatactgaggcaaacagtttcgaatctaaagattatctccaggtttgtcttcgaataagaccatttacacagtcagaaaaagaacttgagtctgagggctgtgtgcatattctggattcacagactgttgtgctgaaagagcctcaatgcatccttggtcggttaagtgaaaaaagctcagggcagatggcacagaaattcagtttttccaaggtttttggcccagcaactacacagaaggaattctttcagggttgcattatgcaaccagtaaaagacctcttgaaaggacagagtcgtctgatttttacttacgggctaaccaattcaggaaaaacatatacatttcaagggacagaagaaaatattggcattctgcctcgaactttgaatgtattatttgatagtcttcaagaaagactgtatacaaagatgaaccttaaaccacatagatccagagaatacttaaggttatcatcagaacaagagaaagaagaaattgctagcaaaagtgcattgcttcggcaaattaaagaggttactgtgcataatgatagtgatgatactctttatggaagtttaactaactctttgaatatctcagagtttgaagaatccataaaagattatgaacaagccaacttgaatatggctaatagtataaaattttctgtgtgggtttctttctttgaaatttacaatgaatatatttatgacttatttgttcctgaattagctaaaaccaaaggagaattaatcaaaaccaaagaagagttaaaaaagagagaaaatgaatcagattcattgattcaagagcttgagacatctaataagaaaataattacacagaatcaaagaattaaagaattgataaatataattgatc

SEQ ID NO: 189843 - DNA, 660 bp, Artificial Sequence
  derived and/or modified sequence
aggtgaggaggtgacccgcgggaatgtgtggggaaggagaatggaatctaattttaatcaagagggagtacctcgaccatcttatgtttttagtgctgacccaattgcaaggccttcagaaataaatttcgatggcattaagcttgatctgtctcatgaattttccttagttgctccaaatactgaggcaaacagtttcgaatctaaagattatctccaggtttgtcttcgaataagaccatttacacagtcagaaaaagaacttgagtctgagggctgtgtgcatattctggattcacagactgttgtgctgaaagagcctcaatgcatccttggtcggttaagtgaaaaaagctcagggcagatggcacagaaattcagtttttccaaggtttttggcccagcaactacacagaaggaattctttcagggttgcattatgcaaccagtaaaagacctcttgaaaggacagagtcgtctgatttttacttacgggctaaccaattcaggaaaaacatatacatttcaagggacagaagaaaatattggcattctgcctcgaactttgaatgtattatttgatagtcttcaagaaagactgtatacaaagatgaaccttaaaccacatagatccagagaatacttaaggttatcatcaga

SEQ ID NO: 189844 - DNA, 6306 bp, Artificial Sequence
  derived and/or modified sequence
attgtttgaatttgaaaacggtaacatcgcagtgctgctcgcgggtctggctagtcaggcgaagtttgcagaatggaatctaattttaatcaagagggagtacctcgaccatcttatgtttttagtgctgacccaattgcaaggccttcagaaataaatttcgatggcattaagcttgatctgtctcatgaattttccttagttgctccaaatactgaggcaaacagtttcgaatctaaagattatctccaggtttgtcttcgaataagaccatttacacagtcagaaaaagaacttgagtctgagggctgtgtgcatattctggattcacagactgttgtgctgaaagagcctcaatgcatccttggtcggttaagtgaaaaaagctcagggcagatggcacagaaattcagtttttccaaggtttttggcccagcaactacacagaaggaattctttcagggttgcattatgcaaccagtaaaagacctcttgaaaggacagagtcgtctgatttttacttacgggctaaccaattcaggaaaaacatatacatttcaagggacagaagaaaatattggcattctgcctcgaactttgaatgtattatttgatagtcttcaagaaagactgtatacaaagatgaaccttaaaccacatagatccagagaatacttaaggttatcatcagaacaagagaaagaagaaattgctagcaaaagtgcattgcttcggcaaattaaagaggttactgtgcataatgatagtgatgatactctttatggaagtttaactaactctttgaatatctcagagtttgaagaatccataaaagattatgaacaagccaacttgaatatggctaatagtataaaattttctgtgtgggtttctttctttgaaatttacaatgaatatatttatgacttatttgttcctgtatcatctaaattccaaaagagaaagatgctgcgcctttcccaagacgtaaagggctattcttttataaaagatctacaatggattcaagtatctgattccaaagaagcctatagacttttaaaactaggaataaagcaccagagtgttgccttcacaaaattgaataatgcttccagtagaagtcacagcatattcactgttaaaatattacagattgaagattctgaaatgtctcgtgtaattcgagtcagtgaattatctttatgtgatcttgctggttcagaacgaactatgaagacacagaatgaaggtgaaaggttaagagagactgggaatatcaacacttctttattgactctgggaaagtgtattaacgtcttgaagaatagtgaaaagtcaaagtttcaacagcatgtgcctttccgggaaagtaaactgactcactattttcaaagtttttttaatggtaaagggaaaatttgtatgattgtcaatatcagccaatgttatttagcctatgatgaaacactcaatgtattgaagttctccgccattgcacaaaaagtttgtgtcccagacactttaaattcctctcaagagaaattatttggacctgtcaaatcttctcaagatgtatcactagacagtaattcaaacagtaaaatattaaatgtaaaaagagccaccatttcatgggaaaatagtctagaagatttgatggaagacgaggatttggttgaggagctagaaaacgctgaagaaactcaaaatgtggaaactaaacttcttgatgaagatctagataaaacattagaggaaaataaggctttcattagccacgaggagaaaagaaaactgttggacttaatagaagacttgaaaaaaaaactgataaatgaaaaaaaggaaaaattaaccttggaatttaaaattcgagaagaagttacacaggagtttactcagtattgggctcaacgggaagctgactttaaggagactctgcttcaagaacgagagatattagaagaaaatgctgaacgtcgtttggctatcttcaaggatttggttggtaaatgtgacactcgagaagaagcagcgaaagacatttgtgccacaaaagttgaaactgaagaagctactgcttgtttagaactaaagtttaatcaaattaaagctgaattagctaaaaccaaaggagaattaatcaaaaccaaagaagagttaaaaaagagagaaaatgaatcagattcattgattcaagagcttgagacatctaataagaaaataattacacagaatcaaagaattaaagaattgataaatataattgatcaaaaagaagatactatcaacgaatttcagaacctaaagtctcatatggaaaacacatttaaatgcaatgacaaggctgatacatcttctttaataataaacaataaattgatttgtaatgaaacagttgaagtacctaaggacagcaaatctaaaatctgttcagaaagaaaaagagtaaatgaaaatgaacttcagcaagatgaaccaccagcaaagaaagggtctatccatgttagttcagctatcactgaagaccaaaagaaaagtgaagaagtgcgaccgaacattgcagaaattgaagacatcagagttttacaagaaaataatgaaggactgagagcatttttactcactattgagaatgaacttaaaaatgaaaaggaagaaaaagcagaattaaataaacagattgttcattttcagcaggaactttctctttctgaaaaaaagaatttaactttaagtaaagaggtccaacaaattcagtcaaattatgatattgcaattgctgaattacatgtgcagaaaagtaaaaatcaagaacaggaggaaaagatcatgaaattgtcaaatgagatagaaactgctacaagaagcattacaaataatgtttcacaaataaaattaatgcacacgaaaatagacgaactacgtactcttgattcagtttctcagatttcaaacatagatttgctcaatctcagggatctgtcaaatggttctgaggaggataatttgccaaatacacagttagaccttttaggtaatgattatttggtaagtaagcaagttaaagaatatcgaattcaagaacccaatagggaaaattctttccactctagtattgaagctatttgggaagaatgtaaagagattgtgaaggcctcttccaaaaaaagtcatcagattgaggaactggaacaacaaattgaaaaattgcaggcagaagtaaaaggctataaggatgaaaacaatagactaaaggagaaggagcataaaaaccaagatgacctactaaaagaaaaagaaactcttatacagcagctgaaagaagaattgcaagaaaaaaatgttactcttgatgttcaaatacagcatgtagttgaaggaaagagagcgctttcagaacttacacaaggtgttacttgctataaggcaaaaataaaggaacttgaaacaattttagagactcagaaagttgaatgtagtcattcagccaagttagaacaagacattttggaaaaggaatctatcatcttaaagctagaaagaaatttgaaggaatttcaagaacatcttcaggattctgtcaaaaacaccaaagatttaaatgtaaaggaactcaagctgaaagaagaaatcacacagttaacaaataatttgcaagatatgaaacatttacttcaattaaaagaagaagaagaagaaaccaacaggcaagaaacagaaaaattgaaagaggaactctctgcaagctctgctcgtacccagaatctgaaagcagatcttcagaggaaggaagaagattatgctgacctgaaagagaaactgactgatgccaaaaagcagattaagcaagtacagaaagaggtatctgtaatgcgtgatgaggataaattactgaggattaaaattaatgaactggagaaaaagaaaaaccagtgttctcaggaattagatatgaaacagcgaaccattcagcaactcaaggagcagttaaataatcagaaagtggaagaagctatacaacagtatgagagagcatgcaaagatctaaatgttaaagagaaaataattgaagacatgcgaatgacactagaagaacaggaacaaactcaggtagaacaggatcaagtgcttgaggctaaattagaggaagttgaaaggctggccacagaattggaaaaatggaaggaaaaatgcaatgatttggaaaccaaaaacaatcaaaggtcaaataaagaacatgagaacaacacagatgtgcttggaaagctcactaatcttcaagatgagttacaggagtctgaacagaaatataatgctgatagaaagaaatggttagaagaaaaaatgatgcttatcactcaagcgaaagaagcagagaatatacgaaataaagagatgaaaaaatatgctgaggacagggagcgtttttttaagcaacagaatgaaatggaaatactgacagcccagctgacagagaaagatagtgaccttcaaaagtggcgagaagaacgagatcaactggttgcagctttagaaatacagctaaaagcactgatatccagtaatgtacagaaagataatgaaattgaacaactaaaaaggatcatatcagagacttctaaaatagaaacacaaatcatggatatcaagcccaaacgtattagttcagcagatcctgacaaacttcaaactgaacctctatcgacaagttttgaaatttccagaaataaaatagaggatggatctgtagtccttgactcttgtgaagtgtcaacagaaaatgatcaaagcactcgatttccaaaacctgagttagagattcaatttacacctttacagccaaacaaaatggcagtgaaacaccctggttgtaccacaccagtgacagttaagattcccaaggctcggaagaggaagagtaatgaaatggaggaggacttggtgaaatgtgaaaataagaagaatgctacacccagaactaatttgaaatttcctatttcagatgatagaaattcttctgtcaaaaaggaacaaaaggttgccatacgtccatcatctaagaaaacatattctttacggagtcaggcatccataattggtgtaaacctggccactaagaaaaaagaaggaacactacagaaatttggagacttcttacaacattctccctcaattcttcaatcaaaagcaaagaagataattgaaacaatgagctcttcaaagctctcaaatgtagaagcaagtaaagaaaatgtgtctcaaccaaaacgagccaaacggaaattatacacaagtgaaatttcatctcctattgatatatcaggccaagtgattttaatggaccagaaaatgaaggagagtgatcaccagattatcaaacgacgacttcgaacaaaaacagccaaataaatcacttatggaaatgtttaatataaattttatagtcatagtcattggaacttgcatcctgtattgtaaatataaatgtatatattatgcattaaatcactctgcatatagattgctgttttatacatagtataattttaattcaataaatgagtcaaaatttgtatatttttataaggcttttttataatagcttctttcaaactgtatttccctattatctcagacattggatcagtgaagatcctaggaaagaggctgttattctcatttattttgctatacaggatgtaataggtcaggtatttggtttacttatatttaacaatgtcttatgaattttttttactttatctgttatacaactgattttacatatctgtttggattatagctaggatttggagaataagtgtgtacagatcacaaaacatgtatatacattatttagaaaagatctcaagtctttaattagaatgtctcacttattttgtaaacattttgtgggtacatagtacatgtatatatttacggggtatgtgagatgttttgacacaggcatgcaatgtgaaatacgtgtatcatggagaatgaggtatccatcccctcaagcatttttcctttgaattacagataatccaattacattctttagatcatttaaaaatatacaagtaagttattattgattatagtcactctattgtgctatcagatagtagatcattctttttatcttatttgtttttgtacccattaaccatccccacctccccctgcaaccgtcagtacccttaccagccactggtaaccattcttctactctgtatgcccatgaggtcaattgattttatttttagatcccataaataaatgagaacatgcagtctt

SEQ ID NO: 189845 - DNA, 5343 bp, Artificial Sequence
  derived and/or modified sequence
atggagagcaacttcaaccaggagggcgtgcccagacccagctacgtgttcagcgccgaccccatcgccagacccagcgagatcaacttcgacggcatcaagctggacctgagccacgagttcagcctggtggcccccaacaccgaggccaacagcttcgagagcaaggactacctgcaggtgtgcctgagaatcagacccttcacccagagcgagaaggagctggagagcgagggctgcgtgcacatcctggacagccagaccgtggtgctgaaggagccccagtgcatcctgggcagactgagcgagaagagcagcggccagatggcccagaagttcagcttcagcaaggtgttcggccccgccaccacccagaaggagttcttccagggctgcatcatgcagcccgtgaaggacctgctgaagggccagagcagactgatcttcacctacggcctgaccaacagcggcaagacctacaccttccagggcaccgaggagaacatcggcatcctgcccagaaccctgaacgtgctgttcgacagcctgcaggagagactgtacaccaagatgaacctgaagccccacagaagcagagagtacctgagactgagcagcgagcaggagaaggaggagatcgccagcaagagcgccctgctgagacagatcaaggaggtgaccgtgcacaacgacagcgacgacaccctgtacggcagcctgaccaacagcctgaacatcagcgagttcgaggagagcatcaaggactacgagcaggccaacctgaacatggccaacagcatcaagttcagcgtgtgggtgagcttcttcgagatctacaacgagtacatctacgacctgttcgtgcccgtgagcagcaagttccagaagagaaagatgctgagactgagccaggacgtgaagggctacagcttcatcaaggacctgcagtggatccaggtgagcgacagcaaggaggcctacagactgctgaagctgggcatcaagcaccagagcgtggccttcaccaagctgaacaacgccagcagcagaagccacagcatcttcaccgtgaagatcctgcagatcgaggacagcgagatgagcagagtgatcagagtgagcgagctgagcctgtgcgacctggccggcagcgagagaaccatgaagacccagaacgagggcgagagactgagagagaccggcaacatcaacaccagcctgctgaccctgggcaagtgcatcaacgtgctgaagaacagcgagaagagcaagttccagcagcacgtgcccttcagagagagcaagctgacccactacttccagagcttcttcaacggcaagggcaagatctgcatgatcgtgaacatcagccagtgctacctggcctacgacgagaccctgaacgtgctgaagttcagcgccatcgcccagaaggtgtgcgtgcccgacaccctgaacagcagccaggagaagctgttcggccccgtgaagagcagccaggacgtgagcctggacagcaacagcaacagcaagatcctgaacgtgaagagagccaccatcagctgggagaacagcctggaggacctgatggaggacgaggacctggtggaggagctggagaacgccgaggagacccagaacgtggagaccaagctgctggacgaggacctggacaagaccctggaggagaacaaggccttcatcagccacgaggagaagagaaagctgctggacctgatcgaggacctgaagaagaagctgatcaacgagaagaaggagaagctgaccctggagttcaagatcagagaggaggtgacccaggagttcacccagtactgggcccagagagaggccgacttcaaggagaccctgctgcaggagagagagatcctggaggagaacgccgagagaagactggccatcttcaaggacctggtgggcaagtgcgacaccagagaggaggccgccaaggacatctgcgccaccaaggtggagaccgaggaggccaccgcctgcctggagctgaagttcaaccagatcaaggccgagctggccaagaccaagggcgagctgatcaagaccaaggaggagctgaagaagagagagaacgagagcgacagcctgatccaggagctggagaccagcaacaagaagatcatcacccagaaccagagaatcaaggagctgatcaacatcatcgaccagaaggaggacaccatcaacgagttccagaacctgaagagccacatggagaacaccttcaagtgcaacgacaaggccgacaccagcagcctgatcatcaacaacaagctgatctgcaacgagaccgtggaggtgcccaaggacagcaagagcaagatctgcagcgagagaaagagagtgaacgagaacgagctgcagcaggacgagccccccgccaagaagggcagcatccacgtgagcagcgccatcaccgaggaccagaagaagagcgaggaggtgagacccaacatcgccgagatcgaggacatcagagtgctgcaggagaacaacgagggcctgagagccttcctgctgaccatcgagaacgagctgaagaacgagaaggaggagaaggccgagctgaacaagcagatcgtgcacttccagcaggagctgagcctgagcgagaagaagaacctgaccctgagcaaggaggtgcagcagatccagagcaactacgacatcgccatcgccgagctgcacgtgcagaagagcaagaaccaggagcaggaggagaagatcatgaagctgagcaacgagatcgagaccgccaccagaagcatcaccaacaacgtgagccagatcaagctgatgcacaccaagatcgacgagctgagaaccctggacagcgtgagccagatcagcaacatcgacctgctgaacctgagagacctgagcaacggcagcgaggaggacaacctgcccaacacccagctggacctgctgggcaacgactacctggtgagcaagcaggtgaaggagtacagaatccaggagcccaacagagagaacagcttccacagcagcatcgaggccatctgggaggagtgcaaggagatcgtgaaggccagcagcaagaagagccaccagatcgaggagctggagcagcagatcgagaagctgcaggccgaggtgaagggctacaaggacgagaacaacagactgaaggagaaggagcacaagaaccaggacgacctgctgaaggagaaggagaccctgatccagcagctgaaggaggagctgcaggagaagaacgtgaccctggacgtgcagatccagcacgtggtggagggcaagagagccctgagcgagctgacccagggcgtgacctgctacaaggccaagatcaaggagctggagaccatcctggagacccagaaggtggagtgcagccacagcgccaagctggagcaggacatcctggagaaggagagcatcatcctgaagctggagagaaacctgaaggagttccaggagcacctgcaggacagcgtgaagaacaccaaggacctgaacgtgaaggagctgaagctgaaggaggagatcacccagctgaccaacaacctgcaggacatgaagcacctgctgcagctgaaggaggaggaggaggagaccaacagacaggagaccgagaagctgaaggaggagctgagcgccagcagcgccagaacccagaacctgaaggccgacctgcagagaaaggaggaggactacgccgacctgaaggagaagctgaccgacgccaagaagcagatcaagcaggtgcagaaggaggtgagcgtgatgagagacgaggacaagctgctgagaatcaagatcaacgagctggagaagaagaagaaccagtgcagccaggagctggacatgaagcagagaaccatccagcagctgaaggagcagctgaacaaccagaaggtggaggaggccatccagcagtacgagagagcctgcaaggacctgaacgtgaaggagaagatcatcgaggacatgagaatgaccctggaggagcaggagcagacccaggtggagcaggaccaggtgctggaggccaagctggaggaggtggagagactggccaccgagctggagaagtggaaggagaagtgcaacgacctggagaccaagaacaaccagagaagcaacaaggagcacgagaacaacaccgacgtgctgggcaagctgaccaacctgcaggacgagctgcaggagagcgagcagaagtacaacgccgacagaaagaagtggctggaggagaagatgatgctgatcacccaggccaaggaggccgagaacatcagaaacaaggagatgaagaagtacgccgaggacagagagagattcttcaagcagcagaacgagatggagatcctgaccgcccagctgaccgagaaggacagcgacctgcagaagtggagagaggagagagaccagctggtggccgccctggagatccagctgaaggccctgatcagcagcaacgtgcagaaggacaacgagatcgagcagctgaagagaatcatcagcgagaccagcaagatcgagacccagatcatggacatcaagcccaagagaatcagcagcgccgaccccgacaagctgcagaccgagcccctgagcaccagcttcgagatcagcagaaacaagatcgaggacggcagcgtggtgctggacagctgcgaggtgagcaccgagaacgaccagagcaccagattccccaagcccgagctggagatccagttcacccccctgcagcccaacaagatggccgtgaagcaccccggctgcaccacccccgtgaccgtgaagatccccaaggccagaaagagaaagagcaacgagatggaggaggacctggtgaagtgcgagaacaagaagaacgccacccccagaaccaacctgaagttccccatcagcgacgacagaaacagcagcgtgaagaaggagcagaaggtggccatcagacccagcagcaagaagacctacagcctgagaagccaggccagcatcatcggcgtgaacctggccaccaagaagaaggagggcaccctgcagaagttcggcgacttcctgcagcacagccccagcatcctgcagagcaaggccaagaagatcatcgagaccatgagcagcagcaagctgagcaacgtggaggccagcaaggagaacgtgagccagcccaagagagccaagagaaagctgtacaccagcgagatcagcagccccatcgacatcagcggccaggtgatcctgatggaccagaagatgaaggagagcgaccaccagatcatcaagagaagactgagaaccaagaccgccaagtag

SEQ ID NO: 189846 - protein, 103 aa, Artificial Sequence
  derived and/or modified sequence
MADKEKKKKESILDLSKYIDKTIRVKFQGGREASGILKGFDPLLNLVLDGTIEYMRDPDDQYKLTEDTRQLGLVVCRGTSVVLICPQDGMEAIPNPFIQQQDA

SEQ ID NO: 189847 - DNA, 312 bp, Artificial Sequence
  derived and/or modified sequence
atggcggataaagaaaaaaaaaaaaaggaatctatattggacctcagcaaatatatcgataagactatacgcgtgaaattccaaggggggcgcgaggcctccggcatcttaaagggcttcgaccctctgttaaatctggtgctcgatggcacgattgaatatatgagagaccctgacgaccagtacaaactgactgaggacacacgtcagctgggcctagttgtctgcagagggacgtcagtggtgctaatatgcccccaggacggtatggaagcaatacccaatcccttcattcagcagcaggacgcctag

SEQ ID NO: 189848 - DNA, 312 bp, Artificial Sequence
  derived and/or modified sequence
atggctgacaaggagaagaagaagaaggagagcatcctggacctgagcaagtacatcgacaagaccatccgggtgaagttccagggcggccgggaggccagcggcatcctgaagggctttgaccccctgctgaacctggtgctggatggcaccatcgagtacatgagggaccctgatgaccagtacaagctgacagaggacacccggcagctgggcctggtggtgtgccggggcacctctgtggtgctgatctgcccccaggacggcatggaggccatccccaaccccttcatccagcagcaggatgcctag

SEQ ID NO: 189849 - DNA, 518 bp, Artificial Sequence
  derived and/or modified sequence
gtcaaagggcgcggggcggtgcctgcgaagagccacacggcgcgacaagatggcggataaggagaagaagaaaaaggagagcatcttggacttgtccaagtacatcgacaagacgatccgggtaaagttccagggaggccgcgaagccagtggaatcctgaagggcttcgacccactcctcaaccttgtgctggacggcaccattgagtacatgcgagaccctgacgaccagtacaagctcacggaggacacccggcagctgggcctcgtggtgtgccggggcacgtccgtggtgctaatctgcccgcaggacggcatggaggccatccccaaccccttcatccagcagcaggacgcctagcctggccgggggcgcggggggtgcagggcaggcccgagcagctcggtttcccgcggacttggctgctgctcccaccgcagtaccgcctcctggaacggaagcattttcctttttgtataggttgaatttttgttttcttaataaaattgcaaacctc

SEQ ID NO: 189850 - DNA, 312 bp, Artificial Sequence
  derived and/or modified sequence
atggccgacaaggagaagaagaagaaggagagcatcctggacctgagcaaatatattgacaaaaccatcagggttaagtttcagggcggaagggaggcaagcgggatcctgaaagggttcgatcctctcctgaatttggtactggatggcacgattgagtacatgcgcgatccagatgaccagtacaaactgactgaggacacccggcaactcgggctagtggtttgtcgtggcacaagcgtcgtgctgatctgtccgcaggacggaatggaggccattcccaatccctttatccaacagcaggacgcctag

SEQ ID NO: 189851 - DNA, 312 bp, Artificial Sequence
  derived and/or modified sequence
atggctgacaaggaaaagaagaagaaggaatctattctggacctgagtaaatacatagacaaaaccattcgtgttaaatttcagggagggagggaagcttccgggatcttaaagggatttgacccactactcaacttagtactggatggaacaatcgagtatatgcgagatcctgacgatcaatataaattaaccgaagatacgcgccagctggggctggtagtgtgtcgcggtacatccgtggtactgatatgtccccaggacgggatggaagccatcccaaacccgtttattcagcagcaggatgcgtag

SEQ ID NO: 189852 - DNA, 312 bp, Artificial Sequence
  derived and/or modified sequence
atggccgacaaggagaagaagaagaaggagagcatcctggacctgagcaagtacatcgacaagaccatcagagtgaagttccagggcggcagagaggccagcggcatcctgaagggcttcgaccccctgctgaacctggtgctggacggcaccatcgagtacatgagagaccccgacgaccagtacaagctgaccgaggacaccagacagctgggcctggtggtgtgcagaggcaccagcgtggtgctgatctgcccccaggacggcatggaggccatccccaaccccttcatccagcagcaggacgcctag

SEQ ID NO: 189853 - DNA, 519 bp, Artificial Sequence
  derived and/or modified sequence
atgctgctgctgccccccagacccccccaccccagaagcagcagccccgaggccatggacccccccccccccaaggccccccccttccccaaggccgagggccccagcagcacccccagcagcgccgccggccccagaccccccagactgggcagacacctgctgatcgacgccaacggcgtgccctacacctacaccgtgcagctggaggaggagcccagaggccccccccagagagaggccccccccggcgagcccggccccagaaagggctacagctgccccgagtgcgccagagtgttcgccagccccctgagactgcagagccacagagtgagccacagcgacctgaagcccttcacctgcggcgcctgcggcaaggccttcaagagaagcagccacctgagcagacacagagccacccacagagccagagccggccccccccacacctgccccctgtgccccagaagattccaggacgccgccgagctggcccagcacgtgagactgcactag

SEQ ID NO: 189854 - DNA, 519 bp, Artificial Sequence
  derived and/or modified sequence
atgctcttactgcccccacgaccgccgcacccccgttcctcatccccggaagcgatggaccctcccccgcctaaagctccgcctttcccaaaggcggagggcccatcatctaccccctcgtccgccgcaggccctagaccgccaaggctcggccgtcaccttttaattgacgctaatggtgtgccttacacctacaccgtgcagctagaagaagaaccgcgaggtccaccccagcgagaagcccctccaggagagcccggcccgcggaagggttactcctgccccgagtgcgctcgcgttttcgcctcccccctccgactccaaagtcaccgggtgtcacattccgatctcaaacctttcacctgtggagcctgcgggaaggcctttaaaagatcctctcacttaagcagacatcgcgcgacacacagagcgagggctggccctcctcacacctgccccctctgcccaagacgttttcaggacgcagcagagctggcccagcacgtgcgcctgcattag

SEQ ID NO: 189855 - DNA, 519 bp, Artificial Sequence
  derived and/or modified sequence
atgcttcttttgccccccaggccccctcacccccggtcatcctctcctgaggcaatggatccaccacctcctaaggcccctcccttcccaaaagcggaggggccaagcagcactcctagtagtgcagccggtcccaggccccctcgtttgggccggcacctgctgatcgacgccaacggggttccgtacacatatacggttcaactggaggaggaaccccggggccctccccagagggaggcccctcccggcgaacccgggccaagaaaagggtactcctgtccggagtgtgcacgcgtgtttgcttcaccgttgcggctacaaagccacagggtaagccattcggacctcaagcctttcacatgtggagcgtgcgggaaagcttttaagaggagttcacacttgtcaaggcatcgcgccactcacagagccagagctggcccaccacatacctgcccattatgtccacgcagatttcaggacgcagcggagctagcccaacacgtgaggctgcactag

SEQ ID NO: 189856 - DNA, 519 bp, Artificial Sequence
  derived and/or modified sequence
atgctgttgctgccgccaaggcccccacatcctagaagctcatcccctgaggccatggacccccccccacctaaggcgcctcctttcccgaaggccgagggcccgagttctacaccctctagcgccgccgggcctaggcccccaaggttaggccggcaccttctgatcgatgcaaacggcgttccctacacatatacagttcaactggaggaggagccccgcggccccccccagcgggaagccccacccggcgagccaggaccacggaaaggctactcttgtcctgaatgtgcccgcgtctttgcaagtcctctaaggctacagtctcacagagtgtcccactctgacctgaagccatttacttgcggcgcctgcggaaaagccttcaagcggtcctcccacttatcaaggcatagagctacccaccgagcgcgcgcaggacctccacatacatgcccactgtgtccgaggaggttccaggatgcagcggagctggcacagcacgtcaggctccactag

SEQ ID NO: 189857 - DNA, 519 bp, Artificial Sequence
  derived and/or modified sequence
atgctgctgctgcccccccggcccccccaccccaggagcagcagccctgaggccatggaccccccaccacccaaggccccacccttccccaaggccgagggccccagcagcacccccagcagcgctgctggccccaggcctccccggctgggccgccacctgctgattgatgccaatggagtgccctacacctacacagtgcagctggaggaggagccccggggccccccccagcgggaggcccctcctggagagcccggccccaggaagggctacagctgcccagaatgtgcccgggtgtttgccagccccctgcggctgcagagccaccgggtgagccacagcgacctgaagcccttcacctgtggggcctgtgggaaggccttcaagaggagcagccacctgagccgccaccgggccacccaccgggcccgggccggccccccccacacctgccccctgtgcccccggcgcttccaggatgctgctgagctggcccagcacgtgcggctgcactag

SEQ ID NO: 189858 - DNA, 519 bp, Artificial Sequence
  derived and/or modified sequence
atgctgctgctgcccccccggcccccccacccccggagcagcagccccgaagccatggatcctcctcctcctaaagcgccaccttttccaaaggctgagggtccaagttcaactcctagtagtgctgccggacctcggccaccacgtctggggcgacatctcctgatcgacgctaacggcgtaccctacacttacaccgtgcagttagaggaagagccacgcgggccccctcagcgtgaggcaccccctggcgagcctggcccacgcaaaggctactcgtgtcctgagtgtgctagagtgttcgcttcaccattgcgcctgcagagtcaccgtgttagccactctgatttaaagccttttacatgtggcgcctgtgggaaggccttcaagcgaagctcgcatctttccagacaccgagccacccatcgcgctagagctgggccccctcacacctgccccctctgcccaaggcgcttccaagacgcggccgaacttgcccagcacgtgagactgcattag

SEQ ID NO: 189859 - DNA, 519 bp, Artificial Sequence
  derived and/or modified sequence
atgctgctgctgcccccccggcccccccacccccggagcagcagccctgaagccatggatccaccccctccaaaggcacctcccttcccaaaggctgaggggccctcttctacgccatcttccgctgccggcccccgccccccgcgtctgggaaggcatttgctgatagatgctaacggggtgccttacacctatacggtgcaactcgaggaggagccacggggaccgccccaaagagaggcaccacccggagaaccagggcccagaaaaggctactcatgcccagagtgcgctcgtgtcttcgcatcccctttgagactgcagtcccacagggttagtcactcagatttaaagcccttcacttgcggtgcttgcggaaaggctttcaagaggagctcccatctcagcagacatagggcaacgcaccgcgctagggccggaccccctcacacatgtccactttgtccccgcaggttccaggacgctgccgaattggctcagcatgtacgtttacattag

SEQ ID NO: 189860 - DNA, 519 bp, Artificial Sequence
  derived and/or modified sequence
atgctgctgctgcccccccggcccccccacccccggagcagcagcccagaagcaatggaccccccccctccaaaggcaccacccttcccaaaggccgagggccctagcagcacaccctccagcgccgcagggcccagaccaccacgacttggacgccatctgctcattgacgcaaacggagtgccttatacctataccgtgcagctggaggaggaaccacgggggccccctcagcgcgaggcgcctcccggtgagcccggtccccgcaaaggctactcctgtccggagtgtgcacgtgtttttgcctctccactcaggcttcagtctcaccgcgtatcacattccgacttaaagcctttcacctgcggcgcgtgcggcaaagcctttaaacggtcatcacatctgagtaggcacagggccacccaccgggcgcgcgcggggcctccccacacatgcccactgtgtccgagacggtttcaagacgctgcagagctggcacaacacgtgaggctccactag

SEQ ID NO: 189861 - DNA, 519 bp, Artificial Sequence
  derived and/or modified sequence
atgctgctcctcccacccagacctccccatccgaggagtagttctcctgaggccatggaccctccaccaccaaaagcgcctccttttcccaaggctgagggtccctcgagtactccctctagtgctgcagggcctcgccctcctcggctcggacggcacctgttgatcgacgccaacggcgtgccctatacctacacggtgcagctggaagaagagcctcgcggaccccctcagagagaagcgcctcccggtgaacccggaccaagaaaaggctactcctgtcccgagtgcgcacgggttttcgcatcccccctccggcttcagtcacaccgggtatcacacagtgatctgaagcccttcacatgtggggcttgtggcaaggcgtttaaaagaagcagccatttatcccggcatagggccacgcacagggccagggccggaccccctcatacatgtccgctgtgtccacggagattccaggacgcagccgaactggcacagcacgttcggttgcactag

SEQ ID NO: 189862 - DNA, 519 bp, Artificial Sequence
  derived and/or modified sequence
atgcttttactgccccctcggcctccccaccctaggagtagttcacccgaagcaatggacccccctcctccaaaggctcctcccttcccaaaggctgagggcccaagctcaacgccttcctctgctgcgggtcccagaccgccacggttaggtcggcatctgctgatcgacgccaatggagtcccctacacgtatactgtacagttagaggaggagccgagaggtcccccacagcgcgaggcccctcccggtgaaccaggacccagaaagggttactcttgtccagaatgcgcaagggtatttgcctccccattgcggctgcaatcgcacagggtgagccacagcgaccttaagccttttacttgcggcgcatgtggaaaggccttcaaaagatcaagtcatctgtcacgccatcgcgcaactcaccgggctcgagccggtccaccccatacctgtcccctgtgtccgcgtagattccaggatgcagctgagctagctcagcatgtacgcttacactag

SEQ ID NO: 189863 - DNA, 519 bp, Artificial Sequence
  derived and/or modified sequence
atgctcctactgcctcctagaccaccacacccaagatctagtagtcccgaagctatggacccgccacccccaaaggcgcctccatttcctaaggcagagggaccatcgtcgactccgagcagtgccgcaggccctcgcccacctcgcctgggcagacacctactgattgacgccaacggagtgccctacacttacaccgtccagcttgaggaagaaccacgtggacccccacagcgcgaggcacctcccggagaacctggcccacggaaaggatacagctgcccagaatgtgctagggtattcgcgagtcctctccgcctacagagccaccgcgtaagtcacagcgatctgaaaccttttacatgcggcgcttgcggaaaggcctttaaacgctctagtcatctgtcaaggcacagagcaacccatagagcaagagcaggccctccacacacatgcccactgtgccctaggcggttccaggacgccgctgagctggcccagcacgttcgtctccactag

SEQ ID NO: 189864 - DNA, 1131 bp, Artificial Sequence
  derived and/or modified sequence
cccctcgcacccccgcgcccccagtccccgcgtccccggcgccgccggcccggagctgcccggaagtctcggttccgccgccggcgctcgccaggggaagcccggggccgcccgggacctcggcccgttcctccggacccgagaggccgccgcacgggctgccgctccagatgctgctgctgccgccgcggccaccccaccctcggtcctcctctccggaggccatggacccaccgccccccaaggctccccctttccccaaggcggaaggcccctcctccactccttcctcggcggcggggccccgacccccgcggctgggccgccacctcctcatcgacgccaatggggtcccctacacatacacggtgcagctggaggaggagccccggggcccgccccagcgcgaggcgcccccaggagagcccggccctcgcaagggctacagctgcccggagtgcgcccgtgtctttgccagccctctgcggctgcagagccaccgcgtgtcgcactcggacctcaagcccttcacgtgcggcgcctgcggcaaggccttcaagcgctccagccacctgtcgcggcatcgcgccacgcaccgcgcccgcgccgggccgccgcacacctgcccgctctgcccacgccgcttccaggacgccgcggagctggcgcagcacgtgcgcctccactaagctcgagacccggcctgtgctgccctgcccgtctcagggccaccaagtctgacccacacagcgtcactcactcccacacacaccccctggctctgctgaggttactgccttaccctgggcctcagtttccccaccttccaaagggaggagcatcattccttccttaccccctttctagctgtgtgatgtagaccaaagtcgttgcccctccctgggcctgggaaccagtcggaactgggttccagtccagctgtgctgtgtgagcctgtgcaagtgacatgacctctctaaaccttggttttctgctctctggagcggtgaaccggtggttgtctgcggggaagagatgataaagagcacgggcacggtctggttcatttctgtatctaccccccttccgcccacgcccccgaccctttgctcaataaacattccgcactcc

SEQ ID NO: 189865 - DNA, 1418 bp, Artificial Sequence
  derived and/or modified sequence
gtaaactgaactggggctgggcaacaggaaaaaagaagaaaccacagattagagaaatctcggcggtcaggaggcccggggtctaagatgtaaagaggtaaacagatttagggattgattgtctgctggggtgggttgagaggagaaaagggaagaaaagtcgggggactacgtcctcagacctgacctgagtggtgagaggtggacccaggaggagtggcaggtggtggcggggttttgcagagctcagttggaggccctctccgaggcagcttgatggaacgtgggagagccgggctggagtcacagtttttattttgctagggaggtagtcagtggcgcacaaagggtaacaagcagtgatagtggggatgctttccattttaggaaacttttcctaaaaggaagtggcaattttaactaatctcccctccgccgctcccagctgccgctccagatgctgctgctgccgccgcggccaccccaccctcggtcctcctctccggaggccatggacccaccgccccccaaggctccccctttccccaaggcggaaggcccctcctccactccttcctcggcggcggggccccgacccccgcggctgggccgccacctcctcatcgacgccaatggggtcccctacacatacacggtgcagctggaggaggagccccggggcccgccccagcgcgaggcgcccccaggagagcccggccctcgcaagggctacagctgcccggagtgcgcccgtgtctttgccagccctctgcggctgcagagccaccgcgtgtcgcactcggacctcaagcccttcacgtgcggcgcctgcggcaaggccttcaagcgctccagccacctgtcgcggcatcgcgccacgcaccgcgcccgcgccgggccgccgcacacctgcccgctctgcccacgccgcttccaggacgccgcggagctggcgcagcacgtgcgcctccactaagctcgagacccggcctgtgctgccctgcccgtctcagggccaccaagtctgacccacacagcgtcactcactcccacacacaccccctggctctgctgaggttactgccttaccctgggcctcagtttccccaccttccaaagggaggagcatcattccttccttaccccctttctagctgtgtgatgtagaccaaagtcgttgcccctccctgggcctgggaaccagtcggaactgggttccagtccagctgtgctgtgtgagcctgtgcaagtgacatgacctctctaaaccttggttttctgctctctggagcggtgaaccggtggttgtctgcggggaagagatgataaagagcacgggcacggtctggttcatttctgtatctaccccccttccgcccacgcccccgaccctttgctcaataaacattccgcactcc

SEQ ID NO: 189866 - DNA, 1025 bp, Artificial Sequence
  derived and/or modified sequence
agattagagaaatctcggcggtcaggaggcccggggtctaagatgtaaagagctgccgctccagatgctgctgctgccgccgcggccaccccaccctcggtcctcctctccggaggccatggacccaccgccccccaaggctccccctttccccaaggcggaaggcccctcctccactccttcctcggcggcggggccccgacccccgcggctgggccgccacctcctcatcgacgccaatggggtcccctacacatacacggtgcagctggaggaggagccccggggcccgccccagcgcgaggcgcccccaggagagcccggccctcgcaagggctacagctgcccggagtgcgcccgtgtctttgccagccctctgcggctgcagagccaccgcgtgtcgcactcggacctcaagcccttcacgtgcggcgcctgcggcaaggccttcaagcgctccagccacctgtcgcggcatcgcgccacgcaccgcgcccgcgccgggccgccgcacacctgcccgctctgcccacgccgcttccaggacgccgcggagctggcgcagcacgtgcgcctccactaagctcgagacccggcctgtgctgccctgcccgtctcagggccaccaagtctgacccacacagcgtcactcactcccacacacaccccctggctctgctgaggttactgccttaccctgggcctcagtttccccaccttccaaagggaggagcatcattccttccttaccccctttctagctgtgtgatgtagaccaaagtcgttgcccctccctgggcctgggaaccagtcggaactgggttccagtccagctgtgctgtgtgagcctgtgcaagtgacatgacctctctaaaccttggttttctgctctctggagcggtgaaccggtggttgtctgcggggaagagatgataaagagcacgggcacggtctggttcatttctgtatctaccccccttccgcccacgcccccgaccctttgctcaataaacattccgcactcc

SEQ ID NO: 189867 - protein, 525 aa, Artificial Sequence
  derived and/or modified sequence
MPLLDGDLEGSGKHSSRKVDSPFGPGSPSKGFFSRGPQPRPSSPMSAPVRPKTSPGSPKTVFPFSYQESPPRSPRRMSFSGIFRSSSKESSPNSNPATSPGGIRFFSRSRKTSGLSSSPSTPTQVTKQHTFPLESYKHEPERLENRIYASSSPPDTGQRFCPSSFQSPTRPPLASPTHYAPSKAAALAAALGPAEAGMLEKLEFEDEAVEDSESGVYMRFMRSHKCYDIVPTSSKLVVFDTTLQVKKAFFALVANGVRAAPLWESKKQSFVGMLTITDFINILHRYYKSPMVQIYELEEHKIETWRELYLQETFKPLVNISPDASLFDAVYSLIKNKIHRLPVIDPISGNALYILTHKRILKFLQLFMSDMPKPAFMKQNLDELGIGTYHNIAFIHPDTPIIKALNIFVERRISALPVVDESGKVVDIYSKFDVINLAAEKTYNNLDITVTQALQHRSQYFEGVVKCNKLEILETIVDRIVRAEVHRLVVVNEADSIVGIISLSDILQALILTPAGAKQKETETE

SEQ ID NO: 189868 - protein, 328 aa, Artificial Sequence
  derived and/or modified sequence
MLEKLEFEDEAVEDSESGVYMRFMRSHKCYDIVPTSSKLVVFDTTLQVKKAFFALVANGVRAAPLWESKKQSFVGMLTITDFINILHRYYKSPMVQIYELEEHKIETWRELYLQETFKPLVNISPDASLFDAVYSLIKNKIHRLPVIDPISGNALYILTHKRILKFLQLFMSDMPKPAFMKQNLDELGIGTYHNIAFIHPDTPIIKALNIFVERRISALPVVDESGKVVDIYSKFDVINLAAEKTYNNLDITVTQALQHRSQYFEGVVKCNKLEILETIVDRIVRAEVHRLVVVNEADSIVGIISLSDILQALILTPAGAKQKETETE

SEQ ID NO: 189869 - protein, 569 aa, Artificial Sequence
  derived and/or modified sequence
MGSAVMDTKKKKDVSSPGGSGGKKNASQKRRSLRVHIPDLSSFAMPLLDGDLEGSGKHSSRKVDSPFGPGSPSKGFFSRGPQPRPSSPMSAPVRPKTSPGSPKTVFPFSYQESPPRSPRRMSFSGIFRSSSKESSPNSNPATSPGGIRFFSRSRKTSGLSSSPSTPTQVTKQHTFPLESYKHEPERLENRIYASSSPPDTGQRFCPSSFQSPTRPPLASPTHYAPSKAAALAAALGPAEAGMLEKLEFEDEAVEDSESGVYMRFMRSHKCYDIVPTSSKLVVFDTTLQVKKAFFALVANGVRAAPLWESKKQSFVGMLTITDFINILHRYYKSPMVQIYELEEHKIETWRELYLQETFKPLVNISPDASLFDAVYSLIKNKIHRLPVIDPISGNALYILTHKRILKFLQLFMSDMPKPAFMKQNLDELGIGTYHNIAFIHPDTPIIKALNIFVERRISALPVVDESGKVVDIYSKFDVINLAAEKTYNNLDITVTQALQHRSQYFEGVVKCNKLEILETIVDRIVRAEVHRLVVVNEADSIVGIISLSDILQALILTPAGAKQKETETE

SEQ ID NO: 189870 - DNA, 1710 bp, Artificial Sequence
  derived and/or modified sequence
atgggctccgctgtgatggataccaaaaaaaaaaaggatgtgtcttcccccggcggatcaggaggcaaaaaaaacgcatcccaaaagcggagaagtctacgggttcatattccggatctgtcttctttcgccatgcccttgctggacggagacctggaaggcagcgggaaacacagctctaggaaggtcgattctccatttggccccggctccccaagtaagggcttttttagtaggggcccacagccacggcccagttctcccatgagtgcaccggtacgtccaaagacaagcccagggagccccaaaactgttttcccatttagttatcaggagagcccgcctagatccccacggaggatgtcctttagtggaatcttccgcagtagtagtaaggaaagtagcccaaactctaatccagcaacttcgccaggcggaatacgattcttcagccgctcccgaaagacgtctggcttatcatcatctccctcaactcctacccaagtgaccaaacaacacaccttcccattggaatcttacaaacatgaaccagagcgcctggaaaatcgcatatacgcaagctcctctccccccgataccgggcaaaggttttgcccatccagtttccagagccccactcggccaccgctggcatctcctacacattacgcccccagcaaggctgctgcccttgcagcagcccttggcccggctgaagccgggatgttggagaagcttgagttcgaagacgaggcagtcgaagacagtgaatccggtgtctacatgaggttcatgaggtcccataagtgctatgacatcgtaccaacttccagcaagctcgtggtgtttgacactacgctccaggtcaagaaggccttctttgcactggtggccaacggggtgcgagccgcccccctttgggaatcaaagaaacaatctttcgtgggtatgttgaccatcacagactttatcaacatcctgcaccgctactataagtccccaatggtgcagatctacgagttggaggagcataagattgagacttggcgtgagctctacctacaggagacctttaagccgctggttaacatctccccagacgcctctctgtttgacgcagtgtactcgctgattaagaataagatccataggttaccggtgattgatcccattagcggcaatgcactgtacatactcacgcacaaaagaatactgaagttcctgcagctgttcatgtccgatatgccaaaacccgcatttatgaaacagaatctggatgaactcggaattggaacctaccataacatcgccttcatccatcctgatacgccgatcatcaaagcactgaatattttcgttgagcgtcggatcagtgctctgcctgttgttgacgaaagtggcaaggtcgtagatatttattcgaagttcgatgtgattaaccttgccgcagaaaagacttacaataacttagatataacagtgacacaagcgctccagcatcgctctcagtactttgagggcgtggttaagtgcaacaaattggagatcctcgagaccatcgtggatagaatcgtgagagcagaagttcatcgattagtggtggtgaatgaggccgactctatcgtcggtattatatccttgagcgacatccttcaagccctaatcctcacccctgccggagctaagcaaaaagagactgaaacagagtag

SEQ ID NO: 189871 - DNA, 1710 bp, Artificial Sequence
  derived and/or modified sequence
atgggcagcgctgtgatggacaccaagaagaagaaggatgtgagcagccctgggggcagcggcggcaagaagaatgccagccagaagaggaggagcctgcgggtgcacatcccagacctgagcagctttgccatgcccctgctggatggagacctggagggcagcggcaagcacagcagcaggaaggtggacagcccctttggacctggcagccccagcaagggcttcttcagccggggcccccagccccggcccagcagccccatgtctgcccctgtgcggcccaagaccagccctggcagccccaagacagtgttccccttctcctaccaggagagcccccccaggagccccaggaggatgtccttcagcggcatcttccgcagcagcagcaaggagagcagccccaacagcaacccagccaccagccctgggggcatccgcttcttcagccgcagcaggaagaccagcggcctgagcagcagccccagcacccccacccaggtgaccaagcagcacaccttccccctggagagctacaagcatgagcctgagcggctggagaaccgcatctatgccagcagcagccccccagacaccggccagcgcttctgccccagcagcttccagagccccaccaggcctcccctggccagccccacccactacgcccccagcaaggctgctgccctggccgccgccctgggccctgctgaggccggcatgctggagaagctggagtttgaagatgaggccgtggaggacagcgagagcggcgtgtacatgaggttcatgaggagccacaagtgctatgacatcgtgcccaccagcagcaagctggtggtgtttgacaccaccctgcaggtgaagaaggccttctttgccctggtggccaatggagtgcgggccgcccccctgtgggagagcaagaagcagagctttgtgggcatgctgaccatcacagacttcatcaacatcctgcaccgctactacaagagccccatggtgcagatctatgagctggaggagcacaagattgagacctggagggagctgtacctgcaggagaccttcaagcccctggtgaacatcagcccagatgccagcctgtttgatgctgtgtacagcctcatcaagaacaagatccaccggctgcccgtcatcgaccccatctctggaaatgccctgtacatcctgacccacaagaggatcctgaagttcctgcagctgttcatgtctgacatgcccaagccagccttcatgaagcagaacctggatgagctgggcatcggcacctaccacaacatcgccttcatccacccagacacccccatcatcaaggccctgaacatctttgtggagcggcgcatcagcgccctgcctgtggtggatgagagcggcaaggtggtggacatctacagcaagtttgatgtgatcaacctggccgctgagaagacctacaacaacctggacatcaccgtgacccaggccctgcagcacaggagccagtactttgaaggagtggtgaagtgcaacaagctggagatcctggagaccatcgtggaccgcatcgtgcgggcagaggtgcaccggctggtggtggtgaatgaggccgacagcatcgtgggcatcatcagcctgagtgacatcctgcaggccctgatcctgaccccagctggggccaagcagaaggagacagaaacagaatag

SEQ ID NO: 189872 - DNA, 1710 bp, Artificial Sequence
  derived and/or modified sequence
atgggcagcgccgtgatggacaccaagaagaagaaggacgtgagctctcctggaggctctggcggaaaaaagaatgccagccagaaacgtagatcacttagagtgcacatccctgatctaagcagcttcgctatgcctctcctagatggggacctcgagggtagcggcaagcatagcagccggaaggtcgacagcccctttggccccgggtcccctagcaagggattttttagcaggggtccccaacctcgaccaagttctcccatgtcagcccctgtgagaccaaagacctctccaggatccccaaaaaccgtgttccctttttcgtaccaagaaagtccgcccagaagccctagaaggatgtcatttagcgggatttttcgcagttcatctaaagagtccagcccgaactcaaaccccgccacctccccgggtggaattagattcttcagtcggtctagaaaaaccagcggccttagctcttccccgtctaccccgacacaagtgacaaaacagcacacttttcccctggagtcctacaagcacgagcccgagaggttggagaaccgcatctacgcctcctccagcccacccgatacgggacagaggttctgcccgagctctttccagtcacctacacgccctcctctggcctcacctacacattatgctccatctaaggctgccgccttagctgctgccctgggacctgccgaggccggcatgctcgagaagctggaattcgaggacgaggctgttgaggacagtgagtcgggtgtgtatatgcgcttcatgcgaagtcacaagtgctacgacatcgtgcccacctcatcgaagcttgtggtgtttgacacaaccctgcaagtcaaaaaggcttttttcgccctggtagctaacggtgttcgcgctgcccctctgtgggaatctaaaaagcagtcattcgttgggatgttgactattactgactttattaatatcctgcaccgatattataagagcccaatggttcagatctatgagctggaggaacacaagattgagacctggagagaactatatctccaagagacatttaaaccacttgttaacatcagcccagacgcaagtctctttgacgccgtgtacagtctgatcaaaaacaaaatccatcgactcccagttatcgaccccatcagcgggaatgcattgtacattctgacacataaacggatccttaagtttctacaactatttatgagcgacatgcccaaaccagcgtttatgaaacaaaacctcgacgagctcggcatcggaacttatcacaacatcgcattcatccaccccgatacgcccattattaaagccctgaacatttttgtcgagcggcggataagcgccctacctgttgtagatgagagcggaaaggtggttgacatctactcgaagttcgacgtgatcaacctggccgcggaaaagacttataacaacttggacattactgtgacacaggctctgcaacatcgctcccagtactttgagggcgtggtcaaatgcaataagctcgaaatactggaaaccattgtcgacagaatcgtcagagccgaagtgcaccgcctcgtggttgtaaacgaggccgacagtatcgtgggtatcatcagcctgtctgatattctgcaggcgttgatcctcacgcccgcaggtgcaaagcaaaaagaaaccgaaaccgaatag

SEQ ID NO: 189873 - DNA, 1710 bp, Artificial Sequence
  derived and/or modified sequence
atgggctcggcagtcatggacactaaaaaaaaaaaagacgtgtccagtccgggaggcagcggcggtaagaagaatgcatcacaaaaaagaagaagcctgagagtgcatattcccgacttgtcatcctttgctatgcccctcctggacggagacttagaaggttctggaaagcactcgtcacgcaaagtcgacagtccattcggcccaggttcaccatccaaaggattctttagtagaggcccacagccacgcccatccagtcccatgagcgctccagtcagacccaaaacttcacctgggagccccaaaacggtgttcccatttagctatcaggagtccccccctagaagccctagaaggatgagcttttcaggaatttttcgctcctcaagcaaagagtcgtctcctaattccaaccctgcaacatctcccggaggcattcgcttttttagcagatcgaggaagacctctggcctttcatccagtccaagcacacctacacaggtgaccaaacagcatacctttccgctggagtcttataagcacgagcctgaacgcctggagaatcggatctacgcgtctagctcgccacctgataccgggcagagattctgcccttcctctttccaatcacctactagaccaccattagcctccccaactcactacgcaccgtcgaaagccgcagccctcgctgcagcactcggcccagccgaggccggaatgctagagaaacttgagttcgaggacgaggcggtggaggatagcgagagcggggtgtatatgaggtttatgcgcagtcataaatgttatgatattgtgcctacctcctcaaagttagtggtatttgatacaaccctgcaagtgaaaaaggcattttttgctctggtggcaaatggggttcgcgcagcaccactttgggaaagcaagaagcagagtttcgtcggtatgcttaccattacggacttcatcaatattctgcataggtactacaaatctcctatggtccagatctatgagctcgaagaacacaaaatagagacttggagggagctgtatctgcaggagacctttaaacctcttgtcaatatttccccagatgcgagccttttcgatgccgtgtattctctgataaagaataaaatccacaggctccctgtaattgacccgatcagtggaaacgccctgtacatcctgacacataagcgcatactcaaatttctccagctcttcatgagtgacatgcccaagcccgcttttatgaagcaaaacctggacgagttaggtatcgggacctatcataacattgccttcattcatccagatacccccatcatcaaagcactgaacattttcgtagagcggcgtataagtgccctgccagtcgttgacgagagcggaaaggtggtggacatttacagcaaattcgacgtgattaatttagcagcagaaaaaacctataataatttggacattacagtcacccaggccctccaacatcgttctcagtactttgaaggcgttgtcaagtgcaataagctggaaatcctcgaaacaattgtggacagaattgtgcgggctgaggtgcatagactggtggttgtcaatgaagcagactccatagtcggtataatcagcctgtccgatatcctgcaagccctaattctgactccggctggcgcaaaacagaaagaaaccgagacggagtag

SEQ ID NO: 189874 - DNA, 2281 bp, Artificial Sequence
  derived and/or modified sequence
gggaatgacagtttgctgcagtcccgtcaatgggggaatctgcccgagctctgcctgcattttgagcagcaaagcagctccagccaccaagaccgttgcctgcgctgtcttaggccagcccatgctgtctgccagccgcttgttgcgctgccttggggactgggaacacacccagccccggtccccatctgttgcagacatgcagtggcagcagctcggagcacagccgaaccctagaaattgcctgtgctgaaggggctgggaaaccccttctctgatggacctttcgagtgaggcagcaggatttgtcagagctgggagtgccgcccgtccccgtcactcgcatcctgccatccagcagcttacaagcctgcactgcttattagcatctggaagagaagacctccaggaccccttggggctgagacctgagctccttcgccatgccgctcctggacggagacctggagggttccggaaagcattcctctcgaaaggtggacagccccttcggcccgggcagcccctccaaagggttcttctccagaggcccccagccccggccctccagccccatgtctgcacctgtgaggcccaagaccagccccggctctcccaaaaccgtgttcccgttctcctaccaggagtccccgccacgctcccctcgacgcatgagcttcagtgggatcttccgctcctcctccaaagagtcttcccccaactccaaccctgctacctcgcccgggggcatcaggtttttctcccgctccagaaaaacctccggcctctcctcctctccgtcaacacccacccaagtgaccaagcagcacacgtttcccctggaatcctataagcacgagcctgaacggttagagaatcgcatctatgcctcgtcttcccccccggacacagggcagaggttctgcccgtcttccttccagagcccgaccaggcctccactggcatcaccgacacactatgctccctccaaagccgcggcgctggcggcggccctgggacccgcggaagccggcatgctggagaagctggagttcgaggacgaagcagtagaagactcagaaagtggtgtttacatgcgattcatgaggtcacacaagtgttatgacatcgttccaaccagttcaaagcttgttgtctttgatactacattacaagttaaaaaggccttctttgctttggtagccaacggtgtccgagcagcgccactgtgggagagtaaaaaacaaagttttgtaggaatgctaacaattacagatttcataaatatactacatagatactataaatcacctatggtacagatttatgaattagaggaacataaaattgaaacatggagggagctttatttacaagaaacatttaagcctttagtgaatatatctccagatgcaagcctcttcgatgctgtatactccttgatcaaaaataaaatccacagattgcccgttattgaccctatcagtgggaatgcactttatatacttacccacaaaagaatcctcaagttcctccagctttttatgtctgatatgccaaagcctgccttcatgaagcagaacctggatgagcttggaataggaacgtaccacaacattgccttcatacatccagacactcccatcatcaaagccttgaacatatttgtggaaagacgaatatcagctctgcctgttgtggatgagtcaggaaaagttgtagatatttattccaaatttgatgtaattaatcttgctgctgagaaaacatacaataacctagatatcacggtgacccaggcccttcagcaccgttcacagtattttgaaggtgttgtgaagtgcaataagctggaaatactggagaccatcgtggacagaatagtaagagctgaggtccatcggctggtggtggtaaatgaagcagatagtattgtgggtattatttccctgtcggacattctgcaagccctgatcctcacaccagcaggtgccaaacaaaaggagacagaaacggagtgaccgccgtgaatgtagacgccctaggaggagaacttgaacaaagtctctgggtcacgttttgcctcatgaacactggctgcaagtggttaagaatgtatatcagggtttaacaataggtatttcttccagtgatgttgaaattaagcttaaaaaagaaagattttatgtgcttgaagattcaggcttgcattaaaagactgttttcagacctttgtctgaaggattttaaatgctgtatgtcattaaagtgcactgtgtcc

SEQ ID NO: 189875 - DNA, 3282 bp, Artificial Sequence
  derived and/or modified sequence
gagctggtttattctgcggccgaggattacatttatgcacgaacgggcttactggttccagattccccacttgggcacaggcataggaggcttgttttccaaattgctggttttaattgcacctgcctttcagattacctctgggaatctgtgggaggagccgagagggtggaaaatgtttcttagctttgcaaaaggaagaaaactttgtcacccagcgggagacctcagccacgagtaacccggggagacaccagaaccgggacgggctttgactgatttgcctacgagggttccgtaggaaaggacgcttgaattcggcgcttcggcggcggcggcggccgcgcgagttccctgctcaccctccctctccgcggaagtccccacgaggtggcttcagggtgtaacagagcgcgcggctccagtccgaaggcagcggccgggggagggaaggaggggaccgaacccccgaggagtttcgcagaatcaacttctggttagagttatgggaagcgcggttatggacaccaagaagaaaaaagatgtttccagccccggcgggagcggcggcaagaaaaatgccagccagaagaggcgttcgctgcgcgtgcacattccggacctgagctccttcgccatgccgctcctggacggagacctggagggttccggaaagcattcctctcgaaaggtggacagccccttcggcccgggcagcccctccaaagggttcttctccagaggcccccagccccggccctccagccccatgtctgcacctgtgaggcccaagaccagccccggctctcccaaaaccgtgttcccgttctcctaccaggagtccccgccacgctcccctcgacgcatgagcttcagtgggatcttccgctcctcctccaaagagtcttcccccaactccaaccctgctacctcgcccgggggcatcaggtttttctcccgctccagaaaaacctccggcctctcctcctctccgtcaacacccacccaagtgaccaagcagcacacgtttcccctggaatcctataagcacgagcctgaacggttagagaatcgcatctatgcctcgtcttcccccccggacacagggcagaggttctgcccgtcttccttccagagcccgaccaggcctccactggcatcaccgacacactatgctccctccaaagccgcggcgctggcggcggccctgggacccgcggaagccggcatgctggagaagctggagttcgaggacgaagcagtagaagactcagaaagtggtgtttacatgcgattcatgaggtcacacaagtgttatgacatcgttccaaccagttcaaagcttgttgtctttgatactacattacaagttaaaaaggccttctttgctttggtagccaacggtgtccgagcagcgccactgtgggagagtaaaaaacaaagttttgtaggaatgctaacaattacagatttcataaatatactacatagatactataaatcacctatggtacagatttatgaattagaggaacataaaattgaaacatggagggagctttatttacaagaaacatttaagcctttagtgaatatatctccagatgcaagcctcttcgatgctgtatactccttgatcaaaaataaaatccacagattgcccgttattgaccctatcagtgggaatgcactttatatacttacccacaaaagaatcctcaagttcctccagctttttatgtctgatatgccaaagcctgccttcatgaagcagaacctggatgagcttggaataggaacgtaccacaacattgccttcatacatccagacactcccatcatcaaagccttgaacatatttgtggaaagacgaatatcagctctgcctgttgtggatgagtcaggaaaagttgtagatatttattccaaatttgatgtaattaatcttgctgctgagaaaacatacaataacctagatatcacggtgacccaggcccttcagcaccgttcacagtattttgaaggtgttgtgaagtgcaataagctggaaatactggagaccatcgtggacagaatagtaagagctgaggtccatcggctggtggtggtaaatgaagcagatagtattgtgggtattatttccctgtcggacattctgcaagccctgatcctcacaccagcaggtgccaaacaaaaggagacagaaacggagtgaccgccgtgaatgtagacgccctaggaggagaacttgaacaaagtctctgggtcacgttttgcctcatgaacactggctgcaagtggttaagaatgtatatcagggtttaacaataggtatttcttccagtgatgttgaaattaagcttaaaaaagaaagattttatgtgcttgaagattcaggcttgcattaaaagactgttttcagacctttgtctgaaggattttaaatgctgtatgtcattaaagtgcactgtgtcctgaagttttcattatttttcatttcaaagaattcactggtatggaacaggtgatgtggcataaggtgagtgcacggtatgttcagatcacagtgccttatgtccgaatacagcaatatgtcaccgccgcagccggggcgcacgcgtgtgaaacaacaccgagcttgaatgtggaagtctttgaaccttttaccaaatcagtttgttttctttagatttgtcaaaaagttgtaatttgaatataaataattactttaaaattgtaatgacacttttacacgtaagtgttttgttctgggctaccgtgtcaacgaggctgctttacaacagctttatttatttttactttcatgcaatttttttacacatcttttggtggagtaaacttcaccacatccatgaataaactctcagttattttgaaatggcaaatttctcattatttaagtttggatctggaaaggacatgacttctgaaatagccgctgctgggttttaaaagctgaggtctctcaaagtgtggaggagacgttgccgtcaggcgggagccaagtgccgggaagatgtctattttttttcttgtgtattgaaatgtaaaatcatgatgtttgttatgactgctgatgcgattgtttttgtaaattttattgtggcatatacagtattgtcatacagttgaagagaaacaatgtttcctaatgtaagtgctctgaaaatgttgacactgtatatatatatatgaggatagtttgttttttttttgttttgggtttttttttttcagattgaaaaattaaaatagatccta

SEQ ID NO: 189876 - DNA, 1710 bp, Artificial Sequence
  derived and/or modified sequence
atgggcagcgccgtgatggacaccaagaagaagaaggacgtgagcagccccggcggcagcggcggcaagaagaacgccagccagaagagaagaagcctgagagtgcacatccccgacctgagcagcttcgccatgcccctgctggacggcgacctggagggcagcggcaagcacagcagcagaaaggtggacagccccttcggccccggcagccccagcaagggcttcttcagcagaggcccccagcccagacccagcagccccatgagcgcccccgtgagacccaagaccagccccggcagccccaagaccgtgttccccttcagctaccaggagagcccccccagaagccccagaagaatgagcttcagcggcatcttcagaagcagcagcaaggagagcagccccaacagcaaccccgccaccagccccggcggcatcagattcttcagcagaagcagaaagaccagcggcctgagcagcagccccagcacccccacccaggtgaccaagcagcacaccttccccctggagagctacaagcacgagcccgagagactggagaacagaatctacgccagcagcagcccccccgacaccggccagagattctgccccagcagcttccagagccccaccagaccccccctggccagccccacccactacgcccccagcaaggccgccgccctggccgccgccctgggccccgccgaggccggcatgctggagaagctggagttcgaggacgaggccgtggaggacagcgagagcggcgtgtacatgagattcatgagaagccacaagtgctacgacatcgtgcccaccagcagcaagctggtggtgttcgacaccaccctgcaggtgaagaaggccttcttcgccctggtggccaacggcgtgagagccgcccccctgtgggagagcaagaagcagagcttcgtgggcatgctgaccatcaccgacttcatcaacatcctgcacagatactacaagagccccatggtgcagatctacgagctggaggagcacaagatcgagacctggagagagctgtacctgcaggagaccttcaagcccctggtgaacatcagccccgacgccagcctgttcgacgccgtgtacagcctgatcaagaacaagatccacagactgcccgtgatcgaccccatcagcggcaacgccctgtacatcctgacccacaagagaatcctgaagttcctgcagctgttcatgagcgacatgcccaagcccgccttcatgaagcagaacctggacgagctgggcatcggcacctaccacaacatcgccttcatccaccccgacacccccatcatcaaggccctgaacatcttcgtggagagaagaatcagcgccctgcccgtggtggacgagagcggcaaggtggtggacatctacagcaagttcgacgtgatcaacctggccgccgagaagacctacaacaacctggacatcaccgtgacccaggccctgcagcacagaagccagtacttcgagggcgtggtgaagtgcaacaagctggagatcctggagaccatcgtggacagaatcgtgagagccgaggtgcacagactggtggtggtgaacgaggccgacagcatcgtgggcatcatcagcctgagcgacatcctgcaggccctgatcctgacccccgccggcgccaagcagaaggagaccgagaccgagtag

SEQ ID NO: 189877 - protein, 429 aa, Artificial Sequence
  derived and/or modified sequence
MCPGALWVALPLLSLLAGSLQGKPLQSWGRGSAGGNAHSPLGVPGGGLPEHTFNLKMFLENVKVDFLRSLNLSGVPSQDKTRVEPPQYMIDLYNRYTSDKSTTPASNIVRSFSMEDAISITATEDFPFQKHILLFNISIPRHEQITRAELRLYVSCQNHVDPSHDLKGSVVIYDVLDGTDAWDSATETKTFLVSQDIQDEGWETLEVSSAVKRWVRSDSTKSKNKLEVTVESHRKGCDTLDISVPPGSRNLPFFVVFSNDHSSGTKETRLELREMISHEQESVLKKLSKDGSTEAGESSHEEDTDGHVAAGSTLARRKRSAGAGSHCQKTSLRVNFEDIGWDSWIIAPKEYEAYECKGGCFFPLADDVTPTKHAIVQTLVHLKFPTKVGKACCVPTKLSPISVLYKDDMGVPTLKYHYEGMSVAECGCR

SEQ ID NO: 189878 - DNA, 1290 bp, Artificial Sequence
  derived and/or modified sequence
atgtgccccggcgccctgtgggtcgctcttcccctactaagccttcttgccggatctctgcaaggaaagcctcttcaatcatgggggcgcggatccgccggggggaacgctcactccccgttgggtgtcccaggtggaggactcccagaacatactttcaacctgaaaatgttccttgagaacgtgaaagttgatttcctgagaagcctgaatctctccggggtgccctctcaggacaagacacgggtggagcctccacagtacatgatcgatctgtacaataggtacactagcgataagtcgaccacccctgcttctaatattgtccgcagcttcagcatggaggacgcaatctccatcaccgccactgaagatttcccctttcagaagcacatcctgctgttcaacattagcatcccaagacacgaacagattactagagctgagctgcgcctttatgtctcctgccagaatcatgttgatccttctcacgacctgaaaggctccgttgtgatttatgacgtcctcgatggtactgacgcctgggatagtgcgaccgagactaagactttcttagtgagtcaggacatccaagatgaggggtgggagacgctggaagtgtctagcgcagtcaaaaggtgggtgagatcggatagtacaaaaagcaaaaacaagttggaggtaaccgtcgagagccatcgaaaggggtgtgacacattggatatatcagtcccaccaggatccagaaacctcccattttttgtggtgttttccaacgatcattcaagcggtactaaggaaaccaggctggagctccgtgaaatgataagtcacgagcaggagagtgtgctgaaaaagctgtcaaaagacggtagcactgaagccggagaatccagccatgaggaagataccgatgggcacgttgcagcgggatctacccttgcaagacggaagagatccgccggagctggtagccactgccaaaagacgtctttgcgcgtaaattttgaggatatcggatgggatagttggataatagccccgaaggagtatgaggcctacgagtgtaagggcggctgtttcttcccactcgctgatgacgttacccctacgaaacacgctattgtacaaaccctggtgcaccttaagttccctactaaggtcggaaaagcatgttgcgttcccaccaagctgagtcctatatctgtgctgtataaagacgacatgggcgtcccaacactcaagtatcactacgagggtatgagtgttgctgagtgcgggtgtcgctag

SEQ ID NO: 189879 - DNA, 1936 bp, Artificial Sequence
  derived and/or modified sequence
tccagcccggcagcgggtgagagtgggtgctggccaggacggttccttcagagcaaacagcagggagatgccggcccgctccttcccagctcctccccgtgcccgctaacacagcacggccgcctgcagtctcctctctgggtgattgcgcgggcctaagatgtgtcctggggcactgtgggtggccctgcccctgctgtccctgctggctggctccctacaggggaagccactgcagagctggggacgagggtctgctgggggaaacgcccacagcccactgggggtgcctggaggtgggctgcctgagcacaccttcaacctgaagatgtttctggagaacgtgaaggtggatttcctgcgcagccttaacctgagtggggtcccttcgcaggacaaaaccagggtggagccgccgcagtacatgattgacctgtacaacaggtacacgtccgataagtcgactacgccagcgtccaacattgtgcggagcttcagcatggaagatgccatctccataactgccacagaggacttccccttccagaagcacatcttgctcttcaacatctccattcctaggcatgagcagatcaccagagctgagctccgactctatgtctcctgtcaaaatcacgtggacccctctcatgacctgaaaggaagcgtggtcatttatgatgttctggatggaacagatgcctgggatagtgctacagagaccaagaccttcctggtgtcccaggacattcaggatgagggctgggagaccttggaagtgtccagcgccgtgaagcgctgggtccggtccgactccaccaagagcaaaaataagctggaagtgactgtggagagccacaggaagggctgcgacacgctggacatcagtgtccccccaggttccagaaacctgcccttctttgttgtcttctccaatgaccacagcagtgggaccaaggagaccaggctggagctgagggagatgatcagccatgaacaagagagcgtgctcaagaagctgtccaaggacggctccacagaggcaggtgagagcagtcacgaggaggacacggatggccacgtggctgcggggtcgactttagccaggcggaaaaggagcgccggggctggcagccactgtcaaaagacctccctgcgggtaaacttcgaggacatcggctgggacagctggatcattgcacccaaggagtatgaagcctacgagtgtaagggcggctgcttcttccccttggctgacgatgtgacgccgacgaaacacgctatcgtgcagaccctggtgcatctcaagttccccacaaaggtgggcaaggcctgctgtgtgcccaccaaactgagccccatctccgtcctctacaaggatgacatgggggtgcccaccctcaagtaccattacgagggcatgagcgtggcagagtgtgggtgcaggtagtatctgcctgcggggctggggaggcaggccaaaggggctccacatgagaggtcctgcatgcccctgggcacaacaaggactgattcaatctgcatgccagcctggaggaggaaagggagcctgctctccctccccacaccccacccaaagcatacaccgctgagctcaactgccagggaaggctaaggaaatggggatttgagcacaacaggaaagcctgggagggttgttgggatgcaaggaggtgatgaaaaggagacagggggaaaaataatccatagtcagcagaaaacaacagcagtgagccagaggagcacaggcgggcaggtcactgcagagactgatggaagttagagaggtggaggaggccagctcgctccaaaacccttggggagtagagggaaggagcaggccgcgtgtcacacccatcattgtatgttatttcccacaacccagttggaggggcatggcttccaatttagagac

SEQ ID NO: 189880 - DNA, 1290 bp, Artificial Sequence
  derived and/or modified sequence
atgtgccctggggccctgtgggtggccctgcccctgctgagcctgctggccggcagcctgcagggcaagcccctgcagagctggggccggggcagcgctggaggaaatgcccacagccccctgggcgtgcctgggggcggcctgcctgagcacaccttcaacctgaagatgttcctggagaatgtgaaggtggacttcctgcggagcctgaacctgtctggagtgcccagccaggacaagaccagggtggagcccccccagtacatgattgacctgtacaaccgctacaccagtgacaagagcaccaccccagccagcaacatcgtgcgctccttctccatggaggatgccatcagcatcacagccacagaggacttccccttccagaagcacatcctgctcttcaacatcagcatccccaggcatgagcagatcaccagggctgagctgcggctgtatgtgtcctgccagaaccacgtggaccccagccatgacctgaagggctctgtggtgatctatgatgtgctggatggaacagatgcctgggacagcgccacagagaccaagaccttcctggtgtcccaggacatccaggatgagggctgggagaccctggaggtgtcctctgctgtgaagcgctgggtgcggagtgacagcaccaagagcaagaacaagctggaggtgacagtggagagccacaggaagggctgtgacaccctggacatctctgtgcccccaggcagcaggaacctgcccttctttgtggtgttcagcaatgaccacagcagcggcaccaaggagacccggctggagctgcgggagatgatcagccatgagcaggagagcgtgctgaagaagctgagcaaggatggcagcacagaagctggggagagcagccatgaggaggacacagatggccacgtggccgccggcagcaccctggcccggaggaagaggtctgctggagctggcagccactgccagaagaccagcctgcgggtgaactttgaagatattggctgggacagctggatcatcgcccccaaggagtatgaggcctatgaatgtaaaggaggctgcttcttccccctggctgatgatgtgacccccaccaagcacgccatcgtgcagaccctggtgcacctgaagttccccaccaaggtgggcaaggcctgctgcgtgcccaccaagctgagccccatctctgtgctgtacaaggatgacatgggcgtgcccaccctgaagtaccactatgagggcatgtctgtggctgaatgtggctgcaggtag

SEQ ID NO: 189881 - DNA, 1290 bp, Artificial Sequence
  derived and/or modified sequence
atgtgccccggcgccctgtgggtggccctgcccctgctgagcctgctggcagggtctctgcagggaaagcccttgcagagctggggccggggatcagccgggggcaatgctcattcccctttgggtgtgccagggggcggcttgcccgagcacacgttcaaccttaagatgttcctggagaacgtgaaggtcgatttcctgagaagcctaaatctgagtggcgtgccttcacaggataagaccagggtggagccgccgcaatacatgattgatttgtacaacaggtacacttcagataagtccactaccccagcatctaatatcgtccggtcatttagcatggaagatgctatatctattaccgcaaccgaagatttccccttccaaaagcacatactcctcttcaatattagcattcctaggcacgagcaaatcacccgtgctgagcttcgcttgtatgtgtcctgtcagaaccatgttgacccttcccatgacttaaaagggagtgtggtgatctacgatgtactcgatggaactgacgcttgggacagcgccaccgagactaagacctttctcgtatctcaggatattcaggatgaaggctgggaaacactggaagtgtcatccgcagtgaagaggtgggtccgatcagattccacaaagtctaaaaataaactggaggttacagtggagagtcacagaaaaggctgcgatacattggatatttcagtgccccccggcagcaggaacctgccattctttgtcgtcttttccaatgaccattctagcggaactaaagaaactcgcctggagcttcgcgagatgatctcccacgaacaggaaagtgtattgaagaagttgagtaaagacggcagtactgaggccggggagtccagccacgaggaggatacagatggccatgtggcagcaggaagcacattggcacgtaggaagaggagcgcaggcgctggttcacactgtcagaagacatccttgagggtaaatttcgaggacatcggttgggatagttggattatcgcacccaaagaatacgaagcatacgaatgtaaagggggctgcttctttccactcgcagatgatgtcactcccaccaaacacgccatcgtccagactttggttcacctcaagtttccaaccaaagtcggtaaggcttgctgcgtgcccacaaagttgagtccaatctccgtgctctacaaagacgacatgggggtaccaacactcaaataccactatgaaggaatgagcgtggccgagtgcggatgccggtag

SEQ ID NO: 189882 - DNA, 1290 bp, Artificial Sequence
  derived and/or modified sequence
atgtgccccggtgctttatgggtcgcactccccttgttgtcccttttggcagggtccctccaaggcaaacccctccagtcatggggcagagggtccgcaggaggaaacgcgcactcgccattaggcgtcccaggcggaggattaccagaacacacattcaacttgaagatgttcctggaaaacgttaaggtcgacttcctgcgctccttgaacctcagcggggtgccatctcaggacaagactcgagtggaacctcctcagtacatgatcgatctgtacaatcgctatacaagtgataaaagcacgactccggcttcaaatatcgtgcgaagtttctccatggaggacgcaatttccataaccgctaccgaggacttcccattccagaaacatatcctcctttttaacatatcgatcccaaggcatgagcagattacaagggctgaacttcgcctatacgtatcctgtcaaaatcatgtggacccgtcacatgatttgaagggtagcgtagttatctacgacgtactggacggaacggacgcctgggattccgcaaccgaaaccaaaactttcctggtttctcaggacatccaggatgagggctgggagaccttggaggtctcgtccgccgttaagcgctgggtgcgttcagacagcacgaagtcgaagaacaagcttgaggttaccgtggaatcccaccgaaagggttgtgacacgttagatatcagcgtgcctcccggaagcagaaatttgcccttcttcgtggttttctctaatgatcacagcagcggcacaaaagaaactaggctggagctacgcgagatgataagccatgaacaggagtccgtattgaaaaagctgtcaaaggacggctccactgaagctggcgaatccagccacgaagaagacacagacggacacgtcgcagctggatccactctcgcaaggcgcaagcggtccgctggagctggtagtcattgtcagaagacctcccttcgcgtcaacttcgaagacatcggatgggactcatggattatagctcctaaagagtacgaagcctatgagtgcaagggcggttgcttcttccccctagcggatgacgtgaccccgacaaagcatgcaattgtgcagaccctggtgcacctgaagttccccactaaggtaggcaaggcttgttgtgtcccaaccaagctgagccctataagcgtgctctacaaggacgacatgggggtccccacactcaagtatcactacgaggggatgtccgtcgccgaatgtggctgccggtag

SEQ ID NO: 189883 - DNA, 1290 bp, Artificial Sequence
  derived and/or modified sequence
atgtgccccggcgccctgtgggtggccctgcccctgctgagcctgctggccggcagcctgcagggcaagcccctgcagagctggggcagaggcagcgccggcggcaacgcccacagccccctgggcgtgcccggcggcggcctgcccgagcacaccttcaacctgaagatgttcctggagaacgtgaaggtggacttcctgagaagcctgaacctgagcggcgtgcccagccaggacaagaccagagtggagcccccccagtacatgatcgacctgtacaacagatacaccagcgacaagagcaccacccccgccagcaacatcgtgagaagcttcagcatggaggacgccatcagcatcaccgccaccgaggacttccccttccagaagcacatcctgctgttcaacatcagcatccccagacacgagcagatcaccagagccgagctgagactgtacgtgagctgccagaaccacgtggaccccagccacgacctgaagggcagcgtggtgatctacgacgtgctggacggcaccgacgcctgggacagcgccaccgagaccaagaccttcctggtgagccaggacatccaggacgagggctgggagaccctggaggtgagcagcgccgtgaagagatgggtgagaagcgacagcaccaagagcaagaacaagctggaggtgaccgtggagagccacagaaagggctgcgacaccctggacatcagcgtgccccccggcagcagaaacctgcccttcttcgtggtgttcagcaacgaccacagcagcggcaccaaggagaccagactggagctgagagagatgatcagccacgagcaggagagcgtgctgaagaagctgagcaaggacggcagcaccgaggccggcgagagcagccacgaggaggacaccgacggccacgtggccgccggcagcaccctggccagaagaaagagaagcgccggcgccggcagccactgccagaagaccagcctgagagtgaacttcgaggacatcggctgggacagctggatcatcgcccccaaggagtacgaggcctacgagtgcaagggcggctgcttcttccccctggccgacgacgtgacccccaccaagcacgccatcgtgcagaccctggtgcacctgaagttccccaccaaggtgggcaaggcctgctgcgtgcccaccaagctgagccccatcagcgtgctgtacaaggacgacatgggcgtgcccaccctgaagtaccactacgagggcatgagcgtggccgagtgcggctgcagatag

SEQ ID NO: 189884 - protein, 88 aa, Artificial Sequence
  derived and/or modified sequence
MKLFLLTLLLVTLVITPSLIQTTMAGSNFCDSKCKLRCSKAGLADRCLKYCGVCCEECKCVPSGTYGNKHECPCYRDKKNSKGKSKCP

SEQ ID NO: 189885 - protein, 70 aa, Artificial Sequence
  derived and/or modified sequence
QSKDGPALEKWCGQKCEGRCKEAGMKDRCLKYCGICCKDCQCVPSGTYGNKHECACYRDKLSSKGTPKCP

SEQ ID NO: 189886 - protein, 345 aa, Artificial Sequence
  derived and/or modified sequence
MSLFGLLLLTSALAGQRQGTQAESNLSSKFQFSSNKEQNGVQDPQHERIITVSTNGSIHSPRFPHTYPRNTVLVWRLVAVEENVWIQLTFDERFGLEDPEDDICKYDFVEVEEPSDGTILGRWCGSGTVPGKQISKGNQIRIRFVSDEYFPSEPGFCIHYNIVMPQFTEAVSPSVLPPSALPLDLLNNAITAFSTLEDLIRYLEPERWQLDLEDLYRPTWQLLGKAFVFGRKSRVVDLNLLTEEVRLYSCTPRNFSVSIREELKRTDTIFWPGCLLVKRCGGNCACCLHNCNECQCVPSKVTKKYHEVLQLRPKTGVRGLHKSLTDVALEHHEECDCVCRGSTGG

SEQ ID NO: 189887 - protein, 182 aa, Artificial Sequence
  derived and/or modified sequence
MPQFTEAVSPSVLPPSALPLDLLNNAITAFSTLEDLIRYLEPERWQLDLEDLYRPTWQLLGKAFVFGRKSRVVDLNLLTEEVRLYSCTPRNFSVSIREELKRTDTIFWPGCLLVKRCGGNCACCLHNCNECQCVPSKVTKKYHEVLQLRPKTGVRGLHKSLTDVALEHHEECDCVCRGSTGG

SEQ ID NO: 189888 - protein, 190 aa, Artificial Sequence
  derived and/or modified sequence
MMQYTWLLTKQFTEAVSPSVLPPSALPLDLLNNAITAFSTLEDLIRYLEPERWQLDLEDLYRPTWQLLGKAFVFGRKSRVVDLNLLTEEVRLYSCTPRNFSVSIREELKRTDTIFWPGCLLVKRCGGNCACCLHNCNECQCVPSKVTKKYHEVLQLRPKTGVRGLHKSLTDVALEHHEECDCVCRGSTGG

SEQ ID NO: 189889 - protein, 167 aa, Artificial Sequence
  derived and/or modified sequence
MSLFGLLLLTSALAGQRQGTQAESNLSSKFQFSSNKEQNGVQDPQHERIITVSTNGSIHSPRFPHTYPRNTVLVWRLVAVEENVWIQLTFDERFGLEDPEDDICKYDFVEVEEPSDGTILGRWCGSGTVPGKQISKGNQIRIRFVSDEYFPSEPSNRGGKIIQLHTS

SEQ ID NO: 189890 - DNA, 1038 bp, Artificial Sequence
  derived and/or modified sequence
atgagcctgttcggcctgctgctgctgaccagcgccctggccggccagagacagggcacccaggccgagagcaacctgagcagcaagttccagttcagcagcaacaaggagcagaacggcgtgcaggacccccagcacgagagaatcatcaccgtgagcaccaacggcagcatccacagccccagattcccccacacctaccccagaaacaccgtgctggtgtggagactggtggccgtggaggagaacgtgtggatccagctgaccttcgacgagagattcggcctggaggaccccgaggacgacatctgcaagtacgacttcgtggaggtggaggagcccagcgacggcaccatcctgggcagatggtgcggcagcggcaccgtgcccggcaagcagatcagcaagggcaaccagatcagaatcagattcgtgagcgacgagtacttccccagcgagcccggcttctgcatccactacaacatcgtgatgccccagttcaccgaggccgtgagccccagcgtgctgccccccagcgccctgcccctggacctgctgaacaacgccatcaccgccttcagcaccctggaggacctgatcagatacctggagcccgagagatggcagctggacctggaggacctgtacagacccacctggcagctgctgggcaaggccttcgtgttcggcagaaagagcagagtggtggacctgaacctgctgaccgaggaggtgagactgtacagctgcacccccagaaacttcagcgtgagcatcagagaggagctgaagagaaccgacaccatcttctggcccggctgcctgctggtgaagagatgcggcggcaactgcgcctgctgcctgcacaactgcaacgagtgccagtgcgtgcccagcaaggtgaccaagaagtaccacgaggtgctgcagctgagacccaagaccggcgtgagaggcctgcacaagagcctgaccgacgtggccctggagcaccacgaggagtgcgactgcgtgtgcagaggcagcaccggcggctag

SEQ ID NO: 189891 - DNA, 504 bp, Artificial Sequence
  derived and/or modified sequence
atgagcctgttcggcctgctgctgctgaccagcgccctggccggccagagacagggcacccaggccgagagcaacctgagcagcaagttccagttcagcagcaacaaggagcagaacggcgtgcaggacccccagcacgagagaatcatcaccgtgagcaccaacggcagcatccacagccccagattcccccacacctaccccagaaacaccgtgctggtgtggagactggtggccgtggaggagaacgtgtggatccagctgaccttcgacgagagattcggcctggaggaccccgaggacgacatctgcaagtacgacttcgtggaggtggaggagcccagcgacggcaccatcctgggcagatggtgcggcagcggcaccgtgcccggcaagcagatcagcaagggcaaccagatcagaatcagattcgtgagcgacgagtacttccccagcgagcccagcaacagaggcggcaagatcatccagctgcacaccagctag

SEQ ID NO: 189892 - DNA, 1038 bp, Artificial Sequence
  derived and/or modified sequence
atgtccctgttcggactcctgctgctgaccagcgcacttgccggacagcgacagggcacgcaagccgagtcaaatctgtccagtaaatttcagtttagctctaacaaagagcagaacggagttcaggatcctcagcatgagcggattataacagtaagcaccaatggatcaattcatagcccacggtttcctcatacatatccacggaacacggtcctcgtgtggcggctggtagcggtggaggaaaatgtatggattcaactgacgttcgatgagcgtttcggcctagaagacccagaagacgacatttgtaagtacgacttcgtcgaagtcgaggagccctcggatggaactattctgggcaggtggtgcgggagcggcacagtacctggaaaacaaattagcaagggcaatcagatccggatcaggtttgtgtccgacgagtacttcccctctgaacctggcttctgcatccactataatatcgtcatgccccaattcacagaagcggtgagcccctcagttctgcctccgtccgcccttcctctcgacctcttgaataatgcaatcacagccttttcgacactcgaagaccttattagataccttgagccagagcgttggcagctggatttagaggatctgtacaggcctacatggcagctactgggaaaggctttcgtcttcggaagaaagagccgggtggtggatctgaacctcttgaccgaagaagtcaggttatacagttgcaccccgaggaatttctccgtgagcattcgggaggagctgaaaaggacagataccattttctggcccgggtgccttcttgtgaaacggtgtggtgggaactgtgcttgttgtttacataattgcaacgagtgccaatgcgtacctagcaaggtaactaagaagtaccatgaggtactacagttgcgaccaaaaactggcgtgcgcggcctacacaagagcttgaccgatgttgccttagagcaccacgaagaatgcgattgtgtgtgccgcggatccacaggcggttag

SEQ ID NO: 189893 - DNA, 504 bp, Artificial Sequence
  derived and/or modified sequence
atgagtctttttggactattattactcacaagtgctttggcaggtcagagacagggtacccaagctgaaagtaatctgtcctctaaatttcagttctcaagcaataaggagcaaaatggggttcaggatccacagcatgaaaggattattaccgtgagcaccaacgggtcaatacatagcccaaggtttccgcatacctatccccggaacactgtgctcgtgtggagactcgttgccgttgaggaaaacgtgtggatccagcttacattcgacgagcggttcggattagaggatccggaggacgatatctgtaaatacgatttcgttgaggtggaggagccttccgacgggacaattctgggacggtggtgtgggagcggcacggtaccaggaaaacagatctcaaagggcaatcagattcgtatcagattcgtctcagatgaatacttcccatcggaaccatcaaatcggggcggcaagattattcagttgcacacgagctag

SEQ ID NO: 189894 - DNA, 1038 bp, Artificial Sequence
  derived and/or modified sequence
atgagcctgtttggcctgctgctgctgaccagcgccctggccggccagaggcagggcacccaggccgagagcaacctgagcagcaagttccagttcagcagcaacaaggagcagaatggagtgcaggacccccagcacgagcgcatcatcaccgtgtccaccaacggcagcatccacagcccccgcttcccccacacctaccccaggaacacagtgctggtgtggaggctggtggccgtggaggagaatgtgtggatccagctgacctttgatgagcgcttcggcctggaggaccctgaagatgacatctgcaagtatgactttgtggaggtggaggagcccagtgatggcaccatcctgggccgctggtgtggcagcggcaccgtgcctgggaagcagatcagcaagggcaaccagatccgcatccgctttgtgtctgatgagtacttccccagcgagcccggcttctgcatccactacaacatcgtgatgccccagttcacagaggccgtgagccccagcgtgctgcccccatctgccctgcccctggacctgctgaacaatgccatcacagccttcagcaccctggaggacctgatccgctacctggagcctgagcgctggcagctggacctggaggacctgtaccggcccacctggcagctgctgggcaaggcctttgtgtttggaaggaagagccgggtggtggacctgaacctgctgacagaggaggtgcggctgtacagctgcaccccaagaaacttctctgtgtccatccgggaggagctgaagaggacagacaccatcttctggccaggctgcctgctggtgaagagatgtggcggcaactgtgcctgctgcctgcacaactgcaatgaatgccagtgtgtgcccagcaaggtgaccaagaagtaccacgaggtgctgcagctgcggcccaagacaggagtgcggggcctgcacaagagcctgacagatgtggccctggagcaccacgaggagtgtgactgtgtgtgccggggcagcactggaggatag

SEQ ID NO: 189895 - DNA, 504 bp, Artificial Sequence
  derived and/or modified sequence
atgagcctgtttggcctgctgctgctgaccagcgccctggccggccagaggcagggcacccaggccgagagcaacctgagcagcaagttccagttcagcagcaacaaggagcagaatggagtgcaggacccccagcacgagcgcatcatcaccgtgtccaccaacggcagcatccacagcccccgcttcccccacacctaccccaggaacacagtgctggtgtggaggctggtggccgtggaggagaatgtgtggatccagctgacctttgatgagcgcttcggcctggaggaccctgaagatgacatctgcaagtatgactttgtggaggtggaggagcccagtgatggcaccatcctgggccgctggtgtggcagcggcaccgtgcctgggaagcagatcagcaagggcaaccagatccgcatccgctttgtgtctgatgagtacttccccagcgagcccagcaacagaggaggcaagatcatccagctgcacaccagctag

SEQ ID NO: 189896 - DNA, 1038 bp, Artificial Sequence
  derived and/or modified sequence
atgagcctgttcggcctgctgctgctgaccagcgccctggccggccagagacagggcacccaggccgaaagtaatttatccagtaaattccagttctccagtaacaaagagcagaatggcgtccaagacccgcaacacgaacggatcatcacagtcagtaccaacggaagtattcacagtccgcgatttccgcatacctacccacgcaataccgtgctggtgtggagactggtggccgtagaggagaacgtgtggatccagctgacattcgatgagcggtttgggttggaggatccagaagacgatatttgtaaatatgattttgtggaggtggaagagcccagcgacgggactattctcggccggtggtgcggatctggcaccgtcccaggaaagcagatcagtaagggaaaccaaatcagaataagatttgttagtgacgagtattttcctagtgagccaggattttgtattcactataatatcgttatgccccagtttaccgaggctgtctcccctagtgtcctacccccctctgcattgcctctcgacttgcttaataatgcaataacagctttttccaccctcgaggatctgatcaggtacttggaacctgaacggtggcagctggatctcgaggatctctacaggcctacctggcagctgttagggaaggctttcgtgtttggacggaaatcaagggtggtcgatcttaacctgcttactgaggaggtccgcctttactcctgtacacccagaaatttttccgtgagtatccgtgaggaattaaagaggaccgatacaatcttctggcccggatgcctcctggttaagagatgcggcggcaactgtgcctgctgtttacacaattgtaacgagtgccaatgcgttccatctaaggtgacgaaaaagtaccacgaggtgctgcagctgcgacctaagaccggtgtgcggggacttcacaagtctttgacggacgtcgccctagaacatcacgaagaatgcgattgcgtgtgccgcggaagcaccggtggatag

SEQ ID NO: 189897 - DNA, 504 bp, Artificial Sequence
  derived and/or modified sequence
atgagcctgttcggcctgctgctgctgaccagcgccctggccggccagcgtcagggcactcaagccgagtccaatctttctagtaaatttcaattcagctcaaacaaggagcagaacggagtgcaagatccccagcacgagcgaattattactgtgtccaccaacgggtccattcattctccgagattcccccacacatatcctcggaacactgtgctggtttggcggctcgtggcagtggaagaaaatgtgtggatccagttgaccttcgatgaacgctttggcctcgaggacccggaagatgacatatgcaagtacgatttcgttgaggtagaggagccatctgatggaacaattctcggacgatggtgtgggagtggcacggtcccagggaaacagatttccaagggaaaccagattagaattaggttcgtgtcggacgaatattttcctagtgagccttctaatcggggagggaagataattcagcttcacaccagttag

SEQ ID NO: 189898 - DNA, 1038 bp, Artificial Sequence
  derived and/or modified sequence
atgtcactgtttggcctgctgttgctgacctccgcactagctgggcaaagacagggaacccaggccgaatccaacctaagctccaaattccagttttcaagcaacaaggagcaaaacggagtccaggatcctcagcatgagaggataatcaccgtcagcaccaatggctcaattcactcccccagatttcctcacacataccctagaaataccgtactagtgtggaggctggtggctgtagaagagaatgtgtggatacagctgacattcgatgaacgatttggccttgaggatcctgaggacgacatctgtaagtacgattttgtggaggtggaagaacccagtgacgggaccatacttggcagatggtgcggcagcggaactgtgccgggtaagcagatttcaaagggcaaccagatcagaattcggtttgtgagtgacgaatattttcccagtgaacccggattttgcatccactacaacatcgttatgccacagttcactgaggccgtctcaccctcggttctccccccaagtgctctgcctctggatctattaaacaatgcaattactgccttttcgacactggaggaccttatcaggtatttggagcccgaacgctggcagttggacctggaagatctttaccggccaacgtggcaactgcttggaaaggccttcgtgttcggcaggaaatcccgggtggtcgaccttaacctattgacggaagaggtccgcctgtattcctgcacccctcggaacttctctgtgagcatcagggaagaactgaaacggacagataccatcttctggcccggttgccttctcgtcaagcggtgtggagggaattgcgcttgttgtctccacaattgtaatgaatgtcagtgcgtgccttccaaggtgaccaaaaagtaccacgaggttctacagctgagaccgaaaaccggagtaagagggctccacaaatcactcaccgacgtcgctcttgaacatcacgaagaatgcgactgcgtatgccggggttctacgggagggtag

SEQ ID NO: 189899 - DNA, 504 bp, Artificial Sequence
  derived and/or modified sequence
atgagtcttttcggactgctactcctgacaagtgccctggcgggtcagagacagggcacacaggctgagtccaacctcagctcgaagttccagttttcctctaataaagaacagaacggcgtccaggacccgcagcatgagcggattattacagtttctacaaatggtagtatccactcccctagattcccgcatacgtatccacgaaacaccgtgctcgtttggagactggtggccgtggaagaaaacgtgtggattcagctgactttcgacgaacgattcggattggaagacccagaagatgatatttgcaagtacgactttgtcgaagtggaggagccatctgatggtacaatactcggaaggtggtgcggcagtggcaccgtgcccggtaaacagatctctaagggtaaccagattcgtatccggtttgtttcagatgagtattttccaagcgagccaagcaaccggggtggcaaaataatccaactccatacctcctag

SEQ ID NO: 189900 - DNA, 4165 bp, Artificial Sequence
  derived and/or modified sequence
gcccggagagccgcatctattggcagctttgttattgatcagaaactgctcgccgccgacttggcttccagtctggctgcgggcaacccttgagttttcgcctctgtcctgtcccccgaactgacaggtgctcccagcaacttgctggggacttctcgccgctcccccgcgtccccaccccctcattcctccctcgccttcacccccacccccaccacttcgccacagctcaggatttgtttaaaccttgggaaactggttcaggtccaggttttgctttgatccttttcaaaaactggagacacagaagagggctctaggaaaaagttttggatgggattatgtggaaactaccctgcgattctctgctgccagagcaggctcggcgcttccaccccagtgcagccttcccctggcggtggtgaaagagactcgggagtcgctgcttccaaagtgcccgccgtgagtgagctctcaccccagtcagccaaatgagcctcttcgggcttctcctgctgacatctgccctggccggccagagacaggggactcaggcggaatccaacctgagtagtaaattccagttttccagcaacaaggaacagaacggagtacaagatcctcagcatgagagaattattactgtgtctactaatggaagtattcacagcccaaggtttcctcatacttatccaagaaatacggtcttggtatggagattagtagcagtagaggaaaatgtatggatacaacttacgtttgatgaaagatttgggcttgaagacccagaagatgacatatgcaagtatgattttgtagaagttgaggaacccagtgatggaactatattagggcgctggtgtggttctggtactgtaccaggaaaacagatttctaaaggaaatcaaattaggataagatttgtatctgatgaatattttccttctgaaccagggttctgcatccactacaacattgtcatgccacaattcacagaagctgtgagtccttcagtgctacccccttcagctttgccactggacctgcttaataatgctataactgcctttagtaccttggaagaccttattcgatatcttgaaccagagagatggcagttggacttagaagatctatataggccaacttggcaacttcttggcaaggcttttgtttttggaagaaaatccagagtggtggatctgaaccttctaacagaggaggtaagattatacagctgcacacctcgtaacttctcagtgtccataagggaagaactaaagagaaccgataccattttctggccaggttgtctcctggttaaacgctgtggtgggaactgtgcctgttgtctccacaattgcaatgaatgtcaatgtgtcccaagcaaagttactaaaaaataccacgaggtccttcagttgagaccaaagaccggtgtcaggggattgcacaaatcactcaccgacgtggccctggagcaccatgaggagtgtgactgtgtgtgcagagggagcacaggaggatagccgcatcaccaccagcagctcttgcccagagctgtgcagtgcagtggctgattctattagagaacgtatgcgttatctccatccttaatctcagttgtttgcttcaaggacctttcatcttcaggatttacagtgcattctgaaagaggagacatcaaacagaattaggagttgtgcaacagctcttttgagaggaggcctaaaggacaggagaaaaggtcttcaatcgtggaaagaaaattaaatgttgtattaaatagatcaccagctagtttcagagttaccatgtacgtattccactagctgggttctgtatttcagttctttcgatacggcttagggtaatgtcagtacaggaaaaaaactgtgcaagtgagcacctgattccgttgccttgcttaactctaaagctccatgtcctgggcctaaaatcgtataaaatctggatttttttttttttttttgctcatattcacatatgtaaaccagaacattctatgtactacaaacctggtttttaaaaaggaactatgttgctatgaattaaacttgtgtcgtgctgataggacagactggatttttcatatttcttattaaaatttctgccatttagaagaagagaactacattcatggtttggaagagataaacctgaaaagaagagtggccttatcttcactttatcgataagtcagtttatttgtttcattgtgtacatttttatattctccttttgacattataactgttggcttttctaatcttgttaaatatatctatttttaccaaaggtatttaatattcttttttatgacaacttagatcaactatttttagcttggtaaatttttctaaacacaattgttatagccagaggaacaaagatgatataaaatattgttgctctgacaaaaatacatgtatttcattctcgtatggtgctagagttagattaatctgcattttaaaaaactgaattggaatagaattggtaagttgcaaagactttttgaaaataattaaattatcatatcttccattcctgttattggagatgaaaataaaaagcaacttatgaaagtagacattcagatccagccattactaacctattccttttttggggaaatctgagcctagctcagaaaaacataaagcaccttgaaaaagacttggcagcttcctgataaagcgtgctgtgctgtgcagtaggaacacatcctatttattgtgatgttgtggttttattatcttaaactctgttccatacacttgtataaatacatggatatttttatgtacagaagtatgtctcttaaccagttcacttattgtactctggcaatttaaaagaaaatcagtaaaatattttgcttgtaaaatgcttaatatcgtgcctaggttatgtggtgactatttgaatcaaaaatgtattgaatcatcaaataaaagaatgtggctattttggggagaaaattatgtgtgtgtgtgctcaagatttatttcttggactctgagaaaatgaaagataaaattttctgttatgattttcatttagcaaaagcatatgtcaattcaaaagacaaaaaaagggaagatacctgtgagccttctctgcctcttgtttccaatgcctttgagcaatggttttatttttcttactggtcttaatacagatttctggtaatttaagtttcacctgacttgaaagttgtatggtttatgaaatgcttggtgataggtggtatggtagtatgaaactggaaaaaaacttgcaggtttccactcatgtcttcattgtcactggcaactactaaatggggtgagcataaattgatttggtgcatggattattgtacattgcacacttcaagatatggttcctcagttccagacatagattcctattcagggctggtatcttcagcatcctttcctcagcctttcaacttggcagagatgtctagtgtccagggccttctgtcttcagactgctcttcaggcaagcacccttttcctgtgctttgacacctgcagttctgccctgcctccaactatgtggaaaacaaagaaacaaaatgagcctatgtgttctgtcttacttccttaccttttcctggttttgtcctatccatatagaggccaactagatatatggaatatgcaacgtagtaagtagttggcagtttacaactttcattagtatagtaaagactactaagtcttagtaaatagcctgtttaactgtgtttaatccattgtttcccatctttgaacgaaatatattttcccttttttaatatttattttttgtttacttataaaatcttgacagccagaagagatcataagggtagcagtcctcagttgccagtcggtgagtggttaccatgtgaggactaaccactttataatcacttactcatagatcgtcctgtgtattttactaaacacacacacacacacacacacacataaatagcacatgaccctaatttctgagaagtacagtaagtattgactgtattgaccacacaccgttttgtgtatgatatctgtttcaagcctttgtccttgagacatgggctgttttgcccagtgatgtttactaaaataaaagcaagccttaaatgtca

SEQ ID NO: 189901 - DNA, 995 bp, Artificial Sequence
  derived and/or modified sequence
gcccggagagccgcatctattggcagctttgttattgatcagaaactgctcgccgccgacttggcttccagtctggctgcgggcaacccttgagttttcgcctctgtcctgtcccccgaactgacaggtgctcccagcaacttgctggggacttctcgccgctcccccgcgtccccaccccctcattcctccctcgccttcacccccacccccaccacttcgccacagctcaggatttgtttaaaccttgggaaactggttcaggtccaggttttgctttgatccttttcaaaaactggagacacagaagagggctctaggaaaaagttttggatgggattatgtggaaactaccctgcgattctctgctgccagagcaggctcggcgcttccaccccagtgcagccttcccctggcggtggtgaaagagactcgggagtcgctgcttccaaagtgcccgccgtgagtgagctctcaccccagtcagccaaatgagcctcttcgggcttctcctgctgacatctgccctggccggccagagacaggggactcaggcggaatccaacctgagtagtaaattccagttttccagcaacaaggaacagaacggagtacaagatcctcagcatgagagaattattactgtgtctactaatggaagtattcacagcccaaggtttcctcatacttatccaagaaatacggtcttggtatggagattagtagcagtagaggaaaatgtatggatacaacttacgtttgatgaaagatttgggcttgaagacccagaagatgacatatgcaagtatgattttgtagaagttgaggaacccagtgatggaactatattagggcgctggtgtggttctggtactgtaccaggaaaacagatttctaaaggaaatcaaattaggataagatttgtatctgatgaatattttccttctgaaccttctaacagaggaggtaagattatacagctgcacacctcgtaa

SEQ ID NO: 189902 - DNA, 1038 bp, Artificial Sequence
  derived and/or modified sequence
atgagcctattcggtttactgctgcttactagcgctttggcgggtcagaggcagggcacccaggctgagagcaaccttagtagcaagtttcagttttcaagtaataaggagcagaacggagtgcaggacccccagcacgaacgaatcatcacggtgagcactaacggtagtattcactcacccagatttccccatacttatcctcggaataccgttctcgtatggaggctggtagcagtggaggagaacgtctggatccagttgacatttgacgaacgctttgggctggaggaccccgaagatgatatctgtaaatatgactttgtcgaggttgaggaaccctctgacgggactatcctgggcagatggtgcggctcaggtaccgtgccaggcaaacagatcagcaagggaaatcagattagaatcaggttcgtgtcagacgagtactttccaagcgagcccggattttgtatccattacaacattgttatgcctcagttcaccgaagccgtaagcccaagcgtactcccaccttccgccctccccctggatctcctaaacaacgccattactgcgttttccacactggaggaccttatccggtatctcgaacctgaaaggtggcagctcgatcttgaagatctgtacaggcctacttggcaactattaggcaaggcgtttgttttcggacgcaagtctcgggtggttgatttgaacctgttgaccgaagaagtgagattgtattcgtgtaccccgcgtaacttctccgtatccatcagagaggaactcaaacgaacagatactatcttttggccaggatgtctgcttgtcaagagatgcggaggcaattgcgcctgttgcctccacaactgcaacgagtgtcagtgcgtcccaagcaaagttaccaaaaaataccatgaggtgctacagctgagacctaaaaccggggtaagagggctccacaaatccttaacagatgtggcactagagcatcatgaagaatgcgactgtgtatgtcgaggctctactggcggctag

SEQ ID NO: 189903 - DNA, 504 bp, Artificial Sequence
  derived and/or modified sequence
atgagtctttttgggctccttcttctgacaagtgcattagctggccagcggcagggcacccaggccgagagtaatttatcgagtaagttccaattctccagcaataaggagcagaatggagtgcaggacccgcagcatgaaagaataattacagtgtctactaatggctcaatccactcccctcgctttcctcacacttaccctcgaaatacagttcttgtgtggagacttgtggccgttgaggagaatgtttggattcagctcacctttgatgaacggtttggattggaggacccagaggatgatatctgtaaatacgatttcgtggaagtcgaagaaccaagcgacggcactattctggggcgatggtgtggcagtggaacagtgccaggcaaacagatctccaagggcaatcagataaggattcggttcgtatctgacgaatactttcccagtgagccctcaaatcgaggaggcaagatcatccagctccacacatcctag

SEQ ID NO: 189904 - DNA, 1038 bp, Artificial Sequence
  derived and/or modified sequence
atgagcctttttggactgttgcttcttaccagcgctttggccgggcaaagacagggaacgcaagccgagtcaaatctgagttcaaagtttcaattcagttccaataaagaacagaacggcgtccaggatccccagcatgaacgaatcattacagtgagtacgaacggttcaatccactcacctcgctttcctcacacataccctcgcaacacagttcttgtatggcgactagtggcggttgaggaaaatgtgtggattcagctaaccttcgatgaacgatttggactagaggaccccgaggatgacatttgcaaatacgacttcgtcgaggttgaagaaccaagcgatggcacaatcctgggtcggtggtgtggaagtggaacggtccctggtaagcaaatctcaaaaggaaatcagattagaatccgttttgtttctgatgagtatttccctagtgaacctgggttttgcatccactacaatatcgtcatgccccaattcactgaagcagtgtcaccctcagtgctccccccctccgctctccccctcgatcttctaaataatgccattaccgcattctcgaccctagaagacctgatcagatacctcgaacccgaaagatggcagttggacctagaagacctgtacagaccgacctggcagctcctgggaaaagcgtttgtcttcggacggaaatcccgcgtcgtcgatctgaacctcctcaccgaagaggtgagactgtattcctgtaccccaaggaactttagcgtcagtattcgcgaagaattgaagcgtactgataccattttctggcctggatgcctgcttgtaaagcgctgtggaggaaattgtgcatgttgcttgcataactgcaatgagtgccagtgcgtgccttcaaaggtaaccaagaagtatcacgaagtgttgcagttacggcctaagacaggtgttagaggacttcataagagccttacagacgtggcattggagcatcacgaggagtgtgattgcgtttgtcgtggaagtacaggaggctag

SEQ ID NO: 189905 - DNA, 504 bp, Artificial Sequence
  derived and/or modified sequence
atgtccttattcggtctcctgctcctaacttcggctcttgcaggccaacgacagggaacacaggccgagtccaacctcagttcaaaatttcagttcagtagcaacaaagaacagaatggtgtgcaggaccctcaacacgaacgtatcataacagtctctacaaatgggtctatacattcccctagattcccccatacttacccaagaaacactgtgcttgtctggcgtctggtggccgtggaagagaacgtctggatccagctgacatttgacgagcggtttggtttggaagacccagaggatgacatctgtaagtatgacttcgtggaggtcgaagagcccagcgacggtacgattctaggcagatggtgcggcagcggcacagttccaggtaaacaaatttccaagggtaatcaaataagaattagatttgtctcagacgagtacttcccgagtgaaccaagtaaccgtggagggaagatcattcagctgcataccagctag

SEQ ID NO: 189906 - DNA, 3018 bp, Artificial Sequence
  derived and/or modified sequence
gcccggagagccgcatctattggcagctttgttattgatcagaaactgctcgccgccgacttggcttccagtctggctgcgggcaacccttgagttttcgcctctgtcctgtcccccgaactgacaggtgctcccagcaacttgctggggacttctcgccgctcccccgcgtccccaccccctcattcctccctcgccttcacccccacccccaccacttcgccacagctcaggatttgtttaaaccttgggaaactggttcaggtccaggttttgctttgatccttttcaaaaactggagacacagaagagggctctaggaaaaagttttggatgggattatgtggaaactaccctgcgattctctgctgccagagcaggctcggcgcttccaccccagtgcagccttcccctggcggtggtgaaagagactcgggagtcgctgcttccaaagtgcccgccgtgagtgagctctcaccccagtcagccaaatgagcctcttcgggcttctcctgctgacatctgccctggccggccagagacaggggactcaggcggaatccaacctgagtagtaaattccagttttccagcaacaaggaacagaacggagtacaagatcctcagcatgagagaattattactgtgtctactaatggaagtattcacagcccaaggtttcctcatacttatccaagaaatacggtcttggtatggagattagtagcagtagaggaaaatgtatggatacaacttacgtttgatgaaagatttgggcttgaagacccagaagatgacatatgcaagtatgattttgtagaagttgaggaacccagtgatggaactatattagggcgctggtgtggttctggtactgtaccaggaaaacagatttctaaaggaaatcaaattaggataagatttgtatctgatgaatattttccttctgaaccagggttctgcatccactacaacattgtcatgccacaattcacagaagctgtgagtccttcagtgctacccccttcagctttgccactggacctgcttaataatgctataactgcctttagtaccttggaagaccttattcgatatcttgaaccagagagatggcagttggacttagaagatctatataggccaacttggcaacttcttggcaaggcttttgtttttggaagaaaatccagagtggtggatctgaaccttctaacagaggaggtaagattatacagctgcacacctcgtaacttctcagtgtccataagggaagaactaaagagaaccgataccattttctggccaggttgtctcctggttaaacgctgtggtgggaactgtgcctgttgtctccacaattgcaatgaatgtcaatgtgtcccaagcaaagttactaaaaaataccacgaggtccttcagttgagaccaaagaccggtgtcaggggattgcacaaatcactcaccgacgtggccctggagcaccatgaggagtgtgactgtgtgtgcagagggagcacaggaggatagccgcatcaccaccagcagctcttgcccagagctgtgcagtgcagtggctgattctattagagaacgtatgcgttatctccatccttaatctcagttgtttgcttcaaggacctttcatcttcaggatttacagtgcattctgaaagaggagacatcaaacagaattaggagttgtgcaacagctcttttgagaggaggcctaaaggacaggagaaaaggtcttcaatcgtggaaagaaaattaaatgttgtattaaatagatcaccagctagtttcagagttaccatgtacgtattccactagctgggttctgtatttcagttctttcgatacggcttagggtaatgtcagtacaggaaaaaaactgtgcaagtgagcacctgattccgttgccttgcttaactctaaagctccatgtcctgggcctaaaatcgtataaaatctggatttttttttttttttttgctcatattcacatatgtaaaccagaacattctatgtactacaaacctggtttttaaaaaggaactatgttgctatgaattaaacttgtgtcgtgctgataggacagactggatttttcatatttcttattaaaatttctgccatttagaagaagagaactacattcatggtttggaagagataaacctgaaaagaagagtggccttatcttcactttatcgataagtcagtttatttgtttcattgtgtacatttttatattctccttttgacattataactgttggcttttctaatcttgttaaatatatctatttttaccaaaggtatttaatattcttttttatgacaacttagatcaactatttttagcttggtaaatttttctaaacacaattgttatagccagaggaacaaagatgatataaaatattgttgctctgacaaaaatacatgtatttcattctcgtatggtgctagagttagattaatctgcattttaaaaaactgaattggaatagaattggtaagttgcaaagactttttgaaaataattaaattatcatatcttccattcctgttattggagatgaaaataaaaagcaacttatgaaagtagacattcagatccagccattactaacctattccttttttggggaaatctgagcctagctcagaaaaacataaagcaccttgaaaaagacttggcagcttcctgataaagcgtgctgtgctgtgcagtaggaacacatcctatttattgtgatgttgtggttttattatcttaaactctgttccatacacttgtataaatacatggatatttttatgtacagaagtatgtctcttaaccagttcacttattgtactctggcaatttaaaagaaaatcagtaaaatattttgcttgtaaaatgcttaatatcgtgcctaggttatgtggtgactatttgaatcaaaaatgtattgaatcatcaaataaaagaatgtggctattttggggagaaaattaaaaaaaaaaa

SEQ ID NO: 189907 - RNA, 1038 nt, Artificial Sequence
  derived and/or modified sequence
augagccuauucgguuuacugcugcuuacuagcgcuuuggcgggucagaggcagggcacccaggcugagagcaaccuuaguagcaaguuucaguuuucaaguaauaaggagcagaacggagugcaggacccccagcacgaacgaaucaucacggugagcacuaacgguaguauucacucacccagauuuccccauacuuauccucggaauaccguucucguauggaggcugguagcaguggaggagaacgucuggauccaguugacauuugacgaacgcuuugggcuggaggaccccgaagaugauaucuguaaauaugacuuugucgagguugaggaacccucugacgggacuauccugggcagauggugcggcucagguaccgugccaggcaaacagaucagcaagggaaaucagauuagaaucagguucgugucagacgaguacuuuccaagcgagcccggauuuuguauccauuacaacauuguuaugccucaguucaccgaagccguaagcccaagcguacucccaccuuccgcccucccccuggaucuccuaaacaacgccauuacugcguuuuccacacuggaggaccuuauccgguaucucgaaccugaaagguggcagcucgaucuugaagaucuguacaggccuacuuggcaacuauuaggcaaggcguuuguuuucggacgcaagucucgggugguugauuugaaccuguugaccgaagaagugagauuguauucguguaccccgcguaacuucuccguauccaucagagaggaacucaaacgaacagauacuaucuuuuggccaggaugucugcuugucaagagaugcggaggcaauugcgccuguugccuccacaacugcaacgagugucagugcgucccaagcaaaguuaccaaaaaauaccaugaggugcuacagcugagaccuaaaaccgggguaagagggcuccacaaauccuuaacagauguggcacuagagcaucaugaagaaugcgacuguguaugucgaggcucuacuggcggcuag

SEQ ID NO: 189908 - RNA, 504 nt, Artificial Sequence
  derived and/or modified sequence
augagucuuuuugggcuccuucuucugacaagugcauuagcuggccagcggcagggcacccaggccgagaguaauuuaucgaguaaguuccaauucuccagcaauaaggagcagaauggagugcaggacccgcagcaugaaagaauaauuacagugucuacuaauggcucaauccacuccccucgcuuuccucacacuuacccucgaaauacaguucuuguguggagacuuguggccguugaggagaauguuuggauucagcucaccuuugaugaacgguuuggauuggaggacccagaggaugauaucuguaaauacgauuucguggaagucgaagaaccaagcgacggcacuauucuggggcgaugguguggcaguggaacagugccaggcaaacagaucuccaagggcaaucagauaaggauucgguucguaucugacgaauacuuucccagugagcccucaaaucgaggaggcaagaucauccagcuccacacauccuag

SEQ ID NO: 189909 - RNA, 1038 nt, Artificial Sequence
  derived and/or modified sequence
augagccuuuuuggacuguugcuucuuaccagcgcuuuggccgggcaaagacagggaacgcaagccgagucaaaucugaguucaaaguuucaauucaguuccaauaaagaacagaacggcguccaggauccccagcaugaacgaaucauuacagugaguacgaacgguucaauccacucaccucgcuuuccucacacauacccucgcaacacaguucuuguauggcgacuaguggcgguugaggaaaauguguggauucagcuaaccuucgaugaacgauuuggacuagaggaccccgaggaugacauuugcaaauacgacuucgucgagguugaagaaccaagcgauggcacaauccugggucggugguguggaaguggaacggucccugguaagcaaaucucaaaaggaaaucagauuagaauccguuuuguuucugaugaguauuucccuagugaaccuggguuuugcauccacuacaauaucgucaugccccaauucacugaagcagugucacccucagugcucccccccuccgcucucccccucgaucuucuaaauaaugccauuaccgcauucucgacccuagaagaccugaucagauaccucgaacccgaaagauggcaguuggaccuagaagaccuguacagaccgaccuggcagcuccugggaaaagcguuugucuucggacggaaaucccgcgucgucgaucugaaccuccucaccgaagaggugagacuguauuccuguaccccaaggaacuuuagcgucaguauucgcgaagaauugaagcguacugauaccauuuucuggccuggaugccugcuuguaaagcgcuguggaggaaauugugcauguugcuugcauaacugcaaugagugccagugcgugccuucaaagguaaccaagaaguaucacgaaguguugcaguuacggccuaagacagguguuagaggacuucauaagagccuuacagacguggcauuggagcaucacgaggagugugauugcguuugucguggaaguacaggaggcuag

SEQ ID NO: 189910 - RNA, 504 nt, Artificial Sequence
  derived and/or modified sequence
auguccuuauucggucuccugcuccuaacuucggcucuugcaggccaacgacagggaacacaggccgaguccaaccucaguucaaaauuucaguucaguagcaacaaagaacagaauggugugcaggacccucaacacgaacguaucauaacagucucuacaaaugggucuauacauuccccuagauucccccauacuuacccaagaaacacugugcuugucuggcgucugguggccguggaagagaacgucuggauccagcugacauuugacgagcgguuugguuuggaagacccagaggaugacaucuguaaguaugacuucguggaggucgaagagcccagcgacgguacgauucuaggcagauggugcggcagcggcacaguuccagguaaacaaauuuccaaggguaaucaaauaagaauuagauuugucucagacgaguacuucccgagugaaccaaguaaccguggagggaagaucauucagcugcauaccagcuag

SEQ ID NO: 189911 - protein, 326 aa, Artificial Sequence
  derived and/or modified sequence
MSCAEVMYHPQPYGASQYLPNPMAATTCPTAYYQPAPQPGQQKKLAVFSKMQDSLEVTLPSKQEEEDEEEEEEEKDQPAEMEYLNSRCVLFTYFQGDIGSVVDEHFSRALGQAITLHPESAISKSKMGLTPLWRDSSALSSQRNSFPTSFWTSSYQPPPAPCLGGVHPDFQVTGPPGTFSAADPSPWPGHNLHQTGPAPPPAVSESWPYPLTSQVSPSYSHMHDVYMRHHHPHAHMHHRHRHHHHHHHPPAGSALDPSYGPLLMPSVHAARIPAPQCDITKTEPTTVTSATSAWAGAFHGTVDIVPSVGFDTGLQHQDKSKESPWY

SEQ ID NO: 189912 - DNA, 981 bp, Artificial Sequence
  derived and/or modified sequence
atgagctgcgccgaggtgatgtaccacccccagccctacggcgccagccagtacctgcccaaccccatggccgccaccacctgccccaccgcctactaccagcccgccccccagcccggccagcagaagaagctggccgtgttcagcaagatgcaggacagcctggaggtgaccctgcccagcaagcaggaggaggaggacgaggaggaggaggaggaggagaaggaccagcccgccgagatggagtacctgaacagcagatgcgtgctgttcacctacttccagggcgacatcggcagcgtggtggacgagcacttcagcagagccctgggccaggccatcaccctgcaccccgagagcgccatcagcaagagcaagatgggcctgacccccctgtggagagacagcagcgccctgagcagccagagaaacagcttccccaccagcttctggaccagcagctaccagcccccccccgccccctgcctgggcggcgtgcaccccgacttccaggtgaccggcccccccggcaccttcagcgccgccgaccccagcccctggcccggccacaacctgcaccagaccggccccgcccccccccccgccgtgagcgagagctggccctaccccctgaccagccaggtgagccccagctacagccacatgcacgacgtgtacatgagacaccaccacccccacgcccacatgcaccacagacacagacaccaccaccaccaccaccacccccccgccggcagcgccctggaccccagctacggccccctgctgatgcccagcgtgcacgccgccagaatccccgccccccagtgcgacatcaccaagaccgagcccaccaccgtgaccagcgccaccagcgcctgggccggcgccttccacggcaccgtggacatcgtgcccagcgtgggcttcgacaccggcctgcagcaccaggacaagagcaaggagagcccctggtactag

SEQ ID NO: 189913 - DNA, 981 bp, Artificial Sequence
  derived and/or modified sequence
atgtcctgtgccgaagtgatgtaccaccctcagccatacggggcatctcagtacctgccaaatcctatggccgcgaccacatgccctactgcatactatcaacctgccccgcagccagggcagcaaaaaaaactggcggtgttctcaaaaatgcaggatagtctggaggtgacgctgccgtctaagcaagaagaggaggacgaggaggaagaagaagaggagaaagatcagccagctgagatggagtacctgaacagcagatgtgtgctttttacctactttcagggcgatatcggctccgtggttgacgaacacttttcacgagccttgggacaggcaatcacactgcatccagagtccgctataagcaagtcaaagatgggcctaacacctttatggagggacagctcagctctttctagccagcgcaattctttcccaacctcattttggacaagcagctatcaacctccacctgctccctgtttggggggcgttcacccagattttcaggtcacaggcccccctggcacattctcagctgctgacccttcaccttggccgggacataacctgcaccagaccggaccagcccctccacctgcagtttcagagagttggccgtacccgttgacctcgcaggtaagtcccagttactcgcacatgcacgatgtctacatgcgccaccaccatccccacgctcacatgcatcaccggcaccgccaccatcatcaccatcatcacccccccgccgggtccgccctggacccttcatacggacccttgcttatgccttctgtccatgcggcccggatcccagcacctcagtgcgacattacgaaaaccgaaccaactactgtaacctccgccacatctgcttgggctggcgcatttcacgggacagtagacatcgtcccttccgttggcttcgacaccggattgcaacaccaagacaaatccaaagagtctccttggtactag

SEQ ID NO: 189914 - DNA, 981 bp, Artificial Sequence
  derived and/or modified sequence
atgagctgtgccgaggtgatgtaccacccccagccctatggagccagccagtacctgcccaaccccatggccgccaccacctgccccacagcctactaccagcctgccccccagcccggccagcagaagaagctggccgtgttcagcaagatgcaggacagcctggaggtgaccctgcccagcaagcaggaggaggaggatgaggaggaggaggaggaggagaaggaccagcctgctgagatggagtacctgaacagccgctgtgtgctcttcacctacttccagggcgacatcggctctgtggtggatgagcacttcagccgggccctgggccaggccatcaccctgcaccctgagagcgccatcagcaagagcaagatgggcctgacccccctgtggagggacagcagcgccctgagcagccagagaaattccttccccaccagcttctggaccagcagctaccagcccccaccagccccctgcctgggcggcgtgcacccagacttccaggtgactggacctcctggcaccttctctgctgctgaccccagcccctggccaggccacaacctgcaccagacaggccctgcccctcctcctgctgtgtctgagagctggccctaccccctgaccagccaggtgagccccagctacagccacatgcatgatgtgtacatgaggcaccaccacccccacgcccacatgcaccaccgccaccgccaccaccaccaccaccaccaccccccagctggcagcgccctggaccccagctatggccccctgctgatgcccagcgtgcatgctgcccgcatcccagccccccagtgtgacatcaccaagacagagcccaccaccgtgaccagcgccaccagcgcctgggccggggccttccatggaacagtggacatcgtgcccagcgtgggctttgacaccggcctgcagcaccaggacaagagcaaggagagcccctggtactag

SEQ ID NO: 189915 - DNA, 981 bp, Artificial Sequence
  derived and/or modified sequence
atgagctgcgccgaggtgatgtaccacccccagccctacggcgcctctcaatacctgcccaacccaatggcagctaccacgtgtccgacagcgtactatcagccggctccacagcccggccagcaaaagaaactcgccgtttttagtaaaatgcaggattccctcgaggtgacactgccctccaaacaggaggaggaggatgaagaagaggaggaggaagagaaggatcagccagccgagatggaatacttgaacagtcgatgtgttctatttacctattttcagggcgacatagggtccgttgttgatgaacacttcagtcgcgctctcggccaggcgatcacattgcatcctgaatctgcaatttcgaaaagtaaaatgggactgacgcctctgtggcgtgactcaagtgcgttgtctagtcaacggaactcattccctacctcattctggacttccagttaccaacctccccctgctccttgcttagggggagtacatcctgatttccaggtgacaggccctcccggtacctttagtgcggccgaccctagcccatggcccgggcataatctacatcagacaggcccagcgccccccccagcagtgtccgaatcttggccctatcccttgaccagccaggtcagtccttcctactcccatatgcatgacgtatatatgagacaccaccatcctcatgcccatatgcatcaccgccacagacaccatcaccatcatcaccatcctcctgcaggctccgccctggacccctcatatggtcccctcctgatgcctagtgtgcacgctgcaagaattcccgcaccacagtgcgacattactaaaacagagcccaccactgttacctccgcgactagcgcatgggcaggtgcttttcacggcaccgtcgatattgttccgagcgtggggttcgatacggggctccagcatcaggacaaatccaaggagtccccctggtactag

SEQ ID NO: 189916 - DNA, 981 bp, Artificial Sequence
  derived and/or modified sequence
atgtcttgcgcagaggttatgtaccatcctcagccatacggggcaagccagtaccttcccaatcctatggccgctaccacatgtcctacggcctattatcagcccgcacctcagcccggacagcagaagaagcttgccgtcttctccaaaatgcaggacagcctggaagtaacactgcccagtaaacaggaggaagaagatgaggaggaggaggaagaggagaaagatcagcccgctgagatggaatatctgaatagtagatgcgtgctttttacatacttccagggagatattggatcagtggtggacgaacatttctcccgtgccctgggtcaggcaatcactctccaccccgaatctgcgattagcaaaagtaagatgggcctgacgcccttgtggcgcgattcctccgcactgagttcccagagaaacagtttccccaccagcttttggaccagtagttatcagccaccacccgcaccctgtctcggaggggtgcatcctgatttccaggtgactgggcctcccggaactttttcggccgcagacccttctccgtggccgggacataatctgcatcagacaggtccagctccacctcccgctgtttccgagtcttggccttacccacttactagtcaagtcagcccctcttactctcacatgcacgacgtgtatatgagacaccatcatccgcacgctcacatgcatcatcgccaccggcatcatcaccatcatcaccacccaccggcaggcagcgcccttgatccgagctacggcccattgttaatgccctccgtgcacgctgcaaggatccccgcaccccagtgtgacattacgaaaaccgagcccacaaccgttacctcagccacatccgcctgggcgggtgccttccatgggactgttgacatcgtccccagcgtgggcttcgacactggcttgcagcatcaggacaagtccaaggaaagtccctggtattag

SEQ ID NO: 189917 - DNA, 10400 bp, Artificial Sequence
  derived and/or modified sequence
cgggcctgggctgtggctgtgactggcgctgccgtgggcgccgcagccctcgcgggagccggacgcggtaatgccccagcggcgcagcgggcggctgcgtccctgagccgctatataagcgcggcagggaacatccggaggggctgaagatgaaggtgcccgcgcatgggcccccgctgattgccagtccctcccgaccccgcgccccgcgcggagcccgaggccgccgaggacccgccttcgccgcagtagcagctggagcagcgacagaggcggcagctgcggcggcggcggcgcccgcgcccctcgcgccagcgcgtagagcggcggcggcagctcgggggccgccactgccccggctgccatgagttgtgcggaggtgatgtatcacccccagccttatggagcgtcccagtatctgcccaaccccatggcagcgacaacctgccccacagcctactatcagccggcgccccaacctggccagcagaagaagttagcggtattcagcaagatgcaggactctctggaagtcacccttcccagcaaacaagaggaggaggatgaggaggaggaggaggaggagaaagaccagcctgccgagatggagtaccttaactctcgctgtgtccttttcacttatttccagggagacattgggtcagtagtggatgaacacttctcaagagctttgggccaagccatcaccctccatccagaatctgccatttcaaaaagcaagatggggctaacccccctatggcgagacagctcagctctctcaagccagcggaatagtttcccaacttccttttggaccagctcttaccagcccccacctgcaccttgtttggggggagttcatcctgacttccaggtcactggaccccctggcaccttttctgcagctgatcccagtccttggccgggacacaacctgcatcagactggcccagcccctccccctgctgtgtctgagtcctggccttatcctttgacatctcaggtgagcccatcctacagccatatgcatgacgtgtacatgcggcaccaccaccctcatgcccacatgcaccaccgccaccgccaccatcatcaccatcaccaccctcctgctggctctgccctggatccatcctatgggcctctgctgatgccttcagtgcatgcggccaggattcctgctccccagtgtgacatcacaaagacagaaccaactacagtcacctctgctacctcagcatgggctggagcctttcatggaacagtagacatagtgcccagcgtgggattcgatacaggtctacagcatcaagacaagagtaaggaatcaccgtggtactgaaacacacaatcttagtgagttaagttgcagcataaatccaagggcccactgggaaaagatactgtcgggtttttccattcagcaataggacacgaaaggcatagaaggagaagacaaagtgtcacgcagttgactggttttcggcctttcttgagaaagcaaagtgggtcccagacattgaagaaaagcatttttatttgtttatttcctcatctgagcctttgccaactgtgcaactctctccttttgttatcttgcttttatcaatatatagctaagtttttgtttcattttgatttttttttttagccaaccaccttgtcaggaaaggatgaaccacacattaaaatgttcattctttcaggaatacaagtttgtagctctatgtgcatctatttttgtagaaatacaaaaagtttggtttagcattgatgggctatttttgagggatgtattttttttaaaattgtaaaaattgttgagttctgtttaaagaacttgctctcagagaagcactggcaaaaatgtttaaaatgcttatctctaagatgtctattatatgctctgtctgtgctttctaggttacctcaaatgttttgtttttttccttcttacaaaagtagctataccgtagtcaaaccaatgcagtattgtttttacattgaatctcagtaaagatttaattccatgctagctcaattagttttgaattatatgtatagcttgaaaagtttttttttaatgactgtgctaaagaaatgatattttattgctttgatttctcccaaagaataacttggaggttgactaataagaaagttggcataaactttcaatcaaatgaagagtttgcctagaggagactaattctctttctagcccatccaaatttgataaatggaaccagaggttatatacaactacaaggaaaaaaatgcatttaaccatgccacctatgagtgccagtgacttattttacttgtttttaattattcattcatggcaatttaaaaagtcatattttaagtgggatttgtttttcctgaagggcatttgaaggaacaatatctgggaaggtactagagaaattacaaagcccgagctctttcttataatgccacctatccctgtaagctaaacaaacaaacaaacaaacaaacaaacagttctatatataatagtttcaacacagaacttaacaagtctctttttttgtttgtttaaatctggctttacttgatttaattcctttttagaaagaaatttagggcaaaataaagtgtatattaggatttaaatttatgccacaatttaaaaataaaaccagaggttatatacaatttaaattgggctaaaaattaaaaatttgaggatttaacttgatatagctctcaggatctaaataaagtttaaattatcattaagacactgctaggagaagattaagattatgaaagtaacagttattgatactgctggacttcaaaggcaaagttcatttcttccattaactgcttccagagatgtcatgtaaaaaagttagtgtattagagaagttttttagctttataaagaggttttttcaaatttctcccatttttctctccacccacataaaatagtatgttcagtgaaatgccactttctatctttaattgttcgtatcatatatgcgaactttttagacatgaacatgacatgttcagctaggcagagttctcatagataattttcaaatattttccttggctgtaatttatgtattcatttatatcctatccgtcttttgagcttcagatctatatactcttttgtactctcatcactccgcactttgctgtttcttacctagactctcttttacacaatatgcacatttttaccattgtggggtccaaatttaagataccttccactcactaataatatgaacttatatttcctgggagtagccaggttaaattttctatactttggtccataatttgatttgatatgattgtttcatttataatttgcccaaatacatggagcacaaaatttagtgaatttataaatctggatttgccttgtgtccttctgagttttcaaaggcaagtattcaacagtccctgtgtgatgactgacagggttatttgcctcatccacatccaccttcggaatacattaacttcctttgtaatttatttgaaagtagtgttaaactcattcagatcattcagttggattttcccaatgaagaggaaaaggaaagtagttattcctagctccatttcttattttccaccaaatttaattgaagggcattaattagatgtcttcaccctgaatttagactttgctctgtgttctcccggtaactgtcagacaaaaagtttattggctctgaggaactgagaaatgttgggaacctggtttctgctgtacacaggaaagatttgtaagtgagctctctctttgaaaacaggacccaggctgggcacagcagctcatgcctgtaatcctagtattataggaggcagaggctcgggaggattgcttgagcccaggagttcaagatcagcctaggcaacatagggagaccctatccctacaaaaaatttctgaaaaattacctgggcattgtggggcacacctgttgtcccagctactctggaggctgagtccggaggaacgtttgagcctgggagtttgagtttgcagcttgcagtgagctgtgattgcaccactgtactccagcttgggcaacagagcaagatcctgtctcaaaaggaaaaagaaaacaggacctaggtgtttggggtacactgccacccagggagtggatcaaaaatatacatagaaagagaatgagcatgtctctataattgtcttctaggaccatattgctgttagaagtcctaaaagaggatgggttgtaatttagcataatattctgaattcattccaagtttaaaatcctgtcattctctggctcttcttttttcacatcaaaatgatgctgttggacttagaggcttccgaactgttttattgagggctactatctgcctccacaattttattaaaaccactccacctttagacaaaggtgacttttgtctgattttacaaatcagattttattcaagctttctaaatatctgtgaagtagaccctagaaaattgtctcgtttattttaaatagaatctatgcttccaccaataaaccatcgggagctaagaaacaacataatgttgacaaatcaggaacctaacagattattttgtctctcattattaatttgaaagagcctctaaacttttgagaaatcaatgtgtcttcttaagaaagttaagcaccctctcttaactttcccctctatttgctctcctttttctttcttcttaagagtatttatattattttgttaagcaaaaatggctaagattgctctaaaatttgcaaaatgaggagtggattgcaaataattgagggatttatttctttaactttataagactttaaaaaaaaaacccaaattctaagcactgacatgaaagttgcctttgagaagcttgttattcattatacaaaaagtatttgcccattcctattctaagatttgcagaatatgtcaccctatctagcttttgagtttgctatctggtttaatgttgtatttataatttaaagtggaaatcagaaactgtttcaagaacctgtattctattccttactgagtgtcccttctttaaatagtgtttgctgaattaagccgatgggggcagtggcgttaagtggtggaaaaaggaaagtatatatgttagagttttgaatgagggataaatagaaagcagaatgaattaatggaaaagaactcggctgttaggccattctctaaattctagtttagccaaaagtttatgtgtggtttggggcttcatttatttatctcatgagtaaaatggaataatacctaacaggcaggctctggaagttggaaatcacatacacacacacacacacacagacacacacacacacgatcaatcatgtagctcatattagatgttcaataaataacagctactacagatgcctatcagttgagtaagtagttcattaaattgagctcccaaaggtctcttctcttcacatccatatccgtttctgcagcaatcaaatagatacatgattgtttttctgtaagaaattactgcaaagagaatctttttctcctactaactgttccttctacctggtataggagataaatgtacgtttcttaattagctgactttttagtatgtcatttctgaaggaaaaataaattaaccttaaagtggcatgtaggtccaattcagttttcctacatgttccaaaattttatttaaattactgtgtccaaaattatgaggacagtgtcattcattcaccatagtttatatttttagttatatatcaaacttccttggcacctaggataagaacatttcttttgaagttatccaatttttttttatttttacttgacttgaaggaaagttggaaaatatggtggaaaaaatcttccgcattaaaagggggaaaaacacaaccatttacgatctcagtcagcagatttactctactcaaggaaaaaaagaaacaatcttattggaagcagatgttgacactgtgtcagttattgaagacggaaggagttcacttgagccattgcagttacaaaggggtattgatggcagtttggattcctgattgatcacctttgcagccaagggaaagacagcagaaactgtatgggatcagaaatgaaatcagcctgccagtttaatggagaggctcctagaaactcattttttttctttcctgtaagataaaagacatctttcagaataagaaaggcttgtttgagagagaaattacagtttattctctgaaaatatttaaaggccaaagtgccctttaaatctattattaaagcattgaaactgttattaaaatcattatagaaaaattaggtaaaaattttagcctaactttcaacatccattcaaaaacgaatgttgaaaacaaacatataacctataaaaaagtgaatggctctggcaagtgggggcatgggtggagtccataaggaaacctcagtctcaataacttcaaaatgttacttttcatggtaacttggtcatggagattggtcacagcacagacatttagaattttttagcaggttttttttttcttttgaatcttgtagtgctctctgggaattgcaccatgtacacttttacaacctacagaaatcgtcattattgttaaagtatctcaacttttctatttcttttattgtctattgtgcttttttgtttaaaaatacttttatagttttaaagtattggtcaaagtagtattctcttgaagttctagtcaatttaatttgatccaataagtttttctgaatctcctttttaagttccaagaaattctattataaataagtgtacttttaccaattccattgtataagcaaacagacaccttttagaaaaggataagtaatcatcaatttgtttttttaaaaaaaaaaacaatttctagactactaaatttggcataagaataattcttttaaaatgcaacatactttaattagtttttttggtatatgcataagatgtgaactttcctattgatatcactttatattaatagagatgtacatttctttctatgccgtggctagagcaaaagttaataatgattatttacacaattgatttaatttcttaggatatgtataatattggatattatatctgatttaaaaatactattccatacattttttttttcaggagataaaacatagggaaaggttttcatgtgaattctttgtatcactttgaagtacatatatttaaagggaagatggatacaatttgtttttattatataaatctaggtaaggtgaaatgcttttgtcaacaaaaatacagtgtagtgaattttatatttgtcacttgattaggtaaactgaaaactaacaatagaaatattattttactgcattgaaataccatgaactttcagacttgttagttctacaagaagttgtgctaccttaattttgtgtttccagaaataaaaattaaccttagttatgctgtcatttttaactaataaaaaaagtataattcataaaacttttggctttataagataattataaaattatatatttttttctgtttttgtggggttgggaaaacattttcttatttctattcactcttcaaatgcaggtctcataatatgtgtcaatgatataagatgatggaagactttgtaataaaaacatatgtcattatcttcaatttgttcaataaataatttaatgtgaattgaatgtttgtattttaacatagcatttggatttggtctgcatttcttgagaatttaaagctctttttgtttcctccttattcaattaagcatcttataaatattttggaaattacaacatcttaggtgttattaattaagaagttaatttctagggccaagaagtctatatgttacagcaaggaatagattataaaatacatgtttataatggaaaagaaaatgaaatggggtatattaattacataacagcaagagtcttgagaattttataatacaatgcttctaaggatattggttgaccaaggtgtattttattgtttttacatttgttgacagggactctgccataagtagtatgaaaaaacaaacaaaaacttttctacgattcattaacattgaaaagagaattccaagaccttgtattctgaagaaagctagagtttctctaagtgggccttcaattttcttattacacgtatctttaatgtgaaagtactaaagtctgaaaatcagcatttaaataatagactttccagcattacagatgaaataatttggcgcaggctttttaactgtctaccatatttagaatgtggtgtcaaaatgagatttttagaactgctgtaaaatattactacattactacaacgataacggcctaaaacaacacaaatttattatcttacagctctgtcagtcagacattcagcaaagatcttagtcttggtgggctacagaatgtaggaggcatttcctggatgcttccaagagagaatcttgctgttccctgcttctagagtcctttgcttagtttccttccatcttcaaatccagcaacctggtcaagaccttctcacatgacatcactgacttcctcttcttcctctcccttacatatttaaggactcatgtgattacaatagctgcatctgtgtaatccagaataatctcttcatctcaaggtttttgttctgttttgtttttttgttttgttttgttttgttttgttttgatggagtcttgctctgtcgtcaggctggagtgcagtggcgcgatctcggctcactccaacctccacctcccgggttcaaaggattcccctgcctcagcctctcgagtagctgggactacagatgcgtgctaccacacaaggctaatattttgtattttagtagagacgggatttcaccatgttggccaggatggtctccgtctcctgacctcgtgatctgcctgccttggcctcccaaagtgttgggattacaggcataagccattgcgccatgctcaaggttcttaattacatctttaaaggccctttttccatgtacagtaacatattcaatggttctggggattaggacttggagccattattctacctacaacaattagtattggacttccatcattttctatcactcttgtaatcgagaaggactatttcactgggagtagcaagtcataatgtttgcgttggcatttgtgtgggggtttatcttcattcattaaataattgcatgtaaagaaaattcctgtcactatttcaaatgtttcatgtagttattatagtgcttcagaatccaaagggttatgtgttacttatgtaagatgagcagtctagggggtggagaacaggtcatctagtgcagattcttcctagctgaagtgtgttttctctggggacaaccaagtaggatttaattgttttgcttccttttttgggaacttagacccatcttgcgatgtcctaagtctccaagcatcttatttgacctgcttatacacatttgactaaatagctaaatatgaccacattgacgtggtaaagctttaacacttttgtccagattgaatcactccatctgctatcagttaagcagtggaaaactgttatggaaaagcaaacatgttttgatagatttaatgtgtaaagaaggtatccatactctggaatgctgctgatcaataaatgagctgcaagactttgttcgaaacaacactcaagcacaactgttttactttccataccaagtttggctgtgactgaatgaagaacatcagcattgatctttgctttgcacttgtacaagagactatttgcagagagccaaatatagcaacagaggatttaatatcttgccaaaaaatacaaaatctgttcccctttaagcatgacactctatcctttcttgtggatcttgctaaaaggaaaatatagctttaaactcccctattccttctgttgaaagcttaagaatctttttcaaatgagctatgtatggttttgtggtattttatgtttccaaaagaaaatggctacatgaaaaatctgtccagtgttatcatttttcttacaaaaaatacttctagttatggttgtattaattaatttgattgtgataatgattacacaatgtttacctatatcaaatcatcatatcgtataccttaaatatatataacttttatgtgtcaattataactcagtaagtctgggaaaatatcgttaagtcaaagattagagtcaacagaaataaagaaaaatcatactttgataacttcaggactaatcaaggatcaatgggtgacatgatatcatgctatgtgccattttgtgttaaacaaattacaccaacaataaaaaaaattggcttcaatcaa

SEQ ID NO: 189918 - protein, 684 aa, Artificial Sequence
  derived and/or modified sequence
MSAIPAEESDQLLIRPLGAGQEVGRSCIILEFKGRKIMLDCGIHPGLEGMDALPYIDLIDPAEIDLLLISHFHLDHCGALPWFLQKTSFKGRTFMTHATKAIYRWLLSDYVKVSNISADDMLYTETDLEESMDKIETINFHEVKEVAGIKFWCYHAGHVLGAAMFMIEIAGVKLLYTGDFSRQEDRHLMAAEIPNIKPDILIIESTYGTHIHEKREEREARFCNTVHDIVNRGGRGLIPVFALGRAQELLLILDEYWQNHPELHDIPIYYASSLAKKCMAVYQTYVNAMNDKIRKQININNPFVFKHISNLKSMDHFDDIGPSVVMASPGMMQSGLSRELFESWCTDKRNGVIIAGYCVEGTLAKHIMSEPEEITTMSGQKLPLKMSVDYISFSAHTDYQQTSEFIRALKPPHVILVHGEQNEMARLKAALIREYEDNDEVHIEVHNPRNTEAVTLNFRGEKLAKVMGFLADKKPEQGQRVSGILVKRNFNYHILSPCDLSNYTDLAMSTVKQTQAIPYTGPFNLLCYQLQKLTGDVEELEIQEKPALKVFKNITVIQEPGMVVLEWLANPSNDMYADTVTTVILEVQSNPKIRKGAVQKVSKKLEMHVYSKRLEIMLQDIFGEDCVSVKDDSILSVTVDGKTANLNLETRTVECEEGSEDDESLREMVELAAQRLYEALTPVH

SEQ ID NO: 189919 - protein, 546 aa, Artificial Sequence
  derived and/or modified sequence
MSAIPAEESDQLLIRPLGAGQEVGRSCIILEFKGRKIMLDCGIHPGLEGMDALPYIDLIDPAEIDLLLISHFHLDHCGALPWFLQKTSFKGRTFMTHATKAIYRWLLSDYVKVSNISADDMLYTETDLEESMDKIETINFHEVKEVAGIKFWCYHAGHVLGAAMFMIEIAGVKLLYTGDFSRQEDRHLMAAEIPNIKPDILIIESTYGTHIHEKREEREARFCNTVHDIVNRGGRGLIPVFALGRAQELLLILDEYWQNHPELHDIPIYYASSLAKKCMAVYQTYVNAMNDKIRKQININNPFVFKHISNLKSMDHFDDIGPSVVMASPGMMQSGLSRELFESWCTDKRNGVIIAGYCVEGTLAKILVHGEQNEMARLKAALIREYEDNDEVHIEVHNPRNTEAVTLNFRGEKLAKVMGFLADKKPEQGQRVSGILVKRNFNYHILSPCDLSNYTDLAMSTVKQTQAIPYTGPFNLLCYQLQKLTGDVEELEIQEKPALKVFKNITVIQEPGMVVLEWLANPSNDMYADTVTTVILEVQSNPKIRK

SEQ ID NO: 189920 - protein, 406 aa, Artificial Sequence [sequence omitted]

SEQ ID NO: 189921 - DNA, 2055 bp, Artificial Sequence
  derived and/or modified sequence
atgagcgcaattcccgcagaagaatccgatcagctactgattcggccactgggcgcaggtcaggaggtgggacggagctgcatcatccttgaatttaagggccggaaaattatgctcgactgcggtatccaccccgggttagaaggaatggacgccctcccctatatagatctgattgatcctgccgaaatagacctgcttctcatcagccattttcacctggatcattgcggagccctcccatggttcttacagaaaaccagctttaagggacggacctttatgactcatgccactaaggctatttatcggtggttgttgtccgactatgttaaggtctccaatatctcagctgacgatatgctgtacacggagaccgatctggaagaaagcatggacaaaatcgaaaccatcaactttcacgaggtgaaggaagtggctgggatcaagttctggtgctatcacgcgggtcacgtcttaggcgccgccatgtttatgattgagatcgccggggtgaaactactgtacactggtgacttctcccgccaggaagacaggcatctgatggcagccgaaatccctaatattaagcctgatatcctgattattgagtctacctacggtacacatatccacgagaagcgggaagaacgagaggccaggttctgcaataccgtgcacgacattgtaaatcgcggcggccgaggactgatccctgtgtttgccctgggaagggctcaggaactcctgctcatcttagatgaatattggcagaaccatccagagttgcacgatattccaatttactacgcatcatccttagccaagaagtgcatggcggtataccaaacctacgttaacgctatgaacgacaaaattaggaagcagattaacattaacaacccttttgtgttcaaacacatctcgaatctaaaaagcatggatcactttgacgacatcggcccaagcgtggtgatggcgtctcctggcatgatgcaatcaggactttccagagaactcttcgagtcctggtgcacagataaacggaacggggtcattattgcagggtactgtgtggaggggaccctagccaagcatataatgagtgagccggaagaaatcacgaccatgagcggacagaaactccctctcaagatgtcagtggactatatctctttcagcgcccatacagattatcagcagacaagcgagttcattcgcgcattaaagccacctcacgtgatactcgttcatggggagcaaaacgagatggccaggctcaaggccgcactgatacgggagtacgaggataacgacgaggttcacatcgaggttcacaaccccagaaacacagaggcagtgacactgaactttcggggagaaaaactggccaaggtcatgggcttcctggccgataaaaagccggagcaaggccaacgcgtgtctggaattttagtgaaacgaaacttcaactatcacatcctcagcccctgtgacctgagcaactatactgacctggccatgtccaccgtaaagcagacacaggccataccctatacagggcccttcaacttgctgtgttaccaactccagaaactgactggagacgttgaggaactggagatacaggagaaaccagccttgaaggtgtttaagaacattaccgtcatccaggaaccggggatggtcgtgttggagtggctggctaaccccagtaacgatatgtatgcagataccgtgaccacagtgatattggaagtgcagtctaatcccaagattcgtaagggagctgtacagaaggtgtctaagaaactggaaatgcacgtgtactcaaagagactggaaattatgctccaagatatcttcggcgaagactgtgtttctgtaaaggacgatagtattttgtccgtgactgtggacggcaaaaccgcaaacttgaatctggaaacgagaaccgtggaatgtgaggagggatcggaagacgacgaaagcctgcgggaaatggtggaactcgctgcacaaagactatacgaagccttaactcccgtccactag

SEQ ID NO: 189922 - DNA, 1641 bp, Artificial Sequence
  derived and/or modified sequence
atgtcagctattcctgcagaagaaagcgaccagttgctgattaggcccctgggggccgggcaggaggtgggcagaagttgtatcattctggagtttaaagggcgcaaaattatgttggattgtggtatccatccagggctcgaaggcatggacgctctcccttatatagatttgattgaccccgcagagatcgatctcttgctgatcagtcattttcacctcgatcactgcggagccttgccctggtttttgcagaagaccagtttcaaagggagaacattcatgactcacgcaaccaaagccatctacaggtggttgctttctgactatgtgaaagtgtccaacataagtgcagacgatatgctgtacacagagacagatcttgaagaatccatggacaagattgaaacaatcaacttccacgaggtgaaggaagtggctggcatcaaattttggtgctaccatgctggacacgtattaggcgccgctatgtttatgatcgaaatagccggggtaaaactgttgtacactggggatttctctaggcaggaggacagacacttgatggcagctgagataccaaacatcaagccagacattcttattatagaaagcacctatggaacgcatatccacgagaaaagggaggagagagaggctagattctgcaatactgtacatgatatcgtgaaccgagggggccgaggtttaatcccagttttcgccttgggcagggcacaagagctgcttctgatccttgacgagtactggcagaatcaccccgagctgcacgatatcccaatctattacgcctcctctctggccaagaagtgcatggctgtttaccaaacctacgtgaatgccatgaatgacaagatccgtaaacagatcaatattaacaaccctttcgttttcaaacacatctctaaccttaagtctatggaccatttcgacgatatcggtccttctgtcgtgatggcctctcccggaatgatgcagtcaggactctctcgtgaactgtttgaatcctggtgtacggacaagcggaacggcgtgatcattgcaggatattgtgtggaaggcaccctggccaagattttagttcacggcgagcaaaatgagatggcccgactgaaagccgcccttattcgggagtacgaagataacgatgaggtgcacattgaagtgcacaacccgagaaatacagaggccgtgaccctgaatttcagaggggagaaactggccaaagttatggggtttctggccgacaaaaagccagaacagggccagcgagtgtcgggaatcttggtcaaacggaactttaattaccacattttatcaccttgcgacctgtctaactatacggacctggctatgagtacggtgaaacagactcaggccatcccgtatacgggcccatttaacttgttatgctaccagttgcagaagcttactggggacgtcgaggagctcgagatccaagaaaagcctgcactaaaagtattcaagaacataactgtgatacaagagcctggtatggtggtcctggagtggctggctaaccccagtaacgacatgtatgccgacacagtgaccaccgttatactcgaggtgcagagcaatccaaagatccggaagtag

SEQ ID NO: 189923 - DNA, 2055 bp, Artificial Sequence
  derived and/or modified sequence
atgtctgccatcccagctgaggagagtgaccagctgctgatccggcccctgggcgccggccaggaggtgggccgcagctgcatcatcctggagttcaagggcaggaagatcatgctggactgtggcatccaccctggcctggagggcatggatgccctgccctacatcgacctgattgatcctgctgagattgacctgctgctgatcagccacttccacctggaccactgtggggccctgccctggttcctgcagaagaccagcttcaagggccgcaccttcatgacccacgccaccaaggccatctaccgctggctgctgagtgactatgtgaaggtgagcaacatctctgcagatgacatgctgtacacagaaacagacctggaggagagcatggacaagattgagaccatcaacttccacgaggtgaaggaggtggccggcatcaagttctggtgctaccacgccggccacgtgctgggcgccgccatgttcatgattgaaattgctggggtgaagctgctgtacacaggagacttcagccggcaggaggacagacacctgatggctgctgagatccccaacatcaagccagacatcctgatcatcgagagcacctacggcacccacatccacgagaagcgggaggagcgggaggcccgcttctgcaacacagtgcatgacatcgtgaacagaggaggccggggcctcatccctgtgtttgccctgggccgggcccaggagctgctgctgatcctggatgagtactggcagaaccaccctgagctgcatgacatccccatctactatgccagcagcctggccaagaagtgcatggctgtgtaccagacctacgtgaatgccatgaatgacaagatcaggaagcagatcaacatcaacaacccctttgtgttcaagcacatcagcaacctgaagtccatggaccactttgatgacatcggccccagcgtggtgatggccagccctggcatgatgcagagcggcctgagccgggagctgtttgagagctggtgcacagacaagagaaatggagtcatcatcgccggctactgtgtggagggcaccctggccaagcacatcatgtctgagcctgaggagatcaccaccatgagcggccagaagctgcccctgaagatgtctgtggactacatctccttcagcgcccacacagactaccagcagaccagcgagttcatccgggccctgaagccccctcatgtgatcctggtgcacggggagcagaatgagatggcccggctgaaggccgccctgatccgggagtatgaggacaatgatgaggtgcacatcgaggtgcacaaccccaggaacacagaagctgtgaccctgaacttccggggggagaagctggccaaggtgatgggcttcctggccgacaagaagccagagcagggccagagggtgtctggcatcctggtgaagaggaacttcaactaccacatcctgagcccctgtgacctgagcaactacacagacctggccatgagcacagtgaagcagacccaggccatcccctacacaggccccttcaacctgctgtgctaccagctgcagaagctgactggagatgtggaggagctggagatccaggagaagccagccctgaaggtgttcaagaacatcaccgtcatccaggagcccggcatggtggtgctggagtggctggccaaccccagcaatgacatgtatgctgacacagtgaccaccgtcatcctggaggtgcagagcaaccccaagatcagaaaaggagctgtgcagaaggtgtccaagaagctggagatgcacgtgtacagcaagaggctggagatcatgctgcaggacatctttggagaggactgtgtgtctgtgaaggatgacagcatcctgtctgtgacagtggatggcaagacagccaacctgaacctggagaccaggacagtggagtgtgaggagggctctgaagatgatgagagcctgcgggagatggtggagctggccgcccagaggctgtatgaggccctgacccctgtgcactag

SEQ ID NO: 189924 - DNA, 1641 bp, Artificial Sequence
  derived and/or modified sequence
atgtctgccatcccagctgaggagagtgaccagctgctgatccggcccctgggcgccggccaggaggtgggccgcagctgcatcatcctggagttcaagggcaggaagatcatgctggactgtggcatccaccctggcctggagggcatggatgccctgccctacatcgacctgattgatcctgctgagattgacctgctgctgatcagccacttccacctggaccactgtggggccctgccctggttcctgcagaagaccagcttcaagggccgcaccttcatgacccacgccaccaaggccatctaccgctggctgctgagtgactatgtgaaggtgagcaacatctctgcagatgacatgctgtacacagaaacagacctggaggagagcatggacaagattgagaccatcaacttccacgaggtgaaggaggtggccggcatcaagttctggtgctaccacgccggccacgtgctgggcgccgccatgttcatgattgaaattgctggggtgaagctgctgtacacaggagacttcagccggcaggaggacagacacctgatggctgctgagatccccaacatcaagccagacatcctgatcatcgagagcacctacggcacccacatccacgagaagcgggaggagcgggaggcccgcttctgcaacacagtgcatgacatcgtgaacagaggaggccggggcctcatccctgtgtttgccctgggccgggcccaggagctgctgctgatcctggatgagtactggcagaaccaccctgagctgcatgacatccccatctactatgccagcagcctggccaagaagtgcatggctgtgtaccagacctacgtgaatgccatgaatgacaagatcaggaagcagatcaacatcaacaacccctttgtgttcaagcacatcagcaacctgaagtccatggaccactttgatgacatcggccccagcgtggtgatggccagccctggcatgatgcagagcggcctgagccgggagctgtttgagagctggtgcacagacaagagaaatggagtcatcatcgccggctactgtgtggagggcaccctggccaagatcctggtgcatggagagcagaatgagatggcccggctgaaggccgccctgatccgggagtatgaagataatgatgaggtgcacatcgaggtgcacaaccccaggaacacagaggccgtgaccctgaacttccggggggagaagctggccaaggtgatgggcttcctggccgacaagaagccagagcagggccagagggtgtctggcatcctggtgaagaggaacttcaactaccacatcctgagcccctgtgacctgagcaactacacagacctggccatgagcacagtgaagcagacccaggccatcccctacacaggccccttcaacctgctgtgctaccagctgcagaagctgactggagatgtggaggagctggagatccaggagaagccagccctgaaggtgttcaagaacatcaccgtcatccaggagcccggcatggtggtgctggagtggctggccaaccccagcaatgacatgtatgctgacacagtgaccaccgtcatcctggaggtgcagagcaaccccaagatcaggaagtag

SEQ ID NO: 189925 - DNA, 2055 bp, Artificial Sequence
  derived and/or modified sequence
atgagcgccatccccgccgaggagagcgaccagctgctgatccggccgctgggcgctggtcaggaggttggtcggagttgtatcatcctggagtttaagggcagaaagatcatgctcgattgtgggatccaccccgggctggaaggcatggatgccttgccctatatagatctgatcgacccggcggagatcgaccttttgctcataagccatttccacctggaccattgtggagctctgccatggttcttgcagaagacctcatttaaggggaggacctttatgacccacgcaacgaaggccatataccgctggctgctaagtgattacgtgaaagtctctaatatttccgccgatgatatgctgtacacagaaactgaccttgaagaaagcatggataaaatcgagaccattaatttccacgaggtgaaggaggtcgccgggattaaattttggtgctaccacgccggccatgtgcttggagctgctatgtttatgattgagatcgccggcgtcaaattgttatatacgggcgacttcagtaggcaggaggaccggcacttaatggcagcagagataccaaacattaaacccgatatcctcatcatcgaatcgacctacggcacacacatccatgaaaaacgagaggagcgtgaagcgcgtttctgtaacacagttcacgatatcgtaaatagaggcggcagaggcttaatccctgtattcgccttgggcagggcccaggaattattactcattttggatgaatactggcagaaccaccccgagttgcatgatatcccaatctattatgcctcctcccttgccaagaagtgcatggcagtgtatcagacctatgtaaacgccatgaacgacaagatccggaaacagatcaacattaataacccctttgtctttaagcatatttcaaacctaaagtccatggatcacttcgacgacattggcccctcagtcgtgatggccagtccaggaatgatgcagtctggcctctcccgcgagctgttcgaatcctggtgcacagataagcgtaatggcgtgatcatcgcgggatattgcgtggaaggcaccctggcaaagcatattatgagtgagccagaagaaatcacaacaatgtctgggcaaaaactcccactcaaaatgtctgttgactatatttcattctccgcccacacggactatcagcagacatcagaattcatccgggctttgaaacctccccacgttatcctggttcacggagagcaaaacgagatggcccggttgaaagccgctctgattagggagtatgaggacaacgacgaggttcacatcgaagtgcacaatccaaggaatacagaagcagtgactctgaatttccgtggagagaagttggccaaggtgatggggtttctcgccgacaaaaagccggagcaaggccaacgagtgtcaggaattctggtcaaaaggaactttaactatcacattctctcgccatgcgatctttctaattacaccgatcttgcaatgtccaccgtgaagcagacacaggctattccttataccggccctttcaatctactttgttaccagctgcagaaactgactggtgacgtggaggaactcgagatacaggagaagcccgctctcaaggttttcaaaaacattaccgtaattcaggaaccaggcatggtcgtcctcgaatggctggccaaccccagcaatgatatgtacgctgataccgttaccacagtgatcttagaggtgcagtccaacccgaaaatcagaaaaggcgccgtgcaaaaggtgtccaagaaattggagatgcacgtttactccaagcgtcttgagatcatgctgcaagacatttttggagaggactgtgtctctgttaaggacgacagcatcctgtccgtgacagtcgacggcaaaactgctaacctcaacctggagaccagaaccgttgagtgtgaggagggctctgaagacgatgaaagtttgcgggagatggtggaactcgccgcccagcggttatatgaggcccttacgcctgtgcattag

SEQ ID NO: 189926 - DNA, 1641 bp, Artificial Sequence
  derived and/or modified sequence
atgagcgccatccccgccgaggagagcgaccagctgctgatccggcctctcggagctgggcaggaagtgggtcggtcatgtatcatcctggaattcaaaggccggaaaatcatgctcgattgcggcatccacccgggtcttgaggggatggatgcactcccatatatcgacctcatcgaccccgctgaaattgacttgctgctaatatcacacttccatttagaccactgcggcgctctgccatggttcttacagaaaacgtcttttaaaggaagaacgttcatgacacacgcaaccaaagctatttataggtggctgctttcggattacgtgaaggtctccaatattagtgcagacgacatgctatataccgaaacggatttagaagagtccatggacaagatagaaacaatcaacttccacgaggtcaaagaggtcgcaggaattaaattttggtgctatcatgcaggccacgtactgggcgctgctatgttcatgatagaaatagctggagtcaagttactctacaccggggatttttctaggcaagaagatagacatctcatggctgctgaaatccccaacatcaaaccagacatattgatcatcgaaagcacatacggcacacacatacacgagaaaagggaggaaagggaagccaggttttgcaatactgtacatgatatcgttaacagaggcggccggggtctgattccggtgtttgcactcgggcgagcccaggagctgctccttattctggatgaatattggcagaatcatccagagttgcacgatatccccatctactacgcctccagtctcgccaagaagtgtatggccgtgtatcagacatacgttaacgctatgaacgataagatcaggaaacagatcaatatcaacaatccattcgtcttcaagcacattagtaatctgaaatccatggaccacttcgatgatatcggcccctcagtggtcatggcatctcccggtatgatgcagtccggactttcccgcgaactcttcgagtcctggtgcaccgataagagaaatggcgtcataatcgcaggttactgcgtggaaggcacactcgccaaaatacttgtgcatggagaacagaacgagatggcacgactgaaagcagcgctgattcgggaatacgaagataatgacgaggttcacatcgaggtgcataacccaaggaacacagaggctgtgactctgaattttcggggcgaaaagctggccaaggtcatgggattcctcgccgataagaagcccgaacaaggacagcgcgtgagtggtatcctggttaagcgaaattttaattatcacattctcagcccttgtgatctaagcaactatactgacttggcgatgtcaacagtgaaacaaactcaagccataccctatacaggacccttcaacctactgtgttatcaacttcagaaactcaccggagacgtcgaggagctcgagatccaggaaaagcccgccctgaaagtcttcaagaacattacagtcatccaagagccaggtatggtcgtcttggaatggctagctaatccttctaatgacatgtacgcggacactgtaactaccgtgatcctggaggtccagtcgaatccgaaaatcagaaagtag

SEQ ID NO: 189927 - DNA, 2055 bp, Artificial Sequence
  derived and/or modified sequence
atgtccgcgatccctgcagaggaaagtgatcagctactgatcaggcctcttggcgctgggcaggaagtgggacgaagttgcatcattctggagtttaagggccgtaaaattatgcttgactgcggaatccatcccggtctggagggtatggacgcgctcccgtatattgacttaattgaccccgctgagatcgatttactcctaatcagtcacttccaccttgatcattgcggggcattgccctggtttctgcagaaaacaagcttcaagggacgcaccttcatgacccacgcaacgaaggcgatctatcgatggctgttgtccgactacgtgaaagtatcaaacatctcagcagacgatatgttatacactgagaccgacctggaagagtccatggacaaaatcgagactattaatttccatgaagtcaaagaagtggccggtatcaaattttggtgttaccacgcgggacacgtgctgggagctgccatgtttatgatcgagatcgctggcgttaagctgctctacactggggacttttcacggcaggaggatcggcacctcatggcggctgaaattccaaacatcaagcctgacattttgatcatagagtctacttatggcactcatattcacgagaagcgtgaagaacgcgaagctaggttctgtaacactgtccatgacatcgtgaacagaggagggcgaggcctgatccccgtctttgctctgggtcgggcacaggagctgctcctaattctggacgaatattggcaaaaccaccccgaactgcatgatattcccatatattatgcctccagcctggctaaaaaatgcatggctgtctatcagacatacgtgaacgccatgaatgataagatacggaagcagatcaatataaacaatccattcgtgtttaagcacatttcgaatctcaaaagtatggatcatttcgacgacatcgggcctagtgttgttatggcatcccctggaatgatgcagtccggactgtcacgtgaacttttcgagagctggtgcactgataagcgtaatggcgttataatcgcaggatactgtgtggaggggacactcgcaaagcacattatgtccgaaccggaggaaatcacaaccatgtccggccagaagctacccctgaagatgtcagtcgactacatcagttttagcgctcataccgactatcagcagacctctgagttcattagagctcttaaaccccctcacgtaatcctggtacacggggagcaaaatgagatggccaggctaaaggccgctctgattcgcgagtatgaggacaacgatgaagttcacatagaggtacataacccacgtaatactgaggccgtcaccctaaattttagaggggagaaactcgcaaaggttatgggctttctcgctgacaagaagcctgaacagggccaaagagtgagcggaatcctcgtaaaaaggaactttaactaccatatcctgtccccctgtgatttgtccaattataccgacctggccatgtctacagtgaagcaaacccaagcaataccttacacgggcccattcaacctgttatgctatcagctgcagaagttaactggcgatgtggaagaactggagatacaggaaaaacctgccttgaaagtgttcaaaaatatcactgttatccaagagcccggaatggtggttctagagtggcttgctaacccctcgaacgatatgtacgccgacacagtgactacagtcattctcgaagtgcagagcaatccaaagattaggaaaggagctgtgcagaaggttagcaagaaattagagatgcatgtttactctaaacgacttgagataatgctccaggatatctttggagaggactgtgtctcagtgaaggatgattccatccttagtgtcactgtcgatggaaaaaccgctaacttgaatctggaaacacgaacagttgaatgcgaagagggcagcgaagatgatgagtcattacgtgaaatggtggagctcgccgctcagcggttgtatgaggccctcaccccagttcattag

SEQ ID NO: 189928 - DNA, 1641 bp, Artificial Sequence
  derived and/or modified sequence
atgagtgccatacctgccgaggagagcgaccagctcctgattagacctctcggggcaggtcaagaggttgggaggtcatgtattatcctggagtttaagggaagaaaaattatgctggactgtggaatccatcctgggctggaaggaatggacgccctaccatacattgatttgatcgatccggcagagattgatctcctgctgatctcccattttcatctcgaccattgcggggcactgccttggttcctgcagaagacaagctttaagggcaggactttcatgactcatgccacaaaggctatatataggtggcttctgagtgattatgtgaaggtctcgaatatttccgccgacgacatgttgtatactgaaaccgatctggaagagagcatggataagatcgagacaatcaatttccatgaggtgaaagaagtagccggaatcaagttttggtgttaccatgccggacacgtgctaggtgccgctatgtttatgattgaaatagctggcgtcaaactcctgtacactggcgatttttctcgccaggaggatcgacacttaatggcggcagagatcccaaacatcaagcctgatattctgatcatcgaaagtacttatggcacccacattcatgaaaaacgggaggaacgggaggctcgattttgcaacaccgttcatgatattgtcaatcgcggaggccgtggcctgatccctgtgttcgcgttgggccgagcgcaagagttgctgctgatactagacgaatactggcaaaaccaccctgaactgcacgacattcccatctactacgcttcctcgctggccaaaaagtgcatggcagtctatcagacttacgttaatgcgatgaatgacaaaatccggaagcagataaatataaataatccctttgtctttaagcacattagtaatctgaagtccatggaccactttgatgacatcgggccttccgtggttatggccagtcccggtatgatgcagtcagggctatctcgcgagttgttcgagagttggtgcacagataagcggaatggagtgatcatcgccggttattgcgttgaaggaaccttagccaaaatattggtgcacggcgaacagaacgagatggccaggctcaaggccgctctcatacgcgagtacgaagataacgacgaggtgcacatcgaggtgcacaacccgagaaacacggaagcagtcaccctaaatttccgaggtgaaaagttagcgaaagtgatgggcttccttgctgataagaagccagagcaagggcagcgagtgtctggtatcctggtcaaaaggaattttaattaccatattctgtccccctgcgatctcagtaattataccgatctggcgatgagtactgttaaacaaactcaagccatcccctacaccggaccatttaacctactgtgttaccagctacagaaactgactggtgacgtcgaagaactggaaatccaggaaaagccggcacttaaagtgttcaagaatataaccgtcatccaagaacctggaatggtggttctcgagtggcttgcaaacccctcgaatgacatgtatgctgacactgtgacaaccgtgattttggaagtgcagtcaaaccccaaaatcagaaaatag

SEQ ID NO: 189929 - DNA, 2345 bp, Artificial Sequence
  derived and/or modified sequence
accccaagtggtgggaagcctcgcgagcggcgtcccccgaccggaagtcgaggggaggagtctagtgccgcgggctccggagtgacggaagttgtgctcttggtgaatggggttcttccttttttatttaccggtggctgtgcttccaatttaggaagaccccggcgacctgttcctcacccccgcttcgccctcacactttcgggatgtctgcgattcctgctgaggagagcgaccagctgctgatccgaccccttggagctgggcaagaagtaggaagatcatgtattattctcgagttcaaaggaagaaaaataatgctcgactgtgggatccaccctggcctagaaggaatggatgctcttccttatattgatttaattgacccagctgagattgatctcctattaattagtcatttccatttggatcactgtggagctctgccctggtttctacagaagacaagtttcaaaggaagaacatttatgactcatgccacaaaagctatttatagatggcttctttctgattatgtcaaagttagtaacatatcagcagacgacatgctgtataccgagacagatttggaagaaagcatggacaaaattgaaactatcaactttcatgaagttaaggaagttgcgggaatcaagttttggtgttaccatgcaggtcacgtcctaggagccgccatgttcatgattgagatcgcaggcgtgaagcttttgtacactggtgatttctcaagacaagaagataggcacttaatggcagctgaaattcctaatattaagcctgatattcttatcattgaatctacttatgggacccatatccatgagaaacgtgaagagcgagaagcaagattctgtaacactgtccacgatattgtaaacagaggaggcaggggtctcattcctgtctttgctcttggaagggctcaggagctgctcttgattctagatgagtactggcagaatcacccagaactacatgacattccaatatactatgcatcatctttggccaagaagtgtatggcagtgtaccagacatatgtaaatgccatgaatgacaaaatccgcaaacagatcaacatcaataatccctttgttttcaaacacattagtaacctcaagagcatggatcattttgatgacattggtcccagtgttgtaatggcctccccaggcatgatgcaaagtggcttatccagagaattatttgaaagctggtgtactgataagaggaatggtgtcattatagcgggatactgtgtagaagggacacttgccaagcacatcatgtctgaacctgaagaaatcactactatgtctggacagaagttaccactgaaaatgtctgttgattacatttctttctcagctcacacggattaccagcaaaccagtgaatttattcgtgctttgaaaccgcctcatgtgattttagtccatggagaacagaatgaaatggccagattgaaagcagcactgattcgagaatatgaagataacgatgaagttcacatagaggttcataatcctcggaatacagaagcagtgaccttaaacttcagaggagaaaaactagccaaggttatgggatttttagcagacaaaaaaccagaacaaggccagcgggtctcaggaatacttgttaaaagaaactttaattatcacatactttctccttgcgacctgtccaattatactgacctggccatgagcacggtgaagcagacccaagccattccatatactggtccctttaatttgctctgttaccagctgcagaaattgacaggtgatgtggaagaattagaaattcaagaaaaacctgctctgaaagtgttcaaaaatattactgtaatacaagaaccaggcatggtggtattagaatggctggcaaacccttctaatgatatgtatgcagatacagtaacaactgtgatattggaagttcagtcaaatcccaaaataagaaaaggtgcagtacagaaggtttctaaaaaattagaaatgcacgtttacagcaagaggttggagatcatgctccaggacatatttggagaagactgtgtaagtgtaaaggatgactctattcttagcgtcacagtggacgggaaaactgccaaccttaacttggagacacggactgtagaatgtgaagagggaagtgaagacgatgaatccctccgagaaatggtggagctggctgcacagagactgtacgaggccctgacgccagttcactgagactgtgcctgtatatgaactttgaaaaaatacttgactctacttttgttacctaaaataaaatgcattcgtttctctggggga

SEQ ID NO: 189930 - DNA, 2099 bp, Artificial Sequence
  derived and/or modified sequence
ctcttggtgaatggggttcttccttttttatttaccggtggctgtgcttccaatttaggaagaccccggcgacctgttcctcacccccgcttcgccctcacactttcgggatgtctgcgattcctgctgaggagagcgaccagctgctgatccgaccccttggagctgggcaagaagtaggaagatcatgtattattctcgagttcaaaggaagaaaaataatgctcgactgtgggatccaccctggcctagaaggaatggatgctcttccttatattgatttaattgacccagctgagattgatctcctattaattagtcatttccatttggatcactgtggagctctgccctggtttctacagaagacaagtttcaaaggaagaacatttatgactcatgccacaaaagctatttatagatggcttctttctgattatgtcaaagttagtaacatatcagcagacgacatgctgtataccgagacagatttggaagaaagcatggacaaaattgaaactatcaactttcatgaagttaaggaagttgcgggaatcaagttttggtgttaccatgcaggtcacgtcctaggagccgccatgttcatgattgagatcgcaggcgtgaagcttttgtacactggtgatttctcaagacaagaagataggcacttaatggcagctgaaattcctaatattaagcctgatattcttatcattgaatctacttatgggacccatatccatgagaaacgtgaagagcgagaagcaagattctgtaacactgtccacgatattgtaaacagaggaggcaggggtctcattcctgtctttgctcttggaagggctcaggagctgctcttgattctagatgagtactggcagaatcacccagaactacatgacattccaatatactatgcatcatctttggccaagaagtgtatggcagtgtaccagacatatgtaaatgccatgaatgacaaaatccgcaaacagatcaacatcaataatccctttgttttcaaacacattagtaacctcaagagcatggatcattttgatgacattggtcccagtgttgtaatggcctccccaggcatgatgcaaagtggcttatccagagaattatttgaaagctggtgtactgataagaggaatggtgtcattatagcgggatactgtgtagaagggacacttgccaagattttagtccatggagaacagaatgaaatggccagattgaaagcagcactgattcgagaatatgaagataacgatgaagttcacatagaggttcataatcctcggaatacagaagcagtgaccttaaacttcagaggagaaaaactagccaaggttatgggatttttagcagacaaaaaaccagaacaaggccagcgggtctcaggaatacttgttaaaagaaactttaattatcacatactttctccttgcgacctgtccaattatactgacctggccatgagcacggtgaagcagacccaagccattccatatactggtccctttaatttgctctgttaccagctgcagaaattgacaggtgatgtggaagaattagaaattcaagaaaaacctgctctgaaagtgttcaaaaatattactgtaatacaagaaccaggcatggtggtattagaatggctggcaaacccttctaatgatatgtatgcagatacagtaacaactgtgatattggaagttcagtcaaatcccaaaataagaaaaggtgcagtacagaaggtttctaaaaaattagaaatgcacgtttacagcaagaggttggagatcatgctccaggacatatttggagaagactgtgtaagtgtaaaggatgactctattcttagcgtcacagtggacgggaaaactgccaaccttaacttggagacacggactgtagaatgtgaagagggaagtgaagacgatgaatccctccgagaaatggtggagctggctgcacagagactgtacgaggccctgacgccagttcactgagactgtgcctgtatatgaactttgaaaaaatacttgactctacttttgttacctaaaataaaatgcattcgtttctctggg

SEQ ID NO: 189931 - DNA, 1966 bp, Artificial Sequence
  derived and/or modified sequence
gtgctcttggtgaatggggttcttccttttttatttaccggtggctgtgcttccaatttaggaagaccccggcgacctgttcctcacccccgcttcgccctcacactttcgggatgtctgcgattcctgctgaggagagcgaccagctgctgatccgaccccttggagctgggcaagaagtaggaagatcatgtattattctcgagttcaaaggaagaaaaataatgctcgactgtgggatccaccctggcctagaaggaatggatgctcttccttatattgatttaattgacccagctgagattgatctcctattaattagtcatttccatttggatcactgtggagctctgccctggtttctacagaagacaagtttcaaaggaagaacatttatgactcatgccacaaaagctatttatagatggcttctttctgattatgtcaaagttaggacccatatccatgagaaacgtgaagagcgagaagcaagattctgtaacactgtccacgatattgtaaacagaggaggcaggggtctcattcctgtctttgctcttggaagggctcaggagctgctcttgattctagatgagtactggcagaatcacccagaactacatgacattccaatatactatgcatcatctttggccaagaagtgtatggcagtgtaccagacatatgtaaatgccatgaatgacaaaatccgcaaacagatcaacatcaataatccctttgttttcaaacacattagtaacctcaagagcatggatcattttgatgacattggtcccagtgttgtaatggcctccccaggcatgatgcaaagtggcttatccagagaattatttgaaagctggtgtactgataagaggaatggtgtcattatagcgggatactgtgtagaagggacacttgccaagcacatcatgtctgaacctgaagaaatcactactatgtctggacagaagttaccactgaaaatgtctgttgattacatttctttctcagctcacacggattaccagcaaaccagtgaatttattcgtgctttgaaaccgcctcatgtgattttagtccatggagaacagaatgaaatggccagattgaaagcagcactgattcgagaatatgaagataacgatgaagttcacatagaggttcataatcctcggaatacagaagcagtgaccttaaacttcagaggagaaaaactagccaaggttatgggatttttagcagacaaaaaaccagaacaaggccagcgggtctcaggaatacttgttaaaagaaactttaattatcacatactttctccttgcgacctgtccaattatactgacctggccatgagcacggtgaagcagacccaagccattccatatactggtccctttaatttgctctgttaccagctgcagaaattgacaggtgatgtggaagaattagaaattcaagaaaaacctgctctgaaagtgttcaaaaatattactgtaatacaagaaccaggcatggtggtattagaatggctggcaaacccttctaatgatatgtatgcagatacagtaacaactgtgatattggaagttcagtcaaatcccaaaataagaaaaggtgcagtacagaaggtttctaaaaaattagaaatgcacgtttacagcaagaggttggagatcatgctccaggacatatttggagaagactgtgtaagtgtaaaggatgactctattcttagcgtcacagtggacgggaaaactgccaaccttaacttggagacacggactgtagaatgtgaagagggaagtgaagacgatgaatccctccgagaaatggtggagctggctgcacagagactgtacgaggccctgacgccagttcactgagactgtgcctgtatatgaactttgaaaaaatacttgactctacttttgttacctaaaataaaatgcattcgtttctctgg

SEQ ID NO: 189932 - DNA, 2055 bp, Artificial Sequence
  derived and/or modified sequence
atgagcgccatccccgccgaggagagcgaccagctgctgatcagacccctgggcgccggccaggaggtgggcagaagctgcatcatcctggagttcaagggcagaaagatcatgctggactgcggcatccaccccggcctggagggcatggacgccctgccctacatcgacctgatcgaccccgccgagatcgacctgctgctgatcagccacttccacctggaccactgcggcgccctgccctggttcctgcagaagaccagcttcaagggcagaaccttcatgacccacgccaccaaggccatctacagatggctgctgagcgactacgtgaaggtgagcaacatcagcgccgacgacatgctgtacaccgagaccgacctggaggagagcatggacaagatcgagaccatcaacttccacgaggtgaaggaggtggccggcatcaagttctggtgctaccacgccggccacgtgctgggcgccgccatgttcatgatcgagatcgccggcgtgaagctgctgtacaccggcgacttcagcagacaggaggacagacacctgatggccgccgagatccccaacatcaagcccgacatcctgatcatcgagagcacctacggcacccacatccacgagaagagagaggagagagaggccagattctgcaacaccgtgcacgacatcgtgaacagaggcggcagaggcctgatccccgtgttcgccctgggcagagcccaggagctgctgctgatcctggacgagtactggcagaaccaccccgagctgcacgacatccccatctactacgccagcagcctggccaagaagtgcatggccgtgtaccagacctacgtgaacgccatgaacgacaagatcagaaagcagatcaacatcaacaaccccttcgtgttcaagcacatcagcaacctgaagagcatggaccacttcgacgacatcggccccagcgtggtgatggccagccccggcatgatgcagagcggcctgagcagagagctgttcgagagctggtgcaccgacaagagaaacggcgtgatcatcgccggctactgcgtggagggcaccctggccaagcacatcatgagcgagcccgaggagatcaccaccatgagcggccagaagctgcccctgaagatgagcgtggactacatcagcttcagcgcccacaccgactaccagcagaccagcgagttcatcagagccctgaagcccccccacgtgatcctggtgcacggcgagcagaacgagatggccagactgaaggccgccctgatcagagagtacgaggacaacgacgaggtgcacatcgaggtgcacaaccccagaaacaccgaggccgtgaccctgaacttcagaggcgagaagctggccaaggtgatgggcttcctggccgacaagaagcccgagcagggccagagagtgagcggcatcctggtgaagagaaacttcaactaccacatcctgagcccctgcgacctgagcaactacaccgacctggccatgagcaccgtgaagcagacccaggccatcccctacaccggccccttcaacctgctgtgctaccagctgcagaagctgaccggcgacgtggaggagctggagatccaggagaagcccgccctgaaggtgttcaagaacatcaccgtgatccaggagcccggcatggtggtgctggagtggctggccaaccccagcaacgacatgtacgccgacaccgtgaccaccgtgatcctggaggtgcagagcaaccccaagatcagaaagggcgccgtgcagaaggtgagcaagaagctggagatgcacgtgtacagcaagagactggagatcatgctgcaggacatcttcggcgaggactgcgtgagcgtgaaggacgacagcatcctgagcgtgaccgtggacggcaagaccgccaacctgaacctggagaccagaaccgtggagtgcgaggagggcagcgaggacgacgagagcctgagagagatggtggagctggccgcccagagactgtacgaggccctgacccccgtgcactag

SEQ ID NO: 189933 - DNA, 1641 bp, Artificial Sequence
  derived and/or modified sequence
atgagcgccatccccgccgaggagagcgaccagctgctgatcagacccctgggcgccggccaggaggtgggcagaagctgcatcatcctggagttcaagggcagaaagatcatgctggactgcggcatccaccccggcctggagggcatggacgccctgccctacatcgacctgatcgaccccgccgagatcgacctgctgctgatcagccacttccacctggaccactgcggcgccctgccctggttcctgcagaagaccagcttcaagggcagaaccttcatgacccacgccaccaaggccatctacagatggctgctgagcgactacgtgaaggtgagcaacatcagcgccgacgacatgctgtacaccgagaccgacctggaggagagcatggacaagatcgagaccatcaacttccacgaggtgaaggaggtggccggcatcaagttctggtgctaccacgccggccacgtgctgggcgccgccatgttcatgatcgagatcgccggcgtgaagctgctgtacaccggcgacttcagcagacaggaggacagacacctgatggccgccgagatccccaacatcaagcccgacatcctgatcatcgagagcacctacggcacccacatccacgagaagagagaggagagagaggccagattctgcaacaccgtgcacgacatcgtgaacagaggcggcagaggcctgatccccgtgttcgccctgggcagagcccaggagctgctgctgatcctggacgagtactggcagaaccaccccgagctgcacgacatccccatctactacgccagcagcctggccaagaagtgcatggccgtgtaccagacctacgtgaacgccatgaacgacaagatcagaaagcagatcaacatcaacaaccccttcgtgttcaagcacatcagcaacctgaagagcatggaccacttcgacgacatcggccccagcgtggtgatggccagccccggcatgatgcagagcggcctgagcagagagctgttcgagagctggtgcaccgacaagagaaacggcgtgatcatcgccggctactgcgtggagggcaccctggccaagatcctggtgcacggcgagcagaacgagatggccagactgaaggccgccctgatcagagagtacgaggacaacgacgaggtgcacatcgaggtgcacaaccccagaaacaccgaggccgtgaccctgaacttcagaggcgagaagctggccaaggtgatgggcttcctggccgacaagaagcccgagcagggccagagagtgagcggcatcctggtgaagagaaacttcaactaccacatcctgagcccctgcgacctgagcaactacaccgacctggccatgagcaccgtgaagcagacccaggccatcccctacaccggccccttcaacctgctgtgctaccagctgcagaagctgaccggcgacgtggaggagctggagatccaggagaagcccgccctgaaggtgttcaagaacatcaccgtgatccaggagcccggcatggtggtgctggagtggctggccaaccccagcaacgacatgtacgccgacaccgtgaccaccgtgatcctggaggtgcagagcaaccccaagatcagaaagtag

SEQ ID NO: 189934 - protein, 221 aa, Artificial Sequence
  derived and/or modified sequence
MFHGIPATPGIGAPGNKPELYEEVKLYKNAREREKYDNMAELFAVVKTMQALEKAYIKDCVSPSEYTAACSRLLVQYKAAFRQVQGSEISSIDEFCRKFRLDCPLAMERIKEDRPITIKDDKGNLNRCIADVVSLFITVMDKLRLEIRAMDEIQPDLRELMETMHRMSHLPPDFEGRQTVSQWLQTLSGMSASDELDDSQVRQMLFDLESAYNAFNRFLHA

SEQ ID NO: 189935 - DNA, 666 bp, Artificial Sequence
  derived and/or modified sequence
atgttccacggcatccccgccacccccggcatcggcgcccccggcaacaagcccgagctgtacgaggaggtgaagctgtacaagaacgccagagagagagagaagtacgacaacatggccgagctgttcgccgtggtgaagaccatgcaggccctggagaaggcctacatcaaggactgcgtgagccccagcgagtacaccgccgcctgcagcagactgctggtgcagtacaaggccgccttcagacaggtgcagggcagcgagatcagcagcatcgacgagttctgcagaaagttcagactggactgccccctggccatggagagaatcaaggaggacagacccatcaccatcaaggacgacaagggcaacctgaacagatgcatcgccgacgtggtgagcctgttcatcaccgtgatggacaagctgagactggagatcagagccatggacgagatccagcccgacctgagagagctgatggagaccatgcacagaatgagccacctgccccccgacttcgagggcagacagaccgtgagccagtggctgcagaccctgagcggcatgagcgccagcgacgagctggacgacagccaggtgagacagatgctgttcgacctggagagcgcctacaacgccttcaacagattcctgcacgcctag

SEQ ID NO: 189936 - DNA, 666 bp, Artificial Sequence
  derived and/or modified sequence
atgttccacggcatcccagccactcctgggatcggcgccccagggaacaagcccgagttatatgaggaagttaagctttataagaacgctcgtgagcgcgagaagtatgacaacatggcagaactgtttgcggtggtgaagaccatgcaggctctcgagaaggcctacattaaggattgtgtcagccccagtgaatatacagccgcctgcagtaggctcttggtccaatacaaggctgctttcagacaggttcagggcagcgagatatcttccattgatgagttctgtcggaaatttcgcttagactgtcccctggctatggaacgcatcaaggaagacaggccaatcactattaaggatgataaaggcaatcttaatcgctgtatcgccgatgtggtttccttgtttatcacagtgatggacaagctgcgcctggagatccgagcgatggatgagatccagccagatcttcgtgagttaatggagacaatgcacagaatgtctcacctgcccccggactttgaaggcagacagacagtgagtcaatggctccagactctaagcggaatgagcgcctcggatgagcttgacgacagccaggtgaggcagatgttattcgacctcgagagcgcgtacaacgcatttaacaggttcctgcacgcgtag

SEQ ID NO: 189937 - DNA, 666 bp, Artificial Sequence
  derived and/or modified sequence
atgttccatggaattccggcaaccccggggattggtgcccccgggaataagcccgagctctacgaagaagtcaaactgtataaaaacgccagggaacgcgaaaagtatgataacatggccgagctgtttgccgtggtgaaaaccatgcaagcactggagaaagcctacatcaaagactgcgtgagtccctcagagtacacggctgcatgcagtcgcttgttggtccagtataaagctgcattcagacaggtccaggggagtgagatctctagcatagacgaattctgcaggaagttcagactggattgccccttggctatggagcggatcaaagaggacaggcctatcacaataaaggacgataaaggaaatctcaaccgctgcatcgccgatgtcgtgagtctcttcataaccgttatggataagctccggcttgagatcagggccatggatgagatccaacctgatctcagagagcttatggaaaccatgcatcgaatgtcacacctccctccagactttgagggtcggcagacagtgtcccagtggttgcaaaccctcagcggcatgtccgcatcagatgaactggatgacagccaagtgcggcagatgttgttcgatttagagtccgcatataacgctttcaaccgcttcctacacgcatag

SEQ ID NO: 189938 - DNA, 666 bp, Artificial Sequence
  derived and/or modified sequence
atgtttcatggcatcccagccaccccaggcattggagcccctggcaacaagccagagctgtatgaggaggtgaagctgtacaagaatgcccgggagcgggagaagtatgacaacatggccgagctgtttgctgtggtgaagaccatgcaggccctggagaaggcctacatcaaggactgtgtgagccccagcgagtacacagctgcctgcagccggctgctggtgcagtacaaggccgccttccggcaggtgcagggcagcgagatcagcagcattgatgagttctgcaggaagttccggctggactgccccctggccatggagcgcatcaaggaggaccggcccatcaccatcaaggatgacaagggcaacctgaaccgctgcatcgcagatgtggtgtccctcttcatcaccgtgatggacaagctgcggctggagatccgggccatggatgagatccagcctgacctgcgggagctgatggagaccatgcacaggatgagccacctgcccccagactttgagggccggcagacagtgtcccagtggctgcagaccctgagcggcatgtctgccagtgatgagctggatgacagccaggtgcggcagatgctgtttgacctggagagcgcctacaatgccttcaaccgcttcctgcacgcctag

SEQ ID NO: 189939 - DNA, 666 bp, Artificial Sequence
  derived and/or modified sequence
atgttccacggcatccccgccacccccggcatcggcgcccccggcaacaaacctgagctgtacgaggaagtaaagctctataagaatgctcgtgagagggaaaaatatgacaacatggccgagttatttgccgtagtgaagactatgcaggcattggagaaagcttacatcaaggactgtgtgtcaccctcagagtacacggccgcttgcagtcggctgctggtccaatataaagcagcattcagacaggtgcaggggagcgagatctcctcgattgacgagttctgccgcaagtttaggttggactgtcccttagccatggaacggattaaggaggaccgtcccatcacaattaaggatgataaggggaatctgaatcgctgtattgcagacgtcgtttcactcttcatcaccgtcatggataagttgaggctggagatcagggctatggacgaaatacagccagatctacgggagttgatggagactatgcaccgtatgagccacctgcctcccgattttgaggggaggcaaactgtaagccagtggctccagactctctccggaatgtcagcttcggatgagcttgatgattcccaggtgagacagatgctgtttgacctcgaaagcgcatataatgcctttaacaggtttttgcatgcctag

SEQ ID NO: 189940 - DNA, 666 bp, Artificial Sequence
  derived and/or modified sequence
atgttccacggcatccccgccacccccggcatcggcgcccccggcaacaagccagagctctacgaggaagtgaagctgtacaagaatgctcgtgagcgcgaaaagtacgacaacatggccgagttatttgcagtcgtgaaaactatgcaagccctggaaaaagcctatatcaaagattgcgtctcaccatccgaatacactgctgcatgtagtcgtctactggtgcagtataaagcagcattccgccaggtgcagggctctgaaatttcttcaatcgacgagttctgtcggaagttcagacttgattgcccacttgctatggagaggattaaggaggaccgacccattaccatcaaggacgacaaaggtaatctgaatcgctgtatcgcagacgtcgtcagcctgtttattacggtcatggataaactgaggctggagatcagggccatggacgagatccagcccgatttgagagaactcatggagactatgcatcggatgtcacacctcccccccgattttgagggacgtcagacagtatcccaatggttacagacgttatcggggatgagcgcttccgacgaactggacgacagccaagtcaggcagatgctgttcgatctggagtctgcctacaatgcctttaacaggttcctccatgcatag

SEQ ID NO: 189941 - DNA, 666 bp, Artificial Sequence
  derived and/or modified sequence
atgtttcacggtatccctgccacgcccggtatcggcgcaccaggcaataagcccgagctgtatgaagaggttaagctgtataagaacgccagagagagggaaaaatacgataatatggcagagctgttcgcagtggtgaagaccatgcaggcactggagaaggcatacatcaaagattgcgtgtctcctagcgagtacacagcagcctgctcacgcctgctagtccagtataaggcggcatttaggcaagtacagggaagcgagatcagcagcattgatgagttctgtagaaagtttaggctggattgcccccttgcgatggaacggataaaggaggatcgccctattactattaaagatgataagggaaaccttaaccggtgcatcgccgacgtggtcagcctttttattacagtgatggataagcttagactggagatccgggctatggatgaaatccagcctgatttacgcgagcttatggagaccatgcacagaatgagtcatttgccacctgacttcgagggtcggcaaacggtcagtcagtggctgcagacattaagcgggatgagtgcatccgatgagctggacgatagccaggtgcggcagatgctgtttgatctggaatctgcctacaatgccttcaaccggtttttgcacgcctag

SEQ ID NO: 189942 - DNA, 666 bp, Artificial Sequence
  derived and/or modified sequence
atgttccacggcattcccgctactccaggcatcggcgctccagggaataaaccagagctgtatgaagaggtgaagctgtataaaaacgcccgagaacgcgagaagtacgataacatggcagagctgttcgccgttgtgaaaactatgcaggcgttagagaaggcatatattaaggattgtgtatcaccctcggaatacaccgcggcatgctctagactccttgtccaatataaggctgctttccggcaggtgcagggctctgagatttcatcaatagatgagttttgtcgaaagttcagactggactgcccactagcaatggagagaataaaggaagaccgcccaatcacgatcaaggacgataaaggcaatcttaatcgatgcattgcggatgtcgtgtccctgttcatcaccgtcatggataaactccgcctggaaattcgtgccatggacgagatccagccagatctgagggagctgatggagacgatgcaccggatgagtcacctgcccccagactttgaggggagacagaccgtgagccagtggctgcagacgctctcaggcatgtccgccagtgacgaattggatgacagccaggtgcgtcaaatgctctttgacttggagtcggcgtacaatgcttttaatagattcttacacgcctag

SEQ ID NO: 189943 - DNA, 944 bp, Artificial Sequence
  derived and/or modified sequence
cgctgaccgagcgcaccccgcccccggcgccatcttcccgaccgcgagccgtccaggtctcagtgctgtgccccccccagagcctagaggatgtttcatgggatcccagccacgccgggcataggagcccctgggaacaagccggagctgtatgaggaagtgaagttgtacaagaacgcccgggagagggagaagtacgacaacatggcagagctgtttgcggtggtgaagacaatgcaagccctggagaaggcctacatcaaggactgtgtctcccccagcgagtacactgcagcctgctcccggctcctggtccaatacaaagctgccttcaggcaggtccagggctcagaaatcagctctattgacgaattctgccgcaagttccgcctggactgcccgctggccatggagcggatcaaggaggaccggcccatcaccatcaaggacgacaagggcaacctcaaccgctgcatcgcagacgtggtctcgctcttcatcacggtcatggacaagctgcgcctggagatccgcgccatggatgagatccagcccgacctgcgagagctgatggagaccatgcaccgcatgagccacctcccacccgactttgagggccgccagacggtcagccagtggctgcagaccctgagcggcatgtcggcgtcagatgagctggacgactcacaggtgcgtcagatgctgttcgacctggagtcagcctacaacgccttcaaccgcttcctgcatgcctgagcccggggcactagcccttgcacagaagggcagagtctgaggcgatggctcctggtcccctgtccgccacacaggccgtggtcatccacacaactcactgtctgcagctgcctgtctggtgtctgtctttggtgtcagaactttgggggccgggcccctccccacaataaagatgctctccgaccttc

SEQ ID NO: 189944 - DNA, 892 bp, Artificial Sequence
  derived and/or modified sequence
ccaggtctcagtgctgtgccccccccagagcctagaggatgtttcatgggatcccagccacgccgggcataggagcccctgggaacaagccggagctgtatgaggaagtgaagttgtacaagaacgcccgggagagggagaagtacgacaacatggcagagctgtttgcggtggtgaagacaatgcaagccctggagaaggcctacatcaaggactgtgtctcccccagcgagtacactgcagcctgctcccggctcctggtccaatacaaagctgccttcaggcaggtccagggctcagaaatcagctctattgacgaattctgccgcaagttccgcctggactgcccgctggccatggagcggatcaaggaggaccggcccatcaccatcaaggacgacaagggcaacctcaaccgctgcatcgcagacgtggtctcgctcttcatcacggtcatggacaagctgcgcctggagatccgcgccatggatgagatccagcccgacctgcgagagctgatggagaccatgcaccgcatgagccacctcccacccgactttgagggccgccagacggtcagccagtggctgcagaccctgagcggcatgtcggcgtcagatgagctggacgactcacaggtgcgtcagatgctgttcgacctggagtcagcctacaacgccttcaaccgcttcctgcatgcctgagcccggggcactagcccttgcacagaagggcagagtctgaggcgatggctcctggtcccctgtccgccacacaggccgtggtcatccacacaactcactgtctgcagctgcctgtctggtgtctgtctttggtgtcagaactttgggggccgggcccctccccacaataaagatgctctccgaccttc

SEQ ID NO: 189945 - protein, 1181 aa, Artificial Sequence
  derived and/or modified sequence
MKLKEVDRTAMQAWSPAQNHPIYLATGTSAQQLDATFSTNASLEIFELDLSDPSLDMKSCATFSSSHRYHKLIWGPYKMDSKGDVSGVLIAGGENGNIILYDPSKIIAGDKEVVIAQNDKHTGPVRALDVNIFQTNLVASGANESEIYIWDLNNFATPMTPGAKTQPPEDISCIAWNRQVQHILASASPSGRATVWDLRKNEPIIKVSDHSNRMHCSGLAWHPDVATQMVLASEDDRLPVIQMWDLRFASSPLRVLENHARGILAIAWSMADPELLLSCGKDAKILCSNPNTGEVLYELPTNTQWCFDIQWCPRNPAVLSAASFDGRISVYSIMGGSTDGLRQKQVDKLSSSFGNLDPFGTGQPLPPLQIPQQTAQHSIVLPLKKPPKWIRRPVGASFSFGGKLVTFENVRMPSHQGAEQQQQQHHVFISQVVTEKEFLSRSDQLQQAVQSQGFINYCQKKIDASQTEFEKNVWSFLKVNFEDDSRGKYLELLGYRKEDLGKKHIKEEKEESEFLPSSGGTFNISVSGDIDGLITQALLTGNFESAVDLCLHDNRMADAIILAIAGGQELLARTQKKYFAKSQSKITRLITAVVMKNWKEIVESCDLKNWREALAAVLTYAKPDEFSALCDLLGTRLENEGDSLLQTQACLCYICAGNVEKLVACWTKAQDGSHPLSLQDLIEKVVILRKAVQLTQAMDTSTVGVLLAAKMSQYANLLAAQGSIAAALAFLPDNTNQPNIMQLRDRLCRAQGEPVAGHESPKIPYEKQQLPKGRPGPVAGHHQMPRVQTQQYYPHGENPPPPGFIMHGNVNPNAAGQLPTSPGHMHTQVPPYPQPQPYQPAQPYPFGTGGSAMYRPQQPVAPPTSNAYPNTPYISSASSYTGQSQLYAAQHQASSPTSSPATSFPPPPSSGASFQHGGPGAPPSSSAYALPPGTTGTLPAASELPASQRTGPQNGWNDPPALNRVPKKKKMPENFMPPVPITSPIMNPLGDPQSQMLQQQPSAPVPLSSQSSFPQPHLPGGQPFHGVQQPLGQTGMPPSFSKPNIEGAPGAPIGNTFQHVQSLPTKKITKKPIPDEHLILKTTFEDLIQRCLSSATDPQTKRKLDDASKRLEFLYDKLREQTLSPTITSGLHNIARSIETRNYSEGLTMHTHIVSTSNFSETSAFMPVLKVVLTQANKLGV

SEQ ID NO: 189946 - DNA, 3546 bp, Artificial Sequence
  derived and/or modified sequence
atgaagctgaaggaggtggacagaaccgccatgcaggcctggagccccgcccagaaccaccccatctacctggccaccggcaccagcgcccagcagctggacgccaccttcagcaccaacgccagcctggagatcttcgagctggacctgagcgaccccagcctggacatgaagagctgcgccaccttcagcagcagccacagataccacaagctgatctggggcccctacaagatggacagcaagggcgacgtgagcggcgtgctgatcgccggcggcgagaacggcaacatcatcctgtacgaccccagcaagatcatcgccggcgacaaggaggtggtgatcgcccagaacgacaagcacaccggccccgtgagagccctggacgtgaacatcttccagaccaacctggtggccagcggcgccaacgagagcgagatctacatctgggacctgaacaacttcgccacccccatgacccccggcgccaagacccagccccccgaggacatcagctgcatcgcctggaacagacaggtgcagcacatcctggccagcgccagccccagcggcagagccaccgtgtgggacctgagaaagaacgagcccatcatcaaggtgagcgaccacagcaacagaatgcactgcagcggcctggcctggcaccccgacgtggccacccagatggtgctggccagcgaggacgacagactgcccgtgatccagatgtgggacctgagattcgccagcagccccctgagagtgctggagaaccacgccagaggcatcctggccatcgcctggagcatggccgaccccgagctgctgctgagctgcggcaaggacgccaagatcctgtgcagcaaccccaacaccggcgaggtgctgtacgagctgcccaccaacacccagtggtgcttcgacatccagtggtgccccagaaaccccgccgtgctgagcgccgccagcttcgacggcagaatcagcgtgtacagcatcatgggcggcagcaccgacggcctgagacagaagcaggtggacaagctgagcagcagcttcggcaacctggaccccttcggcaccggccagcccctgccccccctgcagatcccccagcagaccgcccagcacagcatcgtgctgcccctgaagaagccccccaagtggatcagaagacccgtgggcgccagcttcagcttcggcggcaagctggtgaccttcgagaacgtgagaatgcccagccaccagggcgccgagcagcagcagcagcagcaccacgtgttcatcagccaggtggtgaccgagaaggagttcctgagcagaagcgaccagctgcagcaggccgtgcagagccagggcttcatcaactactgccagaagaagatcgacgccagccagaccgagttcgagaagaacgtgtggagcttcctgaaggtgaacttcgaggacgacagcagaggcaagtacctggagctgctgggctacagaaaggaggacctgggcaagaagcacatcaaggaggagaaggaggagagcgagttcctgcccagcagcggcggcaccttcaacatcagcgtgagcggcgacatcgacggcctgatcacccaggccctgctgaccggcaacttcgagagcgccgtggacctgtgcctgcacgacaacagaatggccgacgccatcatcctggccatcgccggcggccaggagctgctggccagaacccagaagaagtacttcgccaagagccagagcaagatcaccagactgatcaccgccgtggtgatgaagaactggaaggagatcgtggagagctgcgacctgaagaactggagagaggccctggccgccgtgctgacctacgccaagcccgacgagttcagcgccctgtgcgacctgctgggcaccagactggagaacgagggcgacagcctgctgcagacccaggcctgcctgtgctacatctgcgccggcaacgtggagaagctggtggcctgctggaccaaggcccaggacggcagccaccccctgagcctgcaggacctgatcgagaaggtggtgatcctgagaaaggccgtgcagctgacccaggccatggacaccagcaccgtgggcgtgctgctggccgccaagatgagccagtacgccaacctgctggccgcccagggcagcatcgccgccgccctggccttcctgcccgacaacaccaaccagcccaacatcatgcagctgagagacagactgtgcagagcccagggcgagcccgtggccggccacgagagccccaagatcccctacgagaagcagcagctgcccaagggcagacccggccccgtggccggccaccaccagatgcccagagtgcagacccagcagtactacccccacggcgagaacccccccccccccggcttcatcatgcacggcaacgtgaaccccaacgccgccggccagctgcccaccagccccggccacatgcacacccaggtgcccccctacccccagccccagccctaccagcccgcccagccctaccccttcggcaccggcggcagcgccatgtacagaccccagcagcccgtggccccccccaccagcaacgcctaccccaacaccccctacatcagcagcgccagcagctacaccggccagagccagctgtacgccgcccagcaccaggccagcagccccaccagcagccccgccaccagcttcccccccccccccagcagcggcgccagcttccagcacggcggccccggcgccccccccagcagcagcgcctacgccctgccccccggcaccaccggcaccctgcccgccgccagcgagctgcccgccagccagagaaccggcccccagaacggctggaacgacccccccgccctgaacagagtgcccaagaagaagaagatgcccgagaacttcatgccccccgtgcccatcaccagccccatcatgaaccccctgggcgacccccagagccagatgctgcagcagcagcccagcgcccccgtgcccctgagcagccagagcagcttcccccagccccacctgcccggcggccagcccttccacggcgtgcagcagcccctgggccagaccggcatgccccccagcttcagcaagcccaacatcgagggcgcccccggcgcccccatcggcaacaccttccagcacgtgcagagcctgcccaccaagaagatcaccaagaagcccatccccgacgagcacctgatcctgaagaccaccttcgaggacctgatccagagatgcctgagcagcgccaccgacccccagaccaagagaaagctggacgacgccagcaagagactggagttcctgtacgacaagctgagagagcagaccctgagccccaccatcaccagcggcctgcacaacatcgccagaagcatcgagaccagaaactacagcgagggcctgaccatgcacacccacatcgtgagcaccagcaacttcagcgagaccagcgccttcatgcccgtgctgaaggtggtgctgacccaggccaacaagctgggcgtgtag

SEQ ID NO: 189947 - DNA, 3546 bp, Artificial Sequence
  derived and/or modified sequence
atgaagctaaaagaggtagaccgcaccgcaatgcaggcttggtcccccgcccagaaccatccgatctatctggcaactggcacgagcgcacagcaactggatgccacgttttcaaccaatgcctccctggagatcttcgagctggacttaagtgacccttccctggacatgaaatcctgcgccaccttctcctcctcccataggtatcacaaactcatttggggcccttacaagatggattccaagggcgacgttagcggcgtgctcatcgccggcggcgagaacggcaatatcattctgtacgacccttcaaaaataattgcaggagataaagaagtggtcatcgcgcagaatgacaaacatactggtccagtgagagctctcgatgttaatatattccagaccaacctggtcgcaagcggcgccaatgaatcggaaatatacatctgggaccttaacaactttgccacccccatgacccctggcgctaaaactcagccgcccgaagacatctcttgcatcgcctggaacaggcaggtacagcacatcttagcatccgcctctccctccggcagagcgaccgtctgggatttgagaaagaacgaacccatcataaaagtcagcgaccatagtaacagaatgcattgcagcggacttgcctggcaccctgatgtggccacccaaatggtactggcgtcagaagatgatcggctgcctgtcatacagatgtgggatctaagattcgcctcctctccactgcgggtgcttgagaaccacgcccgcggcattctggccattgcttggagtatggcagaccccgagcttctcctgagttgcggaaaggatgctaagatcctttgctcaaaccccaatacgggagaagtgttgtatgaactgcccacaaatacccaatggtgttttgatatacaatggtgcccccgcaacccagctgtgctctctgcagcctcattcgacggcagaatctccgtgtactcaattatgggagggtccaccgacggattacgccagaaacaggtggataaacttagctctagctttggcaacctggacccctttggcacggggcagcccctgcccccgctccagattccacagcaaacagcacaacactccattgtgctgccgctgaaaaagcctcctaagtggattcggcggccagtgggtgcgtctttcagtttcgggggaaagctggttacattcgagaacgtcagaatgcctagccaccagggagctgaacagcagcagcagcagcaccacgtgtttatttcacaggtggtgaccgagaaagaatttttgagcaggtcagaccagctccaacaagcagtgcaatcacagggtttcatcaactactgtcaaaagaagatcgatgcttcccaaacagaattcgaaaagaatgtgtggagcttccttaaagtgaactttgaggacgattcccgggggaagtacttggagctgctcggctaccggaaagaagacctcgggaagaaacacatcaaggaggagaaggaagaatctgagttcctgccctcaagcggaggcactttcaacattagcgttagcggcgacatcgacggattgatcacacaggcactcctcaccggtaacttcgagtccgctgtagacctgtgtctccacgataaccgaatggccgacgctataattctagccattgcgggaggacaagagcttctagccaggacccagaagaagtactttgccaagagtcaatccaagatcaccagattgattaccgcagtcgtgatgaagaactggaaagaaatcgtagagtcttgcgaccttaaaaactggagagaggcgctcgccgcggtcctgacatacgccaagcccgatgaatttagtgccttgtgtgatctcctggggacccggttggaaaacgaaggcgactcgttgctccagactcaggcttgcttgtgctacatctgcgctggcaacgtcgagaagctggtggcttgctggactaaggcgcaagatggatcacacccactgtccctgcaggatcttatcgaaaaggtggtgatcctgaggaaggccgtgcaattgacccaagctatggatacatccactgtcggggtcctgttggcagcgaagatgagccagtacgcgaatctgctggctgcacagggaagcatcgccgcagccctggcctttcttcccgataataccaaccagccaaacatcatgcagctccgggataggctttgtagagctcaaggggaacctgtcgcaggccatgaaagtcccaaaataccttatgaaaaacagcagctgcccaaggggaggccaggtcccgtggcaggccaccatcagatgcctagagtgcagacacagcagtactaccctcatggagagaatccgcccccacctggattcatcatgcacggtaatgtcaatcccaacgcagccggccagctgccaacaagcccgggacacatgcacacccaagtgccaccctacccacagccacagccctaccaaccagcccagccttacccttttggtaccggggggtctgctatgtaccggccccagcagcccgtagcgcccccgacttcaaacgcctacccgaacaccccttatatctcgtctgcgtcttcctacaccggacagagccaactctatgccgcacagcaccaagccagttctcctaccagctcccccgccacaagctttcctccccccccaagttctggcgcttcatttcagcacggcggaccaggcgcccccccgtcctcaagtgcatacgctcttccgcctgggacgaccggcactttaccagctgcttccgagttaccggcgagccaaagaaccgggcctcagaacggctggaatgacccccctgccttaaatagagtgcctaagaaaaagaagatgccggagaactttatgcctcctgtcccgattacaagccccattatgaatccactgggagatccgcaatctcagatgctacagcagcaaccctcagcaccggttcctctgtcgtcacagtcatctttccctcagccgcacctgcccggaggtcagcccttccacggtgtgcagcagcccctgggtcaaacagggatgccacccagttttagcaagcccaacattgaaggcgccccaggcgcccctatcggaaataccttccagcatgttcagtctctgccgacaaaaaagatcacaaaaaaacccatcccagacgagcacctgattctgaaaaccaccttcgaagacttaatacaacgctgtctgtctagcgctacagatccacaaactaagagaaaactggatgatgcttcaaagcggctggaatttttgtacgataaactgagggagcagacccttagtccaaccatcactagcgggcttcataatattgctaggtccatcgagactcgaaattacagcgaaggcctcacaatgcatacacatatcgtatccacctccaattttagcgaaactagcgcttttatgccagtcttgaaggtggtgttgacccaggctaacaaattgggcgtgtag

SEQ ID NO: 189948 - DNA, 3546 bp, Artificial Sequence
  derived and/or modified sequence
atgaaactaaaggaggtggaccggactgccatgcaagcctggagccctgctcagaaccacccaatctatcttgctaccggaacctcagctcaacagttggatgccaccttcagtaccaatgcctccctcgaaatttttgagctcgacctgagcgacccgtctctggacatgaaaagctgtgccaccttcagtagctctcatagataccacaaattgatatggggaccgtataagatggacagtaaaggcgatgtgtcaggtgtgctgattgctggaggagaaaatgggaacattatcctctatgacccttcaaagatcattgcaggtgacaaggaagtcgtcatcgcccagaatgataagcacaccgggccagttcgcgccttggacgtgaacattttccagacgaacttggtggccagtggggctaacgagtcagagatttatatctgggatctgaacaatttcgctactccgatgacccctggcgccaaaacccagccacctgaggacatttcatgtattgcatggaatcgccaggtccaacacattctggccagtgctagtccttcaggaagagcaacagtgtgggacctccggaagaatgagcctatcattaaagtgtccgaccattctaatcggatgcactgttctgggcttgcctggcatccagacgttgccacacagatggttctggcttcagaggatgatcggctcccggttattcagatgtgggacctccgatttgcgtcatcgccccttagggtccttgagaaccatgcacggggtattctggcaatcgcctggtctatggcggaccccgagttattactgagctgcggtaaagatgcgaaaatactctgttctaaccctaacacgggcgaagtgctgtatgagctgccaactaatactcagtggtgtttcgatatacaatggtgccccagaaatcccgccgtgctgtctgccgcttcctttgacggacgaatttcagtgtatagcattatgggtggatctaccgatggcttgcggcagaagcaggtcgacaaattgtccagtagtttcggaaatcttgaccccttcggcactggccagccattgccaccgcttcagatcccccagcaaacagcacaacatagcatcgtgctgccactgaaaaagccgcccaaatggatccgaagaccggttggagcgtcttttagctttggaggcaaattggtgacttttgagaacgtgagaatgccatcccaccagggtgccgagcagcaacaacagcagcatcatgtatttatctcacaggtagtcaccgagaaggagtttttgtctcgatccgatcagctacagcaggccgtgcagtctcaggggtttatcaactattgtcagaagaaaatcgacgccagccagacagagttcgagaagaacgtatggtccttcctcaaagttaatttcgaagacgacagccgcggcaagtacctagaactactcggctatcgtaaagaggatttagggaagaagcacatcaaagaagaaaaggaggagtccgaattcctgccttccagcggcggcacctttaatatcagcgtcagcggtgacattgacggcctgattactcaggctttactgactgggaactttgagtccgcggttgacctgtgcctccacgacaaccggatggccgatgcaatcatactggccatcgctggtgggcaagaactgttggctagaacacagaagaagtacttcgctaaatcacagagtaagatcacccgactcatcaccgcggtggtgatgaagaactggaaagagattgtggaatcatgcgatctgaagaactggagagaagctctggctgcggtgctgacctacgcaaagcccgatgagttcagtgcactttgtgacctcctcggaacaaggttagagaacgaaggtgacagcctgctgcagacccaggcctgcctgtgctatatctgtgcagggaatgtagaaaaactggtcgcttgctggacaaaagcacaggatgggtcccatcctttgagtctgcaggacctgattgagaaggtggtcatcctccggaaggcagtacagctgacccaggccatggacacttctacggtgggcgtgctcctcgccgctaaaatgtcccagtacgcaaacttgctggctgcccagggcagtatagcggcggccttagcattcttgccagacaacaccaaccagccgaatatcatgcagctccgggacagactgtgtcgggcacaaggcgagcctgtcgccgggcatgagagcccaaagattccctatgaaaagcagcagctaccgaagggtcggccaggtcctgtggctgggcatcatcagatgccacgggtccagacccagcaatactatccccatggcgagaacccacccccacctggcttcattatgcatggcaatgtgaacccgaacgctgcaggccagcttccaactagtccgggccacatgcacacacaggttcctccttaccctcaaccccaaccctaccagccagcccagccctatccttttggaaccggggggtcagctatgtatcggcctcagcagcccgtagcacctcccacatctaacgcctatcccaacaccccttacattagcagtgcttcctcatacactgggcagagccagctgtacgctgcgcagcatcaggccagtagtcctacttcctcccctgcgacttcatttcccccgccaccgtcctccggtgcttctttccagcatgggggaccaggcgcgccgccaagctctagtgcctacgccctcccgccagggacaaccggcactttgccagctgctagcgagctgccggcatcccaacggacgggcccccagaatgggtggaacgaccccccagctctcaatcgcgtgccgaaaaagaaaaagatgcccgagaattttatgcccccagtacccattacaagtcccattatgaacccactcggtgacccccaaagccagatgctccagcagcaaccctctgctcccgtgcccttgagctctcagagctccttcccacagcctcacctgcccggaggtcaaccattccacggagtccagcaaccactggggcagaccggaatgccgccatcttttagcaagcccaatattgagggcgcaccaggcgcacccatcgggaatacttttcagcatgttcagtccctgccaactaaaaaaatcactaagaaacctatcccggacgagcatttgatcctgaagacaacatttgaggatctgatccagcggtgtcttagctccgccacagatccacaaacaaaaagaaagttagacgacgctagtaaacgcttagaattcttgtacgacaagctgcgggagcaaaccctatctccaaccatcacctcagggctccacaatatcgcaaggtcgatagagactcgtaactacagtgaagggttaacaatgcatacacacattgtatccacgtccaacttcagcgaaacttcagcttttatgcccgtgctcaaggtcgtccttacacaggccaataaactgggggtgtag

SEQ ID NO: 189949 - DNA, 3546 bp, Artificial Sequence
  derived and/or modified sequence
atgaagctgaaggaggtggacagaacagccatgcaggcctggagccctgcccagaaccaccccatctacctggccaccggcaccagcgcccagcagctggatgccaccttcagcaccaatgccagcctggagatctttgagctggacctgagtgaccccagcctggacatgaagagctgtgccaccttcagcagcagccaccgctaccacaagctgatctggggcccctacaagatggacagcaaaggagatgtgtctggagtgctgattgctggaggagaaaatggaaacatcatcctgtatgaccccagcaagatcatcgccggggacaaggaggtggtgattgcccagaatgacaagcacacaggccctgtgcgggccctggatgtgaacatcttccagaccaacctggtggccagcggggccaatgaaagtgagatctacatctgggacctgaacaactttgccacccccatgacccctggggccaagacccagcccccagaggacatcagctgcatcgcctggaaccggcaggtgcagcacatcctggccagcgccagccccagcggccgggccaccgtgtgggacctgaggaagaatgagcccatcatcaaggtgtctgaccacagcaacaggatgcactgcagcggcctggcctggcacccagatgtggccacccagatggtgctggcctctgaagatgaccggctgcctgtgatccagatgtgggacctgcgctttgccagcagccccctgcgggtgctggagaaccacgcccggggcatcctggccatcgcctggagcatggctgaccctgagctgctgctgagctgtgggaaggatgccaagatcctgtgcagcaaccccaacacaggagaggtgctgtatgagctgcccaccaacacccagtggtgctttgacatccagtggtgccccaggaacccagctgtgctgtctgctgccagctttgatggccgcatctctgtgtacagcatcatgggcggcagcacagatggcctgcggcagaagcaggtggacaagctgagcagcagctttggaaacctggacccctttggaacaggccagcccctgccccccctgcagatcccccagcagacagcccagcacagcatcgtgctgcccctgaagaagccacccaagtggatcagaagacctgtgggcgccagcttctcctttggaggcaagctggtgacctttgaaaatgtgaggatgcccagccaccagggcgctgagcagcagcagcagcagcaccacgtgttcatcagccaggtggtgacagagaaggagttcctgagcagaagtgaccagctgcagcaggccgtgcagagccagggcttcatcaactactgccagaagaagattgatgccagccagacagaatttgagaagaatgtgtggagcttcctgaaggtgaactttgaagatgacagccggggcaagtacctggagctgctgggctacaggaaggaggacctgggcaagaagcacatcaaggaggagaaggaggagagcgagttcctgcccagcagcggcggcaccttcaacatctctgtgtctggggacattgatggcctcatcacccaggccctgctgaccggcaactttgaatctgctgtggacctgtgcctgcatgacaacaggatggctgatgccatcatcctggccatcgccggcggccaggagctgctggcccggacccagaagaagtactttgccaagagccagagcaagatcaccaggctcatcacagctgtggtgatgaagaactggaaggagatcgtggagagctgtgacctgaagaactggagggaggccctggccgctgtgctgacctacgccaagccagatgagttcagcgccctgtgtgacctgctgggcacccggctggagaatgaaggagacagcctgctgcagacccaggcctgcctgtgctacatctgtgctggaaatgtggagaagctggtggcctgctggaccaaggcccaggacggcagccaccccctgagcctgcaggacctgattgagaaggtggtgatcctgaggaaggctgtgcagctgacccaggccatggacaccagcacagtgggcgtgctgctggccgccaagatgagccagtatgccaacctgctggccgcccagggcagcattgctgctgccctggccttcctgcctgacaacaccaaccagcccaacatcatgcagctgcgggaccggctgtgccgggcccagggcgagcctgtggccggccacgagagccccaagatcccctatgagaagcagcagctgcccaagggccggcccggccctgtggccggccaccaccagatgccccgggtgcagacccagcagtactacccccatggagaaaatcctcctcctcctggcttcatcatgcatggaaatgtgaaccccaatgctgctggccagctgcccaccagccctggccacatgcacacccaggtgcccccctacccccagccccagccctaccagcctgcccagccctaccccttcggcaccggcggcagcgccatgtaccggccccagcagcctgtggccccacccaccagcaatgcctaccccaacaccccctacatcagcagcgccagcagctacacaggccagagccagctgtatgctgcccagcaccaggccagcagccccaccagcagccctgccaccagcttccccccaccacccagcagcggggccagcttccagcacggcggccctggggccccacccagcagcagcgcctatgccctgcccccaggcaccaccggcaccctgcctgctgccagcgagctgcctgccagccagaggacaggcccccagaatggctggaatgaccccccagccctgaacagagtgcccaagaagaagaagatgcctgagaacttcatgcctcctgtgcccatcaccagccccatcatgaaccccctgggggacccccagagccagatgctgcagcagcagcccagcgcccctgtgcccctgagcagccagagcagcttcccccagccccacctgcccggcggccagcccttccatggagtgcagcagcccctgggccagacaggcatgcctccttccttcagcaagcccaacattgaaggagcccctggggcccccatcggcaacaccttccagcacgtgcagagcctgcccaccaagaagatcaccaagaagcccatcccagatgagcacctgatcctgaagaccacctttgaagatctcatccagcgctgcctgagcagcgccacagacccccagaccaagaggaagctggatgatgccagcaagaggctggagttcctgtatgacaagctgcgggagcagaccctgagccccaccatcaccagcggcctgcacaacatcgcccggagcattgagaccaggaactacagcgagggcctgaccatgcacacccacatcgtgtccaccagcaacttcagcgagaccagcgccttcatgcctgtgctgaaggtggtgctgacccaggccaacaagctgggcgtgtag

SEQ ID NO: 189950 - DNA, 3546 bp, Artificial Sequence
  derived and/or modified sequence
atgaagctgaaggaggtggaccggaccgccatgcaggcctggagccccgcccagaaccaccctatatacctcgctacaggaaccagcgcacagcagcttgatgctacattcagtaccaatgcctctttggagattttcgaactggacctgagcgacccctcactggacatgaagtcttgcgccacgttctcctcctcccatcgataccacaaactaatttggggcccctacaaaatggattctaagggcgatgtttcaggggtgttaattgcagggggtgagaatggcaacatcattctgtatgatccctctaagataatcgccggggacaaagaagtggtcattgcacagaacgataaacatacaggacccgtgagggccttagatgtcaacatcttccagaccaatttagtggcttcaggggctaacgaatccgagatttatatttgggatcttaacaacttcgcgacccctatgactcccggcgccaagacccagccacccgaagatatctcctgcatagcctggaataggcaagttcagcacatcctcgccagtgctagcccgtctggccgtgccactgtctgggacttacgtaagaacgagccaattattaaagtctctgatcactccaacagaatgcactgctccggcttagcgtggcaccccgacgtggctactcagatggtcttggcctctgaggatgaccgtttacctgttattcaaatgtgggacctgaggttcgcttcttctccattgcgcgtgctggagaaccacgctagagggatcttagccatagcatggtcaatggccgacccagagctcctgttgagctgcggcaaagatgctaagatattgtgttccaatcccaacaccggtgaggttctctatgagctgcccacaaatacacagtggtgttttgacatccagtggtgtcccaggaatcccgctgttctgagcgcggcctcctttgacggccggataagcgtctactccatcatgggcggatccaccgacggtctccgacagaaacaggtcgacaaactttcatcatcattcggcaacctcgatccatttggcactggacagcctctgccccctctgcaaatcccacagcaaaccgcccagcatagcatcgtgcttccactgaaaaaaccacctaaatggatccgaagaccggtcggcgcctccttctcttttggcgggaagctcgtgacctttgaaaatgttcgcatgcctagccaccaaggagccgaacagcagcagcagcaacaccacgtctttatctcccaggttgtaacagaaaaggagttcctgagccgctctgaccagctccaacaggccgttcagtcccagggcttcatcaattattgtcagaagaagattgatgcgagtcagactgagttcgaaaagaacgtatggagtttcttgaaggttaacttcgaggatgatagcagaggtaagtacctcgagcttctcgggtatcgaaaagaggatctcggaaaaaaacatattaaagaggagaaagaggagagcgagtttttgccgtcttccggagggacttttaatatcagtgtttcgggggatattgatggcttaatcacacaggccctcctgactggaaatttcgagagtgcagtggatctgtgcttacatgataaccgtatggcggatgctatcatcctcgcgatagccggaggccaggaactgttagctcggacccagaagaaatacttcgcaaagtcccagtcaaagattacgagactgattaccgcggtggtgatgaagaattggaaagagattgtcgagtcttgcgatcttaaaaactggagggaggccctggccgctgttctaacctatgcgaagcctgatgagttcagcgctctgtgtgatcttcttggtactcgtctggagaatgaaggcgactctcttcttcagacccaagcatgcctgtgctacatttgcgcaggcaatgtggagaaactagtggcctgttggaccaaggcacaggatgggtcccaccccctctccctgcaggatctgattgagaaagtggttatcctgcgaaaagccgttcagctgactcaggccatggacacgtctacggtaggcgtgctgctggctgccaagatgagccagtacgcgaatctgctcgccgcccaggggtcaattgccgccgcactggcattccttccggacaatactaatcagcccaatattatgcaattgagggataggttgtgccgagcacagggcgaacccgtggctggccacgagagtcctaagattccttatgaaaagcagcagctcccaaaaggcaggcccggccctgtggccggacaccatcagatgccacgggtgcaaacccagcagtactaccctcacggagaaaatccgcccccaccagggttcatcatgcatggcaatgtgaatcccaatgctgcagggcagcttccaaccagccccgggcacatgcatacacaggtccccccctacccacaaccccagccctaccagcctgctcagccctatccattcgggacagggggaagtgccatgtacaggcctcagcagccggtggctccaccaactagcaacgcttaccctaacactccttacattagcagtgcaagttcctacaccggtcagtcgcagctgtacgctgcccagcatcaggcttctagtcctaccagttctcctgcaacttccttcccacccccaccgagcagcggcgcctcattccagcatggggggcctggcgctcctcctagtagttcagcatatgctctgccacccggtacgaccggcacactaccagctgcttccgagctccccgcttcccagcgcaccggtccacagaatggatggaacgacccgcccgccctgaatagggtgcccaagaagaaaaaaatgccagagaattttatgcccccagtgccaatcacaagccctatcatgaacccattaggcgatccacagtcacagatgctgcagcagcaacccagtgcacctgtgccactgtctagccagagctcatttccacagcctcatctcccaggtggtcaacccttccatggcgtgcagcagcctctcggccaaacagggatgccgcccagtttcagtaagcctaatatcgaaggagcaccaggagcacccatcggcaacactttccaacacgtccagagtctgcccaccaaaaagatcaccaagaagccaattcctgacgagcacctgatcttgaagacaacatttgaagatctgattcagagatgtctgtcaagcgctacagatccccagacgaagcgaaagcttgatgatgcatcaaaaagactggaatttctgtatgacaagctgcgcgagcaaaccctcagtcctacgatcacttcaggcttacataacatagcacggtcaatagagactcgcaactacagcgaaggcctaaccatgcatactcacattgtcagcaccagcaacttctccgagacatccgcttttatgcctgtacttaaggtggtccttacacaagccaataagctcggagtgtag

SEQ ID NO: 189951 - DNA, 3546 bp, Artificial Sequence
  derived and/or modified sequence
atgaagctgaaggaggtggaccggaccgccatgcaggcctggagcccagcccaaaaccatcctatttacctcgccaccggcaccagcgcacaacaactggatgccacgttttctactaacgccagcctcgagatcttcgagctggacctctcggacccttcactggacatgaaaagctgcgcgaccttctcttcgtcccatcgataccataagctgatttggggcccctacaagatggacagcaaaggagacgtgtccggcgtcctcattgctggcggagaaaacggaaatattatcctttacgacccatcaaagatcatcgctggtgacaaggaggtggtaattgctcagaatgataagcacactggcccagtgagggctcttgatgtgaatatcttccaaacaaacctcgttgcctcaggcgccaatgaaagcgagatatacatctgggatcttaacaatttcgcaactccaatgactccgggagcgaaaactcagcctcccgaggacatatcctgcatagcctggaatagacaggtgcagcacattctggcctctgcttccccttctggccgtgcaaccgtctgggatctccgcaaaaacgagcccataattaaggtgtcggaccattcaaacaggatgcactgttccgggcttgcctggcatcctgatgtcgctacccagatggtcttggccagcgaagatgatagactgccggttattcagatgtgggaccttagattcgcgagcagcccgctgagagtgcttgagaatcatgccagaggcatactggcaatcgcttggagcatggctgatcctgagttattgctgtcttgcgggaaagatgccaagatcctgtgtagcaacccaaacacaggggaggtactatatgagctgcctaccaatactcaatggtgtttcgatatacagtggtgtccacggaatccagcggtattatctgctgcttcctttgacggacggatcagcgtatattctatcatgggagggtccactgacggcttgcggcagaagcaggtggacaagctatcttcttcctttggcaacctggaccccttcgggactggtcagcccttacctcctttgcagattccccagcagacggcccagcacagtatcgtgctgcctctgaagaaacctcccaagtggatccggaggcctgtcggtgccagttttagcttcgggggaaagctcgtaaccttcgagaacgtgcggatgccgtctcatcagggagcggagcagcagcagcagcagcaccacgtgtttattagccaggtggtcacagaaaaagagtttctgagccgctctgatcagctccagcaggcggtgcagagccagggtttcatcaattactgccagaaaaagatcgatgcttcgcagacagaatttgaaaagaatgtttggtcctttctgaaagtgaatttcgaagatgactcccgtggaaagtacctagaattactcggctaccgcaaagaggatcttgggaagaagcatataaaggaggaaaaggaagaatccgagttcctaccgtcgtccgggggcacatttaacatttcagtgagcggggacatcgatgggcttattacccaggctcttctcaccggaaatttcgagtccgcggttgacctgtgtctccatgacaaccgtatggctgatgcaatcatcctggctatcgctggtggccaggagctgctcgctcggactcagaagaagtatttcgcaaaaagccagagcaagattacccgtctcataactgctgtggtgatgaaaaactggaaggagatagtcgagagctgtgatctgaaaaactggcgagaagccttggccgccgtgttgacttatgccaagccagacgagttcagcgccctttgtgacttgttggggaccagactggagaacgagggggatagtcttttacagacccaggcctgcctgtgctatatttgtgccgggaacgtggagaagcttgtggcttgttggactaaagcgcaggacggctctcaccccttgagtctccaggatctgatagagaaagtggtaatcttgagaaaggccgtacagcttacacaggccatggatacatctaccgttggcgtgctgttggcagccaaaatgtcccagtacgcgaatctcctagctgctcagggatccattgccgccgcattggccttccttcctgacaacactaaccagcccaatatcatgcagctgcgggatcgactctgccgcgcacagggcgagccagtcgctgggcacgagtccccaaagataccatacgagaaacagcagctcccaaaagggagaccaggaccagtggccgggcatcatcaaatgccacgggtgcagacccagcagtattacccacacggcgaaaatccccctcccccaggcttcattatgcatggcaacgtcaatcccaatgcagcaggtcagttgcccacatcacctggacatatgcacacgcaggtgcccccttatccccagccgcagccgtatcagccagctcagccttatccatttggtaccggcgggtctgcgatgtatcggccccaacagcctgtggcccctcccacctccaatgcctatccaaatacaccctatatctctagtgcgagttcatacacgggccagtctcagttgtacgctgcgcagcaccaagccagcagccccacatcctctcctgccacctccttccctccaccaccttcaagcggagcgagttttcagcacggaggccctggagcccccccctcttctagcgcatacgccctcccacccgggaccactggtaccttacccgcggctagtgagctaccagcaagtcagcggacggggccacagaacggctggaacgatccacctgctttgaatcgggtgcctaaaaagaagaaaatgcctgagaatttcatgccaccggttccaattaccagccccattatgaatcccttaggtgatccgcagtcacaaatgctgcaacaacagccaagcgcacccgtccccctgtcttcacagagtagcttcccgcagcctcacctccctggcggccagccatttcacggagtccagcagcccctcggtcaaaccggcatgcctccctctttttcaaagccaaatattgagggagcacccggcgctcctatcggaaatactttccaacatgtgcagagtttgccaactaaaaagattactaaaaagcctatcccagacgagcatctcatccttaaaaccaccttcgaggacctgatccaaaggtgtctcagctctgccaccgatccccagactaagaggaaactggacgacgcaagtaagaggctcgagttcctgtatgataagctgcgcgaacaaaccttgtcccccacaatcactagtggccttcacaatatcgccagaagtattgaaacacgtaattattcagaaggcctgaccatgcacacacatatagtttccacatcaaatttctccgagactagcgcctttatgcccgtcctcaaagttgtcctgacgcaggccaacaagcttggcgtatag

SEQ ID NO: 189952 - DNA, 3546 bp, Artificial Sequence
  derived and/or modified sequence
atgaagctgaaggaggttgacaggacagcgatgcaggcctggtcgccggcacaaaaccacccaatctacttggcgaccggaacatccgcccaacagctcgatgctacctttagcaccaatgcctctctggagattttcgaactggatttgtctgatccttcattagacatgaaaagctgcgctaccttctcgtcttctcacagataccacaaacttatttgggggccttataagatggacagtaagggtgacgtttctggtgtgttgatcgcaggaggcgaaaatgggaatattattctttatgatccgtctaaaattattgctggcgacaaggaagtggtgatcgctcagaacgataagcatacgggcccagtgcgcgctttggacgttaatatctttcagactaatctcgttgccagtggagccaacgagagtgaaatttacatttgggacctgaacaattttgctacccccatgacgcccggagccaaaacccaacctccagaagacatttcgtgtattgcctggaacaggcaagtccagcatatactggcctctgcttccccgtccggcagagctaccgtgtgggatctgaggaagaatgaacctataataaaggtctcagaccacagcaaccggatgcactgtagcggtctggcctggcatcccgacgtggccacccagatggtgctggccagcgaggacgacaggctacccgtgatacagatgtgggacttacgcttcgcctcttccccattaagagtgctggagaaccacgcacgcggtatactggctatcgcatggagcatggccgatcccgaactactgctgtcgtgcggcaaagacgcaaaaatcctgtgctctaaccccaacaccggagaagtgctgtatgagttgccgaccaatacacaatggtgcttcgatattcagtggtgtcctagaaatccagcagttctttcggccgcaagcttcgatggacgtatttcagtgtatagcatcatggggggttccaccgatgggctgagacagaaacaggttgacaagctatcctcctccttcggcaatctggatccattcggaaccggccagccactgcctcccttgcagattcctcagcagactgcacagcatagtattgtgctccccctgaaaaaacccccaaaatggatcagaaggcccgtcggggcaagtttctctttcggaggaaagctggtgacgttcgaaaatgttagaatgccctctcatcagggagcagaacagcaacaacagcagcatcacgtttttatatcccaggttgttacagaaaaagagttcctttccaggtcagatcagcttcagcaggctgtgcagagtcaggggttcatcaactactgccagaagaagatcgacgcctcacaaaccgagtttgagaaaaatgtgtggagcttccttaaagtaaattttgaagatgacagtcgagggaaatatctggagcttctaggatatcggaaagaggacctgggcaaaaaacacattaaggaagaaaaggaagagtctgaatttctgccctccagtggaggcacttttaacatttcagtaagcggggacatcgacggtctgatcactcaggctctgctgaccggtaacttcgagagtgctgtcgacttgtgtttgcacgacaaccgaatggctgatgctattattctggccatcgcaggcggacaggagctcctggcccgaacccaaaagaaatactttgcaaaatcccaaagtaaaatcaccagactgataaccgctgttgtgatgaaaaattggaaagaaatcgttgaaagctgcgacctcaagaactggcgagaggcactggctgcggtacttacctatgctaaaccagatgaatttagcgccttatgtgatttgttgggaacccggttagagaacgagggggattccttattgcagacccaagcttgtctttgttatatatgcgccggtaacgtggaaaaactggtagcctgttggacaaaagcacaggatggctctcacccgttgtcactgcaagacttgattgaaaaggtggtgattttgagaaaggcagtccagctgactcaagcgatggacaccagtactgtcggcgttctactggctgccaaaatgagccaatacgccaaccttctggctgcccagggctctattgctgctgcattggcatttctgcccgacaataccaatcagccaaatatcatgcagttaagggaccggctgtgcagggcccaaggtgagccagtggctgggcacgagtcaccaaagataccctatgagaaacagcaactccccaaaggaaggcccggaccagtggctggacaccatcagatgcctcgcgtgcagacacagcaatactatccgcatggggagaatcctcctcccccaggatttatcatgcatggcaatgtgaaccccaatgctgccggtcagctgcccacctctcctggccacatgcacactcaggtgcctccatatcctcagcctcaaccctaccagcctgcacagccataccccttcgggacaggcggaagcgcaatgtacagaccacagcagcctgtggccccaccaacaagcaacgcataccctaatactccttacattagcagtgcctcttcatatacgggacaaagtcagctgtatgctgcacaacaccaggccagttcaccgacaagcagtcccgctactagctttccaccgccacccagttcaggagctagcttccagcatggagggccaggtgccccaccttctagcagcgcatacgcactaccacccggtacgaccggaactctgcccgctgcaagcgagctcccggctagccaacggactggacctcagaacggctggaacgacccacccgctctgaaccgcgtgcccaagaagaagaaaatgccagagaacttcatgccccctgttcctataacaagccctataatgaaccccttgggggatccccagtcccagatgctgcagcagcaaccgtccgctccagtgcctctgtctagccagtccagtttccctcaaccacatctccctgggggacagccctttcatggagtccaacaacccctaggtcagactggcatgccgccatctttctcaaagccaaatattgaaggagcccctggcgctccaattggcaacactttccagcacgtgcagtctctgccaactaagaaaattacaaaaaagccaattcccgacgaacatctgatactcaagactacatttgaggatttgattcagaggtgcctgagcagcgcaaccgacccccaaaccaagaggaagctggacgatgctagcaaacggttggagtttttatacgataaacttagagaacagactctgagtcccacaatcacctcagggttgcacaacattgcacgttctatcgaaacacgtaactacagcgaagggttgacaatgcacacccacatagtcagcacaagtaattttagcgaaaccagtgccttcatgcccgtacttaaggtggtactgacccaagcaaacaagcttggtgtatag

SEQ ID NO: 189953 - DNA, 3546 bp, Artificial Sequence
  derived and/or modified sequence
atgaaactgaaggaggtcgataggaccgccatgcaagcctggagccccgctcaaaaccaccctatttatctggcgacaggcacatccgcccagcagcttgacgcaacattttcgacgaacgcctctctggagatcttcgagctcgatctgtccgatcccagcttagatatgaaaagctgcgcgaccttttcctcgtcccaccgttatcacaaactgatatggggcccttataagatggacagcaaaggagacgtgtcaggagtgcttattgcagggggagaaaatggcaacattattttatacgatccctcaaagataatcgccggagacaaagaagtggtgattgcgcaaaacgacaaacacacgggccctgtgcgggctttagatgtgaatatctttcaaactaacctcgtggccagcggcgctaacgaatccgagatttacatttgggatttgaacaacttcgcgaccccaatgacaccaggggcaaagacgcagcccccagaggacatttcctgcatagcgtggaaccgacaggttcaacacatcctggcctccgcctccccttcagggagggccactgtttgggacctacggaagaatgagcccatcattaaggtctctgatcattctaaccgtatgcattgcagcggactggcctggcaccccgatgtggctacccagatggtcctcgctagcgaggacgacaggctccccgtcatccaaatgtgggacctccgattcgcctcatccccactgagagtgttggaaaatcatgcccgtgggatactggcaatagcctggtccatggcagacccggagctgctgttgtcatgcgggaaagatgccaagatcctgtgtagtaatcccaatacgggggaagttctttatgagctgccaacaaacactcaatggtgcttcgacatacagtggtgccctaggaatcctgccgtgctgagtgccgctagttttgacggacggatctctgtttattccattatggggggttcaacagatggcctccgacaaaagcaggtggacaagctatcctcatcctttggaaatctcgacccatttggaaccggccagcccctgccgccactgcagatccctcagcagaccgcccaacactccattgtgttgccactcaagaagcctccaaagtggattaggaggcccgtgggcgcatccttctcatttgggggaaagttagtgaccttcgaaaacgtccgcatgccctcccatcagggtgctgagcaacagcagcagcaacaccacgtgtttatctcacaggtggtcacagaaaaggaattcttgagtaggagcgatcagttgcaacaagccgtgcagtcccaaggcttcataaattattgtcagaaaaaaatcgatgcatcgcagacagagttcgaaaaaaacgtttggtcctttctgaaagttaactttgaggatgattctagaggaaaatacttagagctgctaggttacaggaaagaagatctagggaaaaaacatatcaaagaggagaaagaggagtccgagttcctgcctagttctggtggtaccttcaacatctccgtttccggggacattgacggcttgatcacacaggcacttctcaccggcaacttcgaatcggcagtagacttatgcttacacgataatcgcatggctgatgccattatcctcgcaatcgccggtggccaggaacttctggctcggactcagaaaaaatattttgccaagagccagtctaaaattacgcgtcttatcacagcggtggtcatgaagaattggaaggagattgtcgagtcatgcgacctgaagaactggagagaagcactggcagcagttcttacatatgccaagcctgatgaattcagtgcactctgtgatctcctcgggacccgcctcgagaacgagggtgactctcttctccagacacaggcctgcctttgctatatctgcgcaggcaacgtggaaaaactggtggcgtgttggaccaaagcccaggacgggtcccatccactctcgctccaagacctcattgagaaggtggtcatcttgagaaaggcagtgcagttaacacaggccatggatacctcgactgtgggtgtgctccttgctgccaaaatgagccagtacgctaacctcctggctgcacaaggttcaattgcagccgctctggccttcttgccagacaacaccaaccagccaaatattatgcaattgcgcgaccggctgtgtagagcccaaggagaacctgtggctggacatgagagccctaagattccttacgaaaagcagcagctcccaaaaggacgtcctgggcctgtggcgggtcaccaccaaatgccaagagtgcagactcagcaatattatccccatggtgaaaatccacctccacctggtttcataatgcacgggaatgtgaatccaaacgccgcaggacagcttcctacctcccccggtcacatgcacacacaggtgcctccctatccccagccacagccttatcagccagcccagccctacccattcgggaccgggggatcagccatgtaccggcctcagcagccggtcgccccacccaccagcaatgcctaccctaatacaccctatatttcaagcgcatcatcctacactggacaatctcagctatatgctgcgcaacaccaggccagcagcccaacctctagcccagcaacctcctttcctcctcctccttcatctggcgcatctttccaacacggcggtcctggcgcacctccctcgagcagtgcctatgcacttccgcctggtaccaccggcacccttccagccgcatctgaactcccggcatctcagcgcactggccctcaaaacggatggaatgatcctccagcgcttaatagggtaccaaaaaagaagaagatgcccgagaattttatgccacctgtgcctatcactagccctatcatgaatcctctgggcgatcctcaatcccagatgctgcagcaacagccttcagctccggtgcctctatctagccagtctagctttccacagccccacttgccaggcggacaaccgttccacggggtgcagcaaccattgggacaaacaggaatgcccccaagcttctcaaagcctaacatagagggggctcctggggcacctattgggaatacttttcaacatgtccaaagcctccccaccaagaaaatcacaaaaaagcctatccctgacgaacatcttattctcaagaccactttcgaggacctgattcaacgctgtctgagcagcgctaccgaccctcagaccaaaaggaagctggacgatgcttctaagcgtttggaattcctgtatgataaactcagagagcaaactctgagcccgaccataacatccggccttcataatatcgctcgctcaatagaaactaggaactatagcgaggggttgacgatgcatacacatatagtgtctacaagcaattttagcgaaacctccgcattcatgcctgtgttgaaagtagtgttgacacaagctaacaaactgggggtgtag

SEQ ID NO: 189954 - DNA, 4119 bp, Artificial Sequence
  derived and/or modified sequence
cggaagtgttgggcgcagggcgtggctgcggctgcggctgccacgttggaacggaacgtggaggtggccctggccggggaggaggggcggcggcgaatgctgggagagtccgacgagcgctgcactaacgcaggatccggctgccgaaggtcctcgccaggatgaagttaaaggaagtagatcgtacagccatgcaggcatggagccctgcccagaatcaccccatttacctagcaacaggaacatctgctcagcaattggatgcaacatttagtacgaatgcttcccttgagatatttgaattagacctctctgatccatccttggatatgaaatcttgtgccacattctcctcttctcacaggtaccacaagttgatttgggggccttataaaatggattccaaaggagatgtctctggagttctgattgcaggtggtgaaaatggaaatattattctctatgatccttctaaaattatagctggagacaaggaagttgtgattgcccagaatgacaagcatactggcccagtgagagccttggatgtgaacattttccagactaatctggtagcttctggtgctaatgaatctgaaatctacatatgggatctaaataattttgcaaccccaatgacaccaggagccaaaacacagccgccagaagatatcagctgcattgcatggaacagacaagttcagcatattttagcatcagccagtcccagtggccgggccactgtatgggatcttagaaaaaatgagccaatcatcaaagtcagtgaccatagtaacagaatgcattgttctgggttggcatggcatcctgatgttgctactcagatggtccttgcctccgaggatgaccggttaccagtgatccagatgtgggatcttcgatttgcttcctctccacttcgtgtcctggaaaaccatgccagggggattttggcaattgcttggagcatggcagatcctgaattgttactgagctgtggaaaagatgctaagattctctgctccaatccaaacacaggagaggtgttatatgaacttcccaccaacacacagtggtgcttcgatattcagtggtgtccccgaaatcctgctgtcttatcagctgcttcgtttgatgggcgtatcagtgtttattctatcatgggaggtagcacagatggtttaagacagaaacaagttgacaagctttcatcatcttttgggaatcttgatccctttggcacaggacagccccttcctccgttacaaattccacagcagactgctcagcatagtatagtgctgcctctgaagaagccgcccaagtggattcgaaggcctgttggtgcttctttttcatttggaggcaaactggttacgtttgagaatgtcagaatgccttctcatcagggagctgagcagcagcagcagcagcaccatgtgttcattagtcaggttgtaacagaaaaggagttcctcagccgatcagaccaacttcagcaggctgtgcagtcacaaggatttatcaattattgccaaaaaaaaattgatgcttctcagactgaatttgagaaaaatgtgtggtcctttttgaaggtaaactttgaggatgattctcgtggaaaataccttgaacttctaggatacagaaaagaagatctaggaaagaagcacattaaagaggaaaaagaagaatctgaatttctaccctcatctggaggaacatttaatatctctgtcagtggggacattgatggtttaattactcaggctttgctgacgggcaattttgagagtgctgttgacctttgtttacatgataaccgcatggccgatgccattatattggccatagcaggtggacaagaactcttggctcgaacccagaaaaaatacttcgcaaaatcccaaagcaaaattaccaggctcatcactgcagtggtgatgaagaactggaaagagattgttgagtcttgtgatcttaaaaattggagagaggctttagctgcagtattgacttatgcaaagccggatgaattttcagccctttgtgatcttttgggaaccaggcttgaaaatgaaggagatagcctcctgcagactcaagcatgtctctgctatatttgtgcagggaatgtagagaaattagttgcatgttggactaaagctcaagatggaagccaccctttgtcacttcaggatctgattgagaaagttgtcatcctgcgaaaagctgtgcaactcactcaagccatggacactagtactgtaggagttctcttggctgcgaagatgagtcagtatgccaatttgttggcagctcagggcagtattgctgcagccttggcttttcttcctgacaacaccaaccagccaaatatcatgcagcttcgtgacagactttgtagagcacaaggagagcctgtagcaggacatgaatcacctaaaattccgtacgagaaacagcagctccccaagggcaggcctggaccagttgctggccaccaccagatgccaagagttcaaactcaacaatattatccccatggagaaaatcctccacctccgggtttcataatgcatggaaatgttaatccaaatgctgctggtcagcttcccacatctccaggtcatatgcacacccaggtaccaccttatccacagccacagccttatcaaccagcccagccgtatcccttcggaacaggggggtcagcaatgtatcgacctcagcagcctgttgctcctcctacttcaaacgcttaccctaacaccccttacatatcttctgcttcttcctatactgggcagtctcagctgtacgcagcacagcaccaggcctcttcacctacctccagccctgctacttctttccctcctcccccttcctctggagcatccttccagcatggcggaccaggagctccaccatcatcttcagcttatgcactgcctcctggaacaacaggtacactgcctgctgccagtgagctgcctgcgtcccaaagaacaggtcctcagaatggttggaatgaccctccagctttgaacagagtacccaaaaagaagaagatgcctgaaaacttcatgcctcctgttcccatcacatcaccaatcatgaacccgttgggtgacccccagtcacaaatgctgcagcaacagccttcagctccagtaccactgtcaagccagtcttcattcccacagccacatcttccaggtggccagcccttccatggcgtacagcaacctcttggtcaaacaggcatgccaccatctttttcaaagcccaatattgaaggtgccccaggggctcctattggaaataccttccagcatgtgcagtctttgccaacaaaaaaaattaccaagaaacctattccagatgagcacctcattctaaagaccacatttgaggatcttattcagcgctgcctttcttcagcaacagaccctcaaaccaagaggaagctagatgatgccagcaaacgtttggagtttctgtatgataaacttagggaacagacactttcaccaacaatcaccagtggtttacacaacattgcaaggagcattgaaactcgaaactactcagaaggattgaccatgcatacccacatagttagcaccagcaacttcagtgagacctctgctttcatgccagttctcaaagttgttctcacccaggccaataagctgggtgtctaaaaggacagcttctcttccactcaatattgccatttttccaaagaaacatgttaaaaaaaaaaattataagacatggactagtcctcattagcatgtttgcatagcaaccagtcaagagcatttacactatttctgctgatatactcaccttagaactgctcagaaccctggtgctttatttttgttttaatcttttgttgccagtgatgattttcctattctgcaaatagtgtatttcctggattacacatagtatggtttcctgaagtattctgataaatgtgttttttaaaacctcaatatactttttagaaaaggagcatctggttatgcataaagcagagctaaaactaaatttctttcatgtcctccctacttcctcagtgtcaatcagattaaagtgtgtaatcct

SEQ ID NO: 189955 - DNA, 4012 bp, Artificial Sequence
  derived and/or modified sequence
gacgagcgctgcactaacgcaggatccggctgccgaaggtcctcgccagcaggatgaagttaaaggaagtagatcgtacagccatgcaggcatggagccctgcccagaatcaccccatttacctagcaacaggaacatctgctcagcaattggatgcaacatttagtacgaatgcttcccttgagatatttgaattagacctctctgatccatccttggatatgaaatcttgtgccacattctcctcttctcacaggtaccacaagttgatttgggggccttataaaatggattccaaaggagatgtctctggagttctgattgcaggtggtgaaaatggaaatattattctctatgatccttctaaaattatagctggagacaaggaagttgtgattgcccagaatgacaagcatactggcccagtgagagccttggatgtgaacattttccagactaatctggtagcttctggtgctaatgaatctgaaatctacatatgggatctaaataattttgcaaccccaatgacaccaggagccaaaacacagccgccagaagatatcagctgcattgcatggaacagacaagttcagcatattttagcatcagccagtcccagtggccgggccactgtatgggatcttagaaaaaatgagccaatcatcaaagtcagtgaccatagtaacagaatgcattgttctgggttggcatggcatcctgatgttgctactcagatggtccttgcctccgaggatgaccggttaccagtgatccagatgtgggatcttcgatttgcttcctctccacttcgtgtcctggaaaaccatgccagggggattttggcaattgcttggagcatggcagatcctgaattgttactgagctgtggaaaagatgctaagattctctgctccaatccaaacacaggagaggtgttatatgaacttcccaccaacacacagtggtgcttcgatattcagtggtgtccccgaaatcctgctgtcttatcagctgcttcgtttgatgggcgtatcagtgtttattctatcatgggaggtagcacagatggtttaagacagaaacaagttgacaagctttcatcatcttttgggaatcttgatccctttggcacaggacagccccttcctccgttacaaattccacagcagactgctcagcatagtatagtgctgcctctgaagaagccgcccaagtggattcgaaggcctgttggtgcttctttttcatttggaggcaaactggttacgtttgagaatgtcagaatgccttctcatcagggagctgagcagcagcagcagcagcaccatgtgttcattagtcaggttgtaacagaaaaggagttcctcagccgatcagaccaacttcagcaggctgtgcagtcacaaggatttatcaattattgccaaaaaaaaattgatgcttctcagactgaatttgagaaaaatgtgtggtcctttttgaaggtaaactttgaggatgattctcgtggaaaataccttgaacttctaggatacagaaaagaagatctaggaaagaagcacattaaagaggaaaaagaagaatctgaatttctaccctcatctggaggaacatttaatatctctgtcagtggggacattgatggtttaattactcaggctttgctgacgggcaattttgagagtgctgttgacctttgtttacatgataaccgcatggccgatgccattatattggccatagcaggtggacaagaactcttggctcgaacccagaaaaaatacttcgcaaaatcccaaagcaaaattaccaggctcatcactgcagtggtgatgaagaactggaaagagattgttgagtcttgtgatcttaaaaattggagagaggctttagctgcagtattgacttatgcaaagccggatgaattttcagccctttgtgatcttttgggaaccaggcttgaaaatgaaggagatagcctcctgcagactcaagcatgtctctgctatatttgtgcagggaatgtagagaaattagttgcatgttggactaaagctcaagatggaagccaccctttgtcacttcaggatctgattgagaaagttgtcatcctgcgaaaagctgtgcaactcactcaagccatggacactagtactgtaggagttctcttggctgcgaagatgagtcagtatgccaatttgttggcagctcagggcagtattgctgcagccttggcttttcttcctgacaacaccaaccagccaaatatcatgcagcttcgtgacagactttgtagagcacaaggagagcctgtagcaggacatgaatcacctaaaattccgtacgagaaacagcagctccccaagggcaggcctggaccagttgctggccaccaccagatgccaagagttcaaactcaacaatattatccccatggagaaaatcctccacctccgggtttcataatgcatggaaatgttaatccaaatgctgctggtcagcttcccacatctccaggtcatatgcacacccaggtaccaccttatccacagccacagccttatcaaccagcccagccgtatcccttcggaacaggggggtcagcaatgtatcgacctcagcagcctgttgctcctcctacttcaaacgcttaccctaacaccccttacatatcttctgcttcttcctatactgggcagtctcagctgtacgcagcacagcaccaggcctcttcacctacctccagccctgctacttctttccctcctcccccttcctctggagcatccttccagcatggcggaccaggagctccaccatcatcttcagcttatgcactgcctcctggaacaacaggtacactgcctgctgccagtgagctgcctgcgtcccaaagaacaggtcctcagaatggttggaatgaccctccagctttgaacagagtacccaaaaagaagaagatgcctgaaaacttcatgcctcctgttcccatcacatcaccaatcatgaacccgttgggtgacccccagtcacaaatgctgcagcaacagccttcagctccagtaccactgtcaagccagtcttcattcccacagccacatcttccaggtggccagcccttccatggcgtacagcaacctcttggtcaaacaggcatgccaccatctttttcaaagcccaatattgaaggtgccccaggggctcctattggaaataccttccagcatgtgcagtctttgccaacaaaaaaaattaccaagaaacctattccagatgagcacctcattctaaagaccacatttgaggatcttattcagcgctgcctttcttcagcaacagaccctcaaaccaagaggaagctagatgatgccagcaaacgtttggagtttctgtatgataaacttagggaacagacactttcaccaacaatcaccagtggtttacacaacattgcaaggagcattgaaactcgaaactactcagaaggattgaccatgcatacccacatagttagcaccagcaacttcagtgagacctctgctttcatgccagttctcaaagttgttctcacccaggccaataagctgggtgtctaaaaggacagcttctcttccactcaatattgccatttttccaaagaaacatgttaaaaaaaaaaattataagacatggactagtcctcattagcatgtttgcatagcaaccagtcaagagcatttacactatttctgctgatatactcaccttagaactgctcagaaccctggtgctttatttttgttttaatcttttgttgccagtgatgattttcctattctgcaaatagtgtatttcctggattacacatagtatggtttcctgaagtattctgataaatgtgttttttaaaacctcaatatactttttagaaaaggagcatctggttatgcataaagcagagctaaaactaaatttctttcatgtcctccctacttcctcagtgtcaatcagattaaagtgtgtaatccta

SEQ ID NO: 189956 - protein, 581 aa, Artificial Sequence
  derived and/or modified sequence
MAVAGAVSGEPLVHWCTQQLRKTFGLDVSEEIIQYVLSIESAEEIREYVTDLLQGNEGKKGQFIEELITKWQKNDQELISDPLQQCFKKDEILDGQKSGDHLKRGRKKGRNRQEVPAFTEPDTTAEVKTPFDLAKAQENSNSVKKKTKFVNLYTREGQDRLAVLLPGRHPCDCLGQKHKLINNCLICGRIVCEQEGSGPCLFCGTLVCTHEEQDILQRDSNKSQKLLKKLMSGVENSGKVDISTKDLLPHQELRIKSGLEKAIKHKDKLLEFDRTSIRRTQVIDDESDYFASDSNQWLSKLERETLQKREEELRELRHASRLSKKVTIDFAGRKILEEENSLAEYHSRLDETIQAIANGTLNQPLTKLDRSSEEPLGVLVNPNMYQSPPQWVDHTGAASQKKAFRSSGFGLEFNSFQHQLRIQDQEFQEGFDGGWCLSVHQPWASLLVRGIKRVEGRSWYTPHRGRLWIAATAKKPSPQEVSELQATYRLLRGKDVEFPNDYPSGCLLGCVDLIDCLSQKQFKEQFPDISQESDSPFVFICKNPQEMVVKFPIKGNPKIWKLDSKIHQGAKKGLMKQNKAV

SEQ ID NO: 189957 - DNA, 2044 bp, Artificial Sequence
  derived and/or modified sequence
ggacgtggggcttttgcagctcagctggttccggctggggaagatggcggtggctggggcggtgtccggggagccgctggtgcactggtgcacccagcagttgcggaagactttcggcctggatgtcagcgaggagatcattcagtacgttttgtcaattgagagtgctgaagagatacgagaatatgttactgatctcctccagggaaatgaaggcaaaaaaggtcaattcatagaagaacttataaccaaatggcaaaagaatgatcaggagttgatttcggatcctttgcagcagtgcttcaaaaaagatgaaattttagatgggcagaaatcaggcgaccatctaaagcggggtaggaagaaagggagaaacagacaggaagttcctgcatttactgaacctgacacgactgcagaggttaaaacaccttttgatttggccaaggcacaagagaacagcaactccgtaaagaagaagacaaagtttgtcaatttatacacaagagagggacaggacaggcttgcagtcctgctccctggtcgtcacccttgtgattgcctgggccagaagcacaagctcatcaataactgtctgatctgtgggcgcattgtctgtgaacaagaaggctcaggcccttgcttattctgtggcactctggtgtgtactcatgaggaacaagatattttacagcgtgactcaaacaagagccagaaactgctaaagaaactcatgtcaggagtggagaattctggaaaggtggacatctctaccaaggaccttcttcctcatcaagaattgcgaattaagtctggtctggagaaggctatcaagcataaagacaaactgttagagtttgacagaactagtattcgaaggacccaagtcattgatgatgagtcagattactttgccagtgattctaaccaatggttgtccaaacttgagcgggaaaccttgcagaagcgagaggaggagctgagagaacttcgacacgcctctcgactttctaagaaggtcaccattgactttgcaggaaggaagatcctggaagaagaaaattcactagcagagtatcatagcagactagatgagacaatacaggccattgccaatggaaccttgaaccagccactgaccaaattggatagatcttctgaagagcctttgggagttctggtaaatcccaacatgtaccagtcccctccccagtgggttgaccacacaggtgcagcctcacagaagaaggctttccgttcttcaggatttggactagagttcaactcatttcagcaccagttgcgaatccaggatcaagaatttcaggaaggctttgatggtggctggtgcctctctgtacatcagccctgggcttctctgcttgtcagagggattaaaagggtggagggcagatcctggtacaccccccacagaggacgactttggatagcagccacagctaaaaaaccctcccctcaagaagtctcagaactccaggctacatatcgtcttcttcgtgggaaagatgtggaatttcctaatgactatccgtcaggttgtcttctgggctgtgtggacctaattgactgcttgtcccagaagcaatttaaggagcagtttccagacatcagtcaagagtctgattctccatttgttttcatctgcaaaaatcctcaggaaatggttgtgaagtttcctattaaaggaaatccaaaaatctggaaattggattccaagatccatcaaggagcaaagaaggggttaatgaagcagaataaagctgtctgacccaggagaaaaggaactatacagcatagtggagttttgtgtactaaaattgctatctactggtcctttggaattgaagtagtagaaacctaaaggcttggcgtcaggcttgaatatctcagaacttaaactcttaccaaaatctgtatatttttcttaaggagtgggattcctactttatgtaatggggtcgaaatctttgaacacattatttataaaaacctgtttaaaaattctaaaaaaaaaaaaaaaaaa

SEQ ID NO: 189958 - DNA, 1746 bp, Artificial Sequence
  derived and/or modified sequence
atggccgtggccggcgccgtgagcggcgagcccctggtgcactggtgcacccagcagctgagaaagaccttcggcctggacgtgagcgaggagatcatccagtacgtgctgagcatcgagagcgccgaggagatcagagagtacgtgaccgacctgctgcagggcaacgagggcaagaagggccagttcatcgaggagctgatcaccaagtggcagaagaacgaccaggagctgatcagcgaccccctgcagcagtgcttcaagaaggacgagatcctggacggccagaagagcggcgaccacctgaagagaggcagaaagaagggcagaaacagacaggaggtgcccgccttcaccgagcccgacaccaccgccgaggtgaagacccccttcgacctggccaaggcccaggagaacagcaacagcgtgaagaagaagaccaagttcgtgaacctgtacaccagagagggccaggacagactggccgtgctgctgcccggcagacacccctgcgactgcctgggccagaagcacaagctgatcaacaactgcctgatctgcggcagaatcgtgtgcgagcaggagggcagcggcccctgcctgttctgcggcaccctggtgtgcacccacgaggagcaggacatcctgcagagagacagcaacaagagccagaagctgctgaagaagctgatgagcggcgtggagaacagcggcaaggtggacatcagcaccaaggacctgctgccccaccaggagctgagaatcaagagcggcctggagaaggccatcaagcacaaggacaagctgctggagttcgacagaaccagcatcagaagaacccaggtgatcgacgacgagagcgactacttcgccagcgacagcaaccagtggctgagcaagctggagagagagaccctgcagaagagagaggaggagctgagagagctgagacacgccagcagactgagcaagaaggtgaccatcgacttcgccggcagaaagatcctggaggaggagaacagcctggccgagtaccacagcagactggacgagaccatccaggccatcgccaacggcaccctgaaccagcccctgaccaagctggacagaagcagcgaggagcccctgggcgtgctggtgaaccccaacatgtaccagagccccccccagtgggtggaccacaccggcgccgccagccagaagaaggccttcagaagcagcggcttcggcctggagttcaacagcttccagcaccagctgagaatccaggaccaggagttccaggagggcttcgacggcggctggtgcctgagcgtgcaccagccctgggccagcctgctggtgagaggcatcaagagagtggagggcagaagctggtacaccccccacagaggcagactgtggatcgccgccaccgccaagaagcccagcccccaggaggtgagcgagctgcaggccacctacagactgctgagaggcaaggacgtggagttccccaacgactaccccagcggctgcctgctgggctgcgtggacctgatcgactgcctgagccagaagcagttcaaggagcagttccccgacatcagccaggagagcgacagccccttcgtgttcatctgcaagaacccccaggagatggtggtgaagttccccatcaagggcaaccccaagatctggaagctggacagcaagatccaccagggcgccaagaagggcctgatgaagcagaacaaggccgtgtag

SEQ ID NO: 189959 - DNA, 1746 bp, Artificial Sequence
  derived and/or modified sequence
atggccgtggccggtgccgtttccggcgagcctttggtacattggtgcacacagcagctccgcaagactttcggcctcgacgtaagcgaggagataatccaatatgtgctgtcaatcgagtcggcagaggaaattagggagtacgtcaccgacctgttgcagggcaatgagggaaagaaaggacagtttattgaggagctcattaccaagtggcagaaaaatgatcaggagttgatttctgaccccctgcagcagtgcttcaagaaagatgagattctggatggccagaaaagtggcgaccacctgaaacgcggccgtaagaagggtagaaacaggcaagaggttccagctttcaccgagccagacaccactgccgaggtcaagacaccattcgatctggctaaagcacaagagaactcaaatagtgtcaaaaagaagactaaatttgtgaacctgtacacgagggaagggcaggacagactggccgttctgctgccaggcaggcacccgtgtgactgtctcggacagaagcataaattgatcaataattgtttgatctgcggaagaattgtttgcgagcaggaagggagcggtccgtgtctgttctgcggcactctggtgtgtacccacgaggagcaagatattttgcaaagagatagcaataagtctcaaaagctgctgaagaaacttatgtctggtgtggagaattctggaaaggttgacatttcgacgaaggaccttttgccacatcaggaactgaggattaagtctggattagaaaaagccatcaagcacaaggacaagcttctggagttcgacagaacttccattcgccgtacacaagtcattgacgatgagtctgactacttcgcctcagactccaaccagtggctgtccaagctggaaagagagactctccaaaagagggaagaggaactaagagaactgcgccacgcatcccggctgagcaagaaggtcacgattgactttgcggggaggaagattcttgaggaagaaaatagcctggccgaataccacagccgtttagatgaaacaatccaggctattgctaatggcacccttaatcagccactcacaaagcttgaccgaagctccgaggaaccactaggtgttctcgtgaaccctaacatgtaccagtctcctccccagtgggtggaccacacaggcgctgcatcacagaaaaaggcgttccgaagctccgggttcgggctagagttcaatagctttcagcatcagcttcggattcaggatcaggaattccaggagggatttgatggcggatggtgtctgagcgtgcaccaaccgtgggccagcttactggtgagggggataaaaagggtggaaggtaggtcttggtacacccctcacagaggacggttgtggatagcggcaaccgcgaaaaagcctagcccccaagaggtgtccgaactccaggccacttatcgattattgcgcggaaaagacgtggaattccccaacgattacccaagtggatgtctgcttggttgtgtggatctaattgattgcttgtcccagaagcagtttaaggaacagttccccgatatctctcaggagtctgatagcccttttgtctttatttgtaaaaaccctcaggagatggttgttaagtttccaatcaagggcaatccaaaaatctggaagctggacagcaaaatccaccaaggcgctaagaaagggctgatgaaacagaataaagcagtgtag

SEQ ID NO: 189960 - DNA, 1746 bp, Artificial Sequence
  derived and/or modified sequence
atggctgtggccggggctgtgtctggagagcccctggtgcactggtgcacccagcagctgaggaagaccttcggcctggatgtgtctgaggagatcatccagtatgtgctgagcattgaatctgctgaggagatccgggagtatgtgacagacctgctgcagggcaatgaaggcaagaagggccagttcatcgaggagctgatcaccaagtggcagaagaatgaccaggagctgatcagtgaccccctgcagcagtgcttcaagaaggatgagatcctggatggccagaagagcggggaccacctgaagaggggcaggaagaagggcaggaaccggcaggaggtgcctgccttcacagagccagacaccacagctgaggtgaagaccccatttgacctggccaaggcccaggagaacagcaacagcgtgaagaagaagaccaagtttgtgaacctgtacacccgggagggccaggaccggctggccgtgctgctgcccggccgccacccctgtgactgcctgggccagaagcacaagctgatcaacaactgcctgatctgtggccgcatcgtgtgtgagcaggagggcagcggcccctgcctcttctgtggcaccctggtgtgcacccatgaggagcaggacatcctgcagagggacagcaacaagagccagaagctgctgaagaagctgatgtctggagtggagaacagcggcaaggtggacatcagcaccaaggacctgctgccccaccaggagctgcgcatcaagagcggcctggagaaggccatcaagcacaaggacaagctgctggagtttgacaggaccagcatccggaggacccaggtgattgatgatgaaagtgactactttgccagtgacagcaaccagtggctgagcaagctggagcgggagaccctgcagaagcgggaggaggagctgcgggagctgcggcatgccagccggctgagcaagaaggtgaccatcgactttgctggcaggaagatcctggaggaggagaacagcctggccgagtaccacagccggctggatgagaccatccaggccatcgccaacggcaccctgaaccagcccctgaccaagctggacaggagcagcgaggagcccctgggcgtgctggtgaaccccaacatgtaccagagccccccccagtgggtggaccacactggagctgccagccagaagaaggccttccgcagcagcggcttcggcctggagttcaacagcttccagcaccagctgcgcatccaggaccaggagttccaggagggctttgatggcggctggtgcctgtctgtgcaccagccctgggccagcctgctggtgcggggcatcaagagggtggagggccgctcctggtacaccccccaccggggccgcctgtggattgctgccacagccaagaagcccagcccccaggaggtgtctgagctgcaggccacctaccgcctgctgcggggcaaggatgtggagttccccaatgactaccccagcggctgcctgctgggctgtgtggacctgattgactgcctgagccagaagcagttcaaggagcagttcccagacatcagccaggagagtgacagcccctttgtgttcatctgcaagaacccccaggagatggtggtgaagttccccatcaagggcaaccccaagatctggaagctggacagcaagatccaccagggcgccaagaagggcctgatgaagcagaacaaggctgtgtag

SEQ ID NO: 189961 - DNA, 1746 bp, Artificial Sequence
  derived and/or modified sequence
atggccgtggccggcgccgtgagcggcgagcccctggtgcactggtgtacacagcagctgcggaagactttcgggctggacgttagtgaggaaattatccagtacgtattgagcattgagtctgcagaagagatccgagagtatgttacagacctgctccaggggaacgagggtaaaaaaggccagttcatcgaggagctgattactaagtggcaaaagaacgatcaggagttgatttcagaccccctccagcagtgcttcaaaaaagatgagatcctcgacggtcaaaagtctggtgatcatctgaagcgaggacggaagaagggccggaaccgccaggaagttccagcctttactgagccggacacgaccgcggaagtgaaaactccattcgatctggcgaaggctcaggaaaattctaactcagtcaagaaaaaaaccaagttcgtgaatctgtacacccgtgaaggacaagatcgacttgctgttctcctcccaggcaggcacccttgcgattgcctgggccagaagcacaaactcatcaacaactgtctcatatgcggtagaatagtgtgcgaacaggaggggagtggaccatgcctcttctgcggaactctcgtctgcacacacgaagagcaggacattcttcagcgggactccaacaagagccagaagttacttaaaaaactcatgtccggggtcgagaatagtggcaaagtggacatcagcacaaaggacttgctgcctcaccaggaactcagaatcaagagcggtctggaaaaggccataaagcacaaggataaactccttgaatttgaccggacatccattagaagaacccaggtcatcgacgatgagtcagattatttcgcctccgactccaaccaatggctcagcaaactcgaaagagaaactctgcaaaagagagaggaagaacttagggagcttcgccatgcctcccgtctttcaaaaaaggtgacaatcgattttgccggccgcaaaattctagaagaggagaattccctggccgagtaccattctcgcctggacgagacgatccaggccatcgctaatggcacactgaatcaaccactgaccaagctggaccggagctctgaggaacccctcggggtgctcgtcaaccccaacatgtatcaaagcccaccacaatgggtggatcacaccggcgctgcaagccaaaagaaagcctttagatctagcgggttcggcctcgaatttaattcttttcagcaccagctcagaattcaagatcaggagttccaagaaggattcgacggcggatggtgcctgtctgtccaccagccttgggccagtctcctcgtgcgcggcataaagcgggtcgagggccgaagctggtacacaccgcaccgcggaagactctggatcgccgcgacagcgaagaagccttccccacaagaggtatcagaattacaggctacttacaggctgttacggggcaaagacgttgaatttccaaatgattacccgagtggatgcctgctgggttgtgttgatctcattgactgcctgtcccaaaagcagttcaaggagcagttccctgacatctctcaggaatcagactctcctttcgtgttcatttgtaaaaacccacaagagatggtggtcaaattccctatcaagggaaacccgaagatatggaaacttgattccaaaattcaccagggtgcaaagaaggggttgatgaagcaaaacaaagccgtatag

SEQ ID NO: 189962 - DNA, 1746 bp, Artificial Sequence
  derived and/or modified sequence
atggccgtggctggcgctgtctccggtgagcctcttgtgcattggtgcacccaacagttgcggaagacgttcgggcttgacgtctctgaggaaatcatccagtacgtgctctcaatagagtctgctgaggagatcagggagtatgtcaccgatctgttgcagggcaatgaaggaaaaaaggggcagttcatcgaggaactcatcaccaagtggcaaaagaacgaccaagagctaataagcgaccctttgcaacagtgttttaagaaggatgagatcctcgacggccagaagtcaggggatcatctgaaacgcggacggaagaagggccgaaaccgacaggaagtccccgctttcacggagcctgacacaaccgcagaagtgaagacgccctttgacctggccaaggcacaggagaacagcaacagcgtaaagaaaaaaactaaatttgttaatctgtacacgagagagggccaggatagactggctgtactgctgcccggacgccacccatgcgattgtctcgggcagaagcacaaactgataaataattgtttgatatgcggtcgcattgtctgcgaacaggagggatccgggccatgtttattttgcggaaccctggtctgcacacatgaagaacaggacattctccagcgggactctaataagtcacaaaagcttcttaagaaactgatgagcggggttgaaaacagcggtaaggtggacatctcgactaaagatctattgccccatcaggaactgaggatcaaaagtggattggaaaaagccataaagcataaggacaaattgttagagtttgataggacttcgatccgccgaacccaggtgatagatgatgagtccgattactttgcatccgatagcaaccagtggttgtcgaagctcgagcgggagacactgcagaaacgtgaggaagaactgagagagctaaggcatgcatctcgactttctaagaaagttactattgactttgccggaagaaagattctggaagaggagaattccctggctgagtatcatagcagactcgacgaaaccatacaggcaattgcgaatggaaccttgaatcagcctcttaccaagctagaccgctcatctgaggaaccacttggtgtgctagtcaaccccaacatgtaccagtctccccctcagtgggtcgaccataccggcgctgcttcccagaaaaaggcgttcagatcttccgggttcgggctcgaatttaatagttttcagcaccagttgaggatacaggatcaggaatttcaagaggggttcgatggcggttggtgtctgtctgtacaccagccatgggcgagtttgctggtgcgtgggatcaagcgagtggaaggccgatcctggtatacccctcacagagggaggctgtggatagcagcgacagccaaaaagccgtcgccccaggaggtgtcagaacttcaggccacataccggcttctgcggggtaaagacgtggagtttcccaacgactacccgagcgggtgtctgttggggtgtgtggacctgatcgactgcctgtcccaaaaacagttcaaggaacagttccccgacatttcacaggaaagtgacagtccgtttgtgttcatttgtaagaatccacaggagatggttgtgaaatttccaatcaaaggtaacccaaaaatctggaagctcgattcaaaaattcatcagggggcaaaaaaggggctcatgaagcagaacaaagccgtgtag

SEQ ID NO: 189963 - DNA, 2045 bp, Artificial Sequence
  derived and/or modified sequence
ggaactagtccggtgcaggacgtggggcttttgcagctcagctggttccggctggggaagatggcggtggctggggcggtgtccggggagccgctggtgcactggtgcacccagcagttgcggaagactttcggcctggatgtcagcgaggagatcattcagtacgttttgtcaattgagagtgctgaagagatacgagaatatgttactgatctcctccagggaaatgaaggcaaaaaaggtcaattcatagaagaacttataaccaaatggcaaaagaatgatcaggagttgatttcggatcctttgcagcagtgcttcaaaaaagatgaaattttagatgggcagaaatcaggcgaccatctaaagcggggtaggaagaaagggagaaacagacaggaagttcctgcatttactgaacctgacacgactgcagaggttaaaacaccttttgatttggccaaggcacaagagaacagcaactccgtaaagaagaagacaaagtttgtcaatttatacacaagagagggacaggacaggcttgcagtcctgctccctggtcgtcacccttgtgattgcctgggccagaagcacaagctcatcaataactgtctgatctgtgggcgcattgtctgtgaacaagaaggctcaggcccttgcttattctgtggcactctggtgtgtactcatgaggaacaagatattttacagcgtgactcaaacaagagccagaaactgctaaagaaactcatgtcaggagtggagaattctggaaaggtggacatctctaccaaggaccttcttcctcatcaagaattgcgaattaagtctggtctggagaaggctatcaagcataaagacaaactgttagagtttgacagaactagtattcgaaggacccaagtcattgatgatgagtcagattactttgccagtgattctaaccaatggttgtccaaacttgagcgggaaaccttgcagaagcgagaggaggagctgagagaacttcgacacgcctctcgactttctaagaaggtcaccattgactttgcaggaaggaagatcctggaagaagaaaattcactagcagagtatcatagcagactagatgagacaatacaggccattgccaatggaaccttgaaccagccactgaccaaattggatagatcttctgaagagcctttgggagttctggtaaatcccaacatgtaccagtcccctccccagtgggttgaccacacaggtgcagcctcacagaagaaggctttccgttcttcaggatttggactagagttcaactcatttcagcaccagttgcgaatccaggatcaagaatttcaggaaggctttgatggtggctggtgcctctctgtacatcagccctgggcttctctgcttgtcagagggattaaaagggtggagggcagatcctggtacaccccccacagaggacgactttggatagcagccacagctaaaaaaccctcccctcaagaagtctcagaactccaggctacatatcgtcttcttcgtgggaaagatgtggaatttcctaatgactatccgtcaggttgtcttctgggctgtgtggacctaattgactgcttgtcccagaagcaatttaaggagcagtttccagacatcagtcaagagtctgattctccatttgttttcatctgcaaaaatcctcaggaaatggttgtgaagtttcctattaaaggaaatccaaaaatctggaaattggattccaagatccatcaaggagcaaagaaggggttaatgaagcagaataaagctgtctgacccaggagaaaaggaactatacagcatagtggagttttgtgtactaaaattgctatctactggtcctttggaattgaagtagtagaaacctaaaggcttggcgtcaggcttgaatatctcagaacttaaactcttaccaaaatctgtatatttttcttaaggagtgggattcctactttatgtaatggggtcgaaatctttgaacacattatttataaaaacctgtttaaaaattctaa

SEQ ID NO: 189964 - protein, 544 aa, Artificial Sequence
  derived and/or modified sequence
MRVAVAGCCHGELDKIYETLALAERRGPGPVDLLLCCGDFQAVRNEADLRCMAVPPKYRHMQTFYRYYSGEKKAPVLTLFIGGNHEASNHLQELPYGGWVAPNIYYLGLAGVVKYRGVRIGGISGIFKSHDYRKGHFECPPYNSSTIRSIYHVRNIEVYKLKQLKQPIDIFLSHDWPRSIYHYGNKKQLLKTKSFFRQEVENNTLGSPAASELLEHLKPTYWFSAHLHVKFAALMQHQAKDKGQTARATKFLALDKCLPHRDFLQILEIEHDPSAPDYLEYDIEWLTILRATDDLINVTGRLWNMPENNGLHARWDYSATEEGMKEVLEKLNHDLKVPCNFSVTAACYDPSKPQTQMQLIHRINPQTTEFCAQLGIIDINVRLQKSKEEHHVCGEYEEQDDVESNDSGEDQSEYNTDTSALSSINPDEIMLDEEEDEDSIVSAHSGMNTPSVEPSDQASEFSASFSDVRILPGSMIVSSDDTVDSTIDREGKPGGTVESGNGEDLTKVPLKRLSDEHEPEQRKKIKRRNQAIYAAVDDDDDDAA

SEQ ID NO: 189965 - protein, 310 aa, Artificial Sequence [sequence omitted]

SEQ ID NO: 189966 - DNA, 1635 bp, Artificial Sequence
  derived and/or modified sequence
atgcgggtggctgtggccggttgctgccacggagaactcgacaaaatttatgagacactcgccctggcggaaaggcgggggccaggacctgtggatctactgctgtgttgcggtgattttcaggccgtacgtaacgaggccgacctccggtgtatggctgttccgcctaagtaccgacacatgcagactttttaccgatattactccggagaaaaaaaggccccagtgctcacccttttcatcggcggtaaccatgaagcgtctaaccatttgcaggagctgccatacgggggttgggttgcacccaatatttactaccttggtcttgcaggtgtagtcaagtaccgcggtgtgcgaatcggaggcatctcaggcatatttaagtcccacgactatagaaagggccacttcgagtgccctccctacaactcctcaactattaggtctatttaccacgttcgtaatattgaagtctataagctgaagcagctgaaacagcccattgacatctttctgtcacacgactggcctaggtcaatatatcactacggaaacaaaaagcagctgctcaaaaccaaaagtttctttcgacaggaagtagagaataataccctcggctcccccgcagcgtctgagctgttggagcacttaaagccgacctattggttcagcgcacatctgcatgttaagttcgcagccctgatgcagcaccaagcaaaagacaaagggcagaccgctagagctaccaaattcttggctctggacaagtgtttgccccatagagactttttgcagattttagaaatcgaacacgaccccagcgctcctgactatcttgaatacgatatagagtggctgaccatcctgcgcgcgactgatgatctgattaatgtaactggcagattatggaatatgccagagaataatggactgcacgctcgctgggattatagtgcgacggaagagggaatgaaagaggtcctcgagaagttgaatcatgaccttaaagtgccttgcaatttctctgtaactgctgcctgttatgacccatcgaaaccacagacgcagatgcagttgatccatagaatcaatcctcagaccacagagttttgtgcccagttagggatcatcgacatcaatgtgcggctccaaaagtctaaagaagagcaccatgtctgtggtgagtacgaggagcaggatgacgtcgagtccaacgattccggcgaggaccagagtgagtacaatactgatacatcagctctcagcagtatcaacccagatgagattatgcttgacgaggaggaggatgaggactccatcgtctccgctcacagtggcatgaatacaccctcggtcgagccatcagatcaggctagcgaattttctgcttcctttagcgatgtgcggatcttacccgggtccatgatagtctcttccgatgacacggtcgacagtaccattgacagggaagggaagcccggcgggacggtcgagtcaggaaacggcgaggacttgacaaaggtaccattaaagcggctgagtgatgaacatgagcccgaacagcgtaagaaaataaaacgacgaaatcaagctatctacgcggcagtggatgacgatgatgatgacgcggcctag

SEQ ID NO: 189967 - DNA, 933 bp, Artificial Sequence
  derived and/or modified sequence
atgcagcaccaggccaaggataaggggcaaactgctcgggccaccaaatttctagcactggataaatgtttacctcaccgcgattttctgcagattctcgagatcgagcatgacccttctgctccagattacctcgaatacgatattgagtggctgaccattctacgggcgacagatgacctgataaacgtgacaggaaggttatggaacatgcctgaaaataatggactgcacgctagatgggattattcagccaccgaggaaggtatgaaggaagtcctggaaaagctcaaccatgaccttaaggtgccatgtaattttagcgtaaccgccgcatgttacgatccctctaagcctcaaacccagatgcagctgatacaccggatcaacccccagacaactgagttttgtgctcaactgggcatcatagacatcaacgtcagattgcaaaagagcaaggaggagcaccacgtgtgtggtgagtatgaggaacaagacgatgtggaatctaatgatagtggcgaagatcagtccgagtataacaccgacacgtcagctttaagctcgatcaatccagacgagattatgctggacgaggaggaggacgaagatagtatcgttagtgctcattcaggcatgaacaccccatcggtggagccctcagaccaagctagcgagttttctgcctcctttagcgacgtgaggatactccccgggtctatgatcgtgagttctgacgacactgtcgatagcacaattgatcgggagggcaagccgggcggcaccgtggaatcgggcaacggggaggatttaactaaggtgccactgaagcgtctgagcgatgagcacgaacccgaacagaggaagaagattaagaggcggaaccaggctatatacgccgctgtcgacgacgacgatgacgacgccgcgtag

SEQ ID NO: 189968 - DNA, 1635 bp, Artificial Sequence
  derived and/or modified sequence
atgagggtggccgtggccggctgctgccacggggagctggacaagatctatgagaccctggccctggccgagcggcggggccctggccctgtggacctgctgctgtgctgcggggacttccaggccgtgagaaatgaagctgacctgcgctgcatggctgtgccccccaagtaccgccacatgcagaccttctaccgctactacagcggggagaagaaggcccctgtgctgaccctcttcatcggcggcaaccacgaggccagcaaccacctgcaggagctgccctacggcggctgggtggcccccaacatctactacctgggcctggccggcgtggtgaagtacagaggagtgcgcatcggcggcatcagcggcatcttcaagagccatgactacaggaagggccactttgagtgccccccctacaacagcagcaccatccgcagcatctaccacgtgaggaacatcgaggtgtacaagctgaagcagctgaagcagcccatcgacatcttcctgagccatgactggcccaggagcatctaccactacggcaacaagaagcagctgctgaagaccaagagcttcttccggcaggaggtggagaacaacaccctgggcagccctgctgccagcgagctgctggagcacctgaagcccacctactggttcagcgcccacctgcacgtgaagtttgctgccctgatgcagcaccaggccaaggacaagggccagacagcccgggccaccaagttcctggccctggacaagtgcctgccccaccgggacttcctgcagatcctggagattgaacatgaccccagcgccccagactacctggagtatgacatcgagtggctgaccatcctgcgggccacagatgacctgatcaacgtgacaggccgcctgtggaacatgccagaaaataatggcctgcacgcccgctgggactacagcgccacagaggagggcatgaaggaggtgctggagaagctgaaccacgacctgaaggtgccctgcaacttctctgtgacagctgcctgctatgaccccagcaagccccagacccagatgcagctgatccaccgcatcaacccccagaccacagagttctgtgcccagctgggcatcatcgacatcaacgtgcggctgcagaagagcaaggaggagcaccacgtgtgtggggagtatgaggagcaggatgatgtggagagcaatgattctggagaggaccagagcgagtacaacacagacaccagcgccctgagcagcatcaacccagatgagatcatgctggatgaggaggaggatgaagattccatcgtgtctgcccacagcggcatgaacaccccatctgtggagcccagcgaccaggccagcgagttcagcgccagcttcagtgatgtgcgcatcctgcccggctccatgattgtgtccagtgatgacacagtggacagcaccatcgaccgggagggcaagccaggcggcaccgtggagagcggaaatggagaggacctgaccaaggtgcccctgaagaggctgagtgatgaacatgagcctgagcagaggaagaagatcaagagaagaaaccaggccatctatgctgctgtggatgatgatgatgatgatgctgcctag

SEQ ID NO: 189969 - DNA, 933 bp, Artificial Sequence
  derived and/or modified sequence
atgcagcaccaggccaaggacaagggccagacagcccgggccaccaagttcctggccctggacaagtgcctgccccaccgggacttcctgcagatcctggagattgaacatgaccccagcgccccagactacctggagtatgacatcgagtggctgaccatcctgcgggccacagatgacctgatcaacgtgacaggccgcctgtggaacatgccagaaaataatggcctgcacgcccgctgggactacagcgccacagaggagggcatgaaggaggtgctggagaagctgaaccacgacctgaaggtgccctgcaacttctctgtgacagctgcctgctatgaccccagcaagccccagacccagatgcagctgatccaccgcatcaacccccagaccacagagttctgtgcccagctgggcatcatcgacatcaacgtgcggctgcagaagagcaaggaggagcaccacgtgtgtggggagtatgaggagcaggatgatgtggagagcaatgattctggagaggaccagagcgagtacaacacagacaccagcgccctgagcagcatcaacccagatgagatcatgctggatgaggaggaggatgaagattccatcgtgtctgcccacagcggcatgaacaccccatctgtggagcccagcgaccaggccagcgagttcagcgccagcttcagtgatgtgcgcatcctgcccggctccatgattgtgtccagtgatgacacagtggacagcaccatcgaccgggagggcaagccaggcggcaccgtggagagcggaaatggagaggacctgaccaaggtgcccctgaagaggctgagtgatgaacatgagcctgagcagaggaagaagatcaagagaagaaaccaggccatctatgctgctgtggatgatgatgatgatgatgctgcctag

SEQ ID NO: 189970 - DNA, 1635 bp, Artificial Sequence
  derived and/or modified sequence
atgcgggtggccgtggccggctgctgccacggcgagctggacaagatttacgaaacactcgctctggccgaacgccgggggccaggaccagtcgatttgcttctgtgttgcggcgacttccaggccgttcgaaacgaggccgacctacgatgcatggctgtcccccctaaataccgacatatgcagacattttataggtactatagcggggagaaaaaggcgcccgtcctcactctgttcattggcggaaatcatgaggcctccaatcacctccaagaattgccctatggcgggtgggttgcacccaacatatactatctgggactggccggagtcgtgaagtacaggggcgtgcgaatcggtgggatatcgggtatctttaagtcccacgactaccgcaagggccacttcgaatgccccccttataatagctccacaataagatcaatctaccacgtgaggaatatcgaagtgtacaagctgaagcagttgaagcagcccatcgatatttttctgtctcacgattggccacgatcgatttatcactacggcaataagaagcagctgcttaagaccaaatcattcttccgtcaggaggtggagaataacacacttggaagtccggctgcctcagaattgctggaacatctgaaacctacatactggttctctgctcatctgcacgtgaagttcgccgctctgatgcagcatcaggcaaaggataaaggtcaaactgccagggccaccaaatttcttgctcttgataaatgtctgccccacagagactttctccagatactagaaatcgagcatgacccgtccgcccccgactaccttgagtatgatatcgagtggctgaccattctgcgagccacagatgatctcattaacgtgaccggaaggctgtggaatatgcccgaaaataacggcttacacgctcgatgggactactctgctacagaggaggggatgaaggaggttttggaaaaattgaatcatgatttaaaggtgccctgtaatttttccgtgaccgcagcgtgctatgatcctagcaagccgcagacccagatgcagcttattcacagaattaatccgcagacgactgagttttgtgctcagctgggaatcattgacatcaacgttagactgcaaaagagcaaagaagaacatcacgtgtgcggcgaatacgaggaacaggacgacgtcgaatccaacgatagtggggaagatcaatccgaatacaatactgatacatccgcgctatcttctattaacccagacgaaatcatgttagacgaggaggaagatgaggactcaatcgtgtcagctcactctggcatgaacacaccgtccgtggagccgtcagaccaggcctccgaattcagcgcgtccttttctgatgttcgtatcctgccaggcagcatgatcgtttcaagtgatgatacggtcgattctaccatcgaccgtgagggaaagccaggcgggactgtagaatccggaaatggagaggatctcacaaaggtgcctttaaaaagactcagtgatgagcatgaacctgagcagcggaagaaaatcaaaagacgcaatcaggcaatctatgccgctgtagacgacgatgatgacgacgctgcctag

SEQ ID NO: 189971 - DNA, 933 bp, Artificial Sequence
  derived and/or modified sequence
atgcagcaccaggccaaggacaagggccagaccgcccgggccaccaagttcctcgcactggataaatgcctgcctcaccgggactttttacagatacttgaaatcgaacatgatccgagcgctcccgactacctggagtatgatatagagtggttgacgatcttgcgtgccacagacgatctgatcaatgtaaccggccggctctggaacatgcccgaaaacaacgggctacacgctcggtgggattactccgcaactgaggagggtatgaaggaggttctggaaaagctaaaccacgacctcaaagtgccttgcaacttttccgtcaccgccgcctgctacgatccatccaagccacaaacccaaatgcagttgatccacaggattaacccccagactaccgagttctgtgcccagctcggcattattgatatcaatgttcgacttcaaaagagtaaagaagagcatcatgtatgcggggagtacgaagagcaagacgacgtggagtctaatgactctggagaggaccaaagcgagtacaatacagacacatctgccctcagcagtattaaccctgatgagattatgctggacgaggaggaagacgaggattccatcgtcagcgcccattctgggatgaacactccttcggtcgagccgagcgatcaggctagcgagttcagtgccagcttctctgatgtgcgaattctacctgggtctatgatagtgtccagtgacgacacggtggattctacaattgatcgagaaggcaaacccggcgggacagtagagtccggaaatggcgaagacttgacaaaagtcccactgaaacgcctgagtgatgaacacgagcctgaacagcgtaagaaaatcaaacggagaaatcaggctatttacgcggctgtggatgatgacgacgacgacgccgcttag

SEQ ID NO: 189972 - DNA, 1635 bp, Artificial Sequence
  derived and/or modified sequence
atgcgcgtcgcggtggcgggatgttgccacggcgagctggataagatatacgagacacttgctctggcagagagaagagggcctgggcctgtcgaccttctcctgtgttgcggcgattttcaggcagtgcgaaacgaagcagacttgagatgtatggccgtgccacccaaatatagacatatgcagacattctatcggtattatagcggcgagaagaaagccccagtcctcaccctgttcattggaggtaaccatgaggccagtaatcacctgcaggaattaccttacgggggatgggtggctcccaatatctattacctggggttggccggagtcgtgaaatatcgaggggtacgcatcggcggaatcagcggtatcttcaaatctcatgactatcgcaaaggccatttcgagtgtccaccctataatagctctaccatccgtagcatttatcatgtgaggaatatcgaagtgtacaagctgaagcaactgaaacagcccatagatatttttctgagccatgactggcctaggagcatatatcattatggaaacaaaaaacagttgctgaagacaaaaagtttcttcaggcaggaggtggagaataatacacttggcagccctgccgcaagcgagcttttagaacatctgaaaccaacctactggttttccgcccatctgcatgtgaaattcgctgctttgatgcagcaccaagctaaggataagggtcagacagctagggcgactaagtttcttgctctggacaagtgcctccctcatagagactttttgcaaattctggagatcgagcacgatcctagcgctcccgactacttagaatacgatattgaatggcttaccatcctccgggctaccgacgatctgattaatgtgactgggagactgtggaatatgcctgagaacaatggcctccatgccagatgggactacagtgcaactgaagaaggcatgaaagaggtcctggagaaattgaatcatgatttgaaagtcccatgcaatttttccgtgacagccgcatgttatgatccaagtaaaccacagacccagatgcagttaattcaccgcataaatccacagaccactgaattctgtgcacaattggggatcattgacattaatgtcagactacagaaaagcaaagaggagcatcatgtgtgcggcgaatatgaggagcaggacgatgttgagtccaatgatagcggggaggatcaatctgagtataacaccgatacatctgccctcagcagcataaatcccgatgagatcatgttggatgaagaagaggacgaagattcgatcgtaagtgcccattctggcatgaatacgccctcagttgaaccctcagaccaggcctctgagttttccgcgtccttctcagacgtgcgaatcctgcctgggtctatgatagtctctagtgatgacacggttgattcaaccattgacagagaaggcaagcctggcggaacagtcgaatcaggtaatggcgaagacctgaccaaagtcccgctgaagcggctttcagatgagcacgaacccgagcagcggaagaagattaaacgaagaaatcaggccatttatgcagcggtggatgatgatgacgacgatgcagcctag

SEQ ID NO: 189973 - DNA, 933 bp, Artificial Sequence
  derived and/or modified sequence
atgcagcaccaggccaaggacaagggacagaccgcacgcgctacaaaattccttgctctggataagtgcctgcctcacagagacttcttacaaatcttagagattgagcacgaccccagtgctcctgactatctcgagtacgacattgaatggttaaccatcctgagagctacagatgaccttatcaatgttaccggtcggctctggaacatgcctgaaaacaacggattgcatgccaggtgggactactctgcaaccgaggaagggatgaaagaagttctcgagaagctcaatcacgacctcaaggttccctgcaacttctctgttactgcagcgtgctacgatcctagcaagccccagacacagatgcaattgatccataggatcaatccacaaactacggagttctgcgcacagctgggaataatcgatatcaacgtccggttgcagaaatctaaggaggaacaccatgtgtgtggcgagtatgaagagcaagacgatgtcgagagcaacgacagcggggaagaccagtcggaatataacacagacaccagcgccctgtctagcatcaacccagacgaaatcatgctcgatgaggaagaggacgaagacagcatagtgtcagctcactcaggaatgaacacaccgagcgtggaaccatccgaccaggcctccgaattctctgcgagctttagtgatgtcaggatactccctggctctatgattgttagttccgatgataccgttgattcaaccattgaccgcgaaggcaaacccggaggcacggtcgagtcaggtaacggcgaggatctcacaaaagtacctttgaagcgcctgagtgacgagcacgagccagagcagaggaaaaagatcaagcgacgcaatcaggccatttacgccgctgttgatgacgatgatgacgacgccgcttag

SEQ ID NO: 189974 - DNA, 2666 bp, Artificial Sequence
  derived and/or modified sequence
gatctggaaaccggaagtgaattattttgcaggagtctacacccaggcggtggctatacttattaaagttggcgggagctgagcgatcagtcggtcctgggctggctgtggtgtagggcgttgcaggcagcgctcacctcctcaggccggcagaatgcgggtggctgtggctggctgctgccacggcgagctggataagatctatgagacgctggcgctggcagagcggcgcggcccggggcctgtcgacctcttgctgtgctgcggcgacttccaggcggtgcgcaacgaggcggatctacgctgcatggccgtgccgcccaagtatcgtcacatgcaaaccttctacaggtattactctggagagaaaaaggctccagttctcacgctcttcattgggggaaaccatgaagcctcaaatcatttgcaagagttaccctatggtggctgggtggcaccaaacatttattatttaggtttggctggtgtggtaaaataccgaggtgtaaggatcggtggaatctctggtatctttaaatctcatgactatcgaaaaggtcattttgagtgccccccttataattcatctacaatcaggagtatatatcatgtgagaaatattgaagtctataaattaaaacagctgaagcagcctatagatatattcttgtctcatgattggccaagaagtatatatcattatggaaataagaagcaacttcttaagactaaatcttttttccgacaagaagtggaaaataacacattaggaagtccagctgcctcagagcttttagagcatctcaaacctacttattggttttctgcccaccttcatgtgaagtttgccgccttgatgcagcatcaggcaaaggataaaggacagacagccagagcaaccaaatttttagccttggacaaatgcttaccacatagagattttcttcagatattagagatagaacatgaccccagtgctcctgattacttggaatatgatattgaatggctcactattctcagggctacggatgatcttattaatgtgactgggcgcctgtggaatatgccagaaaataatggcctgcatgcaaggtgggattatagtgcaacagaagaaggtatgaaagaagtattggaaaaattgaatcatgatctcaaggttccatgtaactttagtgtaacagctgcttgttatgatcctagcaagccacagacacaaatgcagctgattcataggatcaatcctcagacaactgaattttgtgcccaacttggcatcatagacatcaatgttaggcttcagaagtccaaggaagaacatcatgtgtgtggtgaatatgaagaacaggatgatgtggagagtaatgactctggagaagaccagagtgaatataatacagacacatctgctctgtcttctattaatccagatgaaataatgttagatgaagaagaagatgaagatagtattgtaagtgcacatagtggcatgaatacaccatcggtagaaccttctgatcaagcttctgagttttctgcaagtttctctgatgtcaggatcttgccaggctctatgattgtatcttctgatgatacggtggattccacaattgatagagaggggaaacctggtgggactgtggagtcagggaatggagaggacttaaccaaggtgccattgaagaggctgagtgatgaacatgaacctgaacaaagaaagaaaattaagaggaggaatcaagccatttacgctgcagtggatgatgatgatgacgatgcagcttaagatgatttacttgttttgtttttgtgtttgttttgtttttttgagatggagtttcactcttgtcacctagactggagtgcaatggcgtgatctcggctcaccgcaacctccgcctcccaggttcaagcaattctcctgcctcagcctcccaagtaggtgggactacaggtgcccgccaccacacccggctaatttttgcatttttagtaatgacagggtttcaccgtgttggccaggctggtctccaactcctgacctcaggcgatccacctgtcttggccttctaaagtgctgggattacaggcgtgagccactgtgcctggccgacaatttacttgtcttagtattatatgtagatatgtgattttttgagactgtatttttagagctgaatttttgactaaagacttaactttataataatgaagatacattagagaattttagttagatattgactttatctttaggcttttgtatgtttcagatgcaaacatattaaagtttcatatatttacttgactgggtatctttttttttgaagacatacattattcacttccatttttacaataaacacttacttaacatctactctgtgccaagcactctgctataatatgggaccataaagatgagtaagacaaggatttttgcctccaaggacttgttatcactgtaaacattttgatgtatacaatatggctatattatattttgttttataaaatcaagtcattgtatatattatgatgtatgctttcttttcatttattataaatatttttcctgatcagcttttaatatctgtcaaataaaaattgaaattgaagatggtatataagatttcaggaaataaactactctgaatactaaa

SEQ ID NO: 189975 - DNA, 2189 bp, Artificial Sequence
  derived and/or modified sequence
aaagttggcgggagctgagcgatcagtcggtcctgggctggctgtggtgtagggcgttgcaggcagcgctcacctcctcaggccggcagaatgcgggtggctgtggctggctgctgccacggcgagctggataagatctatgagacgctggcgctggcagagcggtgcgcaacgaggcggatctacgctgcatggccgtgccgcccaagtatcgtcacatgcaaaccttctacaggtattactctggagagaaaaaggctccagttctcacgctcttcattgggggaaaccatgaagcctcaaatcatttgcaagagttaccctatggtggctgggtggcaccaaacatttattatttaggtttggctggtgtggtaaaataccgaggtgtaaggatcggtggaatctctggtatctttaaatctcatgactatcgaaaaggtcattttgagtgccccccttataattcatctacaatcaggagtatatatcatgtgagaaatattgaagtctataaattaaaacagctgaagcagcctatagatatattcttgtctcatgattggccaagaagtatatatcattatggaaataagaagcaacttcttaagactaaatcttttttccgacaagaagtggaaaataacacattaggaagtccagctgcctcagagcttttagagcatctcaaacctacttattggttttctgcccaccttcatgtgaagtttgccgccttgatgcagcatcaggcaaaggataaaggacagacagccagagcaaccaaatttttagccttggacaaatgcttaccacatagagattttcttcagatattagagatagaacatgaccccagtgctcctgattacttggaatatgatattgaatggctcactattctcagggctacggatgatcttattaatgtgactgggcgcctgtggaatatgccagaaaataatggcctgcatgcaaggtgggattatagtgcaacagaagaaggtatgaaagaagtattggaaaaattgaatcatgatctcaaggttccatgtaactttagtgtaacagctgcttgttatgatcctagcaagccacagacacaaatgcagctgattcataggatcaatcctcagacaactgaattttgtgcccaacttggcatcatagacatcaatgttaggcttcagaagtccaaggaagaacatcatgtgtgtggtgaatatgaagaacaggatgatgtggagagtaatgactctggagaagaccagagtgaatataatacagacacatctgctctgtcttctattaatccagatgaaataatgttagatgaagaagaagatgaagatagtattgtaagtgcacatagtggcatgaatacaccatcggtagaaccttctgatcaagcttctgagttttctgcaagtttctctgatgtcaggatcttgccaggctctatgattgtatcttctgatgatacggtggattccacaattgatagagaggggaaacctggtgggactgtggagtcagggaatggagaggacttaaccaaggtgccattgaagaggctgagtgatgaacatgaacctgaacaaagaaagaaaattaagaggaggaatcaagccatttacgctgcagtggatgatgatgatgacgatgcagcttaagatgatttacttgttttgtttttgtgtttgttttgtttttttgagatggagtttcactcttgtcacctagactggagtgcaatggcgtgatctcggctcaccgcaacctccgcctcccaggttcaagcaattctcctgcctcagcctcccaagtaggtgggactacaggtgcccgccaccacacccggctaatttttgcatttttagtaatgacagggtttcaccgtgttggccaggctggtctccaactcctgacctcaggcgatccacctgtcttggccttctaaagtgctgggattacaggcgtgagccactgtgcctggccgacaatttacttgtcttagtattatatgtagatatgtgattttttgagactgtatttttagagctgaatttttgactaaagacttaactttataataatgaagatacattagagaattttagttagatattgactttatctttaggcttttgtatgtttcagatgcaaacatattaaagtttcatatattt

SEQ ID NO: 189976 - DNA, 1635 bp, Artificial Sequence
  derived and/or modified sequence
atgagagtggccgtggccggctgctgccacggcgagctggacaagatctacgagaccctggccctggccgagagaagaggccccggccccgtggacctgctgctgtgctgcggcgacttccaggccgtgagaaacgaggccgacctgagatgcatggccgtgccccccaagtacagacacatgcagaccttctacagatactacagcggcgagaagaaggcccccgtgctgaccctgttcatcggcggcaaccacgaggccagcaaccacctgcaggagctgccctacggcggctgggtggcccccaacatctactacctgggcctggccggcgtggtgaagtacagaggcgtgagaatcggcggcatcagcggcatcttcaagagccacgactacagaaagggccacttcgagtgccccccctacaacagcagcaccatcagaagcatctaccacgtgagaaacatcgaggtgtacaagctgaagcagctgaagcagcccatcgacatcttcctgagccacgactggcccagaagcatctaccactacggcaacaagaagcagctgctgaagaccaagagcttcttcagacaggaggtggagaacaacaccctgggcagccccgccgccagcgagctgctggagcacctgaagcccacctactggttcagcgcccacctgcacgtgaagttcgccgccctgatgcagcaccaggccaaggacaagggccagaccgccagagccaccaagttcctggccctggacaagtgcctgccccacagagacttcctgcagatcctggagatcgagcacgaccccagcgcccccgactacctggagtacgacatcgagtggctgaccatcctgagagccaccgacgacctgatcaacgtgaccggcagactgtggaacatgcccgagaacaacggcctgcacgccagatgggactacagcgccaccgaggagggcatgaaggaggtgctggagaagctgaaccacgacctgaaggtgccctgcaacttcagcgtgaccgccgcctgctacgaccccagcaagccccagacccagatgcagctgatccacagaatcaacccccagaccaccgagttctgcgcccagctgggcatcatcgacatcaacgtgagactgcagaagagcaaggaggagcaccacgtgtgcggcgagtacgaggagcaggacgacgtggagagcaacgacagcggcgaggaccagagcgagtacaacaccgacaccagcgccctgagcagcatcaaccccgacgagatcatgctggacgaggaggaggacgaggacagcatcgtgagcgcccacagcggcatgaacacccccagcgtggagcccagcgaccaggccagcgagttcagcgccagcttcagcgacgtgagaatcctgcccggcagcatgatcgtgagcagcgacgacaccgtggacagcaccatcgacagagagggcaagcccggcggcaccgtggagagcggcaacggcgaggacctgaccaaggtgcccctgaagagactgagcgacgagcacgagcccgagcagagaaagaagatcaagagaagaaaccaggccatctacgccgccgtggacgacgacgacgacgacgccgcctag

SEQ ID NO: 189977 - DNA, 933 bp, Artificial Sequence
  derived and/or modified sequence
atgcagcaccaggccaaggacaagggccagaccgccagagccaccaagttcctggccctggacaagtgcctgccccacagagacttcctgcagatcctggagatcgagcacgaccccagcgcccccgactacctggagtacgacatcgagtggctgaccatcctgagagccaccgacgacctgatcaacgtgaccggcagactgtggaacatgcccgagaacaacggcctgcacgccagatgggactacagcgccaccgaggagggcatgaaggaggtgctggagaagctgaaccacgacctgaaggtgccctgcaacttcagcgtgaccgccgcctgctacgaccccagcaagccccagacccagatgcagctgatccacagaatcaacccccagaccaccgagttctgcgcccagctgggcatcatcgacatcaacgtgagactgcagaagagcaaggaggagcaccacgtgtgcggcgagtacgaggagcaggacgacgtggagagcaacgacagcggcgaggaccagagcgagtacaacaccgacaccagcgccctgagcagcatcaaccccgacgagatcatgctggacgaggaggaggacgaggacagcatcgtgagcgcccacagcggcatgaacacccccagcgtggagcccagcgaccaggccagcgagttcagcgccagcttcagcgacgtgagaatcctgcccggcagcatgatcgtgagcagcgacgacaccgtggacagcaccatcgacagagagggcaagcccggcggcaccgtggagagcggcaacggcgaggacctgaccaaggtgcccctgaagagactgagcgacgagcacgagcccgagcagagaaagaagatcaagagaagaaaccaggccatctacgccgccgtggacgacgacgacgacgacgccgcctag

SEQ ID NO: 189978 - protein, 543 aa, Artificial Sequence
  derived and/or modified sequence
MPNPKNSKGGRKNKRANSSGDEQENGAGALAAAGAAGAAAGGALAAAAGCGAAAAGAPGAGGAAGAGGAGTGAANAAAAAGAAAAGDAKNEAPCATPLICSFGRPVDLEKDDYQKVVCNNEHCPCSTWMHLQCFYEWESSILVQFNCIGRARSWNEKQCRQNMWTKKGYDLAFRFCSCRCGQGHLKKDTDWYQVKRMQDEKKKKSGSEKNTGRPPGEAAEEAKKCRPPNKPQKGPSHDLPRRHSMDRQNSQEKAVGAAAYGARSPGGSPGQSPPTGYSILSPAHFSGPRSSRYLGEFLKNAIHLEPHKKAMAGGHVFRNAHFDYSPAGLAVHRGGHFDTPVQFLRRLDLSELLTHIPRHKLNTFHVRMEDDAQVGQGEDLRKFILAALSASHRNVVNCALCHRALPVFEQFPLVDGTLFLSPSRHDEIEYDVPCHLQGRLMHLYAVCVDCLEGVHKIICIKCKSRWDGSWHQLGTMYTYDILAASPCCQARLNCKHCGKPVIDVRIGMQYFSEYSNVQQCPHCGNLDYHFVKPFSSFKVLEAY

SEQ ID NO: 189979 - DNA, 1632 bp, Artificial Sequence
  derived and/or modified sequence
atgcccaaccccaagaacagcaagggcggcagaaagaacaagagagccaacagcagcggcgacgagcaggagaacggcgccggcgccctggccgccgccggcgccgccggcgccgccgccggcggcgccctggccgccgccgccggctgcggcgccgccgccgccggcgcccccggcgccggcggcgccgccggcgccggcggcgccggcaccggcgccgccaacgccgccgccgccgccggcgccgccgccgccggcgacgccaagaacgaggccccctgcgccacccccctgatctgcagcttcggcagacccgtggacctggagaaggacgactaccagaaggtggtgtgcaacaacgagcactgcccctgcagcacctggatgcacctgcagtgcttctacgagtgggagagcagcatcctggtgcagttcaactgcatcggcagagccagaagctggaacgagaagcagtgcagacagaacatgtggaccaagaagggctacgacctggccttcagattctgcagctgcagatgcggccagggccacctgaagaaggacaccgactggtaccaggtgaagagaatgcaggacgagaagaagaagaagagcggcagcgagaagaacaccggcagaccccccggcgaggccgccgaggaggccaagaagtgcagaccccccaacaagccccagaagggccccagccacgacctgcccagaagacacagcatggacagacagaacagccaggagaaggccgtgggcgccgccgcctacggcgccagaagccccggcggcagccccggccagagcccccccaccggctacagcatcctgagccccgcccacttcagcggccccagaagcagcagatacctgggcgagttcctgaagaacgccatccacctggagccccacaagaaggccatggccggcggccacgtgttcagaaacgcccacttcgactacagccccgccggcctggccgtgcacagaggcggccacttcgacacccccgtgcagttcctgagaagactggacctgagcgagctgctgacccacatccccagacacaagctgaacaccttccacgtgagaatggaggacgacgcccaggtgggccagggcgaggacctgagaaagttcatcctggccgccctgagcgccagccacagaaacgtggtgaactgcgccctgtgccacagagccctgcccgtgttcgagcagttccccctggtggacggcaccctgttcctgagccccagcagacacgacgagatcgagtacgacgtgccctgccacctgcagggcagactgatgcacctgtacgccgtgtgcgtggactgcctggagggcgtgcacaagatcatctgcatcaagtgcaagagcagatgggacggcagctggcaccagctgggcaccatgtacacctacgacatcctggccgccagcccctgctgccaggccagactgaactgcaagcactgcggcaagcccgtgatcgacgtgagaatcggcatgcagtacttcagcgagtacagcaacgtgcagcagtgcccccactgcggcaacctggactaccacttcgtgaagcccttcagcagcttcaaggtgctggaggcctactag

SEQ ID NO: 189980 - DNA, 1632 bp, Artificial Sequence
  derived and/or modified sequence
atgccgaaccccaagaactcaaaggggggcagaaagaacaaaagagcgaattcgtctggggatgaacaggaaaacggagcgggggcactggctgctgcaggagctgccggcgctgctgcgggtggtgcattagctgccgcagcaggttgtggcgccgccgcggcgggtgcacctggcgcaggcggcgccgccggtgccgggggagccggaacgggggccgcgaacgccgctgcagctgctggcgccgccgcggccggcgatgccaagaatgaggccccctgtgccacgcctctgatatgttccttcggcaggcccgtcgacttagagaaagacgactaccagaaggtggtctgcaataacgaacattgcccatgctcaacgtggatgcatttgcagtgcttttacgaatgggagtcatccatattggtccaatttaactgtatcggccgcgcgcggtcatggaatgaaaaacaatgtcgacagaacatgtggaccaagaaaggttatgacctggcattcagattctgctcatgtcggtgcggacaaggtcacttaaaaaaggataccgactggtatcaggtaaagagaatgcaggacgaaaagaagaaaaaatccggcagtgagaagaacaccgggcgacccccaggcgaggccgcagaggaggcaaagaaatgccggcctcccaacaaacctcagaaaggcccatcccatgacctgccgagacgtcactctatggacaggcagaactcgcaggagaaggccgtgggcgctgccgcttacggggcacggagccctggtgggtcccctggccaatcccctccaacggggtattctatactgtctcctgcacacttttccggacctcggagttcaagatacctaggagaatttctcaaaaacgctattcacctggaaccccataagaaagccatggccggaggccatgtgttccgcaacgcacacttcgactactccccagcaggcttagctgtgcataggggtggtcatttcgatactccagttcaattccttcggcgcctggatttgagtgaactcctgacacatatccctcgtcataaactgaataccttccacgtgcgaatggaggacgacgcacaggttggtcagggcgaggatttgcggaaatttattttggccgccctttctgcctcccacagaaatgtagtgaattgcgctctctgtcatcgcgccctgccggtgttcgagcaattcccactagtcgacggcactctctttcttagcccaagccgacatgatgagatcgaatacgatgtgccctgtcacctacagggaagactgatgcacctctatgctgtgtgtgtggattgcctagagggagtgcataaaattatctgtattaaatgtaaaagtaggtgggacgggtcatggcatcaattaggcaccatgtatacttatgatatcctggccgccagcccgtgttgtcaggccagactcaattgcaaacactgcggcaaaccggtgattgatgttcgtatcggcatgcagtacttcagtgagtattccaatgtgcagcaatgcccgcactgtggcaacctcgactaccattttgtcaaaccattttcctcatttaaagtgttggaagcctactag

SEQ ID NO: 189981 - DNA, 1632 bp, Artificial Sequence
  derived and/or modified sequence
atgcccaaccccaagaacagcaagggcggcaggaagaacaagagggccaacagcagtggagatgagcaggagaatggagctggggccctggccgctgctggagctgctggagctgctgctgggggcgccctggccgctgctgctggctgtggggctgctgctgctggggcccctggggccggcggggccgccggggccggcggggccggcactggagctgccaatgctgctgctgctgctggagctgctgctgctggagatgccaagaatgaggccccctgtgccacccccctcatctgcagctttggccggcctgtggacctggagaaggatgactaccagaaggtggtgtgcaacaatgagcactgcccctgcagcacctggatgcacctgcagtgcttctatgagtgggagagcagcatcctggtgcagttcaactgcatcggccgggcccgctcctggaatgagaagcagtgccggcagaacatgtggaccaagaagggctatgacctggccttccgcttctgcagctgccgctgtggccagggccacctgaagaaggacacagactggtaccaggtgaagaggatgcaggatgagaagaagaagaagagcggcagcgagaagaacacaggccggcccccaggagaggccgctgaggaggccaagaagtgcaggcctcccaacaagccccagaagggccccagccatgacctgcccaggaggcacagcatggaccggcagaacagccaggagaaggctgtgggcgccgccgcctacggggcccggagccctgggggcagccctggccagagccccccaacaggctacagcatcctgagccctgcccacttcagcggccccaggagcagccgctacctgggggagttcctgaagaatgccatccacctggagccccacaagaaggccatggccggcggccacgtgttcagaaatgcccactttgactacagccctgctggcctggccgtgcaccggggcggccactttgacacccctgtgcagttcctgcggcggctggacctgtctgagctgctgacccacatccccaggcacaagctgaacaccttccacgtgaggatggaggatgatgcccaggtgggccagggcgaggacctgaggaagttcatcctggccgccctgagcgccagccacagaaatgtggtgaactgtgccctgtgccaccgggccctgcctgtgtttgagcagttccccctggtggatggcaccctcttcctgagccccagcagacatgatgaaattgaatatgatgtgccctgccacctgcagggccgcctgatgcacctgtatgctgtgtgtgtggactgcctggagggcgtgcacaagatcatctgcatcaagtgcaagagccgctgggatggctcctggcaccagctgggcaccatgtacacctatgacatcctggccgccagcccctgctgccaggcccggctgaactgcaagcactgcggcaagcctgtgattgatgtgcgcatcggcatgcagtacttcagcgagtacagcaatgtgcagcagtgcccccactgcggcaacctggactaccactttgtgaagcccttcagcagcttcaaggtgctggaggcctactag

SEQ ID NO: 189982 - DNA, 5614 bp, Artificial Sequence
  derived and/or modified sequence
gccttttccctccggctcgggagcgtctcgcttgcgccccgggcccgcggcgcccgcgcggctgcgagcctcgggtggccgcgtgccggctccaggaagccggagagggcgcggcggccaggatggcgcggcacgggccgtgcggctagacgggagccgagggaaccgccggctcgcgccctccgttctttcccggagccggcttcacgcagggccgggaacggccgtgcctctgggatccgccttcgctgacgccgggcacctacctggacgcgagcgagcgagatgcccaaccccaaaaacagcaaaggcggccgcaaaaacaagcgcgccaacagcagcggcgacgagcaggaaaatggagccggggccctggcagcggcgggcgcggcgggagcggcggccgggggggccctggcggcggcggccggttgcggggcggcggcggcgggcgcgccgggcgccggaggcgcggcgggcgccggaggcgcggggactggcgccgcgaacgctgcggccgccgcgggggctgcggccgcgggcgatgccaaaaacgaagccccatgtgccactcccctgatctgcagcttcggtaggccggtggacctggagaaggacgactaccagaaggtggtgtgcaacaacgagcactgcccctgcagcacctggatgcacctgcagtgcttctacgagtgggagagcagcatcctcgtccagttcaactgcatcggccgcgcgcgcagctggaacgagaagcaatgccgccagaacatgtggacaaagaagggctacgacctggccttccgcttctgctcttgccgctgtggccagggccacttgaagaaggacacagactggtatcaggtgaagcggatgcaggacgagaaaaagaagaagtctggctccgagaagaacacagggaggcctcctggtgaggcggcggaggaggcaaaaaagtgcaggcccccaaataagccccagaaaggcccaagccacgacctcccccgccggcattccatggaccggcagaactcccaggagaaggcagtgggtgccgcagcctacggtgcccgttcccccggtggctccccgggccagtccccacccacgggctactccatcctctctcctgcccacttcagcggcccccgctcctccagatacctcggggagttcttaaagaacgccatccatctggagcctcacaagaaggccatggctgggggccatgtgttcagaaatgcccactttgattacagccctgcggggttggcagttcacagggggggacacttcgacacccccgtgcagttccttcggcggctggacctctccgaactcctcactcacatccccaggcataagctgaacactttccacgtgcgcatggaagacgatgcccaagtgggccagggggaagacttgcggaagttcattctggccgcgctcagtgccagccacagaaacgtggtaaactgtgccctgtgccaccgggcgctcccggtgttcgaacagttcccactggtggatggaactttgttcctaagcccgtcgagacatgatgagatcgaatatgatgttccttgtcaccttcaagggagactcatgcatctgtatgccgtgtgcgtggactgcctggaaggggttcacaagatcatctgcatcaagtgtaagtcacggtgggatggcagctggcaccagctgggcactatgtacacctacgacatcctggctgcctctccatgttgtcaggcccgcctgaactgtaagcactgtgggaagccggtgatcgacgtgaggatcgggatgcagtacttctccgaatatagcaacgtccagcagtgtccacactgtgggaacctggactaccacttcgtgaagccattttcctccttcaaagttctcgaagcttattgatgaaagctttgctttagtaatagctattttattgatattattactttattacatatcttttatagggaaacattctgtgacattaatttcctttctaatttaaaggagagttactttgttgtatgtgtgccactaaaataggggctgcccttgccctgtcttgattcccgagtgttaatctgtggttttgaccagagcccagatgggtaatcctgtgcatttgggttggggttcactcttaccaagaatctttgatgcagctttaagatggtggggaggatggggtgaatttaggaaaggaatttgtggttataaactaagagcttgataggagttggaaggaaactcttactaaaatgttaactttctaaaaaccttcttttagatcttccttgggcctttggaaaaatatgtgacaagtgaatgtaagtctgtgcctggagagctaatagtgcattagtctatctcagcctagtgttctgcagcacacatgggcaggcagtttactcacactgacaggtgacctgaaagtggcacaagtgctgtttctatcactattgtaatttgccagttcatttttcatgctgaaagtaatatccaaattgtaagacatatgaaagatattagtgttgcaaatatgtttaggtaaactgacctataacagaatatgtgaaatgaatttggaaataatgcaagaaggcagaactcaatcatttaaattgtgtctttgaagttggtaatatagcttttaaggagaacccatgaataacctgatttgggcagtgatgatttattacaggttgcactgttgaagtgtcatttggtgtcaggttcttctcacaggtaaatctttcagccacagaatctaactggtgagcttcagaaccaataattgccacatttattgtcctcaaaattgcttatggccatgtataaccaattaattctgagtttccaaaatcaaagatttgaccttaagagggaagggaaaaaagtgtgaaaggatgatgaagaaaataattttactatttcttttaaaagtatgttttggaaaatcaatgattttaatgcatagcagtatgtttgaaaaatagaccattctaaaaagcccatgataccttactgttgatgaaaaaggatgatcatatatatagaacttgattagtcagagcattgggcattccaaaatacagcctttggttcagtagattttaatgctttaaatagactgacgtcgcatacccttatagaattggaatatgatttctcaaaaattaatttgataatttcatgtatgatgtgcatatatgctaaaagaatgcagaaaatcattttatgaatagccaaatttggggttgatgtgaacattttatgttactcatttggtttatacttttttttttttttttttaactgtgtggtttttcttttcagaagtatttaggcaatattgcacgtgagtttcagttctttttttcttttttttgagatggagtctcactcttgtcacccaggctggagtgcagtagtgcgatctcagctcactgcaacctctgcctcctggattcaagcgattctcctgtcccagcctcccaggtagctgggactataggcacgtgccaccacacccggctaattttttgtatttttagtagagacagcgtttcaccatgttagctaggatggtctagatctcctgaccttgtgatctgcctgcctcggcctcccaaagtgctgggattacaggcgtgagtcactgtgcctggccaagtttcagttctatatgaagtatttgatgttttgtttgaaacaatacagcattaaagaaccaatgttattcactaatatcattcatctttcagtttggatgatttggtttgctgcatctaggttggtgtttgatcatctgaaaaaacatttcagtgggaagaaatgcataaaatgcctataagaagtagaaagtcattgaactgacagtgtttgatgcaactaaaagaggattgtaagacatagctttctgcaaacttgtctttaatgcacaaagctgtagtggtgaattaactatctccttattgattctctcctgtacccagatgcaaaaagtgctaagtttctcttgtcctcgtaataccatttggattttatttctgaatttaaatagtaaaatatttatgatgctgatctttaacccacctaaaattttatagtgaaacctgctttatattgttgttctgaagcttacaattgacctatacattgcattcagcaagctcctgaatttagaactgccgtcagtgtagtgtatgctgtgttccatgttgcctttttagatggctttctaccccctgaacaataaataggatgaggttttactgtaattgggtaaagtttactcttggacattatttcgatgctaaagtaaggattctgtggatgttacttaaagagaaaagcataagagcatgaagcatatctgggaatatcttttgcctttaagacgattcattcttgtctagagggaaaatctggctgatttgggaataaaatataatcgaatattcaacaccatgaagataaatcttattttggaaatctactgaccttaataccccaagcttgccctgaatactttgattggaattggaatatatcaaaaaaggttagtatttttgttgtagttaggatactaaaaggatattagttacccaagagatccaatttgtttttctgatgaatagtgttcagtaaaatgaagcagtcttaagagtgactaataatttcaaagtgatttttcgtctattcttaatattttttaattatttatttttaagagttttataccttgagcagatacaatgatctgctttagtgagaggacaatttctgattgattgttttctcttcaggccatctcacctcttcattctcttgttacatttgaagcagttgatataatgggtttatactttaaaagatagacatggtgccatgaagttggggagttgggtgaattatcccattctagttacagaggagctttccttaaatgccctttaacttctaggttttgttcaagaagttcattttctgagtaaaaggtattttcatatatgttgggggaaaattaactcatctaaaaagaatcttattaggtatttgaactctaaaactaacagataagacagatatgtaccttattagagcaccagaactaatttgctaagtcttttgtttagtcctgcaagactgatgcttaatacacagtctgttctcctgtgtctaggtcaggaactccagtttgcttttctgttttgtgtcctggtagcagctgttgagtaactttcattggaggttgggaaggaagtgaggagaaagtgttcttgtttagtgttttatttcctataataggatgctgcctaacccagttcatctctatgtcctgttcactgaatattccgggtaattgaaagaaaatataatggatgggctccattaaaaccagctcaaaaataaattcttgtcagtaaagatttcttgtcaagatgtcttggattgcacttttgttgaggaaagacagtgtaaatagttaaagaatgttgataaaattgaaacatttggttgtggaattgtgtgtggttttagagggtttctgtttgtgaaatgtatgtattaaaaataataaaattccagaaactaa

SEQ ID NO: 189983 - DNA, 1632 bp, Artificial Sequence
  derived and/or modified sequence
atgcccaaccccaagaacagcaagggcggccggaagaacaagcgggctaactcctccggtgacgaacaggagaatggcgctggagccctggccgcagcaggagctgcaggtgccgccgcaggcggtgccctggctgccgctgccggttgcggagcagcagctgcaggagcacctggcgctggcggggcagcaggggccggcggcgccggcacaggagccgccaacgcagctgccgcagccggagctgctgcagctggcgatgccaaaaatgaagctccttgcgcaacccctctgatctgctcctttggcagacccgttgacctggagaaagacgactaccagaaggtagtgtgtaataacgagcattgcccatgttctacttggatgcatctgcagtgcttctatgagtgggagtcctctatcctggtgcagttcaattgcatcgggagagctaggagttggaatgaaaaacaatgtcgacagaacatgtggacgaagaaaggctatgacttggctttccgcttctgctcctgtcgatgtggccagggacatctgaagaaagacaccgattggtaccaggtgaaacgcatgcaggatgagaagaaaaaaaagagcgggagcgagaaaaacactggccggccaccaggcgaagcagcagaggaggctaagaagtgccggcctcccaacaagccacagaaaggtccctcgcacgacttaccccgcagacatagcatggacaggcaaaacagtcaagaaaaggcggtgggcgctgccgcttacggagctcgatctccaggcggctcgcctgggcagtctccaccgaccgggtattctatcctctcaccagcgcatttcagcggtccaagatcttctagataccttggcgaattcttgaagaatgccattcatctggaaccccataagaaggcaatggcagggggccatgtgttccgcaacgctcattttgactactcaccggccgggctcgctgtacaccggggcggacacttcgacacacccgtccagtttttgcgcaggctagatctttcagaactactgacccatatcccacggcataagctcaacaccttccacgtgcggatggaggacgacgcacaggtgggccagggggaagatctgcggaaatttatactggccgctctcagcgcctcccatagaaacgttgtgaattgcgccctgtgtcatagggctctccctgtatttgaacagttccccctcgtggacgggactctgtttctgtccccatccagacatgatgaaattgaatatgacgttccttgccacctgcagggccggctgatgcatctgtacgccgtatgtgttgactgccttgagggcgtgcataagatcatttgtattaaatgtaagagccgctgggacggatcctggcaccaactgggaactatgtatacgtacgatatcctagccgcatcgccttgttgccaggcccggttgaactgcaagcactgcggcaagcctgtgattgacgtgcgaattggcatgcaatacttttccgagtatagtaatgtgcagcagtgcccgcactgtggcaacctggattaccattttgtgaagccattttcttcctttaaggtgttggaagcttactag

SEQ ID NO: 189984 - DNA, 1632 bp, Artificial Sequence
  derived and/or modified sequence
atgccgaatccgaagaatagtaaggggggtagaaaaaacaagcgtgccaattcgtccggagacgagcaggagaatggggcaggcgcactagctgctgccggagctgcaggggctgccgcaggtggtgctctggctgccgctgccggttgtggagccgctgccgcaggcgctcccggagccggtggagctgcgggagcaggaggtgcgggaaccggcgctgccaacgccgcagctgcagccggtgctgctgcggcaggggacgcaaaaaacgaagccccatgtgctaccccactcatttgcagcttcggcagacctgtcgacttggaaaaagatgactatcaaaaagttgtatgcaataatgagcattgcccatgttccacctggatgcacctgcaatgcttttacgagtgggaaagctctattttggttcagttcaactgcattggaagggctcgaagctggaatgagaagcagtgtcggcaaaacatgtggaccaagaagggctacgatcttgcctttaggttctgtagttgtcgctgcggccaaggccaccttaagaaggacaccgactggtaccaagtcaagcggatgcaggacgaaaagaaaaaaaagagtgggtccgagaagaataccggccgaccgccaggagaggccgctgaggaagcgaagaagtgccgccctcctaataaaccgcagaaagggcctagccacgatctgccccgacgccacagcatggacaggcaaaactcgcaggaaaaagctgttggagccgctgcctacggcgcacgatcaccaggaggtagcccaggtcagagtcccccaaccggatatagcatactgagtcccgcacatttttctggtccacggtcttcacgctatttgggagagttcctgaaaaatgccatacacctggagccacacaaaaaagctatggccggagggcatgtgtttagaaacgcccactttgactattcaccggcaggtctggctgtccaccgaggagggcatttcgatacacccgttcaattccttaggcggcttgatctgtcagagttgcttacccacatccctcggcacaagcttaacacttttcacgttcggatggaggacgatgctcaagtgggccagggcgaggacctgagaaagttcattctcgctgccttgagcgccagtcatcgtaatgtggtgaactgcgccctgtgccatagagcgctgcccgtgttcgaacagtttcctctggtagacggcacactgtttctcagtccatcccgacatgatgagattgaatacgatgtgccctgtcacttgcagggacggctgatgcacttatacgccgtatgtgtcgactgcctggaaggtgtccataagataatttgtatcaaatgcaaatcgagatgggatggttcatggcaccagcttggaaccatgtacacgtatgatattctcgccgcatccccttgttgccaggcgaggctgaactgtaagcactgcgggaagcctgtcatcgatgtcagaatcggaatgcagtacttcagcgagtacagcaatgtacaacagtgtcctcactgcgggaatctggactatcacttcgtgaagccattttcctctttcaaggtcctggaggcatactag

SEQ ID NO: 189985 - protein, 870 aa, Artificial Sequence
  derived and/or modified sequence
MDSTKEKCDSYKDDLLLRMGLNDNKAGMEGLDKEKINKIIMEATKGSRFYGNELKKEKQVNQRIENMMQQKAQITSQQLRKAQLQVDRFAMELEQSRNLSNTIVHIDMDAFYAAVEMRDNPELKDKPIAVGSMSMLSTSNYHARRFGVRAAMPGFIAKRLCPQLIIVPPNFDKYRAVSKEVKEILADYDPNFMAMSLDEAYLNITKHLEERQNWPEDKRRYFIKMGSSVENDNPGKEVNKLSEHERSISPLLFEESPSDVQPPGDPFQVNFEEQNNPQILQNSVVFGTSAQEVVKEIRFRIEQKTTLTASAGIAPNTMLAKVCSDKNKPNGQYQILPNRQAVMDFIKDLPIRKVSGIGKVTEKMLKALGIITCTELYQQRALLSLLFSETSWHYFLHISLGLGSTHLTRDGERKSMSVERTFSEINKAEEQYSLCQELCSELAQDLQKERLKGRTVTIKLKNVNFEVKTRASTVSSVVSTAEEIFAIAKELLKTEIDADFPHPLRLRLMGVRISSFPNEEDRKHQQRSIIGFLQAGNQALSATECTLEKTDKDKFVKPLEMSHKKSFFDKKRSERKWSHQDTFKCEAVNKQSFQTSQPFQVLKKKMNENLEISENSDDCQILTCPVCFRAQGCISLEALNKHVDECLDGPSISENFKMFSCSHVSATKVNKKENVPASSLCEKQDYEAHPKIKEISSVDCIALVDTIDNSSKAESIDALSNKHSKEECSSLPSKSFNIEHCHQNSSSTVSLENEDVGSFRQEYRQPYLCEVKTGQALVCPVCNVEQKTSDLTLFNVHVDVCLNKSFIQELRKDKFNPVNQPKESSRSTGSSSGVQKAVTRTKRPGLMTKYSTSKKIKPNNPKHTLDIFFK

SEQ ID NO: 189986 - protein, 672 aa, Artificial Sequence
  derived and/or modified sequence
MDSTKEKCDSYKDDLLLRMGLNDNKAGMEGLDKEKINKIIMEATKGSRFYGNELKKEKQVNQRIENMMQQKAQITSQQLRKAQLQVDRFAMELEQSRNLSNTIVHIDMDAFYAAVEMRDNPELKDKPIAVGSMSMLSTSNYHARRFGVRAAMPGFIAKRLCPQLIIVPPNFDKYRAVSKEVKEILADYDPNFMAMSLDEAYLNITKHLEERQNWPEDKRRYFIKMGSSVENDNPGKEVNKLSEHERSISPLLFEESPSDVQPPGDPFQVNFEEQNNPQILQNSVVFGTSAQEVVKEIRFRIEQKTTLTASAGVRISSFPNEEDRKHQQRSIIGFLQAGNQALSATECTLEKTDKDKFVKPLEMSHKKSFFDKKRSERKWSHQDTFKCEAVNKQSFQTSQPFQVLKKKMNENLEISENSDDCQILTCPVCFRAQGCISLEALNKHVDECLDGPSISENFKMFSCSHVSATKVNKKENVPASSLCEKQDYEAHPKIKEISSVDCIALVDTIDNSSKAESIDALSNKHSKEECSSLPSKSFNIEHCHQNSSSTVSLENEDVGSFRQEYRQPYLCEVKTGQALVCPVCNVEQKTSDLTLFNVHVDVCLNKSFIQELRKDKFNPVNQPKESSRSTGSSSGVQKAVTRTKRPGLMTKYSTSKKIKPNNPKHTLDIFFK

SEQ ID NO: 189987 - protein, 780 aa, Artificial Sequence
  derived and/or modified sequence
MELEQSRNLSNTIVHIDMDAFYAAVEMRDNPELKDKPIAVGSMSMLSTSNYHARRFGVRAAMPGFIAKRLCPQLIIVPPNFDKYRAVSKEVKEILADYDPNFMAMSLDEAYLNITKHLEERQNWPEDKRRYFIKMGSSVENDNPGKEVNKLSEHERSISPLLFEESPSDVQPPGDPFQVNFEEQNNPQILQNSVVFGTSAQEVVKEIRFRIEQKTTLTASAGIAPNTMLAKVCSDKNKPNGQYQILPNRQAVMDFIKDLPIRKVSGIGKVTEKMLKALGIITCTELYQQRALLSLLFSETSWHYFLHISLGLGSTHLTRDGERKSMSVERTFSEINKAEEQYSLCQELCSELAQDLQKERLKGRTVTIKLKNVNFEVKTRASTVSSVVSTAEEIFAIAKELLKTEIDADFPHPLRLRLMGVRISSFPNEEDRKHQQRSIIGFLQAGNQALSATECTLEKTDKDKFVKPLEMSHKKSFFDKKRSERKWSHQDTFKCEAVNKQSFQTSQPFQVLKKKMNENLEISENSDDCQILTCPVCFRAQGCISLEALNKHVDECLDGPSISENFKMFSCSHVSATKVNKKENVPASSLCEKQDYEAHPKIKEISSVDCIALVDTIDNSSKAESIDALSNKHSKEECSSLPSKSFNIEHCHQNSSSTVSLENEDVGSFRQEYRQPYLCEVKTGQALVCPVCNVEQKTSDLTLFNVHVDVCLNKSFIQELRKDKFNPVNQPKESSRSTGSSSGVQKAVTRTKRPGLMTKYSTSKKIKPNNPKHTLDIFFK

SEQ ID NO: 189988 - protein, 461 aa, Artificial Sequence
  derived and/or modified sequence
MDSTKEKCDSYKDDLLLRMGLNDNKAGMEGLDKEKINKIIMEATKGSRFYGNELKKEKQVNQRIENMMQQKAQITSQQLRKAQLQVDRFAMELEQSRNLSNTIVHIDMDAFYAAVEMRDNPELKDKPIAVGSMSMLSTSNYHARRFGVRAAMPGFIAKRLCPQLIIVPPNFDKYRAVSKEVKEILADYDPNFMAMSLDEAYLNITKHLEERQNWPEDKRRYFIKMGSSVENDNPGKEVNKLSEHERSISPLLFEESPSDVQPPGDPFQVNFEEQNNPQILQNSVVFGTSAQEVVKEIRFRIEQKTTLTASAGIAPNTMLAKVCSDKNKPNGQYQILPNRQAVMDFIKDLPIRKVSGIGKVTEKMLKALGIITCTELYQQRALLSLLFSETSWHYFLHISLGLGSTHLTRDGERKSMSVERTFSEINKAEEQYSLCQELCSELAQDLQKERLKVAQVEYRRL

SEQ ID NO: 189989 - protein, 141 aa, Artificial Sequence
  derived and/or modified sequence
MDSTKEKCDSYKDDLLLRMGLNDNKAGMEGLDKEKINKIIMEATKGSRFYGNELKKEKQVNQRIENMMQQKAQITSQQLRKAQLQVDRFAMELEQSRNLSNTIVHIDMDAFYAAVEMRDNPELKDKPIAVGSMSMLSTSNY

SEQ ID NO: 189990 - protein, 472 aa, Artificial Sequence
  derived and/or modified sequence
MDSTKEKCDSYKDDLLLRMGLNDNKAGMEGLDKEKINKIIMEATKGSRFYGNELKKEKQVNQRIENMMQQKAQITSQQLRKAQLQVDRFAMELEQSRNLSNTIVHIDMDAFYAAVEMRDNPELKDKPIAVGSMSMLSTSNYHARRFGVRAAMPGFIAKRLCPQLIIVPPNFDKYRAVSKEVKEILADYDPNFMAMSLDEAYLNITKHLEERQNWPEDKRRYFIKMGSSVENDNPGKEVNKLSEHERSISPLLFEESPSDVQPPGDPFQVNFEEQNNPQILQNSVVFGTSAQEVVKEIRFRIEQKTTLTASAGIAPNTMLAKVCSDKNKPNGQYQILPNRQAVMDFIKDLPIRKVSGIGKVTEKMLKALGIITCTELYQQRALLSLLFSETSWHYFLHISLGLGSTHLTRDGERKSMSVERTFSEINKAEEQYSLCQELCSELAQDLQKERLKVLYFDMVSLVFKFFNSKMLP

SEQ ID NO: 189991 - DNA, 2613 bp, Artificial Sequence
  derived and/or modified sequence
atggacagcactaaagagaaatgcgattcctacaaagacgacttgttgcttagaatgggactgaatgacaacaaagccgggatggaagggctcgataaagaaaagatcaataagatcataatggaagcaaccaaggggtcaaggttctatggaaacgaacttaagaaagaaaaacaggtcaaccagcgaattgagaacatgatgcagcagaaagctcagataacaagtcagcagctcagaaaggctcaactccaggtggacagattcgcaatggagctcgagcagagcaggaacctgagcaatacaatcgttcatattgatatggacgcattctatgctgcggtcgaaatgagagataacccggagttgaaggacaaaccaatagcggttggttcgatgagtatgcttagcaccagcaattaccacgctagacgctttggtgttagagcggcgatgcccggcttcattgcgaagagattgtgccctcagcttataattgtcccgcctaatttcgacaaatacagagctgtcagcaaagaggtcaaagagatcttagcagactacgaccctaactttatggctatgagcctggatgaagcgtacctaaacatcaccaagcatttggaggagagacaaaactggccagaagacaaacgccgctattttatcaaaatgggaagctccgttgaaaatgataatccaggtaaagaggtcaataaactgtccgagcacgagcgttctattagccctctgctgttcgaagagagccccagtgacgtgcagccgccaggggatccgtttcaggtgaatttcgaagaacagaacaacccccaaatcctgcagaattccgtggtcttcggtactagtgcccaggaggtggtgaaagagatcagatttcggattgagcagaagaccacccttacagcttccgctggtatcgcacccaacaccatgctcgcaaaggtttgctcagacaagaacaagcctaatggtcagtatcaaattctcccaaacaggcaggcggtcatggatttcattaaagacctgcccatacgaaaggtgagtggcattggtaaggtgacagaaaagatgcttaaggcgctgggaattataacttgcaccgaactttatcagcagagggcattgctaagcctcttattctctgaaacatcatggcactactttctgcatattagcctgggcctgggctccactcatttgacccgagacggcgaacgaaaatcaatgtcggttgagcgaacgttctcagagatcaataaagcggaggagcaatactcgttgtgccaggaactctgtagtgagttggcccaggatctgcagaaagagcgcttgaagggtaggacagtaacaataaagttaaagaatgtcaacttcgaagtaaagaccagagccagtactgtaagctccgttgtcagcaccgccgaagagattttcgccatcgccaaagagctgctcaagactgaaatcgatgctgatttcccccacccactgcgcctgcgcctcatgggagtccggatctcgtctttccccaatgaggaagatcggaagcaccaacagcgctccatcatcggattcctccaggccggtaatcaagcccttagcgctaccgagtgtactctggagaaaaccgacaaagataagtttgttaagccgctggaaatgagccacaagaagtctttctttgataaaaagaggtccgagagaaaatggtctcaccaggatactttcaagtgtgaggcagtcaataagcagagtttccagacaagccagcccttccaggtcctgaagaagaagatgaatgaaaatcttgaaatcagtgaaaattctgatgattgtcagatcttgacttgcccagtatgcttccgcgcgcaagggtgcatttccctcgaagctctgaataaacatgttgatgagtgcctcgatgggccatctatatcagagaacttcaaaatgtttagctgcagtcatgtgagcgccacaaaggtcaataagaaggaaaatgtgcctgccagtagcttatgtgagaaacaggactacgaggctcaccctaagataaaagagatatcgtccgtagattgcattgctctggtagatacgatagataactccagcaaggcagagtcaattgatgccttgagcaataagcactcgaaggaggagtgtagctccctaccctccaagtcattcaatatcgaacattgccatcaaaactccagcagcaccgtaagtctggaaaacgaggatgtgggttcctttcgccaagagtacaggcaaccatatctttgcgaagttaagacaggtcaggcactcgtgtgtcccgtctgtaatgtggagcagaaaacttctgatctcactctcttcaatgtgcacgtggatgtgtgcctgaataaaagttttattcaggagctccggaaggacaagttcaatcctgtgaaccagcctaaagagtcatcccgcagcaccgggtcaagcagcggggtccagaaggctgtgacccggaccaaacgacccggactgatgacaaagtacagtactagtaagaagattaagcctaataatcctaagcacacactggatatttttttcaagtag

SEQ ID NO: 189992 - DNA, 2343 bp, Artificial Sequence
  derived and/or modified sequence
atggagctcgagcagtcccggaatctgagtaatacgatcgtgcacattgacatggatgccttctatgcagcagtcgaaatgagagacaaccccgaattaaaggataagccaatcgccgtgggctctatgtcaatgctgagtacttctaattaccacgcgcgcaggtttggcgttcgggcagccatgcctggcttcatagcgaagcgtctgtgccctcaactgatcattgtgcctcccaatttcgataagtaccgcgctgtgagcaaggaggttaaagagatcttggccgactatgacccaaactttatggccatgtctctggatgaggcgtatctgaatatcacgaagcacctagaagaaagacaaaattggcctgaagacaaacgcaggtacttcattaagatggggtcttccgttgagaatgataatcccggcaaggaggttaacaaactctcggagcatgagcgcagcatttcccccttgttattcgaggagtccccctcagatgtgcagccccctggggaccccttccaggtgaacttcgaggagcagaacaacccccagatcctgcaaaatagcgttgtgtttggtaccagtgcccaggaggtggtcaaggagataagatttcgcattgagcagaagacaaccttaacggcctctgccggaatcgctcccaacaccatgctggcaaaagtatgctctgataaaaataagccgaacggtcaataccagattttgccgaacagacaggcagtgatggactttatcaaggacctgcctattcgaaaggtttctggcataggcaaggtcactgaaaaaatgctcaaagccctgggaataattacctgcacagagctgtaccagcaaagagcgctgctgtcactcttgttcagtgaaacttcttggcactatttcctccatatttctctgggacttggatccacacatctcacaagggatggcgaacggaagtccatgagcgttgaaaggacgttttccgagatcaataaggctgaggaacagtacagcctgtgccaggaactttgctccgagctcgcccaagatctccagaaggagagactgaagggacgtaccgttaccattaaattgaaaaacgttaacttcgaggtaaagactagggcatcaaccgtgagctctgtggtatctaccgccgaggagatttttgccatcgcaaaagagcttctcaagaccgaaattgacgccgactttccgcacccattacggctgagacttatgggagtgcgtatctccagcttcccaaacgaggaggatcggaagcaccagcagagatccattattggcttcttgcaggctggaaaccaggccctcagtgcaaccgagtgcacactggaaaaaactgacaaagacaaattcgtaaaacctctagaaatgtcccacaagaagtcctttttcgataaaaaacgctccgaaagaaagtggtcccatcaagatacattcaaatgcgaggccgtcaacaagcaaagctttcagacatcacagccattccaagtgctgaaaaaaaagatgaatgaaaatctagaaatatccgaaaattctgacgactgccagatccttacttgcccagtgtgtttccgtgcccaggggtgtatatcactggaagcattgaacaaacacgtcgacgagtgtctggacggaccttccatcagcgaaaacttcaaaatgttctcttgcagtcatgtttctgcaacaaaagtaaataaaaaagagaacgtgcccgctagcagtctgtgtgagaaacaggactatgaagctcaccctaagatcaaggagataagtagtgtggattgcatagcacttgtggatacgatcgacaactcatctaaagcagagtctatcgacgctctctccaataaacattccaaggaggagtgttccagcctgccatctaagagttttaacatcgagcattgtcaccagaattcatcttccaccgtctcactggaaaacgaagatgtcgggtctttccgccaggaataccgtcagccgtatctgtgtgaggttaagacaggacaggcgctggtctgtcccgtttgcaacgtggagcaaaaaacttctgacctgactctgttcaacgtgcacgttgacgtgtgccttaacaaatctttcatccaggagcttaggaaggataaattcaatcccgttaaccagcccaaggaatcatctagaagcacagggagttctagtggtgtccagaaggcggtgactagaacaaaacgccccgggctgatgacgaagtactccacatctaagaaaataaagcccaacaaccccaagcacaccctcgatatattctttaaatag

SEQ ID NO: 189993 - DNA, 2613 bp, Artificial Sequence
  derived and/or modified sequence
atggacagcaccaaggagaagtgtgacagctacaaggatgacctgctgctgaggatgggcctgaatgacaacaaggccggcatggagggcctggacaaggagaagatcaacaagatcatcatggaggccaccaagggcagccgcttctatggaaatgagctgaagaaggagaagcaggtgaaccagagaattgagaacatgatgcagcagaaggcccagatcaccagccagcagctgaggaaggcccagctgcaggtggacagatttgccatggagctggagcagagcaggaacctgagcaacaccatcgtgcacatcgacatggatgccttctatgctgctgtggagatgagggacaaccctgagctgaaggacaagcccatcgctgtgggctccatgtccatgctgagcaccagcaactaccacgcccggcgcttcggcgtgcgggccgccatgcctggcttcatcgccaagaggctgtgcccccagctgatcatcgtgccccccaactttgacaagtacagagctgtgtccaaggaggtgaaggagatcctggccgactatgaccccaacttcatggccatgagcctggatgaggcctacctgaacatcaccaagcacctggaggagcggcagaactggccagaggacaagaggcgctacttcatcaagatgggcagctctgtggagaatgacaaccctgggaaggaggtgaacaagctgtctgagcacgagaggagcatcagccccctgctgtttgaggagagccccagtgatgtgcagcccccaggggaccccttccaggtgaactttgaggagcagaacaacccccagatcctgcagaacagcgtggtgtttggcaccagcgcccaggaggtggtgaaggagatccgcttcagaattgagcagaagaccaccctgacagccagcgctggcatcgcccccaacaccatgctggccaaggtgtgcagcgacaagaacaagcccaacggccagtaccagatcctgcccaaccggcaggccgtgatggacttcatcaaggacctgcccatcaggaaggtgtctggaattggcaaggtgacagagaagatgctgaaggccctgggcatcatcacctgcacagagctgtaccagcagagggccctgctgagcctgctcttcagcgagacctcctggcactacttcctgcacatcagcctgggcctgggcagcacccacctgaccagagatggagagaggaagtccatgtctgtggagaggaccttcagcgagatcaacaaggccgaggagcagtacagcctgtgccaggagctgtgcagcgagctggcccaggacctgcagaaggagcggctgaagggccgcacagtgaccatcaagctgaagaatgtgaactttgaggtgaagacccgggccagcacagtgtcctctgtggtgtccacagctgaggagatctttgccatcgccaaggagctgctgaagacagaaattgatgctgacttcccccaccccctgcggctgcggctgatgggcgtgcgcatcagcagcttccccaatgaggaggacaggaagcaccagcagaggagcatcatcggcttcctgcaggccggcaaccaggccctgagcgccacagagtgcaccctggagaagacagacaaggacaagtttgtgaagcccctggagatgagccacaagaagagcttctttgacaagaagaggtctgagaggaagtggagccaccaggacaccttcaagtgtgaggccgtgaacaagcagagcttccagaccagccagcccttccaggtgctgaagaagaagatgaatgaaaacctggagatcagcgagaacagtgatgactgccagatcctgacctgccctgtgtgcttccgggcccagggctgcatcagcctggaggccctgaacaagcacgtggatgaatgtctggatggccccagcatcagcgagaacttcaagatgttcagctgcagccacgtgtctgccaccaaggtgaacaagaaggaaaatgtgcctgccagcagcctgtgtgagaagcaggactatgaggcccaccccaagatcaaggagatcagctctgtggactgcatcgccctggtggacaccatcgacaacagcagcaaggccgagagcattgatgccctgagcaacaagcacagcaaggaggagtgcagcagcctgcccagcaagagcttcaacatcgagcactgccaccagaacagcagcagcacagtgtccctggagaatgaagatgtgggcagcttccggcaggagtaccggcagccctacctgtgtgaggtgaagacaggccaggccctggtgtgccctgtgtgcaatgtggagcagaagaccagtgacctgaccctcttcaacgtgcacgtggatgtgtgcctgaacaagagcttcatccaggagctgaggaaggacaagttcaaccctgtgaaccagcccaaggagagcagccgcagcacaggcagcagcagcggcgtgcagaaggctgtgaccaggaccaagaggcctggcctgatgaccaagtacagcaccagcaagaagatcaagcccaacaaccccaagcacaccctggacatcttcttcaagtag

SEQ ID NO: 189994 - DNA, 2343 bp, Artificial Sequence
  derived and/or modified sequence
atggagctggagcagagcaggaacctgagcaacaccatcgtgcacatcgacatggatgccttctatgctgctgtggagatgagggacaaccctgagctgaaggacaagcccatcgctgtgggctccatgtccatgctgagcaccagcaactaccacgcccggcgcttcggcgtgcgggccgccatgcctggcttcatcgccaagaggctgtgcccccagctgatcatcgtgccccccaactttgacaagtacagagctgtgtccaaggaggtgaaggagatcctggccgactatgaccccaacttcatggccatgagcctggatgaggcctacctgaacatcaccaagcacctggaggagcggcagaactggccagaggacaagaggcgctacttcatcaagatgggcagctctgtggagaatgacaaccctgggaaggaggtgaacaagctgtctgagcacgagaggagcatcagccccctgctgtttgaggagagccccagtgatgtgcagcccccaggggaccccttccaggtgaactttgaggagcagaacaacccccagatcctgcagaacagcgtggtgtttggcaccagcgcccaggaggtggtgaaggagatccgcttcagaattgagcagaagaccaccctgacagccagcgctggcatcgcccccaacaccatgctggccaaggtgtgcagcgacaagaacaagcccaacggccagtaccagatcctgcccaaccggcaggccgtgatggacttcatcaaggacctgcccatcaggaaggtgtctggaattggcaaggtgacagagaagatgctgaaggccctgggcatcatcacctgcacagagctgtaccagcagagggccctgctgagcctgctcttcagcgagacctcctggcactacttcctgcacatcagcctgggcctgggcagcacccacctgaccagagatggagagaggaagtccatgtctgtggagaggaccttcagcgagatcaacaaggccgaggagcagtacagcctgtgccaggagctgtgcagcgagctggcccaggacctgcagaaggagcggctgaagggccgcacagtgaccatcaagctgaagaatgtgaactttgaggtgaagacccgggccagcacagtgtcctctgtggtgtccacagctgaggagatctttgccatcgccaaggagctgctgaagacagaaattgatgctgacttcccccaccccctgcggctgcggctgatgggcgtgcgcatcagcagcttccccaatgaggaggacaggaagcaccagcagaggagcatcatcggcttcctgcaggccggcaaccaggccctgagcgccacagagtgcaccctggagaagacagacaaggacaagtttgtgaagcccctggagatgagccacaagaagagcttctttgacaagaagaggtctgagaggaagtggagccaccaggacaccttcaagtgtgaggccgtgaacaagcagagcttccagaccagccagcccttccaggtgctgaagaagaagatgaatgaaaacctggagatcagcgagaacagtgatgactgccagatcctgacctgccctgtgtgcttccgggcccagggctgcatcagcctggaggccctgaacaagcacgtggatgaatgtctggatggccccagcatcagcgagaacttcaagatgttcagctgcagccacgtgtctgccaccaaggtgaacaagaaggaaaatgtgcctgccagcagcctgtgtgagaagcaggactatgaggcccaccccaagatcaaggagatcagctctgtggactgcatcgccctggtggacaccatcgacaacagcagcaaggccgagagcattgatgccctgagcaacaagcacagcaaggaggagtgcagcagcctgcccagcaagagcttcaacatcgagcactgccaccagaacagcagcagcacagtgtccctggagaatgaagatgtgggcagcttccggcaggagtaccggcagccctacctgtgtgaggtgaagacaggccaggccctggtgtgccctgtgtgcaatgtggagcagaagaccagtgacctgaccctcttcaacgtgcacgtggatgtgtgcctgaacaagagcttcatccaggagctgaggaaggacaagttcaaccctgtgaaccagcccaaggagagcagccgcagcacaggcagcagcagcggcgtgcagaaggctgtgaccaggaccaagaggcctggcctgatgaccaagtacagcaccagcaagaagatcaagcccaacaaccccaagcacaccctggacatcttcttcaagtag

SEQ ID NO: 189995 - DNA, 2613 bp, Artificial Sequence
  derived and/or modified sequence
atggacagcaccaaggagaagtgcgacagctacaaggacgacctgcttctgagaatgggccttaatgataataaagctggaatggagggtctggataaagaaaagatcaataagattatcatggaggctacaaagggatctcgcttttacgggaatgaactgaaaaaagagaagcaggttaaccagagaatcgagaacatgatgcaacagaaggcccagataaccagtcaacaattgagaaaggcacagctccaggtcgaccggtttgcgatggagctggaacagagtcggaacttaagtaatactattgtccacatagacatggacgccttctacgcggcggtggaaatgagagataatcccgagctcaaagacaagcctatcgccgtcggctcaatgtcaatgctgagcacatccaactaccatgctaggaggtttggcgtgcgggcagccatgcccgggttcattgcaaaaaggctttgtcctcaattgatcatcgtccctccaaactttgataaataccgcgccgtatcaaaggaagtgaaggaaatattggccgattacgatcctaacttcatggcaatgagtctggatgaggcctacttgaatattacgaaacatttggaggaaaggcagaattggccagaggacaaacgccggtactttattaagatggggagcagtgtggagaatgataacccaggcaaagaggtgaataagctttctgaacacgagcggtcgatttctcctttgttatttgaagagtcaccctctgacgtgcagccgcccggtgatccattccaagtaaattttgaagagcagaataatccccaaattctccagaattccgtggtgtttggcacatcagcccaagaggttgtaaaggaaattcgtttcagaatcgagcaaaaaactaccctcacagcctcagctgggatcgccccgaacaccatgctggctaaagtttgtagtgacaaaaacaagcccaacggccagtaccagatcctacccaataggcaggcggtcatggatttcattaaagacctgcccattcgaaaggtgagcggaattggcaaagtgactgaaaaaatgctcaaggcgctggggatcattacatgcaccgaactttaccaacagcgagcactgctgtccctgctgttttctgaaacctcatggcattattttttgcacatttctctggggctgggctctacccacctgactcgtgatggcgaacgtaagtccatgtccgtggagcggacgttttccgagattaacaaagcagaggaacaatattctttgtgccaggagctctgtagcgagctggcccaggatctgcaaaaagaacgcttgaagggtcgtacagtaaccatcaagctaaagaacgtaaattttgaagttaaaactcgggccagcaccgtgtcctccgtggtgtctacagctgaagagatatttgctatcgcgaaggagctgttaaaaactgagatagacgcagactttccacatccactcaggctgagactgatgggcgtacgcatatcgtcattccccaatgaagaggacaggaagcaccagcagagatcaatcataggattcctccaggctggaaaccaggccctgtctgctacagaatgtactttagagaagactgataaagataagttcgtaaagccattagaaatgagccataagaaatccttcttcgataagaagcgctcagagaggaagtggtcgcatcaggacaccttcaagtgtgaggccgtgaataaacaaagcttccagacatcacagccattccaggtgctgaagaagaaaatgaacgagaatttagagatttcagaaaactcagatgactgccagatcctgacctgcccggtgtgtttccgagcacagggttgcatttctctagaggccttgaataagcatgtggacgaatgccttgatggaccttccatcagcgagaactttaaaatgttctcttgctctcatgtgagcgcgaccaaggtgaacaagaaagaaaatgttccagcctcctctctgtgtgagaagcaagattacgaggctcatcccaagataaaggagatttctagtgtggactgcatcgccttggtggacaccatagataactcaagtaaagccgagagcattgacgcattgtcaaataagcactcgaaagaagaatgtagctcattgccgtctaaaagtttcaatatcgaacattgccaccaaaattctagttccactgtctccctcgagaacgaagacgtgggatcattccgtcaggagtacaggcagccctatctgtgcgaagttaagactggtcaagccctcgtgtgtccagtctgcaatgtagagcaaaagaccagcgacttaacactgttcaacgttcatgtggatgtatgtctgaataagtcctttattcaagagttacggaaggataagttcaacccagttaaccagcccaaggaatcatcgcggtcaacaggctcctccagcggggtccaaaaagcagtcacccggactaagagaccaggtctgatgactaaatactctacttctaaaaaaattaagcctaacaatcctaaacataccctcgacatattttttaagtag

SEQ ID NO: 189996 - DNA, 2343 bp, Artificial Sequence
  derived and/or modified sequence
atggagctggagcagagccggaacctgagcaacaccatcgtgcacatcgacatggacgccttctatgctgctgtcgagatgcgcgacaaccccgagctgaaagacaagccgattgccgtggggtctatgagtatgttatccacctccaactatcatgcccgcagattcggagttcgcgccgccatgcccggattcatcgcaaaaagactgtgccctcagcttatcatcgtgccaccaaacttcgacaagtaccgagcggtctccaaggaggtgaaggagattcttgccgactacgacccaaacttcatggcaatgtcattagacgaggcctatttgaacatcacaaagcacctcgaagaacgtcagaattggcctgaggacaagagacggtattttatcaagatgggctcatcagttgaaaacgacaaccctggaaaggaagtaaacaaactgtccgaacacgagcggagcatcagccctctgctgttcgaagagtcccccagtgacgttcaacctcctggagatcctttccaggtgaatttcgaggaacagaacaatccacagatcctgcagaactccgttgtttttggcacctctgcccaggaagtggtgaaggagattcgattcagaatcgaacaaaaaaccacgcttacggcatccgctggcattgcccccaacacaatgctggccaaagtgtgtagtgacaagaataaacctaacggccaataccaaatactgcctaaccgccaggcagttatggatttcatcaaggacctgcccatcaggaaggtgagcggcatcggtaaggtgacggagaaaatgctgaaggccctggggatcatcacctgcacagagctgtatcagcaacgtgcattattgtcgctgctgttcagtgagacatcatggcactattttttgcatattagcctcggcttgggatcaactcacctgacaagagatggagagaggaagtcaatgtccgttgagcgtacattttctgagattaacaaggcagaggagcagtactccctgtgtcaggagctgtgtagcgagttggcacaggatttgcagaaggagaggctgaaggggcggactgtcaccatcaaactgaaaaacgtcaattttgaggtgaaaacaagggctagcactgtgtcgagcgtcgtgtctaccgccgaagaaattttcgcaatagccaaagaattgctcaagaccgagatcgatgctgactttcctcaccctttaagactccgtctaatgggagttcggatctccagtttccccaatgaagaggataggaaacaccaacagaggtctatcataggttttctgcaggcaggaaaccaggcgctttccgccactgaatgtactctcgaaaagacggataaggataagtttgtgaagcctctggagatgtctcacaagaagagtttttttgacaaaaagaggtcggaacggaaatggtctcaccaggataccttcaaatgcgaggctgtaaataagcaatcctttcagacttctcagccgtttcaggttctgaagaaaaagatgaacgaaaacctcgagatcagcgagaactctgatgactgtcagatcttaacatgccccgtgtgcttccgggcccagggctgtatcagcttggaagcactgaataagcatgtggatgagtgcctggacggaccctctatcagtgaaaattttaaaatgttttcctgcagccacgtgtctgcgacaaaggtgaataagaaggagaatgtgcctgcatccagcctctgcgaaaaacaagactatgaggctcatccgaagatcaaagaaatatcttcagtcgactgtatcgctctcgtggataccatcgacaattccagcaaggccgagtccatcgatgctctgagcaataagcactctaaggaagagtgctcttctctcccctccaaatctttcaacattgaacactgccaccaaaacagttcttccaccgtgagcctcgaaaacgaggacgttggatctttccggcaggagtatcggcagccctatctctgtgaggtgaaaaccggccaggcccttgtttgtcccgtctgcaatgttgagcagaaaacatcagatctgaccctctttaacgttcatgtggacgtctgcctaaacaaatcttttattcaagagctgcgtaaggataaattcaatcccgttaatcagcccaaagaatcatccagaagcactgggtctagctcaggagttcagaaggccgtcacccgtactaagagaccaggtcttatgactaagtactcaacctcaaaaaagattaagccgaacaatccaaagcatactctggacatcttcttcaaatag

SEQ ID NO: 189997 - DNA, 5911 bp, Artificial Sequence
  derived and/or modified sequence
tacctccggctctcccgggtgacgacgggtagaaaagcaggaggagcggagaaaggagagggcggggtagggatgcagctgtgctgcattctgggaagggcgttggtccgtcgctcgcgcagcctcctgggagttgtagtcgcgatcctgaggtaacggataagtttataccatggatagcacaaaggagaagtgtgacagttacaaagatgatcttctgcttaggatgggacttaatgataataaagcaggaatggaaggattagataaagagaaaattaacaaaattataatggaagccacgaaggggtccagattttatggaaatgagctcaagaaagaaaagcaagtcaaccaacgaattgaaaatatgatgcaacaaaaagctcaaatcaccagccaacagctaagaaaagcacaattacaggttgacagatttgcaatggaattagaacaaagccgaaatttgagcaataccatagtgcacattgacatggatgctttctatgcagctgtagaaatgagggacaatccagaattgaaggataaacccattgctgtaggatcaatgagtatgctgtctacttcaaattaccatgcaaggagatttggtgttcgtgcagccatgccaggatttattgctaagaggctgtgcccacaacttataatagtgccccccaactttgacaaataccgagctgtgagtaaagaggttaaggaaatacttgctgattatgatcccaattttatggccatgagtcttgatgaagcctacttgaatataacaaagcacttagaagaaagacaaaattggcctgaggataaaagaaggtatttcatcaaaatgggaagctctgtagaaaatgataatccaggaaaggaagttaataaactgagtgagcatgaacgatccatctctccactactttttgaagagagtccttctgatgtgcagcccccaggagatcctttccaagtgaactttgaagaacaaaacaatcctcaaatactccaaaactcagttgtttttggaacatcagcccaggaagtggtaaaggaaattcgtttcagaattgagcagaaaacaacactgacagccagtgcaggcattgccccaaatacaatgttagcaaaagtatgcagtgataagaataaaccaaatggacaataccaaattcttcccaatagacaagctgtgatggacttcatcaaggatttacccattagaaaggtttctggaataggaaaagttacagagaaaatgttaaaggcccttggaattattacatgtacagaactttaccaacagagggcattgctttctctccttttctctgaaacatcttggcattatttccttcatatctccttgggtctaggttcaacacacctgacgagggatggagagaggaaaagtatgagcgttgagaggacattcagtgagataaataaagcggaagagcaatacagcctatgtcaagaactttgcagtgagcttgctcaggatctacagaaagaaagacttaagggtagaactgttaccattaagttgaagaatgtgaattttgaagtaaaaactcgtgcatctacagtttcatctgttgtttctactgcagaagaaatatttgccattgctaaggaattgctaaaaacagaaattgatgctgattttccacatcccttgagattaaggcttatgggtgttcggatatctagttttcccaatgaagaggacaggaaacaccaacaaaggagcattattggctttttacaggctggaaaccaagccctgtcagccactgagtgtacattagagaaaactgacaaagataagtttgtaaaacctctagaaatgtctcataagaagagtttctttgataaaaaacgatcagaaaggaaatggagtcaccaagatacatttaaatgtgaagccgtgaataaacaaagtttccagacatcacaaccattccaagttttaaagaagaagatgaatgagaatttggaaatatcagagaattcagatgactgtcagatacttacctgtcctgtttgctttagggctcaagggtgcatcagtctggaagccttgaataaacatgtagatgaatgtcttgatggaccttcaatcagtgaaaactttaaaatgttctcgtgttcacatgtttctgctaccaaagttaacaagaaagaaaatgttcctgcttcttcactttgtgagaagcaagattatgaagcccatccaaaaattaaagaaatatcttcagtagattgtatagctttagtagatactatagataactcatctaaagcagaaagcatagatgctttaagtaataagcatagcaaggaagaatgttctagtctcccaagcaagtcttttaatattgaacactgtcatcagaattcttcttctactgtttcattggaaaacgaagatgttggatcatttagacaagaataccgccagccttacttatgtgaagtgaaaacaggccaagctctagtttgtcctgtttgtaacgtagaacaaaagacttcagatctaaccctgttcaatgtgcatgtggatgtttgcttaaataaaagttttatccaagaattaagaaaggataaatttaacccagttaatcaacccaaagaaagctccagaagtactggtagctcaagtggagtacagaaggctgtaacaagaacaaaaaggccaggattgatgacaaagtactcaacatcaaagaaaataaaaccaaacaatcccaaacatacccttgatatattttttaagtaaacattgaacattttatcattaatttttaattgaaactagttattttataatcaatgaatttgttctttctgattttaagtttgcagatttatttagtgaaggcaagtgcaataatccttcctcagatgatgtttgcttttctaagatacatatactgattctgtgtatcttttttataaccatgagaattttacttccattatacatcaattggaaatcaatcctgttaagagataattcttaaaagggaaattaggaatgggataagaaggtgatttttttattatttttatactgaatataaaaacatttgtaagggctctcaaagattcacacatgcctatattatcataagaatttttcagcacttaactactttgttggcattgatcctagtgtctttaaatacttcatgagcattcataattaaaatttatcttaagttctatgaagagtattaatgtaactagcataagtggttttcttcaggaaaataaatatcacagtattatctgtgttaaaatggtttttgcctaaaatataatttttaatttggcttttcttatttaaaattccattatcttatgaataagcacttgaatcagtttttaaaatatttagtctaagatgattcaaagtagttttattttaatacaggacttttaaatggcagtatttcatttcttgtcaattatgttggtactttccacaaatctataaagaaggataaattgtaccatcattttattataatcctcaagagaaaatgtgtaattcaaaagattaatgtgtattaaaacacattatgtatcttagttacatttctatcagtacttttattaatatttgtgaaagaagacagcttaatagtagttagcttaagtagtttctccaagtacttttgtgctatcaatgagttcttctcaaaaaataattagttaggccaggcacaatggctcacacctgtaatgccagccctttgggaggccgaatgggcagatcacttgaggtcaggagtttgagaccagcctcgccaacatggtgagaccctgtctctactaaaacgataaaaaaaaaaaaaaaattagccaggcttggtggcacacgcctgtaatcccagctactcagatggctgaggcaggagaactacttgaacctgggaggtcaaagctgcagtcagccaagatcttgccactgtactccagcctgaagagcgagactctgtctcaataatataataatagttattatttaattgcaacatgaagttggaagccattttctgttacttctttaaggagctaaatcttttatatttttgttttctctccccttgcgtttcatattttagcttatgatctaaatatatattttgtatattataatattttaggaatagcttaattaagaactcacagactttgacaaagtggtaactagacttttaattactagattcttcaaattaggcttaatgcctgctagcatgccaatccaatcccatgactgatgttattatacactatggcaaatacaaagttgtagtattatggttcttgatggtgtgatttacttatgtaaattatgtacaaatttaagttcaatgaaacactgatttaatgtactgaaaggtaaatagtaccatagtgaattattttctgtcttgccttaggtttatttttattatcttcaatattagaataaatgctaaattattttcatttaaggatttatgtagttgaatattatcatttagtaatatttaatcatttgaaataaaatttaaagctttaattgatctaatagagatggttttctacttttccactcttcctccctcttatgccttcacttttgttttctgtgcccagaattttcttcacattctttactacctgttttgtctattatatccaacccattttctttttattataattttgatttggggcatttgaagaaaatacagcaaaactacaagaactggtaataagcatgcataatctcacctacttagtgaacctaatataaacctaatataaagaaccaccgtatttgcaatatatataactggtgaaaaactagtgtccagaatatataaatgatccctatgaatcagtaagaaaaagacagtcaatagaaatttggacaaaagactttatatggcatttcaagtgaaaggaaatccagatgaccaagaaacatgaaaatattcccagccatattaatatttgagaagtaaaaaataaaactacaaggaggtattacatctttaccttatttgcaaaaatgaaatgatctaatgatactaagttttggtgatgatgtcagctcttacattgaaaacaatcactgtggaaaaatttgtccctcagtaaatttaaagataaacatgctcaaaacctagcaattgcactctgaagtatacatctttgcaggttatctttcattacagttatttttttccctgtcaggaccctaactaatacaatgccttgggaaaactaatgaacatgtatcctaggaagcatgtacaagaaagttcttcccagtcaggaaggtggccaagaaaaaaattttttaatgttcatagcagcactgcaatatccaaaagttagaaatgaaccaaatattcagcaatggtagaatggttaaattgtaccatggcatttatattgaaacagtagaattctacacagtggtgaaaatgaaggaaatagctaaccacaacatagatgaatatcacagacatagcatagagcaaaagaagcaaatcacagaaggatgccatcaacatgattccatttgtataaagtttaaaacagtataaactgaacaactatattgttttaagggtatatagttatatatatgagatacaactgtaaagaaaagcaagtgttttgctgtccccagaaccagaataatgatttcctctgtggagaagtacagcagtgtgattggggagtggcacctggtgcttctgggatgctggcaatgttctatttcttgtcttgggtggtgattgcatggatgttcacttttaaaatactctttatacatatatattttatatattcttgttcatatataacctttataataaagagaaaaaaatggcaaaaa

SEQ ID NO: 189998 - DNA, 2727 bp, Artificial Sequence
  derived and/or modified sequence
atggatagcacaaaggagaagtgtgacagttacaaagatgatcttctgcttaggatgggacttaatgataataaagcaggaatggaaggattagataaagagaaaattaacaaaattataatggaagccacgaaggggtccagattttatggaaatgagctcaagaaagaaaagcaagtcaaccaacgaattgaaaatatgatgcaacaaaaagctcaaatcaccagccaacagctaagaaaagcacaattacagattaacatcaaattttaacattataaaagcaattctacagaggaacatttacattatgctacagtatcttcagttgtaccttcctgttcagcataaacatcatatgccaaagaggttgacagatttgcaatggaattagaacaaagccgaaatttgagcaataccatagtgcacattgacatggatgctttctatgcagctgtagaaatgagggacaatccagaattgaaggataaacccattgctgtaggatcaatgagtatgctgtctacttcaaattaccatgcaaggagatttggtgttcgtgcagccatgccaggatttattgctaagaggctgtgcccacaacttataatagtgccccccaactttgacaaataccgagctgtgagtaaagaggttaaggaaatacttgctgattatgatcccaattttatggccatgagtcttgatgaagcctacttgaatataacaaagcacttagaagaaagacaaaattggcctgaggataaaagaaggtatttcatcaaaatgggaagctctgtagaaaatgataatccaggaaaggaagttaataaactgagtgagcatgaacgatccatctctccactactttttgaagagagtccttctgatgtgcagcccccaggagatcctttccaagtgaactttgaagaacaaaacaatcctcaaatactccaaaactcagttgtttttggaacatcagcccaggaagtggtaaaggaaattcgtttcagaattgagcagaaaacaacactgacagccagtgcaggcattgccccaaatacaatgttagcaaaagtatgcagtgataagaataaaccaaatggacaataccaaattcttcccaatagacaagctgtgatggacttcatcaaggatttacccattagaaaggtttctggaataggaaaagttacagagaaaatgttaaaggcccttggaattattacatgtacagaactttaccaacagagggcattgctttctctccttttctctgaaacatcttggcattatttccttcatatctccttgggtctaggttcaacacacctgacgagggatggagagaggaaaagtatgagcgttgagaggacattcagtgagataaataaagcggaagagcaatacagcctatgtcaagaactttgcagtgagcttgctcaggatctacagaaagaaagacttaagggtagaactgttaccattaagttgaagaatgtgaattttgaagtaaaaactcgtgcatctacagtttcatctgttgtttctactgcagaagaaatatttgccattgctaaggaattgctaaaaacagaaattgatgctgattttccacatcccttgagattaaggcttatgggtgttcggatatctagttttcccaatgaagaggacaggaaacaccaacaaaggagcattattggctttttacaggctggaaaccaagccctgtcagccactgagtgtacattagagaaaactgacaaagataagtttgtaaaacctctagaaatgtctcataagaagagtttctttgataaaaaacgatcagaaaggaaatggagtcaccaagatacatttaaatgtgaagccgtgaataaacaaagtttccagacatcacaaccattccaagttttaaagaagaagatgaatgagaatttggaaatatcagagaattcagatgactgtcagatacttacctgtcctgtttgctttagggctcaagggtgcatcagtctggaagccttgaataaacatgtagatgaatgtcttgatggaccttcaatcagtgaaaactttaaaatgttctcgtgttcacatgtttctgctaccaaagttaacaagaaagaaaatgttcctgcttcttcactttgtgagaagcaagattatgaagcccatccaaaaattaaagaaatatcttcagtagattgtatagctttagtagatactatagataactcatctaaagcagaaagcatagatgctttaagtaataagcatagcaaggaagaatgttctagtctcccaagcaagtcttttaatattgaacactgtcatcagaattcttcttctactgtttcattggaaaacgaagatgttggatcatttagacaagaataccgccagccttacttatgtgaagtgaaaacaggccaagctctagtttgtcctgtttgtaacgtagaacaaaagacttcagatctaaccctgttcaatgtgcatgtggatgtttgcttaaataaaagttttatccaagaattaagaaaggataaatttaacccagttaatcaacccaaagaaagctccagaagtactggtagctcaagtggagtacagaaggctgtaacaagaacaaaaaggccaggattgatgacaaagtactcaacatcaaagaaaataaaaccaaacaatcccaaacatacccttgatatattttttaagtaa

SEQ ID NO: 189999 - DNA, 2613 bp, Artificial Sequence
  derived and/or modified sequence
atggacagtaccaaggagaagtgtgacagctacaaggacgatcttctgctgcggatgggactgaacgacaacaaagccggaatggaggggcttgacaaggagaaaattaacaagatcattatggaggccaccaagggctccagattttatggcaacgagttaaaaaaagaaaagcaagtgaaccaacgcatcgagaacatgatgcaacagaaagcccagattacctcccagcagctgcgcaaggctcagctgcaggtggatcgatttgctatggagctagagcaaagcaggaacctcagcaacactattgttcacattgacatggacgctttttacgccgctgtagaaatgcgggataacccggaactcaaagataagcccatcgcagtcggcagcatgagcatgctgtccacaagtaattatcacgccagacgtttcggcgtgcgcgcagccatgccaggctttatcgccaagagactgtgcccacaattgatcatcgttcctcctaattttgacaaataccgggcagtcagtaaggaggtgaaagagatcctggctgattatgacccgaatttcatggccatgagtttggacgaggcttatctgaatatcaccaaacatctggaagaacgtcagaattggccggaggataaacggagatacttcatcaagatgggatcctccgtggagaacgataatcccggaaaagaagttaacaagttgagtgaacacgagcggagcatttctccactcctgtttgaggaaagcccttctgacgttcagcccccaggcgatccttttcaagtgaactttgaggaacaaaacaacccacagatcttgcagaacagtgtcgtcttcggcacctcggctcaagaagtggtgaaggaaatccggttccgaatagagcagaaaacaacgctcactgcatccgctgggatcgcccctaacacaatgctagcgaaggtctgttctgataagaataaacctaatggacaatatcaaatactgcctaacaggcaagcagttatggatttcatcaaggatcttccgattcgaaaggtgtctgggatcgggaaagtgaccgagaagatgcttaaggcgttgggtataattacatgcaccgaactctaccagcagcgggctctgctttctctgctgttttctgaaacctcatggcactatttcctgcatatctccctgggcctgggcagcacacacctgacacgggacggcgagcgaaaaagcatgagcgtagagaggaccttcagtgagatcaacaaggcggaggagcaatattcactgtgccaagaactgtgctcagagctggctcaggacttgcagaaagaacgtttaaagggaagaactgttactataaagctgaaaaatgtaaactttgaggtgaagactagagccagtaccgtgagctccgttgtcagcaccgcggaagagattttcgccattgccaaagaactgctgaaaactgaaatcgatgctgatttcccccacccattgcggctccgcctgatgggcgtacgcatctctagcttccctaacgaggaagatcgcaaacaccagcaacggagcatcattggttttcttcaggcaggaaaccaggccctgtccgccaccgagtgcaccttggagaaaaccgacaaggacaaattcgtcaagcccctggagatgagccacaaaaaaagcttctttgataagaaaagatctgagagaaagtggtcccatcaggatacttttaaatgcgaggcggtgaataagcagagtttccagacatcacagccctttcaagtactgaaaaaaaaaatgaacgagaatctggagatcagtgagaacagcgacgactgtcagatcctcacatgccctgtatgcttcagggcccaggggtgtatttccctggaagcgttgaacaaacatgtcgacgagtgcctggacggccctagtatttccgaaaattttaagatgttctcatgttcacacgtctccgccactaaggtgaacaagaaagagaatgttcccgcttccagtctctgcgagaaacaggactacgaagcccacccgaaaatcaaagaaatctctagcgtggattgcatcgcactggttgataccattgacaattccagcaaggctgaaagtatagatgccctgagcaataaacatagcaaggaagagtgcagttcactccctagcaaatcctttaatatcgagcactgccatcaaaattcctccagcacagtgtccctggaaaacgaggatgtaggtagctttcgccaggaataccggcagccgtacttgtgcgaggtaaaaaccggccaggctctcgtttgccctgtttgcaatgtggagcaaaagaccagcgatctcacgctgtttaatgtccacgtggatgtgtgccttaacaaaagctttatccaggagctacgaaaggataagtttaatcctgtgaaccagcctaaggaaagtagcaggagcacgggttcttcttctggtgtacagaaagccgtgaccagaacaaagcgtcctggtctgatgaccaagtactctacttctaagaagatcaagcctaataacccaaagcatactttggacatcttctttaagtag

SEQ ID NO: 190000 - DNA, 2343 bp, Artificial Sequence
  derived and/or modified sequence
atggaactagagcagtctcgcaatctgtcaaacaccatcgtgcacatcgacatggacgccttctacgccgcagttgagatgcgcgataacccagagctgaaagataagccaatcgcagttggcagcatgagcatgctaagtacatcgaactaccatgcccgaaggttcggtgtaagggcagcaatgcccggtttcatcgccaaacggctatgtcctcaactgatcatcgtgccccctaacttcgataaataccgagcagtttctaaagaggtgaaggagatactcgccgattacgacccgaactttatggctatgagcctggacgaggcctacttgaatataacaaaacacctggaggaaaggcagaactggccagaagacaagaggcggtatttcatcaagatgggtagttcggtcgaaaacgacaaccccggtaaggaggtgaataagttatctgagcacgaacgctctatctctcccctcctatttgaggaatccccttcggatgtccagccccctggagatcccttccaggtaaattttgaagaacaaaataacccacaaatcctgcagaatagcgtcgtgttcggaacttcggctcaggaggtggtgaaagagatcaggtttcggatcgaacagaagactacactcactgccagcgcaggtatcgctcccaacactatgctggccaaagtgtgcagcgataagaataagccgaacggccaatatcaaattctgcctaaccggcaggctgtgatggatttcatcaaagatttgcctatccgtaaggtatccggaatcggaaaagtcaccgaaaagatgttgaaggctctgggcatcattacctgcaccgagctttaccagcagcgcgctctcctatcgctccttttctctgaaacatcttggcattattttctccacatttcccttggcctgggcagtacacacttaacgagagatggagagcgaaaatcaatgtctgttgaacgcactttcagtgagatcaacaaagctgaagagcagtactccttgtgtcaggagttatgctcagaactggcccaagatctgcagaaagaaaggctaaaagggaggacagtgaccattaaactcaaaaacgtgaattttgaagtgaaaacccgcgctagtacggttagcagtgtagtctccacagccgaggagatttttgctattgccaaggagctgctgaagactgagatcgatgccgacttccctcaccccctccgacttcgcttgatgggggtgcggatctcctctttccctaatgaagaagaccggaagcaccaacagcgttcaatcattggctttctgcaggccggtaaccaggccttaagcgccacagagtgcacattggagaaaaccgacaaggataagtttgtgaaacctctggagatgagtcataagaagtcttttttcgacaagaaacgctcggagaggaaatggtcccaccaggacacgtttaagtgcgaggccgtgaacaagcagtcattccaaacttcccagccatttcaggtgttaaaaaagaaaatgaacgagaatctagagatctccgaaaattccgacgattgtcagattctaacctgtcccgtctgtttcagggcccagggctgcatcagcctggaagccttgaacaagcacgtggatgaatgcctggacggcccttccatctccgaaaattttaagatgttttcctgctcccatgtgtcggccacgaaagtcaacaaaaaggaaaatgttccagcctcaagcttatgtgagaagcaggactacgaggcccatccaaaaattaaagagattagctccgtggactgtatcgctctggtggataccattgataacagctcaaaggctgagagtattgacgctctgtcaaataagcacagcaaagaagagtgctcaagcctgccgagtaagtcttttaacatagaacattgtcatcaaaattccagctcaaccgtgtccctggagaatgaagatgtgggctcttttagacaggagtatcgccagccttacttatgtgaggtgaaaacaggccaggcccttgtatgccccgtgtgcaatgtcgagcagaagaccagtgacctgactctgttcaatgtccacgttgacgtgtgcctcaataagagctttatacaagagttgagaaaagacaaattcaaccccgtgaatcagcctaaggagagcagccggagtaccggatcttcatctggcgttcagaaggccgttacccgtacaaaacgaccgggtctcatgaccaagtacagcacatctaaaaaaatcaagcccaacaatcccaagcatacattggatatattctttaagtag

SEQ ID NO: 190001 - DNA, 2613 bp, Artificial Sequence
  derived and/or modified sequence
atggacagcaccaaggagaagtgcgacagctacaaggacgacctgctgctgagaatgggcctgaacgacaacaaggccggcatggagggcctggacaaggagaagatcaacaagatcatcatggaggccaccaagggcagcagattctacggcaacgagctgaagaaggagaagcaggtgaaccagagaatcgagaacatgatgcagcagaaggcccagatcaccagccagcagctgagaaaggcccagctgcaggtggacagattcgccatggagctggagcagagcagaaacctgagcaacaccatcgtgcacatcgacatggacgccttctacgccgccgtggagatgagagacaaccccgagctgaaggacaagcccatcgccgtgggcagcatgagcatgctgagcaccagcaactaccacgccagaagattcggcgtgagagccgccatgcccggcttcatcgccaagagactgtgcccccagctgatcatcgtgccccccaacttcgacaagtacagagccgtgagcaaggaggtgaaggagatcctggccgactacgaccccaacttcatggccatgagcctggacgaggcctacctgaacatcaccaagcacctggaggagagacagaactggcccgaggacaagagaagatacttcatcaagatgggcagcagcgtggagaacgacaaccccggcaaggaggtgaacaagctgagcgagcacgagagaagcatcagccccctgctgttcgaggagagccccagcgacgtgcagccccccggcgaccccttccaggtgaacttcgaggagcagaacaacccccagatcctgcagaacagcgtggtgttcggcaccagcgcccaggaggtggtgaaggagatcagattcagaatcgagcagaagaccaccctgaccgccagcgccggcatcgcccccaacaccatgctggccaaggtgtgcagcgacaagaacaagcccaacggccagtaccagatcctgcccaacagacaggccgtgatggacttcatcaaggacctgcccatcagaaaggtgagcggcatcggcaaggtgaccgagaagatgctgaaggccctgggcatcatcacctgcaccgagctgtaccagcagagagccctgctgagcctgctgttcagcgagaccagctggcactacttcctgcacatcagcctgggcctgggcagcacccacctgaccagagacggcgagagaaagagcatgagcgtggagagaaccttcagcgagatcaacaaggccgaggagcagtacagcctgtgccaggagctgtgcagcgagctggcccaggacctgcagaaggagagactgaagggcagaaccgtgaccatcaagctgaagaacgtgaacttcgaggtgaagaccagagccagcaccgtgagcagcgtggtgagcaccgccgaggagatcttcgccatcgccaaggagctgctgaagaccgagatcgacgccgacttcccccaccccctgagactgagactgatgggcgtgagaatcagcagcttccccaacgaggaggacagaaagcaccagcagagaagcatcatcggcttcctgcaggccggcaaccaggccctgagcgccaccgagtgcaccctggagaagaccgacaaggacaagttcgtgaagcccctggagatgagccacaagaagagcttcttcgacaagaagagaagcgagagaaagtggagccaccaggacaccttcaagtgcgaggccgtgaacaagcagagcttccagaccagccagcccttccaggtgctgaagaagaagatgaacgagaacctggagatcagcgagaacagcgacgactgccagatcctgacctgccccgtgtgcttcagagcccagggctgcatcagcctggaggccctgaacaagcacgtggacgagtgcctggacggccccagcatcagcgagaacttcaagatgttcagctgcagccacgtgagcgccaccaaggtgaacaagaaggagaacgtgcccgccagcagcctgtgcgagaagcaggactacgaggcccaccccaagatcaaggagatcagcagcgtggactgcatcgccctggtggacaccatcgacaacagcagcaaggccgagagcatcgacgccctgagcaacaagcacagcaaggaggagtgcagcagcctgcccagcaagagcttcaacatcgagcactgccaccagaacagcagcagcaccgtgagcctggagaacgaggacgtgggcagcttcagacaggagtacagacagccctacctgtgcgaggtgaagaccggccaggccctggtgtgccccgtgtgcaacgtggagcagaagaccagcgacctgaccctgttcaacgtgcacgtggacgtgtgcctgaacaagagcttcatccaggagctgagaaaggacaagttcaaccccgtgaaccagcccaaggagagcagcagaagcaccggcagcagcagcggcgtgcagaaggccgtgaccagaaccaagagacccggcctgatgaccaagtacagcaccagcaagaagatcaagcccaacaaccccaagcacaccctggacatcttcttcaagtag

SEQ ID NO: 190002 - DNA, 2343 bp, Artificial Sequence
  derived and/or modified sequence
atggagctggagcagagcagaaacctgagcaacaccatcgtgcacatcgacatggacgccttctacgccgccgtggagatgagagacaaccccgagctgaaggacaagcccatcgccgtgggcagcatgagcatgctgagcaccagcaactaccacgccagaagattcggcgtgagagccgccatgcccggcttcatcgccaagagactgtgcccccagctgatcatcgtgccccccaacttcgacaagtacagagccgtgagcaaggaggtgaaggagatcctggccgactacgaccccaacttcatggccatgagcctggacgaggcctacctgaacatcaccaagcacctggaggagagacagaactggcccgaggacaagagaagatacttcatcaagatgggcagcagcgtggagaacgacaaccccggcaaggaggtgaacaagctgagcgagcacgagagaagcatcagccccctgctgttcgaggagagccccagcgacgtgcagccccccggcgaccccttccaggtgaacttcgaggagcagaacaacccccagatcctgcagaacagcgtggtgttcggcaccagcgcccaggaggtggtgaaggagatcagattcagaatcgagcagaagaccaccctgaccgccagcgccggcatcgcccccaacaccatgctggccaaggtgtgcagcgacaagaacaagcccaacggccagtaccagatcctgcccaacagacaggccgtgatggacttcatcaaggacctgcccatcagaaaggtgagcggcatcggcaaggtgaccgagaagatgctgaaggccctgggcatcatcacctgcaccgagctgtaccagcagagagccctgctgagcctgctgttcagcgagaccagctggcactacttcctgcacatcagcctgggcctgggcagcacccacctgaccagagacggcgagagaaagagcatgagcgtggagagaaccttcagcgagatcaacaaggccgaggagcagtacagcctgtgccaggagctgtgcagcgagctggcccaggacctgcagaaggagagactgaagggcagaaccgtgaccatcaagctgaagaacgtgaacttcgaggtgaagaccagagccagcaccgtgagcagcgtggtgagcaccgccgaggagatcttcgccatcgccaaggagctgctgaagaccgagatcgacgccgacttcccccaccccctgagactgagactgatgggcgtgagaatcagcagcttccccaacgaggaggacagaaagcaccagcagagaagcatcatcggcttcctgcaggccggcaaccaggccctgagcgccaccgagtgcaccctggagaagaccgacaaggacaagttcgtgaagcccctggagatgagccacaagaagagcttcttcgacaagaagagaagcgagagaaagtggagccaccaggacaccttcaagtgcgaggccgtgaacaagcagagcttccagaccagccagcccttccaggtgctgaagaagaagatgaacgagaacctggagatcagcgagaacagcgacgactgccagatcctgacctgccccgtgtgcttcagagcccagggctgcatcagcctggaggccctgaacaagcacgtggacgagtgcctggacggccccagcatcagcgagaacttcaagatgttcagctgcagccacgtgagcgccaccaaggtgaacaagaaggagaacgtgcccgccagcagcctgtgcgagaagcaggactacgaggcccaccccaagatcaaggagatcagcagcgtggactgcatcgccctggtggacaccatcgacaacagcagcaaggccgagagcatcgacgccctgagcaacaagcacagcaaggaggagtgcagcagcctgcccagcaagagcttcaacatcgagcactgccaccagaacagcagcagcaccgtgagcctggagaacgaggacgtgggcagcttcagacaggagtacagacagccctacctgtgcgaggtgaagaccggccaggccctggtgtgccccgtgtgcaacgtggagcagaagaccagcgacctgaccctgttcaacgtgcacgtggacgtgtgcctgaacaagagcttcatccaggagctgagaaaggacaagttcaaccccgtgaaccagcccaaggagagcagcagaagcaccggcagcagcagcggcgtgcagaaggccgtgaccagaaccaagagacccggcctgatgaccaagtacagcaccagcaagaagatcaagcccaacaaccccaagcacaccctggacatcttcttcaagtag

SEQ ID NO: 190003 - protein, 699 aa, Artificial Sequence
  derived and/or modified sequence
MAACEGRRSGALGSSQSDFLTPPVGGAPWAVATTVVMYPPPPPPPHRDFISVTLSFGENYDNSKSWRRRSCWRKWKQLSRLQRNMILFLLAFLLFCGLLFYINLADHWKALAFRLEEEQKMRPEIAGLKPANPPVLPAPQKADTDPENLPEISSQKTQRHIQRGPPHLQIRPPSQDLKDGTQEEATKRQEAPVDPRPEGDPQRTVISWRGAVIEPEQGTELPSRRAEVPTKPPLPPARTQGTPVHLNYRQKGVIDVFLHAWKGYRKFAWGHDELKPVSRSFSEWFGLGLTLIDALDTMWILGLRKEFEEARKWVSKKLHFEKDVDVNLFESTIRILGGLLSAYHLSGDSLFLRKAEDFGNRLMPAFRTPSKIPYSDVNIGTGVAHPPRWTSDSTVAEVTSIQLEFRELSRLTGDKKFQEAVEKVTQHIHGLSGKKDGLVPMFINTHSGLFTHLGVFTLGARADSYYEYLLKQWIQGGKQETQLLEDYVEAIEGVRTHLLRHSEPSKLTFVGELAHGRFSAKMDHLVCFLPGTLALGVYHGLPASHMELAQELMETCYQMNRQMETGLSPEIVHFNLYPQPGRRDVEVKPADRHNLLRPETVESLFYLYRVTGDRKYQDWGWEILQSFSRFTRVPSGGYSSINNVQDPQKPEPRDKMESFFLGETLKYLFLLFSDDPNLLSLDAYVFNTEAHPLPIWTPA

SEQ ID NO: 190004 - protein, 402 aa, Artificial Sequence
  derived and/or modified sequence
MWILGLRKEFEEARKWVSKKLHFEKDVDVNLFESTIRILGGLLSAYHLSGDSLFLRKAEDFGNRLMPAFRTPSKIPYSDVNIGTGVAHPPRWTSDSTVAEVTSIQLEFRELSRLTGDKKFQEAVEKVTQHIHGLSGKKDGLVPMFINTHSGLFTHLGVFTLGARADSYYEYLLKQWIQGGKQETQLLEDYVEAIEGVRTHLLRHSEPSKLTFVGELAHGRFSAKMDHLVCFLPGTLALGVYHGLPASHMELAQELMETCYQMNRQMETGLSPEIVHFNLYPQPGRRDVEVKPADRHNLLRPETVESLFYLYRVTGDRKYQDWGWEILQSFSRFTRVPSGGYSSINNVQDPQKPEPRDKMESFFLGETLKYLFLLFSDDPNLLSLDAYVFNTEAHPLPIWTPA

SEQ ID NO: 190005 - DNA, 2100 bp, Artificial Sequence
  derived and/or modified sequence
atggcagcttgcgaaggccgccgatctggcgctctaggctccagtcagtccgatttccttacacccccagttgggggtgcgccttgggcagtggctacaaccgttgtgatgtacccacctcctcctcctccccctcaccgggattttatctctgtcaccctgtcctttggcgagaactatgacaattccaagagctggcggagacgcagctgttggcgcaagtggaaacagttgtccaggctacaaaggaacatgattttgtttctgctggccttcctgctgttttgtgggctgttgttctacatcaacttagctgaccactggaaggcgctggctttccgattggaggaggaacagaagatgcgacccgagatagccggcctcaagcccgcgaatcctccggtgctccctgctccacagaaagccgatacggacccggagaacttacccgagatatcctcacaaaagacccagcgacacatccagcgcggacccccacatctgcaaattagacccccttctcaagatctgaaggatggcacccaggaggaggctactaagcgtcaagaggcgcctgttgaccctcgaccagaaggcgatccacagaggaccgtgatctcgtggcgcggggcggtaatcgaacccgagcaagggaccgaattgccctctcgccgcgctgaagtgcccaccaagcctcctctcccccctgcccgaacgcagggaacacctgtccacttgaactaccgccaaaaaggggtgattgacgtgttcctccatgcctggaaaggctaccgcaagtttgcatggggccacgacgagctcaaacctgtctctcggtcattttctgagtggttcgggttgggacttaccttaatcgacgcactagatactatgtggatcctgggactgcgcaaggaatttgaggaagcgaggaaatgggtgagtaaaaagcttcactttgagaaggatgttgatgttaacctattcgagtccaccatcaggatccttggcggactgttaagcgcctatcacctgtccggggattctttattccttcgtaaggccgaggactttggcaatcgcttaatgccagcgttcaggactccctcaaagatcccttatagtgatgtcaacatcgggacaggcgtcgcacaccccccacgttggacctctgactcaaccgttgctgaggtgacttccatccagttggaatttagagagttgagccgcctgaccggggacaaaaagtttcaggaagccgtggagaaggtcacacagcatatccatggtctgtctggaaagaaagacgggctggtcccaatgtttataaatacacattcaggactgtttacccatctgggagtgttcactttaggagctagggccgactcctactatgaatatctgcttaaacaatggattcagggcgggaagcaggagactcaactgttggaggattatgttgaggcaattgagggcgttcgcacccacttgctgagacacagcgagccatctaagctaactttcgtaggagaactggctcacgggcggttttccgccaaaatggaccacctcgtttgtttcctgcctggcacccttgcgctcggtgtgtaccacggactgcctgcctcccacatggaactggcacaagagctaatggaaacctgctatcagatgaaccggcagatggaaaccggcctttctcctgaaatcgtacatttcaacctttacccacagcctggtcgcagagatgtggaagtgaagccggcggaccgacataatcttttacgtccagaaaccgtggaatccctgttctacctgtacagagtaacaggagaccggaagtatcaggactggggatgggagattctccagagtttctcgagattcacgcgggtaccaagcggagggtattcctccattaacaacgtacaggatccccagaaaccggaaccaagagacaaaatggaaagtttcttcctgggtgaaacccttaaatatttgtttctgctgttctcggacgatcctaacttactttcgctggacgcatatgtgtttaacaccgaagcgcacccactgcctatttggactcctgcctag

SEQ ID NO: 190006 - DNA, 1209 bp, Artificial Sequence
  derived and/or modified sequence
atgtggattctggggctacggaaggaattcgaggaggccagaaagtgggtctccaagaagctccatttcgaaaaagacgtagacgtgaacctatttgagagcacaatacggatacttggcggcctcttgtccgcttatcatctctcaggggacagccttttcttacgcaaagctgaagatttcggtaatcggttaatgcccgccttcaggaccccctccaagatcccatactcagatgttaatattgggacaggcgtcgcacacccgccccgctggactagtgatagcacagtagcagaggtaacttccatccagctggagtttagggagctctcacgccttaccggggacaagaaattccaggaggctgtggagaaagtaacacagcacatccacggtttgtcaggcaaaaaggatggtctggtccccatgttcataaatactcactcgggcctctttacacacttgggagtttttaccttaggagcaagggccgactcttactatgaatacttgctcaagcagtggatccaagggggcaaacaggaaacccagctgctagaagactacgtagaggcgattgagggggtacggacacacctgctgaggcatagtgaacccagtaagctcaccttcgttggcgaattggcgcatggccgtttttcagccaagatggatcacctggtgtgttttctgccaggaactcttgcactgggtgtgtatcacgggctgccggccagtcacatggagctggcccaggagctgatggaaacctgttatcagatgaatagacaaatggaaaccggcctgagtccagaaatcgtgcactttaatctgtacccacagccaggccggagagatgtggaagttaaacccgccgacagacataacttactgcgccccgagacagtggagagcctgttctacctgtaccgcgtgactggtgatagaaagtatcaggactggggttgggagatacttcagtccttctctaggtttacacgggtgccttccggcggctactcgtccatcaacaacgttcaggatccccagaagcccgagccacgagataagatggagtctttctttttgggagagacattaaagtatctgtttttactgttctccgatgaccccaacctcctatccttggacgcatatgtgtttaataccgaggcacaccctctgcctatttggacaccggcgtag

SEQ ID NO: 190007 - DNA, 2100 bp, Artificial Sequence
  derived and/or modified sequence
atggccgcctgtgagggcagaagaagtggggccctgggcagcagccagagcgacttcctgaccccacctgtgggcggggccccctgggccgtggccaccaccgtggtgatgtacccacctcctcctcctccaccccaccgggacttcatctctgtgaccctgagctttggagagaactatgacaacagcaagtcctggaggcggcgcagctgctggaggaagtggaagcagctgagccggctgcagaggaacatgatcctcttcctgctggccttcctgctcttctgtggcctgctcttctacatcaacctggccgaccactggaaggccctggccttccggctggaggaggagcagaagatgaggcctgagattgctggcctgaagccagccaacccccctgtgctgcctgccccccagaaggctgacacagatcctgagaacctgcctgagatcagcagccagaagacccagaggcacatccagaggggccccccccacctgcagatccggccccccagccaggacctgaaggatggcacccaggaggaggccaccaagaggcaggaggcccctgtggaccccaggcctgagggggacccccagaggacagtcatctcctggagaggagctgtgattgagcctgagcagggcacagagctgcccagccggcgggcagaggtgcccaccaagccacccctgcccccagcccggacccagggcacccctgtgcacctgaactaccggcagaagggcgtgattgatgtgttcctgcacgcctggaagggctacaggaagtttgcctggggccatgatgagctgaagcctgtgagccgctccttcagcgagtggtttggcctgggcctgaccctgattgatgccctggacaccatgtggatcctgggcctgaggaaggagtttgaggaggccaggaagtgggtgtccaagaagctgcactttgagaaggatgtggatgtgaacctgtttgagagcaccatccgcatcctgggcggcctgctgagcgcctaccacctgagcggggacagcctcttcctgaggaaggccgaggactttggaaaccggctgatgcctgccttccgcacccccagcaagatcccctacagtgatgtgaacattggaactggagtggcccaccccccacgctggaccagtgacagcacagtggccgaggtgaccagcatccagctggagttccgggagctgagccggctgaccggggacaagaagttccaggaggccgtggagaaggtgacccagcacatccacggcctgagcggcaagaaggatggcctggtgcccatgttcatcaacacccacagcggcctcttcacccacctgggcgtcttcaccctgggcgcccgggctgacagctactatgagtacctgctgaagcagtggatccagggcggcaagcaggagacccagctgctggaggactatgtggaggccattgaaggagtgaggacccacctgctgcggcacagcgagcccagcaagctgacctttgtgggggagctggcccacggccgcttcagcgccaagatggaccacctggtgtgcttcctgcccggcaccctggccctgggcgtgtaccacggcctgcctgccagccacatggagctggcccaggagctgatggagacctgctaccagatgaaccggcagatggagaccggcctgagccctgagatcgtgcacttcaacctgtacccccagcccggcagaagagatgtggaggtgaagccagctgacagacacaacctgctgcggcctgagaccgtggagagcctcttctacctgtacagagtgactggagacaggaagtaccaggactggggctgggagatcctgcagagcttcagccgcttcaccagggtgcccagcggcggctacagcagcatcaacaacgtgcaggacccccagaagccagagccccgggacaagatggagagcttcttcctgggggagaccctgaagtacctgttcctgctcttcagtgatgaccccaacctgctgagcctggatgcctacgtgttcaacacagaggcccaccccctgcccatctggaccccagcctag

SEQ ID NO: 190008 - DNA, 1209 bp, Artificial Sequence
  derived and/or modified sequence
atgtggatcctgggcctgaggaaggagtttgaggaggccaggaagtgggtgtccaagaagctgcactttgagaaggatgtggatgtgaacctgtttgagagcaccatccgcatcctgggcggcctgctgagcgcctaccacctgagcggggacagcctcttcctgaggaaggcagaagattttggaaaccggctgatgcctgccttccgcacccccagcaagatcccctacagtgatgtgaacatcggcaccggggtggcccaccccccacgctggaccagtgacagcacagtggccgaggtgaccagcatccagctggagttccgggagctgagccggctgactggagacaagaagttccaggaggccgtggagaaggtgacccagcacatccacggcctgagcggcaagaaggatggcctggtgcccatgttcatcaacacccacagcggcctcttcacccacctgggcgtcttcaccctgggcgcccgggctgacagctactatgagtacctgctgaagcagtggatccagggcggcaagcaggagacccagctgctggaggactatgtggaggccatcgagggcgtgaggacccacctgctgcggcacagcgagcccagcaagctgacctttgtgggggagctggcccacggccgcttcagcgccaagatggaccacctggtgtgcttcctgcccggcaccctggccctgggcgtgtaccacggcctgcctgccagccacatggagctggcccaggagctgatggagacctgctaccagatgaaccggcagatggagaccggcctgagccctgagatcgtgcacttcaacctgtacccccagcctggaagaagagatgtggaggtgaagccagctgacagacacaacctgctgcggcctgagaccgtggagagcctcttctacctgtacagagtgactggagacaggaagtaccaggactggggctgggagatcctgcagagcttcagccgcttcaccagggtgcccagcggcggctacagcagcatcaacaacgtgcaggacccccagaagccagagccccgggacaagatggagagcttcttcctgggggagaccctgaagtacctgttcctgctcttcagtgatgaccccaacctgctgagcctggatgcctacgtgttcaacacagaggcccaccccctgcccatctggaccccagcctag

SEQ ID NO: 190009 - DNA, 2765 bp, Artificial Sequence
  derived and/or modified sequence
actggccgcatagagacgcagcgcacgcgcagtcgcgtatccgtgtgatgggcgggctgttgacggcgctgcgatggctgcctgcgagggcaggagaagcggagctctcggttcctctcagtcggacttcctgacgccgccagtgggcggggccccttgggccgtcgccaccactgtagtcatgtacccaccgccgccgccgccgcctcatcgggacttcatctcggtgacgctgagctttggcgagaactatgacaacagcaagagttggcggcggcgctcgtgctggaggaaatggaagcaactgtcgagattgcagcggaatatgattctcttcctccttgcctttctgcttttctgtggactcctcttctacatcaacttggctgaccattggaaagctctggctttcaggctagaggaagagcagaagatgaggccagaaattgctgggttaaaaccagcaaatccacccgtcttaccagctcctcagaaggcggacaccgaccctgagaacttacctgagatttcgtcacagaagacacaaagacacatccagcggggaccacctcacctgcagattagacccccaagccaagacctgaaggatgggacccaggaggaggccacaaaaaggcaagaagcccctgtggatccccgcccggaaggagatccgcagaggacagtcatcagctggaggggagcggtgatcgagcctgagcagggcaccgagctcccttcaagaagagcagaagtgcccaccaagcctcccctgccaccggccaggacacagggcacaccagtgcatctgaactatcgccagaagggcgtgattgacgtcttcctgcatgcatggaaaggataccgcaagtttgcatggggccatgacgagctgaagcctgtgtccaggtccttcagtgagtggtttggcctcggtctcacactgatcgacgcgctggacaccatgtggatcttgggtctgaggaaagaatttgaggaagccaggaagtgggtgtcgaagaagttacactttgaaaaggacgtggacgtcaacctgtttgagagcacgatccgcatcctgggggggctcctgagtgcctaccacctgtctggggacagcctcttcctgaggaaagctgaggattttggaaatcggctaatgcctgccttcagaacaccatccaagattccttactcggatgtgaacatcggtactggagttgcccacccgccacggtggacctccgacagcactgtggccgaggtgaccagcattcagctggagttccgggagctctcccgtctcacaggggataagaagtttcaggaggcagtggagaaggtgacacagcacatccacggcctgtctgggaagaaggatgggctggtgcccatgttcatcaatacccacagtggcctcttcacccacctgggcgtattcacgctgggcgccagggccgacagctactatgagtacctgctgaagcagtggatccagggcgggaagcaggagacacagctgctggaagactacgtggaagccatcgagggtgtcagaacgcacctgctgcggcactccgagcccagtaagctcacctttgtgggggagcttgcccacggccgcttcagtgccaagatggaccacctggtgtgcttcctgccagggacgctggctctgggcgtctaccacggcctgcccgccagccacatggagctggcccaggagctcatggagacttgttaccagatgaaccggcagatggagacggggctgagtcccgagatcgtgcacttcaacctttacccccagccgggccgtcgggacgtggaggtcaagccagcagacaggcacaacctgctgcggccagagaccgtggagagcctgttctacctgtaccgcgtcacaggggaccgcaaataccaggactggggctgggagattctgcagagcttcagccgattcacacgggtcccctcgggtggctattcttccatcaacaatgtccaggatcctcagaagcccgagcctagggacaagatggagagcttcttcctgggggagacgctcaagtatctgttcttgctcttctccgatgacccaaacctgctcagcctggatgcctacgtgttcaacaccgaagcccaccctctgcctatctggacccctgcctagggtggatggctgctggtgtggggacttcgggtgggcagaggcaccttgctgggtctgtggcattttccaagggcccacgtagcaccggcaaccgccaagtggcccaggctctgaactggctctgggctcctcctcgtctctgctttaatcaggacaccgtgaggacaagtgaggccgtcagtcttggtgtgatgcggggtgggctgggccgctggagcctccgcctgcttcctccagaagacacgaatcatgactcacgattgctgaagcctgagcaggtctctgtgggccgaccagaggggggcttcgaggtggtccctggtactggggtgaccgagtggacagcccagggtgcagctctgcccgggctcgtgaagcctcagatgtccccaatccaagggtctggaggggctgccgtgactccagaggcctgaggctccagggctggctctggtgtttacaagctggactcagggatcctcctggccgccccgcagggggcttggagggctggacggcaagtccgtctagctcacgggcccctccagtggaatgggtcttttcggtggagataaaagttgatttgctctaa

SEQ ID NO: 190010 - DNA, 2336 bp, Artificial Sequence
  derived and/or modified sequence
attctttttgaagaccagccatggccagttccggttttacttctgactgtgcagtgttgaataagacagacctgtttcctctcaagaggccacagctggtaggagaggctgaagacacaaagacacatccagcggggaccacctcacctgcagattagacccccaagccaagacctgaaggatgggacccaggaggaggccacaaaaaggcaagaagcccctgtggatccccgcccggaaggagatccgcagaggacagtcatcagctggaggggagcggtgatcgagcctgagcagggcaccgagctcccttcaagaagagcagaagtgcccaccaagcctcccctgccaccggccaggacacagggcacaccagtgcatctgaactatcgccagaagggcgtgattgacgtcttcctgcatgcatggaaaggataccgcaagtttgcatggggccatgacgagctgaagcctgtgtccaggtccttcagtgagtggtttggcctcggtctcacactgatcgacgcgctggacaccatgtggatcttgggtctgaggaaagaatttgaggaagccaggaagtgggtgtcgaagaagttacactttgaaaaggacgtggacgtcaacctgtttgagagcacgatccgcatcctgggggggctcctgagtgcctaccacctgtctggggacagcctcttcctgaggaaagctgaggattttggaaatcggctaatgcctgccttcagaacaccatccaagattccttactcggatgtgaacatcggtactggagttgcccacccgccacggtggacctccgacagcactgtggccgaggtgaccagcattcagctggagttccgggagctctcccgtctcacaggggataagaagtttcaggaggcagtggagaaggtgacacagcacatccacggcctgtctgggaagaaggatgggctggtgcccatgttcatcaatacccacagtggcctcttcacccacctgggcgtattcacgctgggcgccagggccgacagctactatgagtacctgctgaagcagtggatccagggcgggaagcaggagacacagctgctggaagactacgtggaagccatcgagggtgtcagaacgcacctgctgcggcactccgagcccagtaagctcacctttgtgggggagcttgcccacggccgcttcagtgccaagatggaccacctggtgtgcttcctgccagggacgctggctctgggcgtctaccacggcctgcccgccagccacatggagctggcccaggagctcatggagacttgttaccagatgaaccggcagatggagacggggctgagtcccgagatcgtgcacttcaacctttacccccagccgggccgtcgggacgtggaggtcaagccagcagacaggcacaacctgctgcggccagagaccgtggagagcctgttctacctgtaccgcgtcacaggggaccgcaaataccaggactggggctgggagattctgcagagcttcagccgattcacacgggtcccctcgggtggctattcttccatcaacaatgtccaggatcctcagaagcccgagcctagggacaagatggagagcttcttcctgggggagacgctcaagtatctgttcttgctcttctccgatgacccaaacctgctcagcctggatgcctacgtgttcaacaccgaagcccaccctctgcctatctggacccctgcctagggtggatggctgctggtgtggggacttcgggtgggcagaggcaccttgctgggtctgtggcattttccaagggcccacgtagcaccggcaaccgccaagtggcccaggctctgaactggctctgggctcctcctcgtctctgctttaatcaggacaccgtgaggacaagtgaggccgtcagtcttggtgtgatgcggggtgggctgggccgctggagcctccgcctgcttcctccagaagacacgaatcatgactcacgattgctgaagcctgagcaggtctctgtgggccgaccagaggggggcttcgaggtggtccctggtactggggtgaccgagtggacagcccagggtgcagctctgcccgggctcgtgaagcctcagatgtccccaatccaagggtctggaggggctgccgtgactccagaggcctgaggctccagggctggctctggtgtttacaagctggactcagggatcctcctggccgccccgcagggggcttggagggctggacggcaagtccgtctagctcacgggcccctccagtggaatgggtcttttcggtggagataaaagttgatttgctct

SEQ ID NO: 190011 - DNA, 2100 bp, Artificial Sequence
  derived and/or modified sequence
atggccgcctgcgagggccggcggagcggcgccctgggcagcagccaaagtgactttctaactccccctgttggaggtgccccatgggctgttgccacaactgtagtgatgtatccaccgccgcctcctccccctcaccgcgacttcatttcggtcaccctgagttttggagaaaattacgataactccaaatcatggagaaggagaagttgttggagaaaatggaaacagctgagtcggctgcagagaaatatgatactgtttctgctggcattcctcctcttctgtggcttgctcttctatataaacctcgccgatcactggaaggcccttgcatttcgcctcgaagaggaacagaaaatgaggcccgagatagcgggcctgaaacctgccaatccccccgtgctgccagcccctcagaaggctgacactgaccctgagaatcttccagaaatctcttcccagaagacacagcgtcatatccaacgcggccctcctcacttacaaatacggcctcctagccaagatttgaaggatggtacccaagaagaggcaacaaaacggcaggaggcccccgtggaccccaggccagaaggagacccccagaggaccgttatctcctggcgaggggctgtcatcgagccagaacagggcacagaacttccgtcaagaagggctgaggttcccaccaagcctccattgccccctgctagaacccaggggactcctgttcatctgaactataggcaaaaaggagttatcgacgtcttcctgcacgcctggaaaggttacaggaagtttgcttggggacacgacgaactgaagcccgtgtccagatcctttagcgaatggtttgggctgggcctgaccttgatcgatgcacttgacacaatgtggatcctgggcctgcgcaaggagtttgaggaggcgagaaaatgggtcagcaagaaactgcattttgagaaggacgtggacgtgaatctcttcgagtctacaatccggatccttggcgggctgctgtccgcatatcatttaagcggtgactctttgtttctgaggaaggccgaggatttcggcaaccgcctcatgcctgcattccgcaccccctccaagataccatactccgatgttaatatcgggactggggtcgcccacccgcctcggtggacgagtgacagcacagtcgccgaagttaccagtattcaattggagttcagggaactatcacgcctgaccggcgacaaaaagtttcaggaggccgtagagaaagtgacacagcatatacacggcctgtctggcaagaaagacgggctggtgcccatgttcatcaacacgcatagcggactgtttactcatctgggcgttttcaccctgggcgccagggctgacagctattatgaatacctgctgaagcagtggatccagggggggaaacaagagacccagttgcttgaggattacgtagaggccatcgagggtgtccgcactcacttgcttcgccatagcgagccttctaagctcacatttgttggagagcttgcccacgggcgtttttccgccaagatggatcacctggtgtgcttcctgccagggacactcgcattgggagtctatcacggcctccccgccagccatatggagctcgcacaagaactgatggagacctgttatcagatgaatcgccagatggaaacgggcttgtccccggagatcgtccactttaacctgtaccctcagcccggcaggcgcgatgtagaggttaagccggcagaccggcataacctgcttagacctgagacggtggagagtctgttttacctgtatagagtgactggagataggaagtaccaagattggggctgggagatcctgcagtctttcagcagattcacacgggtaccctctgggggatatagttctatcaacaacgttcaggatcctcagaagcccgaaccccgagacaaaatggaaagctttttcctaggggagactctcaagtacctgtttctcctctttagtgatgacccaaacttgctaagcctcgacgcctacgtttttaatactgaggctcacccgctccctatatggactcctgcctag

SEQ ID NO: 190012 - DNA, 1209 bp, Artificial Sequence
  derived and/or modified sequence
atgtggatcctgggcctgcggaaggagttcgaggaggcccggaagtgggtgtcgaaaaagcttcatttcgagaaggatgtagacgtcaatctgtttgagtctactatccggatcctgggtggcctgctgtccgcctaccatctcagcggagattccctctttctcaggaaagccgaggattttggcaatcgcctgatgcccgcctttagaacccccagcaaaatcccatacagcgatgttaacattggaactggcgttgcacatcccccccgctggacttccgactcaacggtggccgaggttacaagcatacaacttgaattccgggaattatcccgcctcactggcgataaaaagttccaggaagcggttgaaaaagttacccagcacatccacggcctctccggaaagaaggatggacttgtaccgatgttcattaacactcattctgggctgtttacccatttaggcgtgttcacccttggcgcaagggctgattcgtattatgagtatttgctgaagcaatggattcagggcgggaagcaagaaactcagctgctggaagactatgtcgaggctattgagggggtacggacccacctgttgaggcattccgagccaagtaaattgaccttcgtgggggagctggctcacggcaggttctctgcgaaaatggatcacctggtgtgtttccttccaggaacccttgctttaggcgtgtaccatgggctgcccgcctcacacatggagttagctcaggagctcatggaaacctgttaccagatgaatcgtcagatggaaacgggattgagtccagagatcgtacactttaacttatatccgcagccaggccgcagagatgtggaggtgaaaccagctgatcgtcataacctcttaagacccgagaccgtggagtctttgttctatctgtacagggtgacaggcgaccgaaaataccaagactggggttgggagatcctgcagtccttcagcagatttacacgcgtgccatcagggggctactctagcatcaacaacgttcaggacccccagaagcccgaaccaagggataaaatggagagcttcttcttgggggagacgcttaagtacctttttcttctcttcagtgatgaccccaacctgttgagtctggatgcttatgtattcaatactgaggctcaccctctccccatatggacacctgcctag

SEQ ID NO: 190013 - DNA, 2100 bp, Artificial Sequence
  derived and/or modified sequence
atggcagcatgcgagggtcgccgatccggtgctttaggttcttctcaaagtgacttcctcactcctccggtgggtggtgcaccatgggcggtggctacaacggtggtaatgtatccaccaccacctcctcccccacatagggacttcatttccgtaaccctgtcctttggcgagaattacgacaactctaagtcatggcgacgcagaagctgctggcgaaagtggaaacaactctctagattgcagagaaacatgatcttatttttgcttgcctttctcctgttctgcggactgcttttctacatcaatttggccgatcactggaaagccctggccttccggctggaagaggagcagaaaatgaggccagaaatagctgggctgaaacctgctaaccctccagtgcttcctgccccacagaaggcagacacagatcccgaaaatctgccagagatcagtagtcagaaaacgcagcggcacattcagaggggccctccacatttgcagatccgccctccatcccaggatttaaaggacggtacacaggaggaagcaaccaagcgccaggaggcgccagttgatcccagacccgagggggatcctcagcgaacagtgatttcctggcgcggtgcagtgatcgaacctgaacagggtaccgagctcccgtcacgtagggccgaggtacccactaagccccctctgccacccgcacggacccaaggtacgccagtacatctgaattacagacaaaagggcgtgatcgatgtgtttctgcatgcctggaagggctatcgaaaattcgcctggggacacgatgagctgaaacctgtatccaggagcttctctgagtggtttggcttaggcctgacactgatcgacgctcttgatacgatgtggatcctggggttgcgcaaggagttcgaggaggcccgaaaatgggtgagtaagaagcttcacttcgagaaggacgttgatgtaaatctctttgagtcaacgattcgcattcttggcggtttactgtctgcgtatcatttgtcaggtgattccttgttccttagaaaagccgaggattttggaaatagactgatgcccgctttcagaacgccgtctaagatcccctattcagacgttaacatcggaacaggggtggcacacccaccacggtggacatctgatagcacagtagcagaggttacctcaatccagctggagttcagagaactcagccggctaaccggggacaagaagtttcaggaagccgtcgaaaaggttacccagcacatacacggactctccggcaaaaaggacgggctggtgcccatgtttattaatacacatagtggccttttcacccacctgggcgtgttcacgctgggagcgcgagccgacagttactatgaatacttactgaagcagtggattcagggtgggaaacaggaaacccaactgctggaagactacgtagaggcaatcgagggagtgcggacccatcttctcagacacagcgagcccagtaagctgacgttcgtgggggagctcgctcacggccgattctctgcaaaaatggaccatctggtctgcttcctgcctggcacattggcactcggagtgtaccatggcctcccggcttcccacatggagctagcacaggaactgatggaaacttgctatcagatgaatcgccaaatggagaccggtctatcccccgaaatcgtccactttaatctctatcctcagcctggtaggcgggatgtcgaggtcaagcctgcggaccgccataacctactacgcccagagaccgtcgaatccttgttctacctgtaccgagttacaggcgatcgaaaatatcaggactggggctgggaaatcctgcagtccttctctcggtttactcgggtgcctagtggcggttacagcagtattaataacgtccaagacccacagaaacctgaaccaagggataagatggagtcattcttcttaggggagacactcaaatacctcttcctgttgttctctgatgacccaaatctcctgagcctggacgcttacgtgtttaacactgaggctcacccacttccaatttggacgcctgcatag

SEQ ID NO: 190014 - DNA, 1209 bp, Artificial Sequence
  derived and/or modified sequence
atgtggatcctgggactgagaaaggaatttgaggaagcacgcaaatgggtgagcaaaaagctgcattttgaaaaggacgtggacgtgaatttgttcgagtctacaatccgcattctcggtggcctgttgagcgcctatcatctcagcggtgattccctctttctgcggaaggcagaagacttcggaaacaggcttatgccggcttttcgcacacccagcaagatcccgtacagtgacgtcaacatcggaacaggggttgcacacccgcctcgttggacatctgattccaccgttgccgaagtcacttccatccagctggagttccgggaattgagccgcctcaccggagataaaaagttccaggaggccgtggagaaagtgacacagcatatacatggtctcagtggaaagaaggatggtctggtacctatgtttatcaatacacattccggtctatttacacacctgggcgtatttacattaggcgctcgcgctgactcctactacgaatatctgctgaagcagtggatccagggcggaaagcaggaaacacagctgctggaggattacgtcgaagcaattgagggtgtcaggacccacttgctgaggcacagtgaacccagcaagttgaccttcgtcggcgaactggctcacggcagattctccgctaagatggaccacctggtatgcttcctgcccggaacactggcgctgggcgtgtatcacgggttacctgcctcccacatggagcttgcccaggagctcatggaaacttgctaccagatgaaccggcagatggagacgggactgagtcccgagatcgtacattttaacctgtacccccaacccggtaggagagatgtggaagtgaaaccagcggatcgacataatttacttcgcccagaaacggttgagtccctcttttatttgtaccgagtgaccggcgatcgtaagtaccaagactggggttgggaaatcctgcagtccttctcccggttcactagggtaccaagtgggggatacagctccatcaacaacgtccaggacccacagaagcccgagcctcgagacaagatggagagcttcttcctcggagagaccctgaagtatctctttctgctgtttagcgatgacccgaacctcctgagcctggacgcttatgtgttcaacaccgaggctcacccactgcctatctggacacccgcatag

SEQ ID NO: 190015 - DNA, 2100 bp, Artificial Sequence
  derived and/or modified sequence
atggccgcctgcgagggcagaagaagcggcgccctgggcagcagccagagcgacttcctgaccccccccgtgggcggcgccccctgggccgtggccaccaccgtggtgatgtacccccccccccccccccccccccacagagacttcatcagcgtgaccctgagcttcggcgagaactacgacaacagcaagagctggagaagaagaagctgctggagaaagtggaagcagctgagcagactgcagagaaacatgatcctgttcctgctggccttcctgctgttctgcggcctgctgttctacatcaacctggccgaccactggaaggccctggccttcagactggaggaggagcagaagatgagacccgagatcgccggcctgaagcccgccaacccccccgtgctgcccgccccccagaaggccgacaccgaccccgagaacctgcccgagatcagcagccagaagacccagagacacatccagagaggccccccccacctgcagatcagaccccccagccaggacctgaaggacggcacccaggaggaggccaccaagagacaggaggcccccgtggaccccagacccgagggcgacccccagagaaccgtgatcagctggagaggcgccgtgatcgagcccgagcagggcaccgagctgcccagcagaagagccgaggtgcccaccaagccccccctgccccccgccagaacccagggcacccccgtgcacctgaactacagacagaagggcgtgatcgacgtgttcctgcacgcctggaagggctacagaaagttcgcctggggccacgacgagctgaagcccgtgagcagaagcttcagcgagtggttcggcctgggcctgaccctgatcgacgccctggacaccatgtggatcctgggcctgagaaaggagttcgaggaggccagaaagtgggtgagcaagaagctgcacttcgagaaggacgtggacgtgaacctgttcgagagcaccatcagaatcctgggcggcctgctgagcgcctaccacctgagcggcgacagcctgttcctgagaaaggccgaggacttcggcaacagactgatgcccgccttcagaacccccagcaagatcccctacagcgacgtgaacatcggcaccggcgtggcccacccccccagatggaccagcgacagcaccgtggccgaggtgaccagcatccagctggagttcagagagctgagcagactgaccggcgacaagaagttccaggaggccgtggagaaggtgacccagcacatccacggcctgagcggcaagaaggacggcctggtgcccatgttcatcaacacccacagcggcctgttcacccacctgggcgtgttcaccctgggcgccagagccgacagctactacgagtacctgctgaagcagtggatccagggcggcaagcaggagacccagctgctggaggactacgtggaggccatcgagggcgtgagaacccacctgctgagacacagcgagcccagcaagctgaccttcgtgggcgagctggcccacggcagattcagcgccaagatggaccacctggtgtgcttcctgcccggcaccctggccctgggcgtgtaccacggcctgcccgccagccacatggagctggcccaggagctgatggagacctgctaccagatgaacagacagatggagaccggcctgagccccgagatcgtgcacttcaacctgtacccccagcccggcagaagagacgtggaggtgaagcccgccgacagacacaacctgctgagacccgagaccgtggagagcctgttctacctgtacagagtgaccggcgacagaaagtaccaggactggggctgggagatcctgcagagcttcagcagattcaccagagtgcccagcggcggctacagcagcatcaacaacgtgcaggacccccagaagcccgagcccagagacaagatggagagcttcttcctgggcgagaccctgaagtacctgttcctgctgttcagcgacgaccccaacctgctgagcctggacgcctacgtgttcaacaccgaggcccaccccctgcccatctggacccccgcctag

SEQ ID NO: 190016 - DNA, 1209 bp, Artificial Sequence
  derived and/or modified sequence
atgtggatcctgggcctgagaaaggagttcgaggaggccagaaagtgggtgagcaagaagctgcacttcgagaaggacgtggacgtgaacctgttcgagagcaccatcagaatcctgggcggcctgctgagcgcctaccacctgagcggcgacagcctgttcctgagaaaggccgaggacttcggcaacagactgatgcccgccttcagaacccccagcaagatcccctacagcgacgtgaacatcggcaccggcgtggcccacccccccagatggaccagcgacagcaccgtggccgaggtgaccagcatccagctggagttcagagagctgagcagactgaccggcgacaagaagttccaggaggccgtggagaaggtgacccagcacatccacggcctgagcggcaagaaggacggcctggtgcccatgttcatcaacacccacagcggcctgttcacccacctgggcgtgttcaccctgggcgccagagccgacagctactacgagtacctgctgaagcagtggatccagggcggcaagcaggagacccagctgctggaggactacgtggaggccatcgagggcgtgagaacccacctgctgagacacagcgagcccagcaagctgaccttcgtgggcgagctggcccacggcagattcagcgccaagatggaccacctggtgtgcttcctgcccggcaccctggccctgggcgtgtaccacggcctgcccgccagccacatggagctggcccaggagctgatggagacctgctaccagatgaacagacagatggagaccggcctgagccccgagatcgtgcacttcaacctgtacccccagcccggcagaagagacgtggaggtgaagcccgccgacagacacaacctgctgagacccgagaccgtggagagcctgttctacctgtacagagtgaccggcgacagaaagtaccaggactggggctgggagatcctgcagagcttcagcagattcaccagagtgcccagcggcggctacagcagcatcaacaacgtgcaggacccccagaagcccgagcccagagacaagatggagagcttcttcctgggcgagaccctgaagtacctgttcctgctgttcagcgacgaccccaacctgctgagcctggacgcctacgtgttcaacaccgaggcccaccccctgcccatctggacccccgcctag

SEQ ID NO: 190017 - protein, 460 aa, Artificial Sequence
  derived and/or modified sequence
MASLLQSDRVLYLVQGEKKVRAPLSQLYFCRYCSELRSLECVSHEVDSHYCPSCLENMPSAEAKLKKNRCANCFDCPGCMHTLSTRATSISTQLPDDPAKTTMKKAYYLACGFCRWTSRDVGMADKSVASGGWQEPENPHTQRMNKLIEYYQQLAQKEKVERDRKKLARRRNYMPLAFSDKYGLGTRLQRPRAGASISTLAGLSLKEGEDQKEIKIEPAQAVDEVEPLPEDYYTRPVNLTEVTTLQQRLLQPDFQPVCASQLYPRHKHLLIKRSLRCRKCEHNLSKPEFNPTSIKFKIQLVAVNYIPEVRIMSIPNLRYMKESQVLLTLTNPVENLTHVTLFECEEGDPDDINSTAKVVVPPKELVLAGKDAAAEYDELAEPQDFQDDPDIIAFRKANKVGIFIKVTPQREEGEVTVCFKMKHDFKNLAAPIRPIEESDQGTEVIWLTQHVELSLGPLLP

SEQ ID NO: 190018 - DNA, 1383 bp, Artificial Sequence
  derived and/or modified sequence
atggccagcctgctgcagagcgacagagtgctgtacctggtgcagggcgagaagaaggtgagagcccccctgagccagctgtacttctgcagatactgcagcgagctgagaagcctggagtgcgtgagccacgaggtggacagccactactgccccagctgcctggagaacatgcccagcgccgaggccaagctgaagaagaacagatgcgccaactgcttcgactgccccggctgcatgcacaccctgagcaccagagccaccagcatcagcacccagctgcccgacgaccccgccaagaccaccatgaagaaggcctactacctggcctgcggcttctgcagatggaccagcagagacgtgggcatggccgacaagagcgtggccagcggcggctggcaggagcccgagaacccccacacccagagaatgaacaagctgatcgagtactaccagcagctggcccagaaggagaaggtggagagagacagaaagaagctggccagaagaagaaactacatgcccctggccttcagcgacaagtacggcctgggcaccagactgcagagacccagagccggcgccagcatcagcaccctggccggcctgagcctgaaggagggcgaggaccagaaggagatcaagatcgagcccgcccaggccgtggacgaggtggagcccctgcccgaggactactacaccagacccgtgaacctgaccgaggtgaccaccctgcagcagagactgctgcagcccgacttccagcccgtgtgcgccagccagctgtaccccagacacaagcacctgctgatcaagagaagcctgagatgcagaaagtgcgagcacaacctgagcaagcccgagttcaaccccaccagcatcaagttcaagatccagctggtggccgtgaactacatccccgaggtgagaatcatgagcatccccaacctgagatacatgaaggagagccaggtgctgctgaccctgaccaaccccgtggagaacctgacccacgtgaccctgttcgagtgcgaggagggcgaccccgacgacatcaacagcaccgccaaggtggtggtgccccccaaggagctggtgctggccggcaaggacgccgccgccgagtacgacgagctggccgagccccaggacttccaggacgaccccgacatcatcgccttcagaaaggccaacaaggtgggcatcttcatcaaggtgaccccccagagagaggagggcgaggtgaccgtgtgcttcaagatgaagcacgacttcaagaacctggccgcccccatcagacccatcgaggagagcgaccagggcaccgaggtgatctggctgacccagcacgtggagctgagcctgggccccctgctgccctag

SEQ ID NO: 190019 - DNA, 1383 bp, Artificial Sequence
  derived and/or modified sequence
atggcttccctcctgcagtctgaccgcgtcttgtacctggtgcaaggtgagaagaaagtgcgggcccctttgtcacaattatacttctgtcgctactgttcagaactacggtctctagagtgcgtgagccacgaggtggacagtcattactgcccctcatgtctcgagaacatgcctagcgcagaagccaagctgaagaaaaatcgttgcgccaactgcttcgactgccctggatgtatgcacaccctaagcacgagagccacctcgatctctactcagctgcctgatgacccagccaagactaccatgaaaaaggcatactatttggcatgtggcttctgccgatggacatctagagacgtgggtatggccgataaaagcgtcgcttccggtggctggcaagaacccgagaacccacacacacagaggatgaataagctaattgagtactaccagcagctggcacagaaggagaaggttgagcgggacaggaagaagcttgcgcgtaggagaaactacatgccgctcgcgttttccgacaagtatgggttaggcacacggttgcagcggccacgcgccggcgcatcaatcagcacattggcaggactgagtctcaaagagggcgaagatcaaaaagagattaagatcgagcctgcacaggccgtggatgaggtcgagccactgcctgaggactattacaccaggccagtgaatctgacagaggtcactaccctccaacaaagactgttgcaacctgacttccaaccagtctgcgcctcacaactgtacccccgccacaaacatttgctcattaagcgcagcctcagatgtcgcaagtgcgaacataatctctctaagcctgaattcaatccaacctccattaagtttaagattcagttggtggctgtgaattatataccagaggtgaggattatgagtatccccaacctccgttacatgaaagagagtcaggtactgctgacccttaccaaccctgtggagaatcttacccacgtgactctgtttgagtgcgaggaaggagaccccgacgacattaacagcacagccaaagtggtcgttcctcctaaggagctggttctggccggcaaggacgccgccgccgaatacgacgagctggctgaacctcaggactttcaggacgacccagatataattgcatttcggaaggccaataaggtaggaatctttataaaggtgaccccacagagggaagaaggagaggtgaccgtctgctttaagatgaagcatgactttaaaaatctggccgccccaattaggccaattgaagagtcagatcagggcacagaggtcatctggctgacccagcacgttgagctatctctgggcccgctactgccatag

SEQ ID NO: 190020 - DNA, 1383 bp, Artificial Sequence
  derived and/or modified sequence
atggccagcctgctgcagagcgacagagtgctgtacctggtgcagggcgagaagaaggtgcgggcccccctgagccagctgtacttctgccgctactgcagcgagctgcggagcctggagtgtgtgtcccatgaggtggacagccactactgccccagctgcctggagaacatgcccagcgctgaggccaagctgaagaagaacagatgtgccaactgctttgactgccccggctgcatgcacaccctgagcacccgggccaccagcatcagcacccagctgcctgatgatcctgccaagaccaccatgaagaaggcctactacctggcctgtggcttctgccgctggaccagcagagatgtgggcatggctgacaagtctgtggccagcggcggctggcaggagcctgagaacccccacacccagaggatgaacaagctgattgagtactaccagcagctggcccagaaggagaaggtggagcgggacaggaagaagctggccaggagaagaaactacatgcccctggccttcagtgacaagtatggcctgggcacccggctgcagaggcccagggctggggccagcatcagcaccctggccggcctgagcctgaaggagggggaggaccagaaggagatcaagattgagcccgcccaggccgtggatgaggtggagcccctgcctgaggactactacaccaggcctgtgaacctgacagaggtgaccaccctgcagcagaggctgctgcagcctgacttccagcctgtgtgtgccagccagctgtaccccaggcacaagcacctgctgatcaagaggagcctgcgctgcaggaaatgtgagcacaacctgagcaagccagagttcaaccccaccagcatcaagttcaagatccagctggtggccgtgaactacatccctgaggtgcgcatcatgagcatccccaacctgcgctacatgaaggagagccaggtgctgctgaccctgaccaaccctgtggagaacctgacccacgtgaccctgtttgaatgtgaggagggggaccctgatgacatcaacagcacagccaaggtggtggtgccccccaaggagctggtgctggccggcaaggatgctgctgctgaatatgatgagctggccgagccccaggacttccaggatgatcctgacatcatcgccttcaggaaggccaacaaggtgggcatcttcatcaaggtgaccccccagcgggaggagggggaggtgacagtgtgcttcaagatgaagcatgacttcaagaacctggccgcccccatccggcccatcgaggagagtgaccagggcacagaggtgatctggctgacccagcacgtggagctgagcctgggccccctgctgccctag

SEQ ID NO: 190021 - DNA, 1383 bp, Artificial Sequence
  derived and/or modified sequence
atggccagcctgctgcagagcgaccgggtgctgtacctggtgcagggggagaagaaagtgcgagcccccctgtcccagctgtacttctgccggtactgctctgagctgagatctctcgaatgtgtaagtcacgaggtggattctcactattgtccatcctgccttgaaaatatgccttctgccgaggcaaaactaaagaaaaatcggtgcgctaactgcttcgactgccccggctgcatgcacaccttatctactcgggccactagcatttcgacccagctacccgatgaccccgccaagacgaccatgaagaaggcatactacttagcctgcggtttttgcagatggacaagccgggacgttgggatggccgataaaagcgtagcgtcgggaggctggcaggagccggaaaatccccatacacagcgcatgaataaattaattgaatattaccagcaactggcacaaaaagaaaaggtcgaacgagacagaaaaaaactggctagaaggagaaattacatgcccttggccttctcagataagtatggtctgggtacgcggctgcagaggccaagagccggcgccagtattagtactttggctggcctctcattgaaggaaggcgaggatcagaaggaaattaagattgaaccggcgcaggccgtcgatgaggtcgagcccctgcccgaggattactacacaagaccagtgaacctgacagaggtcactaccttacagcaaaggctcctacagccagacttccaacccgtttgtgcttctcagctgtaccctcggcataagcatctactcatcaagcgttccctcagatgccggaagtgtgaacataacctgtctaagccagagttcaaccctacatcaataaagttcaaaattcagttggtcgccgtgaactacattcccgaggtgaggatcatgtccattccaaatttgagatacatgaaagagagtcaggtgttactgacattgactaatccagtcgagaatttgactcatgtcacattgttcgaatgtgaggagggagaccctgatgatatcaacagcaccgctaaggtggttgtgcccccaaaggagctcgttctggccggcaaggacgcagcagcagaatacgacgagctggccgaaccacaggacttccaggacgatccagatattattgcatttcggaaggcgaacaaggtcggtatcttcattaaggtgacccctcagcgggaggaaggcgaagtcacagtatgttttaaaatgaagcacgattttaaaaacttggccgcaccaattagaccaatcgaggagagtgaccaggggactgaagtcatctggttaacacagcacgttgagttaagcctgggacctctgctcccatag

SEQ ID NO: 190022 - DNA, 4054 bp, Artificial Sequence
  derived and/or modified sequence
actgcctttccaggatttattgcgaggatggagggaggcgcaggcgttctcattcatagttctcccatcctgaaagttctgttcctcttttgtccagaaactgggccctcgtcagactgccttgccctgttcctgactcaggccaaggcctgcagccgggaagaggttggggcggcgtgagttatgtgaaaagcgctcagaatacagtatgtcatgtaagaagctgaaagtgtatttatggagctagaggacaatgctgtccttccctggcacaagtgggcgtccgaagttggatttttcaaaaagaagaccccggccagtaaaaagtcaccaaataacaaaaccccaaaacttctgcagcgcttggcacatcttgtttattcagtaagctttagggattaaaaggtggactcccattattgtcccagttgtttagaaaatatgccatcggctgaagccaaactaaaaaagaatagatgtgccaattgttttgactgtcctggctgcatgcacaccctctctactcgggccacgagcatctccacacagcttccagatgacccagccaagaccaccatgaagaaagcctattacctggcatgtggattttgtcgctggacgtctagagatgtgggcatggcagacaaatctgtagctagtggcggttggcaggaacctgaaaatcctcacacacaacggatgaacaaattgattgaatattaccagcagcttgctcagaaagagaaggttgagcgagatcgcaagaaactggcacgacgtagaaactatatgcctctggctttttcggacaaatatggtcttggaaccaggcttcagcgaccacgagctggtgcatccatcagtacccttgccggactttcccttaaagaaggagaggatcagaaagagataaagattgagccagctcaggctgtggatgaagtggaacctctacctgaagactattatacaagaccagtaaatttaacagaggtaacaacccttcagcagcgtctgttacagcctgacttccagccagtctgtgcttcacagctctatcctcgccacaaacatcttctgatcaaacggtccctgcgctgccgtaaatgtgaacataatttgagcaagccagaatttaacccaacgtcaatcaaattcaaaatccagctggtcgctgtcaattatattccagaagtgagaatcatgtcaattcccaaccttcgctacatgaaggagagccaggtcctcctgactcttacaaatccagttgagaacctcacccatgtgactctcttcgagtgtgaggagggggaccctgatgatatcaacagcactgctaaggtggtggtgcctcccaaagagctcgttttagctggcaaggatgcagcagcagagtacgatgagttggcagaacctcaagactttcaggacgatcctgacattatagccttcagaaaggccaacaaagtgggtattttcatcaaagttacaccacagcgtgaggagggtgaagtgaccgtgtgcttcaagatgaagcatgattttaaaaacctggcagcccccattcgccccattgaagaaagtgaccagggaacagaagtcatctggctcacccagcatgtggaacttagcttgggcccacttcttccttaaaaggttccactggagggcagatcccaaaggacagtatcaccgtaaacctgcgttaaaatgtggaagctgctgcttcattaggccttgtttataacgatgtacccatgcactacggaattctattgctaagaaagtgggagcataggcaaggcattgggaacacagggtagctgctgttgctcttgctctcacccctgttgacaccagtaagtctgtgtctccctcactgaaccctgcacgttgagtaacagcagcataattccatcctaggaaaggggatgggtgttccttggaatggcattgtatttaccacctgagaaactctgtactgtctcttgatctgatctcactaaggatcacaatgtcacagatgaaacttaaatgataacccaaaggtagacctgctgttaatgatccagcattggtcacaatgtaccaactgctttctgcattccgttaaatatcatctaacagtctaaaacatatcccttcattgccataatggctgccattttgccatagatttccatataactgaaaaactgaattgtcactttatctttagtatcatgatgattggaaaaacctgtgaagttgttaaggcactctcatttgccctctttttctaagtgaatacaggacacgtattagttgttcttaatttttttcccagtaaaatatggatcttttaagaagaatttgagaagcaaacaattacatgtcatgtcaagggggtagcagattccattcgttttcaatattgccacaatacccagggattaatgctgccacaggggggcaatctttatttgtcttacttcctaccccttccctgttctgcctctttaactcagttaagttgttctgtttgggacctggaaaagaacccaaagaaaacctgagtggacaggttcatttctggaatgcagaaaacattttaaaggctagatttttagaatattctcaactagcattctttccattgatttgaaggggaaattaactattataatctcttgaatccaaaactggatattaagaactttcccccttactaagtttaagacttttgtcatgtggtgagtcaaataagaccattttgattgtaaaccataaaatagttcagcaagtagcccacagttctggcctaacagcagacttgctgttttcacttggtatcctggagttgggttgctaaccttaatttctatgatgttttctaaaatgaaacttgataaagtagaccaccagctgcaccgtgttttctgtaaaagtattgttagtaagtggccaagagacttgaggaaaatacagattttttgtttaccttggtcttgttttaagtcttaaaaaattaaagataacattataatgtagaatacagatgggacatagtccttgtaagcttcccttgaaaatgttttaaatatttaggaagcttttaaaagacactaaattgtactctaaaagacactaaattgtactaattgtacaaaggtcaagccaattttatgaaacagtcctacagagtaatatatgtgatgcagtgtaagaaggaaaatactcatctctaacattatggtaataacatttagcctcttaggagttggagcagggggatgggtaattacagatttgcagactatagaaagagtttcatttttttgtgaccccacagagtctcaaatttttatttcactacctgctagagcctactgtgaaatcactgctccatatttgccagtggaggaaatgggcatagagtagagaatagcttcatatgtttacacgtttgcatagactacacacatgtcatgcgtttatggcaggtagctggtatttattccccaaagtaataatgttgaagtatgggtctcatcattcccatacacagaaacacaaaacactttgatcataaacttttttcttcagaagccaaactaacttgcagaataatagagccactggtttaatgtttcctcaagataggttttagtgtaagctagtattctgtgtgttcgtagaaatgattcaatacctgcagctggtgaattaggaattgtatttgttgccttttttatattagatgaggtgcaaaaattttaatgctagtcagtatgcaccaccacaggaaagttagatcccattagcacttgaaactacagctttggaaacttaggctaagttaatttggatttgttacttgattcacctactgaccttttcttttgtttgaagtgcttatcagcataatgagctaagtgtcatgcatatttgtgaagaaacaccctttttggtcccttttgggacagagaggtactccttgatctttatgaatgacaggttactgttttgccttattgcttaacttaatgtagtgaaataaagcagacaaagcttg

SEQ ID NO: 190023 - DNA, 1383 bp, Artificial Sequence
  derived and/or modified sequence
atggccagccttctccagagcgatagagtcttatatctggttcagggggagaagaaggtgcgggctcccctatctcagttatatttttgcaggtattgcagcgagctgcggagcctggaatgcgttagtcatgaggtggattcccattactgtccatcttgtttggagaacatgccctccgcagaagccaagctcaagaaaaatcgctgtgcaaactgctttgactgccccggttgtatgcacacactgtccacccgcgcaaccagcatctccactcagcttcctgacgacccagcaaaaactaccatgaagaaggcgtattatttggcctgtggattctgcaggtggactagtcgagatgtgggaatggccgacaaatccgtcgcgagcgggggatggcaagagcccgagaacccacacacccagcgtatgaacaaattgatcgaatactatcagcaattggcgcagaaggaaaaagtggagagagacaggaagaagcttgcccgaagacggaactatatgccgctggctttttcagataaatatggcctgggaacacggttgcagcggcctcgggcaggggcttcgatatcaactcttgctggcctctcgctaaaggaaggggaggatcaaaaagaaataaagatcgagccagcccaagccgttgatgaggttgaaccattacctgaggactattacactcgccctgtgaatctgactgaggtgaccaccctacaacagcggctgttgcaacccgactttcaacctgtgtgcgcttcacagctgtacccacgtcacaaacacctgcttatcaaaaggagcctgagatgccggaagtgtgaacacaacttgtcaaaacccgagtttaatcccacctctattaagttcaagatacaactggtggctgtgaattatatccctgaggtcagaattatgagcattccaaatctccgctatatgaaagagtcccaagttttactcacccttaccaatccagtggagaatctgacacatgtgactctgtttgagtgtgaggagggagatcccgatgatattaacagcaccgccaaggtcgtcgttcctccaaaagaattagtgctcgccggaaaggacgccgcagcagagtatgatgagctggcggagcctcaggacttccaggatgacccggacattattgctttccgcaaagctaataaggtcgggattttcataaaagtgacgccccaaagagaagaaggtgaagtgaccgtctgttttaagatgaagcacgattttaaaaacctagctgcccctatccgacccatcgaggaatctgatcagggcacggaggttatttggctgactcagcacgtcgagctctctctaggaccgttgctgccttag

SEQ ID NO: 190024 - DNA, 4208 bp, Artificial Sequence
  derived and/or modified sequence
gtgggaaacctaacgtcaaagtctacgtaggaagtcgtagggaaggcagcgaggaagacgctggctctcgggtcacgtgatgcgccgggagcgtcatcgcctcctccctccccaagatggcgtccttgctgcagtcggaccgggttctctatctagtccagggagaaaagaaggttcgggccccgctctcgcaactctacttctgccgctattgtagcgaactgcggtcgctggaatgtgtgtctcacgaggtggactcccattattgtcccagttgtttagaaaatatgccatcggctgaagccaaactaaaaaagaatagatgtgccaattgttttgactgtcctggctgcatgcacaccctctctactcgggccacgagcatctccacacagcttccagatgacccagccaagaccaccatgaagaaagcctattacctggcatgtggattttgtcgctggacgtctagagatgtgggcatggcagacaaatctgtagctagtggcggttggcaggaacctgaaaatcctcacacacaacggatgaacaaattgattgaatattaccagcagcttgctcagaaagagaaggttgagcgagatcgcaagaaactggcacgacgtagaaactatatgcctctggctttttcggacaaatatggtcttggaaccaggcttcagcgaccacgagctggtgcatccatcagtacccttgccggactttcccttaaagaaggagaggatcagaaagagataaagattgagccagctcaggctgtggatgaagtggaacctctacctgaagactattatacaagaccagtaaatttaacagaggtaacaacccttcagcagcgtctgttacagcctgacttccagccagtctgtgcttcacagctctatcctcgccacaaacatcttctgatcaaacggtccctgcgctgccgtaaatgtgaacataatttgagcaagccagaatttaacccaacgtcaatcaaattcaaaatccagctggtcgctgtcaattatattccagaagtgagaatcatgtcaattcccaaccttcgctacatgaaggagagccaggtcctcctgactcttacaaatccagttgagaacctcacccatgtgactctcttcgagtgtgaggagggggaccctgatgatatcaacagcactgctaaggtggtggtgcctcccaaagagctcgttttagctggcaaggatgcagcagcagagtacgatgagttggcagaacctcaagactttcaggacgatcctgacattatagccttcagaaaggccaacaaagtgggtattttcatcaaagttacaccacagcgtgaggagggtgaagtgaccgtgtgcttcaagatgaagcatgattttaaaaacctggcagcccccattcgccccattgaagaaagtgaccagggaacagaagtcatctggctcacccagcatgtggaacttagcttgggcccacttcttccttaaaaggttccactggagggcagatcccaaaggacagtatcaccgtaaacctgcgttaaaatgtggaagctgctgcttcattaggccttgtttataacgatgtacccatgcactacggaattctattgctaagaaagtgggagcataggcaaggcattgggaacacagggtagctgctgttgctcttgctctcacccctgttgacaccagtaagtctgtgtctccctcactgaaccctgcacgttgagtaacagcagcataattccatcctaggaaaggggatgggtgttccttggaatggcattgtatttaccacctgagaaactctgtactgtctcttgatctgatctcactaaggatcacaatgtcacagatgaaacttaaatgataacccaaaggtagacctgctgttaatgatccagcattggtcacaatgtaccaactgctttctgcattccgttaaatatcatctaacagtctaaaacatatcccttcattgccataatggctgccattttgccatagatttccatataactgaaaaactgaattgtcactttatctttagtatcatgatgattggaaaaacctgtgaagttgttaaggcactctcatttgccctctttttctaagtgaatacaggacacgtattagttgttcttaatttttttcccagtaaaatatggatcttttaagaagaatttgagaagcaaacaattacatgtcatgtcaagggggtagcagattccattcgttttcaatattgccacaatacccagggattaatgctgccacaggggggcaatctttatttgtcttacttcctaccccttccctgttctgcctctttaactcagttaagttgttctgtttgggacctggaaaagaacccaaagaaaacctgagtggacaggttcatttctggaatgcagaaaacattttaaaggctagatttttagaatattctcaactagcattctttccattgatttgaaggggaaattaactattataatctcttgaatccaaaactggatattaagaactttcccccttactaagtttaagacttttgtcatgtggtgagtcaaataagaccattttgattgtaaaccataaaatagttcagcaagtagcccacagttctggcctaacagcagacttgctgttttcacttggtatcctggagttgggttgctaaccttaatttctatgatgttttctaaaatgaaacttgataaagtagaccaccagctgcaccgtgttttctgtaaaagtattgttagtaagtggccaagagacttgaggaaaatacagattttttgtttaccttggtcttgttttaagtcttaaaaaattaaagataacattataatgtagaatacagatgggacatagtccttgtaagcttcccttgaaaatgttttaaatatttaggaagcttttaaaagacactaaattgtactctaaaagacactaaattgtactaattgtacaaaggtcaagccaattttatgaaacagtcctacagagtaatatatgtgatgcagtgtaagaaggaaaatactcatctctaacattatggtaataacatttagcctcttaggagttggagcagggggatgggtaattacagatttgcagactatagaaagagtttcatttttttgtgaccccacagagtctcaaatttttatttcactacctgctagagcctactgtgaaatcactgctccatatttgccagtggaggaaatgggcatagagtagagaatagcttcatatgtttacacgtttgcatagactacacacatgtcatgcgtttatggcaggtagctggtatttattccccaaagtaataatgttgaagtatgggtctcatcattcccatacacagaaacacaaaacactttgatcataaacttttttcttcagaagccaaactaacttgcagaataatagagccactggtttaatgtttcctcaagataggttttagtgtaagctagtattctgtgtgttcgtagaaatgattcaatacctgcagctggtgaattaggaattgtatttgttgccttttttatattagatgaggtgcaaaaattttaatgctagtcagtatgcaccaccacaggaaagttagatcccattagcacttgaaactacagctttggaaacttaggctaagttaatttggatttgttacttgattcacctactgaccttttcttttgtttgaagtgcttatcagcataatgagctaagtgtcatgcatatttgtgaagaaacaccctttttggtcccttttgggacagagaggtactccttgatctttatgaatgacaggttactgttttgccttattgcttaacttaatgtagtgaaataaagcagacaaagcttgagcgtgtcttttgtttgctctcatgtagatactaagtagcatggctcagagccaaaagacaagcgtgaagttaagagagttggctaagagagttggtggggcatgctcccttccattccttaaatgaagtaatctaaaatctcttagcaggttagttcaccataatatataagtagatgttgctttgagcttcttatatacatattcacagaaccattatataaatgttgttagacctctaccagtttttatcctgggtcattgcttctaaagatatcctttacaatatacacagtggtctgactcca

SEQ ID NO: 190025 - DNA, 579 bp, Artificial Sequence
  derived and/or modified sequence
acttggaaaggaggagcagcctcgggtgggactgagcggatcttctggttctagagcggcctctgattggacaaacttgacttagggaccgtgtctgtctgcgatggggcttggtaaagaaacagatacagagtgttcgctgtggactcccattattgtcccagttgtttagaaaatatgccatcggctgaagccaaactaaaaaagaatagatgtgccaattgttttgactgtcctggctgcatgcacaccctctctactcgggccacgagcatctccacacagcttccagatgacccagccaagaccaccatgaagaaagcctattacctggcatgtggattttgtcgctggacgtctagagatgtgggcatggcagacaaatctgtagctagtggcggttggcaggaacctgaaaatcctcacacacaacggatgaacaaattgattgaatattaccagcagcttgctcagaaagagaaggttgagcgagatcgcaagaaactggcacgacgtagaaactatatgcctctggctttttcggacaaatatggtcttggaaccaggcttcagcgacca

SEQ ID NO: 190026 - DNA, 578 bp, Artificial Sequence
  derived and/or modified sequence
ttattgcgaggatggagggaggcgcaggcgttctcattcatagttctcccatcctgaaagttctgttcctcttttgtccagaaactgggccctcgtcagactgccttgccctgttcctgactcaggccaaggcctgcagccgggaagaggttggggcggcgtgagttatgtgaaaagcgctcagaatacagtatgtcatgtggactcccattattgtcccagttgtttagaaaatatgccatcggctgaagccaaactaaaaaagaatagatgtgccaattgttttgactgtcctggctgcatgcacaccctctctactcgggccacgagcatctccacacagcttccagatgacccagccaagaccaccatgaagaaagcctattacctggcatgtggattttgtcgctggacgtctagagatgtgggcatggcagacaaatctgtagctagtggcggttggcaggaacctgaaaatcctcacacacaacggatgaacaaattgattgaatattaccagcagcttgctcagaaagagaaggttgagcgagatcgcaagaaactggcacgacgtagaa

SEQ ID NO: 190027 - protein, 622 aa, Artificial Sequence
  derived and/or modified sequence
MEESEPERKRARTDEVPAGGSRSEAEDEDDEDYVPYVPLRQRRQLLLQKLLQRRRKGAAEEEQQDSGSEPRGDEDDIPLGPQSNVSLLDQHQHLKEKAEARKESAKEKQLKEEEKILESVAEGRALMSVKEMAKGITYDDPIKTSWTPPRYVLSMSEERHERVRKKYHILVEGDGIPPPIKSFKEMKFPAAILRGLKKKGIHHPTPIQIQGIPTILSGRDMIGIAFTGSGKTLVFTLPVIMFCLEQEKRLPFSKREGPYGLIICPSRELARQTHGILEYYCRLLQEDSSPLLRCALCIGGMSVKEQMETIRHGVHMMVATPGRLMDLLQKKMVSLDICRYLALDEADRMIDMGFEGDIRTIFSYFKGQRQTLLFSATMPKKIQNFAKSALVKPVTINVGRAGAASLDVIQEVEYVKEEAKMVYLLECLQKTPPPVLIFAEKKADVDAIHEYLLLKGVEAVAIHGGKDQEERTKAIEAFREGKKDVLVATDVASKGLDFPAIQHVINYDMPEEIENYVHRIGRTGRSGNTGIATTFINKACDESVLMDLKALLLEAKQKVPPVLQVLHCGDESMLDIGGERGCAFCGGLGHRITDCPKLEAMQTKQVSNIGRKDYLAHSSMDF

SEQ ID NO: 190028 - DNA, 1869 bp, Artificial Sequence
  derived and/or modified sequence
atggaagaatccgagcccgaaaggaaacgtgctaggacagacgaagtgccggctggcggttcaaggtcggaggcggaagatgaggacgacgaggattatgtgccatatgtgccactgcgacagcgtcgccagcttctactacaaaagttacttcagcgccgacggaaaggcgctgctgaagaggagcaacaggactcgggcagtgagccccggggcgatgaggatgatataccacttggacctcagtcaaatgtatctctcctggaccaacaccagcacctgaaggaaaaagccgaggccagaaaagaaagcgctaaagagaagcaattgaaggaagaagagaagattctggagagcgtggctgaagggagggccctgatgtcggtcaaggaaatggcaaagggcatcacgtatgacgaccccattaaaacatcatggactcctcctagatacgtgctctctatgagcgaggaaagacatgaacgggtgcgaaagaagtaccacattctggtagagggcgacggcattccaccccctatcaaatcctttaaagaaatgaaattccctgcggccattctcagggggcttaagaaaaaaggcatccaccatccgactcctattcagatacagggcatccccacaatcctgagtggccgcgacatgatcggcatcgcattcaccgggagcggaaaaacgctggtgttcacgctaccagtcatcatgttttgcctggagcaggagaaacgactccccttttctaaaagggagggcccatatggcttgattatttgcccaagtcgggagcttgcccggcaaacacatggcatccttgaatactactgtcggctcttgcaggaggattccagtcccctgttgagatgcgcactgtgcatcggcggtatgagtgtgaaggagcaaatggagacgatcagacatggggtccacatgatggtcgccactccagggaggctgatggacctcctacagaaaaagatggtctcactagatatctgtcgctacctggcactggatgaggccgataggatgattgatatggggttcgagggcgacataaggacaatctttagctactttaagggtcagcggcagactcttttattttccgccaccatgccgaaaaagattcaaaatttcgccaaatcagctctggttaagccagtgacaataaacgtcggacgggccggggcagcatctctggacgtaattcaggaagtagagtatgtcaaggaagaagcaaaaatggtatacctgctggaatgtttacagaaaacacctcctccagtcctgatctttgctgagaaaaaagcagatgtggacgcaatacatgagtatttgttgttgaaaggcgtggaggctgtcgccattcatggcggtaaagaccaggaggagcggactaaagccattgaggcctttcgagagggcaagaaggatgtgcttgtagctaccgacgtggcgtctaaaggtttggatttcccggcaattcagcacgtgatcaactacgatatgccggaggagatcgagaactacgtacaccggattggacgcacaggaaggagcggaaatactggcattgcgacgacatttataaacaaggcgtgtgacgaaagcgtcttgatggatttgaaagcccttctgctcgaggcaaagcagaaggtgccaccagtattgcaggttttgcattgtggggatgaaagtatgctggatatcgggggcgagagggggtgtgccttttgtggcggtcttggacacagaatcacggattgtcccaagctggaagctatgcagacaaagcaggtgtcaaacatcgggagaaaggactacttggcccattcctctatggacttctag

SEQ ID NO: 190029 - DNA, 1869 bp, Artificial Sequence
  derived and/or modified sequence
atggaggagagcgagcctgagaggaagagggccaggacagatgaggtgcctgctgggggcagccgctctgaggccgaggatgaagatgatgaagattatgtgccctacgtgcccctgcggcagaggcggcagctgctgctgcagaagctgctgcagaggaggaggaaaggagctgctgaggaggagcagcaggacagcggcagcgagcccagaggagatgaagatgacatccccctgggcccccagagcaatgtgtccctgctggaccagcaccagcacctgaaggagaaggccgaggccaggaaggagagcgccaaggagaagcagctgaaggaggaggagaagatcctggagagcgtggccgagggccgggccctgatgtctgtgaaggagatggccaagggcatcacctatgatgaccccatcaagacctcctggaccccacccaggtatgtgctgtccatgtctgaggagagacatgagcgggtgaggaagaagtaccacatcctggtggagggagatggcatccccccacccatcaagagcttcaaggagatgaagtttcctgctgccatcctgcggggcctgaagaagaagggcatccaccaccccacccccatccagatccagggcatccccaccatcctgagcggccgggacatgattggcatcgccttcaccggcagcggcaagaccctggtgttcaccctgcccgtcatcatgttctgcctggagcaggagaagaggctgcccttcagcaagcgggagggcccctacggcctcatcatctgccccagccgggagctggcccggcagacccacggcatcctggagtactactgccgcctgctgcaggaggacagcagccccctgctgcgctgtgccctgtgcatcggcggcatgtctgtgaaggagcagatggagaccatcagacatggagtgcacatgatggtggccaccccaggccgcctgatggacctgctgcagaagaagatggtgtccctggacatctgccgctacctggccctggatgaggccgacaggatgattgacatgggctttgaaggagacatccgcaccatcttctcctacttcaagggccagaggcagaccctgctcttcagcgccaccatgcccaagaagatccagaactttgccaagagcgccctggtgaagcctgtgaccatcaacgtgggccgggccggggccgccagcctggatgtgatccaggaggtggagtatgtgaaggaggaggccaagatggtgtacctgctggagtgcctgcagaagaccccacctcctgtgctgatctttgctgagaagaaggcagatgtggatgccatccacgagtacctgctgctgaagggcgtggaggccgtggccatccatggaggcaaggaccaggaggagaggaccaaggccatcgaggccttccgggagggcaagaaggatgtgctggtggccacagatgtggccagcaagggcctggacttccctgccatccagcacgtgatcaactatgacatgcctgaggagattgagaactacgtgcaccgcatcggccgcacaggccgcagcggcaacacaggaattgccaccaccttcatcaacaaggcctgtgatgaatctgtgctgatggacctgaaggccctgctgctggaggccaagcagaaggtgccccctgtgctgcaggtgctgcactgtggagatgagagcatgctggacatcggcggggagcggggctgtgccttctgtggcggcctgggccaccgcatcacagactgccccaagctggaggccatgcagaccaagcaggtgagcaacattggaaggaaggactacctggcccacagctccatggacttctag

SEQ ID NO: 190030 - DNA, 1869 bp, Artificial Sequence
  derived and/or modified sequence
atggaggagagcgagcccgagcggaagcgggcccggaccgacgaggtaccagcagggggcagccgctcggaggccgaagacgaggatgacgaagattatgtcccatatgtaccactaagacagcgccgccaactcctgttgcagaagttactgcagcggcggagaaagggagccgccgaggaggagcaacaagactccgggtccgagcccaggggcgacgaagacgacattcccttaggtccccagtcgaacgtctctcttctcgatcagcaccagcacttaaaagagaaggccgaagccagaaaagaatccgcgaaagaaaagcaattgaaagaagaggaaaagattttggagtcagtggctgaagggagggcactcatgtccgtgaaagaaatggcaaaggggattacatacgacgaccctataaaaacaagttggactccaccccgatacgtgttatccatgagtgaggagcgacatgaaagagttagaaagaagtaccatatcctggtagagggcgacgggattcctcctccaattaaatccttcaaagagatgaaattcccagctgctatactgagaggactgaagaaaaaaggcatccatcatcctaccccaatacaaatccaaggcatcccaacaattctttccggtcgggatatgatcggaatagccttcacgggttcaggcaagactctggtgtttacgctgcccgtgatcatgttctgtctggaacaggaaaagagactgcctttctccaagcgcgagggaccatatggcttgatcatttgtccaagtagggaacttgctcgccaaacacacggaattcttgagtattattgtcggctgcttcaggaagacagcagtcccttactgaggtgtgcgctctgcatcgggggaatgtcagtcaaagagcaaatggagaccatccggcatggcgtgcacatgatggtggctactccagggcggcttatggatctgttgcagaagaaaatggtgtctcttgatatttgccgctacctagccctggatgaggcggaccgcatgatcgacatgggtttcgaaggggacatccggactatcttttcttactttaaggggcaaaggcagactctgctgttctcagccacaatgcctaagaagatccagaactttgcaaaaagtgctttagtgaaaccagtgaccatcaacgtggggagggcgggggcagcttcacttgacgtaatacaagaggtcgagtacgttaaggaagaagccaaaatggtgtatctgctggagtgtctccagaagacacctcccccggtgttgatcttcgctgagaagaaagcagacgtggacgccattcacgaatacctgctgctaaaaggcgtggaagcggttgctatccatggagggaaggaccaggaggagcggacaaaggccatagaggcctttcgtgaaggtaaaaaagatgtgctggtggccacggatgtcgcctccaagggtctggattttccagccatccagcatgttattaactatgatatgccggaagagattgagaactacgtgcatcgcatcggcagaacaggaaggagtggaaacaccggtatcgcaaccacctttattaacaaggcctgcgacgagtcagtgctgatggacctgaaagctctgttgttggaagcaaaacagaaggtccctcctgtgctccaagtgctgcattgtggtgatgagtctatgctggatattgggggggagcgaggatgtgcgttctgcggaggtcttgggcacagaattacggattgccctaagcttgaggcgatgcaaaccaagcaggtgagtaatataggtagaaaagactacctggctcacagctcaatggacttctag

SEQ ID NO: 190031 - DNA, 1869 bp, Artificial Sequence
  derived and/or modified sequence
atggaggaaagcgagcctgaaaggaaacgtgctcgcaccgatgaagtgccggcaggtggctcaagatcagaagcagaagatgaggacgatgaggactatgtgccttatgtgcccttacggcagagacgccaactgctactccagaagctgctccagcgccgacgcaagggcgcagctgaagaggaacaacaggacagtgggtccgagcctaggggggacgaggacgacattcccctgggtcctcagtccaacgtttctctgcttgatcagcaccagcaccttaaagagaaggctgaggcccgtaaagaaagtgccaaagagaagcagctcaaggaggaagaaaagatactcgagagtgtggccgaaggacgcgctcttatgtctgtcaaggaaatggctaaggggatcacctatgacgatcccattaagacgtcatggacacccccaaggtacgttttgtctatgagcgaggagcgacatgaacgcgtcagaaagaagtaccatattcttgtagaaggcgatggcatcccaccacctatcaagtcatttaaggagatgaagtttccggcagctatcttgagaggcctgaaaaaaaaaggaatacatcaccctacccctattcagattcaagggatccccacaattcttagcggcagagatatgattggaattgcgttcaccgggagcggaaaaaccctggtattcacacttccagtaattatgttctgtctggagcaagaaaagcgactccctttcagcaaaagggaggggccatacggactgatcatctgcccgagcagggagcttgcaaggcagactcatggcatattagagtattactgccgtctcttgcaggaggactctagtccattgctaagatgtgcactctgtatcggaggtatgagcgtaaaagagcaaatggagaccattagacacggggttcacatgatggtcgccacacccggaagactcatggacctgctgcagaaaaagatggtgtcactggatatttgccgctatctggcattagacgaagcggacagaatgatcgatatgggattcgaaggggatataagaaccatttttagctactttaaaggacagcgccagaccctgcttttctccgcaaccatgcccaaaaagatccaaaacttcgcaaaaagcgcgctcgtcaaaccagtgacaataaatgtgggcagagcgggagccgcatccctggacgtgatccaggaggtagagtacgttaaagaggaggccaaaatggtttacctgctcgagtgtctccaaaagactcctccgccagtcttgatctttgcagaaaaaaaggccgacgttgacgctattcacgaatacttgctgcttaaaggcgtcgaggccgtggccatccatggtgggaaagatcaggaggagaggacaaaagcaattgaagcattccgtgagggcaagaaagatgtgttggtggccacagacgttgcttccaagggacttgacttcccagctatccagcatgtcattaactatgacatgcccgaagagatcgagaactatgtacatcgaatagggagaacaggtcggagcggcaacaccgggatcgcaacaacctttattaacaaggcctgtgatgagtctgtgttaatggatcttaaggcgcttttgctggaggctaagcagaaggtgcctccagtgttgcaggttctgcattgtggcgatgagtcaatgctggatataggaggggagcgcggttgcgccttctgcggcggactgggtcacaggattactgactgtcccaagcttgaggccatgcagacaaagcaagtatcaaatataggcaggaaagactacctcgcacatagctccatggatttttag

SEQ ID NO: 190032 - DNA, 2607 bp, Artificial Sequence
  derived and/or modified sequence
acacaggcgcagtcagggaggcagggtgtgtcgagcggtttatcccgcaaccccggcgtccccggcagggatgaaagcgcagggcccacgcgaactcggcccgcagctcccggccctagaggacgcactgtccgccggcaggggcgtgcccaagacgccatgctctgggagaggttgggcacctggcaggccgccccgactccggatcagctgtctccgctgcgtacgtcttcctcttccaatgggcttggattgagccttctagcgcatattccaagtcctccaatgtcccacaatgccttgcagccggtttcgccctcggtcctggcaactgtcgcgtaaccacccatgaaagcgtccatgcctcgccgtgcgatagtatctccggaacaaatttgtccctctgcgcgatccggaactccgaggtcgttcctacgcgccgtcgttcgcctcttcacatcggattgggtctcacgcaaggatgaggcggggtttcgccgtggcgcgcatgcgtgcagcaaagaatggaggagtcggaacccgaacggaagcgggctcgcaccgacgaggtgcctgccggaggaagccgctccgaggcggaagatgaggacgacgaggactacgtgccctatgtgccgttacggcagcgccggcagctactgctccagaagctgctgcagcgaagacgcaagggagctgcggaggaagagcagcaggacagcggtagtgaaccccggggagatgaggacgacatcccgctaggccctcagtccaacgtcagcctcctggatcagcaccagcaccttaaagagaaggctgaagcgcgcaaagagtctgccaaggagaagcagctgaaggaagaagagaagatcctggagagtgttgccgagggccgagcattgatgtcagtgaaggagatggctaagggcattacgtatgatgaccccatcaaaaccagctggactccaccccgttatgttctgagcatgtctgaagagcgacatgagcgcgtgcggaagaaataccacatcctggtggagggagacggtatcccaccacccatcaagagcttcaaggaaatgaagtttcctgcagccatcctgagaggcctgaagaagaaaggcattcaccacccaacacccattcagatccagggcatccccaccattctatctggccgtgacatgataggcatcgctttcacgggttcaggcaagacactggtgttcacgttgcccgtcatcatgttctgcctggaacaagagaagaggttacccttctcaaagcgcgaggggccctatggactcatcatctgcccctcgcgggagctggcccggcagacccatggcatcctggagtactactgccgcctgctgcaggaggacagctcaccactcctgcgctgcgccctctgcattgggggcatgtccgtgaaagagcagatggagaccatccgacacggtgtacacatgatggtggccaccccggggcgcctcatggatttgctgcagaagaagatggtcagcctagacatctgtcgctacctggccctggacgaggctgaccgcatgatcgacatgggcttcgagggtgacatccgtaccatcttctcctacttcaagggccagcgacagaccctgctcttcagtgccaccatgccgaagaagattcagaactttgctaagagtgcccttgtaaagcctgtgaccatcaatgtggggcgcgctggggctgccagcctggatgtcatccaggaggtagaatatgtgaaggaggaggccaagatggtgtacctgctcgagtgcctgcagaagacacccccgcctgtactcatctttgcagagaagaaggcagacgtggacgccatccacgagtacctgctgctcaagggggttgaggccgtagccatccatgggggcaaagaccaggaggaacggactaaggccatcgaggcattccgggagggcaagaaggatgtcctagtagccacagacgttgcctccaagggcctggacttccctgccatccagcacgtcatcaattatgacatgccagaggagattgagaactatgtacaccggattggccgcaccgggcgctcgggaaacacaggcatcgccactaccttcatcaacaaagcgtgtgatgagtcagtgctgatggacctcaaagcgctgctgctagaagccaagcagaaggtgccgcccgtgctgcaggtgctgcattgcggggatgagtccatgctggacattggaggagagcgcggctgtgccttctgcgggggcctgggtcatcggatcactgactgccccaaactcgaggctatgcagaccaagcaggtcagcaacatcggtcgcaaggactacctggcccacagctccatggacttctgagccgacagtcttcccttctctccaagaggcctcagtccccaagactgccaccagtctacacatacagcagccccctggacagaatcagcatttcagctcagctggcctgggatgggccaggctggtcctggctgcctgttccctgtgctcttcagaattactgtttttgtttccttttaccccagctgccattaaagcccaaacctctagccca

SEQ ID NO: 190033 - DNA, 1869 bp, Artificial Sequence
  derived and/or modified sequence
atggaggagagcgagcccgagagaaagagagccagaaccgacgaggtgcccgccggcggcagcagaagcgaggccgaggacgaggacgacgaggactacgtgccctacgtgcccctgagacagagaagacagctgctgctgcagaagctgctgcagagaagaagaaagggcgccgccgaggaggagcagcaggacagcggcagcgagcccagaggcgacgaggacgacatccccctgggcccccagagcaacgtgagcctgctggaccagcaccagcacctgaaggagaaggccgaggccagaaaggagagcgccaaggagaagcagctgaaggaggaggagaagatcctggagagcgtggccgagggcagagccctgatgagcgtgaaggagatggccaagggcatcacctacgacgaccccatcaagaccagctggaccccccccagatacgtgctgagcatgagcgaggagagacacgagagagtgagaaagaagtaccacatcctggtggagggcgacggcatccccccccccatcaagagcttcaaggagatgaagttccccgccgccatcctgagaggcctgaagaagaagggcatccaccaccccacccccatccagatccagggcatccccaccatcctgagcggcagagacatgatcggcatcgccttcaccggcagcggcaagaccctggtgttcaccctgcccgtgatcatgttctgcctggagcaggagaagagactgcccttcagcaagagagagggcccctacggcctgatcatctgccccagcagagagctggccagacagacccacggcatcctggagtactactgcagactgctgcaggaggacagcagccccctgctgagatgcgccctgtgcatcggcggcatgagcgtgaaggagcagatggagaccatcagacacggcgtgcacatgatggtggccacccccggcagactgatggacctgctgcagaagaagatggtgagcctggacatctgcagatacctggccctggacgaggccgacagaatgatcgacatgggcttcgagggcgacatcagaaccatcttcagctacttcaagggccagagacagaccctgctgttcagcgccaccatgcccaagaagatccagaacttcgccaagagcgccctggtgaagcccgtgaccatcaacgtgggcagagccggcgccgccagcctggacgtgatccaggaggtggagtacgtgaaggaggaggccaagatggtgtacctgctggagtgcctgcagaagacccccccccccgtgctgatcttcgccgagaagaaggccgacgtggacgccatccacgagtacctgctgctgaagggcgtggaggccgtggccatccacggcggcaaggaccaggaggagagaaccaaggccatcgaggccttcagagagggcaagaaggacgtgctggtggccaccgacgtggccagcaagggcctggacttccccgccatccagcacgtgatcaactacgacatgcccgaggagatcgagaactacgtgcacagaatcggcagaaccggcagaagcggcaacaccggcatcgccaccaccttcatcaacaaggcctgcgacgagagcgtgctgatggacctgaaggccctgctgctggaggccaagcagaaggtgccccccgtgctgcaggtgctgcactgcggcgacgagagcatgctggacatcggcggcgagagaggctgcgccttctgcggcggcctgggccacagaatcaccgactgccccaagctggaggccatgcagaccaagcaggtgagcaacatcggcagaaaggactacctggcccacagcagcatggacttctag

SEQ ID NO: 190034 - protein, 395 aa, Artificial Sequence
  derived and/or modified sequence
MKIPLNKFPGFAKPGTEQYLLAKQLAKPKEKIPIIVGDYGPMWVYPTSTFDCVVADPRKGSKMYGLKSYIEYQLTPTNTNRSVNHRYKHFDWLYERLLVKFGSAIPIPSLPDKQVTGRFEEEFIKMRMERLQAWMTRMCRHPVISESEVFQQFLNFRDEKEWKTGKRKAERDELAGVMIFSTMEPEAPDLDLVEIEQKCEAVGKFTKAMDDGVKELLTVGQEHWKRCTGPLPKEYQKIGKALQSLATVFSSSGYQGETDLNDAITEAGKTYEEIASLVAEQPKKDLHFLMECNHEYKGFLGCFPDIIGTHKGAIEKVKESDKLVATSKITLQDKQNMVKRVSIMSYALQAEMNHFHSNRIYDYNSVIRLYLEQQVQFYETIAEKLRQALSRFPVM

SEQ ID NO: 190035 - protein, 595 aa, Artificial Sequence
  derived and/or modified sequence
MATKARVMYDFAAEPGNNELTVNEGEIITITNPDVGGGWLEGRNIKGERGLVPTDYVEILPSDGKDQFSCGNSVADQAFLDSLSASTAQASSSAASNNHQVGSGNDPWSAWSASKSGNWESSEGWGAQPEGAGAQRNTNTPNNWDTAFGHPQAYQGPATGDDDDWDEDWDGPKSSSYFKDSESADAGGAQRGNSRASSSSMKIPLNKFPGFAKPGTEQYLLAKQLAKPKEKIPIIVGDYGPMWVYPTSTFDCVVADPRKGSKMYGLKSYIEYQLTPTNTNRSVNHRYKHFDWLYERLLVKFGSAIPIPSLPDKQVTGRFEEEFIKMRMERLQAWMTRMCRHPVISESEVFQQFLNFRDEKEWKTGKRKAERDELAGVMIFSTMEPEAPDLDLVEIEQKCEAVGKFTKAMDDGVKELLTVGQEHWKRCTGPLPKEYQKIGKALQSLATVFSSSGYQGETDLNDAITEAGKTYEEIASLVAEQPKKDLHFLMECNHEYKGFLGCFPDIIGTHKGAIEKVKESDKLVATSKITLQDKQNMVKRVSIMSYALQAEMNHFHSNRIYDYNSVIRLYLEQQVQFYETIAEKLRQALSRFPVM

SEQ ID NO: 190036 - DNA, 1788 bp, Artificial Sequence
  derived and/or modified sequence
atggccaccaaggccagagtgatgtacgacttcgccgccgagcccggcaacaacgagctgaccgtgaacgagggcgagatcatcaccatcaccaaccccgacgtgggcggcggctggctggagggcagaaacatcaagggcgagagaggcctggtgcccaccgactacgtggagatcctgcccagcgacggcaaggaccagttcagctgcggcaacagcgtggccgaccaggccttcctggacagcctgagcgccagcaccgcccaggccagcagcagcgccgccagcaacaaccaccaggtgggcagcggcaacgacccctggagcgcctggagcgccagcaagagcggcaactgggagagcagcgagggctggggcgcccagcccgagggcgccggcgcccagagaaacaccaacacccccaacaactgggacaccgccttcggccacccccaggcctaccagggccccgccaccggcgacgacgacgactgggacgaggactgggacggccccaagagcagcagctacttcaaggacagcgagagcgccgacgccggcggcgcccagagaggcaacagcagagccagcagcagcagcatgaagatccccctgaacaagttccccggcttcgccaagcccggcaccgagcagtacctgctggccaagcagctggccaagcccaaggagaagatccccatcatcgtgggcgactacggccccatgtgggtgtaccccaccagcaccttcgactgcgtggtggccgaccccagaaagggcagcaagatgtacggcctgaagagctacatcgagtaccagctgacccccaccaacaccaacagaagcgtgaaccacagatacaagcacttcgactggctgtacgagagactgctggtgaagttcggcagcgccatccccatccccagcctgcccgacaagcaggtgaccggcagattcgaggaggagttcatcaagatgagaatggagagactgcaggcctggatgaccagaatgtgcagacaccccgtgatcagcgagagcgaggtgttccagcagttcctgaacttcagagacgagaaggagtggaagaccggcaagagaaaggccgagagagacgagctggccggcgtgatgatcttcagcaccatggagcccgaggcccccgacctggacctggtggagatcgagcagaagtgcgaggccgtgggcaagttcaccaaggccatggacgacggcgtgaaggagctgctgaccgtgggccaggagcactggaagagatgcaccggccccctgcccaaggagtaccagaagatcggcaaggccctgcagagcctggccaccgtgttcagcagcagcggctaccagggcgagaccgacctgaacgacgccatcaccgaggccggcaagacctacgaggagatcgccagcctggtggccgagcagcccaagaaggacctgcacttcctgatggagtgcaaccacgagtacaagggcttcctgggctgcttccccgacatcatcggcacccacaagggcgccatcgagaaggtgaaggagagcgacaagctggtggccaccagcaagatcaccctgcaggacaagcagaacatggtgaagagagtgagcatcatgagctacgccctgcaggccgagatgaaccacttccacagcaacagaatctacgactacaacagcgtgatcagactgtacctggagcagcaggtgcagttctacgagaccatcgccgagaagctgagacaggccctgagcagattccccgtgatgtag

SEQ ID NO: 190037 - DNA, 1788 bp, Artificial Sequence
  derived and/or modified sequence
atggctactaaggcacgagtcatgtatgactttgccgccgagcccggtaacaatgagttgaccgtcaatgaaggcgagataatcaccattacaaatccggatgttggcgggggatggctcgaggggcgtaatattaagggcgagcgcggcctagtgcccaccgattacgtggaaattctgccctccgacggcaaggatcaattctcatgcggaaactctgtggctgaccaggcctttctggatagcctgtcagccagcacagcccaagccagttcttccgccgcatccaataaccaccaggtcggaagtggcaacgacccctggagcgcatggagtgcatctaagagtggcaattgggagtccagcgaaggttggggggcccagccggaaggcgctggcgcgcagcggaatacgaacacacctaataactgggataccgcttttggccatcctcaggcttatcaaggcccagctacaggtgatgatgacgattgggatgaagactgggatgggcccaagagttctagttatttcaaggactctgagtcagctgacgccggtggtgcccagaggggcaacagtcgcgcgtcgagtagttctatgaaaataccccttaataaatttccaggattcgccaagcccggaacagagcaatatcttctggccaaacagctcgccaagccgaaggagaagatcccaattatcgtgggtgactacggccccatgtgggtttaccctaccagcactttcgattgcgtggtggccgacccccgtaaaggctcaaagatgtacggcctgaaatcctacatagagtaccaactcacgccgactaatactaaccggtctgtaaaccaccgttataagcattttgattggttatatgaacggcttctcgtaaaattcggatccgccattcctatcccttcgttgccagacaagcaggtcaccggacgctttgaagaagaatttattaaaatgcgaatggagcgtctgcaggcctggatgactaggatgtgtcgtcaccccgttatcagcgaatcggaggtgttccaacagttcctcaacttcagggatgagaaggaatggaagaccggcaagaggaaagctgaaagagacgaattggccggggtgatgatcttttcaaccatggaacctgaggcccccgatttagacctcgttgaaattgaacagaaatgcgaagccgtggggaaatttacgaaggcaatggatgatggtgtgaaggagcttctcacagttgggcaggaacactggaagcgttgtaccggtccactccccaaggagtatcagaagattggtaaagccctgcagagcctggcaaccgtttttagcagttctggctatcagggagaaaccgatctgaatgacgcgatcactgaagcaggaaagacatatgaagagattgcatctctggttgccgagcagccaaagaaggacctccactttttaatggagtgtaaccacgagtacaagggctttctcggatgctttcccgatatcatcggaacccacaaaggcgcaatagaaaaagtgaaagaatcagataagctggttgcgaccagcaagatcacgctgcaggacaaacagaatatggtgaagcgggtgtctataatgagctacgccctgcaggctgagatgaatcactttcactctaatagaatatacgattacaattccgtcattcggctgtacctggagcagcaagtgcagttttatgagaccatagcagagaagttaagacaagcactgagtaggtttccagtcatgtag

SEQ ID NO: 190038 - DNA, 1788 bp, Artificial Sequence
  derived and/or modified sequence
atggccactaaggcaagagtaatgtacgactttgccgctgaaccaggaaacaacgaattaactgttaacgagggtgagattatcaccatcaccaaccctgatgttggtggtggctggcttgaaggtcggaacattaagggagaaagaggtcttgtgcctaccgactacgtcgaaatcctgccgtctgacggtaaggatcagttttcgtgcggcaattctgtagcagatcaggccttccttgactcactgtccgcatccactgctcaagcctcttcatccgcagccagcaacaatcaccaagtagggtcaggcaacgatccgtggtctgcatggagcgcgtctaaaagcgggaattgggagtcttccgaaggctggggagcgcaacccgaaggcgctggagctcagcggaatacgaacactcctaacaactgggatacagcctttgggcatccccaagcatatcagggaccagcaacaggcgatgatgatgactgggacgaggactgggatggaccaaagtccagctcgtattttaaagatagtgaatccgcggatgccggcggggcccaacggggcaactctcgcgcaagctcaagttctatgaaaatcccgctgaataaatttccaggatttgcaaagccagggacggagcagtaccttcttgccaaacagctcgctaaacctaaggagaaaatacccattatcgtcggagattatggacctatgtgggtctatcccacttcaactttcgattgcgtcgtggctgatccacgcaagggctcaaagatgtacggactcaaatcttatatagagtaccaattaactcctactaatacgaaccgctccgtcaaccacagatacaagcactttgattggctttacgaacgcctcttggtcaagttcgggagtgccattcccattccgtccttaccagataagcaggtcacgggccgctttgaggaggagttcattaagatgcgcatggaaaggctgcaggcctggatgactagaatgtgccgccaccccgttatcagcgagagtgaggtatttcaacagttcctgaactttcgtgacgaaaaggagtggaagaccggaaaacggaaggccgagagggacgagctcgccggcgttatgatttttagcaccatggagccggaagcacccgatcttgacctagtggagatcgaacagaaatgcgaggctgtcggcaagtttactaaggcaatggatgatggggttaaggagctgttaaccgttggtcaagagcattggaaacgctgcacgggaccgttgcccaaggaataccagaaaatcggaaaggctctgcagagtttggccactgtgttctccagttcgggttatcagggcgaaacagaccttaatgacgcgattaccgaggctgggaaaacctatgaagagattgcatcactggtggctgagcagcctaaaaaagacctgcacttcctcatggaatgtaatcacgagtataaaggattcctggggtgttttcccgatatcattggcacccataaaggcgctattgagaaagtgaaggagtcggacaaactggtagccacctccaaaatcacattgcaggacaaacagaacatggtgaagagggtgagcataatgtcatacgcgctccaagctgagatgaaccatttccatagcaatagaatctatgactacaattcggttatccgactgtatcttgagcaacaggttcaattttacgagacaatcgcagaaaagctacggcaggccttgagtcgttttcccgtcatgtag

SEQ ID NO: 190039 - DNA, 1788 bp, Artificial Sequence
  derived and/or modified sequence
atggccaccaaggcccgggtgatgtatgactttgctgctgagcccggcaacaatgagctgactgtgaatgaaggagagatcatcaccatcaccaacccagatgtgggcggcggctggctggagggcaggaacatcaagggggagcggggcctggtgcccacagattatgtggagatcctgcccagtgatggcaaggaccagttcagctgtggcaacagcgtggccgaccaggccttcctggacagcctgagcgccagcacagcccaggccagcagcagcgctgccagcaacaaccaccaggtgggcagcggaaatgacccctggagcgcctggagcgccagcaagagcggcaactgggagagcagcgagggctggggcgcccagcctgagggcgctggggcccagaggaacaccaacacccccaacaactgggacacagccttcggccacccccaggcctaccagggccctgccactggagatgatgatgactgggatgaggactgggatggccccaagagcagcagctacttcaaggacagcgagagcgcagatgctgggggcgcccagaggggcaacagccgggccagcagcagctccatgaagatccccctgaacaagtttcctggctttgccaagccaggcacagagcagtacctgctggccaagcagctggccaagcccaaggagaagatccccatcatcgtgggggactatggccccatgtgggtgtaccccaccagcacctttgactgtgtggtggccgaccccaggaagggcagcaagatgtatggcctgaagagctacatcgagtaccagctgacccccaccaacaccaacagatctgtgaaccaccgctacaagcactttgactggctgtatgaaaggctgctggtgaagtttggaagtgccatccccatccccagcctgcctgacaagcaggtgacaggccgctttgaggaggagttcatcaagatgaggatggagcggctgcaggcctggatgaccaggatgtgccgccaccctgtgatcagcgagagcgaggtgttccagcagttcctgaacttcagagatgagaaggagtggaagacaggcaagaggaaggccgagagagatgagctggccggcgtgatgatcttcagcaccatggagcctgaggccccagacctggacctggtggagattgagcagaagtgtgaggccgtgggcaagttcaccaaggccatggatgatggagtgaaggagctgctgactgtgggccaggagcactggaagcgctgcaccggccccctgcccaaggagtaccagaagattggcaaggccctgcagagcctggccaccgtcttcagcagcagcggctaccagggcgagacagacctgaatgatgccatcacagaagctgggaagacctatgaggagatcgccagcctggtggccgagcagcccaagaaggacctgcacttcctgatggagtgcaaccacgagtacaagggcttcctgggctgcttcccagacatcatcggcacccacaagggggccatcgagaaggtgaaggagagtgacaagctggtggccaccagcaagatcaccctgcaggacaagcagaacatggtgaagagggtgtccatcatgtcctatgccctgcaggccgagatgaaccacttccacagcaaccgcatctatgactacaacagcgtcatccggctgtacctggagcagcaggtgcagttctatgagaccatcgccgagaagctgcggcaggccctgagccgcttccctgtgatgtag

SEQ ID NO: 190040 - DNA, 1788 bp, Artificial Sequence
  derived and/or modified sequence
atggccaccaaggcccgggtgatgtacgacttcgccgccgagcccggaaataatgaactcacagttaacgagggtgaaattatcaccatcacaaatcctgacgtgggcggtggttggttggagggccgcaacattaagggcgaacgcgggttagttcctacggactatgtcgaaatcttgccctctgacggaaaggatcagtttagctgcggaaattccgtggcggatcaagcctttctagattcactcagcgcctccaccgcccaagcttcatctagcgctgccagtaataatcaccaggtgggctctggcaatgacccatggtccgcctggtccgcctctaagtctggcaactgggagtcgagcgaaggctggggagcacaaccggagggcgcaggggcacagcgaaacacgaacactcccaataattgggacaccgcattcggacatccccaggcttaccagggccctgccactggagatgacgatgactgggacgaggattgggacgggccaaaaagcagttcctatttcaaagacagtgaatccgcagacgccggtggggcacagagggggaactcacgcgcctcctccagtagcatgaagatcccattgaacaagttcccaggatttgctaagcctgggactgagcagtatttgcttgccaagcaactcgccaaacccaaggaaaaaattccaattatagttggggattacggcccaatgtgggtataccctacttcaacatttgattgtgtcgtggcagacccacgtaaagggtctaaaatgtacggcctgaagagttatattgaataccaacttacaccaaccaacactaatagaagcgtcaatcataggtacaaacacttcgattggctgtacgagcgcctgctcgtcaagttcggctccgccataccgattccctccctgcctgacaagcaggtaaccggccgcttcgaggaggagttcattaaaatgcggatggagagactccaggcgtggatgacaaggatgtgcagacacccagttatttctgaatcggaggtcttccaacagttcctcaactttagagatgaaaaggaatggaaaacagggaaacggaaagctgaacgagatgagctagcaggcgtcatgatttttagcactatggaacccgaggctccagacctggacctggtggagattgaacagaagtgcgaagcagtgggcaaatttactaaggcaatggatgatggcgttaaagagctgcttaccgtgggtcaggagcattggaagcggtgtacaggccctctaccaaaggaatatcagaaaatcgggaaggccttgcagtctctcgcgaccgtgttcagcagttctggttaccaaggggagaccgacctaaatgacgctatcactgaagcaggcaagacatacgaagaaatcgcatcactggtggccgaacaacctaaaaaagacctccattttctgatggaatgtaaccatgaatacaagggatttctggggtgttttcctgacatcatcggaacccacaagggagctatcgaaaaagtaaaagagtccgacaaactggtcgccaccagtaaaattactctgcaagataagcagaacatggtgaagagagtgtccataatgagctacgcccttcaggcagaaatgaaccacttccattccaatcgcatctatgactacaattcggttattagactgtatctcgagcaacaggttcagttttacgagaccattgccgaaaagctgcggcaggccttgagtcggttccccgttatgtag

SEQ ID NO: 190041 - DNA, 1788 bp, Artificial Sequence
  derived and/or modified sequence
atggccaccaaggcccgggtgatgtacgacttcgccgccgagcccggaaacaatgaactgacagtgaatgagggcgaaatcatcactatcacaaaccccgatgtgggcggagggtggctcgaagggcgcaatatcaagggagagagagggctggtgcccaccgattacgtggaaatcctaccaagtgatggtaaggaccagttcagctgcggcaactctgtggcagaccaggctttccttgacagcctctctgccagtaccgcccaggcttccagctccgcggcctcaaataatcaccaggtgggctcagggaacgatccttggtctgcctggagtgcctctaagtccggaaattgggaaagtagtgaaggctggggagcacagcccgaaggcgctggtgcgcagcgaaacaccaacacacctaacaactgggacacggcatttggacatccgcaagcttaccagggaccagctacaggggatgacgatgactgggatgaagattgggacggcccaaagagctcaagctacttcaaggactccgagtctgctgacgccggtggtgcccagagaggaaatagccgcgcctcttcctcgtctatgaaaatccccctcaacaagttccccggtttcgccaagcctggtacagagcagtatctcctcgcgaagcagctcgccaaacctaaggaaaagatcccaattatcgtgggagactatggtcctatgtgggtgtaccccacaagcacctttgactgcgttgtcgctgatccaagaaagggctctaagatgtacggacttaaatcctacattgagtaccaattaacacctactaacaccaacaggagtgtcaatcaccgctacaagcatttcgactggctctacgagcgcttgctggtaaagttcggttctgcgattcccattccatcattgcccgataagcaggtgactgggcgtttcgaggaagaatttattaaaatgaggatggagcgccttcaggcttggatgacacgaatgtgtagacatcctgtcatttccgagtcagaagtattccagcagttcctgaacttccgcgacgaaaaggaatggaagactggaaaacggaaagccgagagagatgaactggcaggagtgatgatattttctacaatggaacctgaagcaccggatctcgacctcgtggagatcgagcaaaaatgtgaagccgtggggaaatttaccaaagcgatggatgatggagtgaaggagttgctgaccgtgggccaggaacactggaaaaggtgtactggtccgctacccaaggaataccagaaaatcgggaaggcgctccagtccctagcaacagtgttcagctcaagcgggtaccagggagagacagacctgaacgacgccataactgaagccgggaagacctatgaggagatcgccagcctggtggccgaacagccaaaaaaggacctgcactttttgatggagtgcaatcatgaatacaaggggttcctcggatgcttccccgacatcattgggacccataagggcgccattgaaaaggtgaaagagtccgacaagctcgtcgcgacctctaagatcaccttacaggacaagcagaatatggtcaagagggtgagtatcatgagttacgcgctgcaagccgagatgaaccattttcattctaaccgcatctatgactacaattcagtcatcaggctttaccttgaacagcaggttcagttctacgagaccatcgcggaaaaactgcgacaggccctcagccgctttccagtcatgtag

SEQ ID NO: 190042 - DNA, 1788 bp, Artificial Sequence
  derived and/or modified sequence
atggccaccaaggctcgtgtcatgtatgattttgctgcggaaccaggtaacaatgaactaactgttaatgaaggagagataattaccattacaaaccctgatgtgggcggaggatggctggaaggaagaaatataaaaggcgaacgtggattagtgcccacagactacgtcgagatcttaccgtcagatggaaaagaccagttctcttgcgggaatagcgtagcggaccaggcctttcttgattccctcagcgcatccactgcccaggctagttcctctgccgcaagcaataatcaccaggtgggtagtggcaacgatccctggtccgcctggtctgccagcaaaagtggcaactgggagagctctgagggatggggcgcacagccagaaggcgctggtgcacagaggaataccaacactccaaataattgggacacagcctttgggcatccacaagcataccagggcccagctaccggtgatgacgacgactgggatgaagactgggatggcccaaaaagctcttcctattttaaggattcggagagtgcagatgcaggcggtgctcagagaggaaatagcagagcctcctccagctctatgaaaattccactgaataaattccccggttttgctaaacccggaacagagcaatatctgttggccaagcagttggccaagcccaaggaaaaaatccccatcatagtaggcgactatgggccaatgtgggtctatccaacatcaacctttgactgtgtggtagcagacccacgcaagggatcaaagatgtatgggctgaagtcttacatcgaatatcagctaacccctaccaataccaaccggagcgtcaatcaccgctataagcattttgattggctgtacgaacggctcttggtcaaattcggctctgctatcccaattccctccctcccagataaacaggtgactgggcgatttgaagaggaattcatcaagatgaggatggagcggctgcaggcttggatgacccgcatgtgccggcatcccgtaatcagcgagagtgaggtctttcagcagtttctcaactttcgggacgagaaagaatggaaaacagggaaaagaaaggctgagcgcgatgagctggctggcgttatgatcttcagcacaatggagcctgaagctccggatctcgacttggtggagatagagcaaaagtgtgaagccgtggggaagtttacaaaagccatggacgatggtgtgaaagaactcctgacagtaggccaggagcattggaagcgttgcaccggccctctgcctaaggagtaccagaagattgggaaggcactccaaagcctagccaccgttttctccagcagcggctatcaaggggaaactgacctcaatgatgccataaccgaggctggcaagacatacgaggagattgcgagtttggtggccgaacagccaaagaaagatcttcatttcctcatggaatgtaaccacgaatacaaagggtttctgggctgtttcccagacatcatcggcactcacaagggtgcaatagaaaaggtcaaggagtctgataaactagtggctacatcaaagattactctacaagataaacagaatatggtcaaacgcgtgtcaatcatgtcttatgccctgcaggccgaaatgaaccattttcactctaaccggatctacgattacaacagcgtgattagattgtacttggaacagcaggtgcaattttacgagaccattgcggaaaagcttcgtcaggcactttcacgctttcccgtcatgtag

SEQ ID NO: 190043 - DNA, 1788 bp, Artificial Sequence
  derived and/or modified sequence
atggctacaaaggctcgagtgatgtatgattttgcggcagaacctggcaataacgagctgactgtcaacgagggtgagatcataaccatcacaaatcctgacgtcggcggaggttggctggaagggagaaacatcaaaggggaacgaggactggttccaacagactacgtggagattctcccctctgacggcaaggatcagttttcgtgcggtaattcggtggcagatcaggctttcctcgattctctttcagcctctacggctcaggcctcatcctcagcagccagtaacaatcaccaggtggggtccgggaacgacccatggtcggcatggtctgccagcaaaagtggtaactgggagtcttccgaaggctggggggctcaaccggagggggctggcgcacagcggaacacaaatacccctaacaattgggatactgcctttggtcaccctcaggcttatcaaggccctgcaacgggagacgatgatgattgggatgaagactgggatggcccaaagtctagttcatactttaaggactccgagtccgccgatgctggtggggctcagcggggaaactccagagcaagtagcagcagtatgaaaatcccactgaacaaattccctgggttcgctaagcctggcactgaacagtacctcctggcgaaacaactggccaaacccaaagaaaagatacccatcatcgtaggtgattatgggccaatgtgggtgtacccaacgagcaccttcgactgcgtcgtggctgaccctcgcaaaggtagcaaaatgtacggccttaagtcttatatcgagtatcaactgactccaacgaacactaaccgtagcgtcaatcatcgatataaacacttcgattggctgtatgaaaggctcctcgtcaagtttgggtccgcaatccccattccatcactgcctgataagcaagtgacaggcaggtttgaggaagaatttataaagatgcgaatggaacggctccaggcttggatgaccagaatgtgtcgacaccctgtcatctctgagtcagaggtctttcagcagttcctgaattttcgagatgagaaggaatggaaaactggcaaacggaaggccgagcgagatgaactggccggtgtgatgatctttagtacaatggaacctgaagctcccgatctggacctagtggagatcgaacagaagtgcgaggcagtggggaagtttactaaggccatggacgacggtgttaaggagctgctgaccgtgggtcaggaacactggaagagatgcaccggtcctcttcccaaagaataccagaaaattggtaaggcattgcagtccctggccacagtcttctcctcaagcggctaccaaggtgagactgatctgaatgatgccatcactgaggccggaaagacctacgaggaaattgcatccctggtggctgagcagcctaagaaagacttgcatttcctgatggagtgcaatcacgaatataagggatttctgggatgcttccccgatatcatcgggacccacaagggcgcaatagaaaaggtgaaggaaagtgacaagttagtagcaacttcaaagataacacttcaggataagcagaatatggtgaagcgcgtttcaataatgtcatatgccctccaggccgagatgaatcacttccatagtaatcgcatttatgattacaattcggttattcgcctgtatctggaacaacaagtgcaattttatgagaccatagctgaaaagctaagacaagccctctcacgattcccagtcatgtag

SEQ ID NO: 190044 - DNA, 4198 bp, Artificial Sequence
  derived and/or modified sequence
agcggctgggcctgagcgtcgagactcggggccgaggcggaggagcggccgccgcgccggggcccagccggagccgccgccctcgcccttgcctttgcctgcgcggctcagaatcaccatccgcggcgcgggagacgagccggccgtcccgggccgggggacccgcccgccatggccaccaaggctcgggttatgtatgattttgctgctgaacctggaaataatgaactgacggttaatgaaggagaaatcatcacaatcacaaatccggatgtaggtggaggatggctggaaggaagaaacatcaaaggagaacgagggctggttcccacagactacgttgaaattttacccagtgatggaaaagatcaattttcttgtggaaattcagtggctgaccaagccttccttgattctctctcagccagcacagctcaggccagttcgtcggctgccagcaacaatcaccaggttggcagtggcaatgacccctggtcagcctggagtgcctccaaatctgggaactgggaaagctcagaaggctggggggcccagccagagggggctggagcccaaagaaacacaaacactcccaacaactgggacactgccttcggccacccccaggcctaccaaggaccagcaactggtgatgatgatgactgggatgaagactgggatgggcccaaatcctcttcctactttaaggattcagagtcagctgatgcaggcggcgctcagcgaggaaacagtcgtgctagttcctcatccatgaaaattccccttaacaaatttcctggatttgcgaaacctggcacggaacagtatttgttggccaaacaactagcaaaacccaaagagaaaattcccatcattgttggagattatggcccaatgtgggtttatcctacctctacttttgactgtgtggtagcagatcccaggaaaggctccaaaatgtatggtctaaagagctacatcgaatatcagctaacacctactaacactaatcgatctgtaaaccacaggtataagcactttgactggttatatgagcgtctcctggttaagtttgggtcagccattccaatcccttctcttccagacaaacaagtcacaggccgctttgaagaggaatttatcaaaatgcgcatggagagacttcaggcctggatgaccaggatgtgtcgccatccagtaatctcagaaagtgaagttttccagcagttcctaaatttccgagatgagaaggaatggaaaactggaaagaggaaggccgagagagatgagctggcgggagtcatgatattttccaccatggaaccagaggcacctgacttggacttagtagaaatagagcagaagtgcgaggctgtggggaagttcaccaaggccatggatgacggcgtgaaggagctgctgacggtggggcaggagcactggaagcgctgcacgggcccattacccaaggaatatcagaagataggaaaggccttgcagagtttggccacagtgttcagttccagtggctatcaaggtgaaacagatctcaatgatgcaataacagaagcaggaaagacttatgaagaaattgccagtctcgtggcagaacagccaaagaaagatctccatttcctgatggaatgtaatcacgagtataaaggttttcttggctgcttccctgacatcattggcactcacaagggagcaatagaaaaagtgaaagaaagtgacaaactagttgcaacaagtaaaatcaccctacaagacaaacagaacatggtgaagagagtcagcatcatgtcttacgcgttgcaagctgagatgaatcactttcacagtaaccggatctatgattacaacagtgtcatccgcctgtacctggagcagcaagtgcaattttacgaaacgattgcagaaaagctgaggcaggccctcagccgctttccagtgatgtaggacagaacgggccttgaagagaatgccgcgtgctttctcctgacttggggcaatgcaattcaaaactttttttcccctattattcagaaaaaaaaggaaacaaaaccaaaaagaaagagttgcaaaaaactgcatttattttattagccaccctaaatgcgtcagttatttagggatggtcttttgttcatttccgcatccattatttaaaccagtggaaattgtctctatttttggaaagtacttaaaagttaccagaattttcaatggaaaatgaggggtttctccccactgatattttacatagagtcataatttatatgtcttataaattataagtcttatataatttataagtctcccacaatcttccagttcttacccagtgtcagataattaattactaattactttcttaaaaacatgaactatgccagaataaaaaatatctatgtttgtatatttttataactcctttcagtcctctggggctcctgtcattgagggaagtcgttacgcctttcactgccacagttacagctcaagtgcttacacttcaagagggaggacgctgggggcccctggggctgctagtgccatcgtggtgtgtggcaggtgggccatcccatgtccctccagggggaccccacagcctggcagatgagcagatacccctggccacccatgtcctcagcgacatttctgatgtgctgctcttatgtgaggaccagtgctttctctctttgcacttccttcctaatcttggttaaggcatgttttatgccatgaagaatacattagaagaattgagggactttgtagagaattttgtggctttggtccaacgggtgagtggctgtgcggaggcctgtgttcgggagggcctgggagaaggagggcacccagcaccccggcgtctctggccctttcttattctttggctcctcatccaccgtgatgagaagcgctgctgtggccacggcacactgcttggcttgggtggcgggttcatggccagttggtgtcatcagcaaagagaaaaagcacaggttagctccccattagatggaaaagtgtagggactgagaagggctgcagcctcagcagtgtacagagtccccggcgctctgaggttggagagaaagaacagaccagcgcccttcccgactacatccgaaacttcacacagggtgtttctgagcaccagcacttccagcgcttcacttaacggcataaagcaaaacaggaccttggcacaccgtcagctcgaactcaacactggcagccaccgtctcacccctgcggaggagcgctcccgtctcccacaggtgccttaccgcgttccctcccgctgctttcatttttctgacctaataattacgggaaatggaaagtctgggccagcatcaataaaatgacaccaaaaataagtagatgaaatcaaatgaatatgagaacatcttgttcttcaatatcacgggtttttgttaatgtttcataagtaattctccccacttgatttttcttctataaaatcccatagaacaatgtttatgctatagccatttaatatatgtacaaattgtaaagaatatgtataaatgttttacacgaatgtaagagcatgtagaagccaacatataaataaattgtttaaaaaaactgtacagtaaattctcaaagcactttttcaaaacactttttggactttgtgtgtgatttttgttgttgttgttaagtactttttattccagctgctgaaaatggtccaggtaatgaattcttccccaaatcctatttcttctgacatgaattcatcatttcagttccgtaggtcagtgttgcggtccgggaagcgtatcataaccacctgggagttgccaagaagcagacagtctcccagtgtctgactctcggatatttggatttgactggtgtgaggcaaagtgaaaaagggatgggggaaatggagatggcacgggctcctcagagcgtggtagccgactgtgaggaaaagcagagggaatgtgaaagaaaataagagaatccacgggatttgatgcctggaagattctccttcaagtggcaacatggcatatatatccttctccggggagtcacatgcaccatttggttcttagatacgttgatgttttgatttttaatgatttgtatcaacctgtaggtaccacagaagagctgtagtcatacaatcacataacttttacaaatatagtgg

SEQ ID NO: 190045 - DNA, 1886 bp, Artificial Sequence
  derived and/or modified sequence
agtagccgagcgcccttgcctttgcctgcgcggctcagaatcaccatccgcggcgcgggagacgagccggccgtcccgggccgggggacccgcccgccatggccaccaaggctcgggttatgtatgattttgctgctgaacctggaaataatgaactgacggttaatgaaggagaaatcatcacaatcacaaatccggatgtaggtggaggatggctggaaggaagaaacatcaaaggagaacgagggctggttcccacagactacgttgaaattttacccagtgatggaaaagatcaattttcttgtggaaattcagtggctgaccaagccttccttgattctctctcagccagcacagctcaggccagttcgtcggctgccagcaacaatcaccaggttggcagtggcaatgacccctggtcagcctggagtgcctccaaatctgggaactgggaaagctcagaaggctggggggcccagccagagggggctggagcccaaagaaacacaaacactcccaacaactgggacactgccttcggccacccccaggcctaccaaggaccagcaactggtgatgatgatgactgggatgaagactgggatgggcccaaatcctcttcctactttaaggattcagagtcagctgatgcaggcggcgctcagcgaggaaacagtcgtgctagttcctcatccatgaaaattccccttaacaaatttcctggatttgcgaaacctggcacggaacagtatttgttggccaaacaactagcaaaacccaaagagaaaattcccatcattgttggagattatggcccaatgtgggtttatcctacctctacttttgactgtgtggtagcagatcccaggaaaggctccaaaatgtatggtctaaagagctacatcgaatatcagctaacacctactaacactaatcgatctgtaaaccacaggtataagcactttgactggttatatgagcgtctcctggttaagtttgggtcagccattccaatcccttctcttccagacaaacaagtcacaggccgctttgaagaggaatttatcaaaatgcgcatggagagacttcaggcctggatgaccaggatgtgtcgccatccagtaatctcagaaagtgaagttttccagcagttcctaaatttccgagatgagaaggaatggaaaactggaaagaggaaggccgagagagatgagctggcgggagtcatgatattttccaccatggaaccagaggcacctgacttggacttagtagaaatagagcagaagtgcgaggctgtggggaagttcaccaaggccatggatgacggcgtgaaggagctgctgacggtggggcaggagcactggaagcgctgcacgggcccattacccaaggaatatcagaagataggaaaggccttgcagagtttggccacagtgttcagttccagtggctatcaaggtgaaacagatctcaatgatgcaataacagaagcaggaaagacttatgaagaaattgccagtctcgtggcagaacagccaaagaaagatctccatttcctgatggaatgtaatcacgagtataaaggttttcttggctgcttccctgacatcattggcactcacaagggagcaatagaaaaagtgaaagaaagtgacaaactagttgcaacaagtaaaatcaccctacaagacaaacagaacatggtgaagagagtcagcatcatgtcttacgcgttgcaagctgagatgaatcactttcacagtaaccggatctatgattacaacagtgtcatccgcctgtacctggagcagcaagtgcaattttacgaaacgattgcagaaaagctgaggcaggccctcagccgctttccagtgatgtag

SEQ ID NO: 190046 - protein, 1406 aa, Artificial Sequence
  derived and/or modified sequence
MRGFLARPFLSTNQHLAQWGSPLPQGKGLVQLPSQHTRHSRPFHELCSKEENSATVPKLISLVVSSETIDFSNKTMDSRRDWEREKRILEGKLQLPKALARTQRARDEGRRAWTSRWLQRRRSPESCEAPLSAPLWGPQRGLPGREPLRSRSASAIALRTIGHILALLLRLLHLGLGSGGCREDVPPSGRGKKEEKMKKHRRALALVSCLFLCSLVWLPSWRVCCKESSSASASSYYSQDDNCALENEDVQFQKKNTESKKLSPPVVETLPTVDLHEESSNAVVDSETVENISSSSTSEITPISKLDEIEKSGTIPIAKPSETEQSETDCDVGEALDASAPIEQPSFVSPPDSLVGQHIENVSSSHGKGKITKSEFESKVSASEQGGGDPKSALNASDNLKNESSDYTKPGDIDPTSVASPKDPEDIPTFDEWKKKVMEVEKEKSQSMHASSNGGSHATKKVQKNRNNYASVECGAKILAANPEAKSTSAILIENMDLYMLNPCSTKIWFVIELCEPIQVKQLDIANYELFSSTPKDFLVSISDRYPTNKWIKLGTFHGRDERNVQSFPLDEQMYAKYVKVELLSHFGSEHFCPLSLIRVFGTSMVEEYEEIADSQYHSERQELFDEDYDYPLDYNTGEDKSSKNLLGSATNAILNMVNIAANILGAKTEDLTEGNKSISENATATAAPKMPESTPVSTPVPSPEYVTTEVHTHDMEPSTPDTPKESPIVQLVQEEEEEASPSTVTLLGSGEQEDESSPWFESETQIFCSELTTICCISSFSEYIYKWCSVRVALYRQRSRTALSKGKDYLVLAQPPLLLPAESVDVSVLQPLSGELENTNIEREAETVVLGDLSSSMHQDDLVNHTVDAVELEPSHSQTLSQSLLLDITPEINPLPKIEVSESVEYEAGHIPSPVIPQESSVEIDNETEQKSESFSSIEKPSITYETNKVNELMDNIIKEDVNSMQIFTKLSETIVPPINTATVPDNEDGEAKMNIADTAKQTLISVVDSSSLPEVKEEEQSPEDALLRGLQRTATDFYAELQNSTDLGYANGNLVHGSNQKESVFMRLNNRIKALEVNMSLSGRYLEELSQRYRKQMEEMQKAFNKTIVKLQNTSRIAEEQDQRQTEAIQLLQAQLTNMTQLVSNLSATVAELKREVSDRQSYLVISLVLCVVLGLMLCMQRCRNTSQFDGDYISKLPKSNQYPSPKRCFSSYDDMNLKRRTSFPLMRSKSLQLTGKEVDPNDLYIVEPLKFSPEKKKKRCKYKIEKIETIKPEEPLHPIANGDIKGRKPFTNQRDFSNMGEVYHSSYKGPPSEGSSETSSQSEESYFCGISACTSLCNGQSQKTKTEKRALKRRRSKVQDQGKLIKTLIQTKSGSLPSLHDIIKGNKEITVGTFGVTAVSGHI

SEQ ID NO: 190047 - DNA, 5917 bp, Artificial Sequence
  derived and/or modified sequence
cccaaagttcgaaaccaacagaacgaaaagcaacgaagcacacttaaagtgaggaacccggcaagcggcgaaattcttgctgaagagaagaaaaagcgaaaggttttccgctgcaaccaatcagatgagaggattcttggcacgcccctttctatctaccaatcaacatctagctcaatggggcagtccattgccacagggaaagggcttggtgcagcttccctcacaacacacacgtcattctaggccattccacgaactgtgctcaaaagaggaaaacagtgcaacagttccaaagctgatcagtctcgtggtgagcagcgaaactatagacttctctaacaaaaccatggattctaggagggactgggaaagagaaaaacgaattctggaaggcaaactacaactcccaaaggcccttgcgcggactcagcgcgcgagggacgaagggcggcgggcgtggacgagccggtggctgcagcggcggcggtccccggagtcctgtgaagcgcccctgtccgcgcctctgtggggccctcagagagggctgccaggacgcgagccactgaggagccgctcagccagcgccatagcccttaggactatcggtcacattctcgcgctcctgctccggctcctccatcttggcctcggcagtggcggctgccgggaggatgtgccgccttctggcagggggaagaaggaggagaagatgaagaagcaccggcgggccttggccctggtctcctgcctctttctgtgctctctggtctggcttcccagctggcgtgtatgttgtaaagagagttcttcagcttcagcgtcatcatattactctcaagatgacaactgcgcactagaaaatgaagatgtacaattccagaaaaagaatacagagtcaaaaaagttaagtccaccggtggtggagacactccctacagttgatttgcatgaagagtcttccaatgcagttgtggacagtgaaactgttgaaaatatttccagctcatctacctcagaaatcactccaatctcaaagcttgatgaaatagaaaaatctggtactattccgatagccaaaccaagtgaaactgagcagtctgaaactgattgtgatgttggtgaggcccttgatgctagtgctccaattgaacaaccttcctttgtcagtccacctgacagccttgttggccagcatatagaaaatgtatcatcttcacatggtaaaggaaagataacaaaatcagaatttgaatcaaaagtttcagcaagtgaacagggcggtggtgatccaaaatctgcattgaatgcttcagataatttaaaaaatgagagctctgattatacaaaaccaggagacattgaccctacatcagtagcaagtcccaaagatccagaagatataccaacatttgatgaatggaagaagaaagttatggaagtagaaaaagaaaaaagtcagtcgatgcatgcatcttctaatggaggttcacatgccaccaaaaaggtccagaaaaatcgaaataattatgcctcagtagaatgtggtgccaaaattctagcagctaatccagaagccaagagcacatctgctattcttatagaaaatatggatctttacatgttgaatccttgcagcactaaaatttggtttgttattgaactttgtgaaccaattcaagtaaaacagcttgatattgcaaattatgaattattttcttctactcctaaagattttctggtttctatcagtgacagatatccaacaaataagtggattaagctgggtacttttcatggtagagatgagcggaatgtacagagtttccctttagatgaacagatgtatgcaaaatatgtcaaggttgagttgctatcacattttggatcagagcacttttgtccattaagccttataagggtatttggcactagcatggtggaagaatatgaagaaattgctgattcccagtatcactcagaacgccaggaactatttgatgaggactatgattatccactggattataatactggagaggataaatcctcaaaaaatcttcttggttctgctacaaatgccattctaaatatggtgaatattgctgctaatattctgggagcaaaaactgaagacctgacagaaggaaataaaagtatatctgagaatgccactgccacagctgcacctaaaatgcctgaatcaactcctgtttcaactcctgttccatctcctgagtatgtaaccactgaagtacacacacatgacatggagccgtcaacaccagatactccaaaagagagtcccattgtacagttagttcaagaggaggaagaggaggcaagtccatctacagtgacccttctgggcagcggtgaacaggaagatgaatcatcaccctggtttgagtcagagacacaaatattttgcagtgaactgaccacaatttgttgtatttctagtttttcagaatacatatataaatggtgttcagttagagttgctctttatcggcagcgcagccgaactgctttgagtaaaggaaaagattatcttgtgttagctcaaccacccttactacttcctgcggaatcagtagatgtttcagtattgcaacctctgagtggagaattggaaaatacgaatatagaaagggaagctgaaactgttgttctgggtgatttaagtagtagtatgcaccaggatgacttggtgaatcacactgtagatgcagttgaacttgaaccaagccattctcaaactctttctcagtctcttcttttagatattaccccagaaatcaatcccttgcctaaaatagaagtatctgagtctgttgaatatgaggcaggacatataccatcaccagtgattccccaagagagttctgttgagatcgataatgaaacagaacaaaagtctgagagctttagttctatagagaaaccatctattacctatgaaacaaataaagttaatgagttaatggataatattataaaagaagatgtgaactccatgcaaattttcacaaagctgtctgaaacaatagtgccaccaataaatacagccactgtacccgacaatgaagatggggaagccaaaatgaatatagctgacacagcaaagcaaactttgatttctgttgtggattcttcttcattacctgaagtaaaagaagaagaacagtctccagaagatgcccttttgagagggttacagaggacagctacagatttttatgctgaattgcaaaattctacagatctaggatatgctaatggaaatcttgtacatggatcaaaccaaaaggagtcagtatttatgagacttaataatcgtattaaagccttagaagttaacatgtctctcagtggtcgctatctggaggagcttagccaaaggtaccgaaaacaaatggaagaaatgcaaaaggctttcaataaaacaatcgtgaaacttcagaatacttcaagaatagcagaggagcaggatcagcggcaaactgaagccatccagttgctacaggcacagctgaccaacatgacacagcttgtttcaaatttatcagcaacagtagcagaattgaaacgggaggtttcagatcgacaaagctatcttgtcatatctttggttctttgtgttgtcttgggactgatgctttgtatgcagcgttgtcgaaatacttctcaatttgatggagattatatttcaaaacttcctaaaagtaatcagtatccaagccctaaaaggtgtttctcttcctatgatgatatgaatttgaaaagaagaacttcattcccactcatgagatccaagtctctacagttaactggcaaagaagtagacccaaatgatttgtacattgtagaacccctcaagttttctccagaaaagaagaagaagcgctgcaagtacaaaattgaaaaaattgagaccataaagcctgaagaaccattgcaccccatagccaatggcgacataaaaggaagaaagccctttacgaaccagagagatttttctaatatgggagaagtttatcactcttcttataaaggtcctccatctgaaggaagctcagaaacttcatcacagtcagaagagtcctatttttgtggcatttcagcttgcacaagtctgtgcaatggacagtctcaaaagacaaaaactgagaagagggctttaaaacgaagacgatctaaagtccaagaccaaggaaaattgataaaaactctaatacagactaagtcgggatcattgccgagcctgcatgacataatcaaaggaaacaaagagatcaccgtgggaacatttggtgttacagcagtctcgggacatatctaaaattaattgaacttttcatacagaagacttttttgttgttgttctttgaagaacagtctgtagtatttgaagggtttgggggagggagaaaatattaatgggaaaggcattcagaaattatggtttctacctttttaaaaagtagatgggattgtgtcaatcttggttaatgagctacagttttacaaagctgatcacttcctataaggacaatggtagacattttataaagatgttttttcacaagattaattactgggacaaaagtaatttggaagcccagttccttaggtgggataggaatgaaagcctaaacctcttcctttagctttgttcctatttcttgcaccttcccatatttatgtgccttttgtctatttataatgccactggaagaggagggataactttttctgttatttgatttcttttataactttgttaggtttttgaagctgcaaacactacaatgctttgagggggtctgtgcctgaagctcaggagtgtggatcagacagtctaaagatcctaaaaacttgccaactggatctttgtttagcaaactcactggaaatgaacacttaatggaatttttaagtctgttctgttaggtagatggtgatgctcttgttattttcacttattcagactggattacttcttacttagttactaactcaatgaggaaaaatccctacaggatctttttttgcaaacaactgatatatgcagacaaatttttgacaaattcaccttttaaacacacttaaccatttgtgaaggttttctttagcttacattttaaacatacacaataaacactaatcctccaaactttcactgtttttattagtatgaatataaaatttgaaggtttggccaattagtacaagtctcatgatataatcactgcctgcatacatatgcacagatccagttagtgagtttgtcaagcttaatctaattggttaagtctaaagagattattattccttgatgtttgctttgtattggctacaaatgtgcagaggtaatacatatgtgatgtcgatgtctctgtctttttttttgtctttaaaaaataattggcagcaactgtatttgaataaaatgatttcttagtatgattgtacagtaatgaatgaaagtggaacatgtttctttttgaaagggagagaattgaccatttattgttgtgatgtttaagttataacttattgagcacttttagtagtgataactgtttttaaacttgcctaatacctttcttgggtattgtttgtaatgtgacttatttaacgccttttttgtttgtttaagttgctgctttaggttaacagcgtgttttagaagatttaaatttctttcctgtctgcacaattagctattcagagcaagagggcctgattttatagaagccccttgaaaagaggtccagatgagagcagagatacagtgagaaattatgtgatctgtgtgttgtgggaagagaattttcaatatgtaactacggagctgtagtgccattagaaactgtgaatttccaaataaatctgaacacttgtctttatt

SEQ ID NO: 190048 - DNA, 4221 bp, Artificial Sequence
  derived and/or modified sequence
atgagaggcttcctggccagacccttcctgagcaccaaccagcacctggcccagtggggcagccccctgccccagggcaagggcctggtgcagctgcccagccagcacaccagacacagcagacccttccacgagctgtgcagcaaggaggagaacagcgccaccgtgcccaagctgatcagcctggtggtgagcagcgagaccatcgacttcagcaacaagaccatggacagcagaagagactgggagagagagaagagaatcctggagggcaagctgcagctgcccaaggccctggccagaacccagagagccagagacgagggcagaagagcctggaccagcagatggctgcagagaagaagaagccccgagagctgcgaggcccccctgagcgcccccctgtggggcccccagagaggcctgcccggcagagagcccctgagaagcagaagcgccagcgccatcgccctgagaaccatcggccacatcctggccctgctgctgagactgctgcacctgggcctgggcagcggcggctgcagagaggacgtgccccccagcggcagaggcaagaaggaggagaagatgaagaagcacagaagagccctggccctggtgagctgcctgttcctgtgcagcctggtgtggctgcccagctggagagtgtgctgcaaggagagcagcagcgccagcgccagcagctactacagccaggacgacaactgcgccctggagaacgaggacgtgcagttccagaagaagaacaccgagagcaagaagctgagcccccccgtggtggagaccctgcccaccgtggacctgcacgaggagagcagcaacgccgtggtggacagcgagaccgtggagaacatcagcagcagcagcaccagcgagatcacccccatcagcaagctggacgagatcgagaagagcggcaccatccccatcgccaagcccagcgagaccgagcagagcgagaccgactgcgacgtgggcgaggccctggacgccagcgcccccatcgagcagcccagcttcgtgagcccccccgacagcctggtgggccagcacatcgagaacgtgagcagcagccacggcaagggcaagatcaccaagagcgagttcgagagcaaggtgagcgccagcgagcagggcggcggcgaccccaagagcgccctgaacgccagcgacaacctgaagaacgagagcagcgactacaccaagcccggcgacatcgaccccaccagcgtggccagccccaaggaccccgaggacatccccaccttcgacgagtggaagaagaaggtgatggaggtggagaaggagaagagccagagcatgcacgccagcagcaacggcggcagccacgccaccaagaaggtgcagaagaacagaaacaactacgccagcgtggagtgcggcgccaagatcctggccgccaaccccgaggccaagagcaccagcgccatcctgatcgagaacatggacctgtacatgctgaacccctgcagcaccaagatctggttcgtgatcgagctgtgcgagcccatccaggtgaagcagctggacatcgccaactacgagctgttcagcagcacccccaaggacttcctggtgagcatcagcgacagataccccaccaacaagtggatcaagctgggcaccttccacggcagagacgagagaaacgtgcagagcttccccctggacgagcagatgtacgccaagtacgtgaaggtggagctgctgagccacttcggcagcgagcacttctgccccctgagcctgatcagagtgttcggcaccagcatggtggaggagtacgaggagatcgccgacagccagtaccacagcgagagacaggagctgttcgacgaggactacgactaccccctggactacaacaccggcgaggacaagagcagcaagaacctgctgggcagcgccaccaacgccatcctgaacatggtgaacatcgccgccaacatcctgggcgccaagaccgaggacctgaccgagggcaacaagagcatcagcgagaacgccaccgccaccgccgcccccaagatgcccgagagcacccccgtgagcacccccgtgcccagccccgagtacgtgaccaccgaggtgcacacccacgacatggagcccagcacccccgacacccccaaggagagccccatcgtgcagctggtgcaggaggaggaggaggaggccagccccagcaccgtgaccctgctgggcagcggcgagcaggaggacgagagcagcccctggttcgagagcgagacccagatcttctgcagcgagctgaccaccatctgctgcatcagcagcttcagcgagtacatctacaagtggtgcagcgtgagagtggccctgtacagacagagaagcagaaccgccctgagcaagggcaaggactacctggtgctggcccagccccccctgctgctgcccgccgagagcgtggacgtgagcgtgctgcagcccctgagcggcgagctggagaacaccaacatcgagagagaggccgagaccgtggtgctgggcgacctgagcagcagcatgcaccaggacgacctggtgaaccacaccgtggacgccgtggagctggagcccagccacagccagaccctgagccagagcctgctgctggacatcacccccgagatcaaccccctgcccaagatcgaggtgagcgagagcgtggagtacgaggccggccacatccccagccccgtgatcccccaggagagcagcgtggagatcgacaacgagaccgagcagaagagcgagagcttcagcagcatcgagaagcccagcatcacctacgagaccaacaaggtgaacgagctgatggacaacatcatcaaggaggacgtgaacagcatgcagatcttcaccaagctgagcgagaccatcgtgccccccatcaacaccgccaccgtgcccgacaacgaggacggcgaggccaagatgaacatcgccgacaccgccaagcagaccctgatcagcgtggtggacagcagcagcctgcccgaggtgaaggaggaggagcagagccccgaggacgccctgctgagaggcctgcagagaaccgccaccgacttctacgccgagctgcagaacagcaccgacctgggctacgccaacggcaacctggtgcacggcagcaaccagaaggagagcgtgttcatgagactgaacaacagaatcaaggccctggaggtgaacatgagcctgagcggcagatacctggaggagctgagccagagatacagaaagcagatggaggagatgcagaaggccttcaacaagaccatcgtgaagctgcagaacaccagcagaatcgccgaggagcaggaccagagacagaccgaggccatccagctgctgcaggcccagctgaccaacatgacccagctggtgagcaacctgagcgccaccgtggccgagctgaagagagaggtgagcgacagacagagctacctggtgatcagcctggtgctgtgcgtggtgctgggcctgatgctgtgcatgcagagatgcagaaacaccagccagttcgacggcgactacatcagcaagctgcccaagagcaaccagtaccccagccccaagagatgcttcagcagctacgacgacatgaacctgaagagaagaaccagcttccccctgatgagaagcaagagcctgcagctgaccggcaaggaggtggaccccaacgacctgtacatcgtggagcccctgaagttcagccccgagaagaagaagaagagatgcaagtacaagatcgagaagatcgagaccatcaagcccgaggagcccctgcaccccatcgccaacggcgacatcaagggcagaaagcccttcaccaaccagagagacttcagcaacatgggcgaggtgtaccacagcagctacaagggcccccccagcgagggcagcagcgagaccagcagccagagcgaggagagctacttctgcggcatcagcgcctgcaccagcctgtgcaacggccagagccagaagaccaagaccgagaagagagccctgaagagaagaagaagcaaggtgcaggaccagggcaagctgatcaagaccctgatccagaccaagagcggcagcctgcccagcctgcacgacatcatcaagggcaacaaggagatcaccgtgggcaccttcggcgtgaccgccgtgagcggccacatctag

SEQ ID NO: 190049 - DNA, 4221 bp, Artificial Sequence
  derived and/or modified sequence
atgcgagggttcctggctcgacctttcctgtccactaaccaacatttagcacagtggggaagtcccttacctcagggtaagggccttgtccagcttccttcgcagcacacccgccactcaagaccctttcatgagttgtgcagtaaggaagaaaactcagcaaccgttcccaagctgatctctttggtagtgtcgtctgagaccatcgatttcagcaataaaaccatggattcgagacgtgactgggagagagagaagcgtatcctcgaggggaagctgcagctgcccaaagctctagcgagaacccagcgcgcccgagatgaaggtagacgagcctggacatcccgctggctccagagacgtcggtcaccggaatcttgtgaggcccctctgagtgcccccctgtggggaccccagcgaggcctgcctggcagggaacccctgaggagtcgaagtgcgagcgcaattgcactcagaacaatcgggcacatactagcactcctgttacggctgcttcacctgggcctggggtctgggggatgtagagaagatgtgccaccgtcggggcggggtaaaaaggaggagaagatgaagaaacaccgacgagcgctggccctggtttcatgtctgtttttgtgtagcctggtctggctgccaagttggagggtgtgctgtaaagaatcgtctagtgcctctgcctcctcctattattcacaggatgataactgcgccctcgagaacgaagatgtacaatttcagaaaaaaaataccgagtccaagaagctgagcccaccggttgttgagacgctgcccaccgtggatctgcatgaagagtcgagcaatgcagttgttgacagtgaaaccgtggaaaacataagtagttcaagtacgtctgagatcacccctatatccaagctggacgaaattgaaaaaagtgggacaatccccatcgccaagcctagcgagactgagcagtcagaaacggattgtgacgtgggcgaagctctggatgctagcgcccctatcgaacagcctagcttcgtgagcccacctgacagcctggtcgggcagcacattgagaacgtttcatcatcacatggcaaaggaaagattaccaagagtgaattcgaatctaaggtctcagcctcagagcagggaggtggcgaccccaagagcgcattgaatgcaagcgacaacttgaagaatgaaagcagtgattacaccaagcccggagatatagacccgacaagtgtcgcttccccaaaagatccggaggatattccaaccttcgacgaatggaaaaaaaaggtaatggaggtggagaaggagaaatctcagagcatgcatgcctcttctaatggcggcagccacgcgacaaagaaggtgcaaaagaaccgcaacaactacgccagcgtcgaatgtggcgctaaaattctggccgccaatcccgaggcaaaaagcacatccgccattttaatcgaaaatatggatctctatatgttgaatccttgcagcactaagatttggtttgtcatcgaattgtgtgagccaattcaggttaaacagttggacatagctaactacgaattgttcagttctactccgaaagactttctcgtgagtatttcagacagataccccaccaataagtggatcaaactcggaacatttcatggacgggacgagcgcaacgttcagtcgtttccgttggatgaacaaatgtacgcgaagtatgtgaaagtcgaactactcagccactttggcagtgaacacttttgcccattatctctaattcgtgtatttggtacatctatggtcgaagagtacgaagagatcgccgacagtcaataccattctgaaaggcaggagttgtttgacgaggactacgattatccacttgactacaatactggagaagacaagtcttccaaaaatctgctggggtccgccactaacgctattctcaatatggtcaacatcgctgccaatatcctgggggctaaaaccgaggatttaaccgaagggaataagtcaattagtgaaaacgccacagccaccgccgccccaaaaatgcctgaatccactcctgtgagcactccagtgccctcaccagagtacgtgaccactgaagtgcacacacacgacatggaaccctctacccccgacacgccaaaggagtctcccatcgtgcagttggttcaggaggaagaggaggaggccagccccagtacggtgacactcctgggtagcggagaacaagaagacgaatccagtccatggtttgaatctgagactcagatcttttgcagcgagctgaccaccatttgctgcatctcaagcttcagcgagtacatctacaagtggtgttccgtgagagtggccctgtataggcagagaagccgaactgccctgtcaaaaggcaaggactatctggtcttagcccagccccccctcctgttgcccgccgaaagcgtagacgtgagtgtactgcagcctttgtctggcgaactagagaacaccaacatcgagagagaagccgagacagtggtgctgggtgatctcagcagctccatgcatcaggacgacctggtgaaccataccgtcgatgccgtggaactggagccctcgcacagccagaccctgagccaaagcctgctgcttgacattactcccgagattaacccacttcccaagatcgaggtaagcgagagcgtggaatacgaggcaggccatatccctagtccagtgattcctcaggagagttctgttgaaattgacaatgagacagagcagaaatcagagtcattttccagcattgagaaacccagtatcacgtacgaaaccaacaaagtcaatgagctcatggacaacatcataaaggaagatgttaacagcatgcagatcttcaccaagctctcagagacaatcgtgccccccatcaataccgcgacagtcccagataatgaggatggagaagccaagatgaatattgcagatactgccaagcaaacgcttatttctgtcgttgactcatcttcccttcctgaagtgaaagaagaagaacaaagcccagaggacgcgctcctcaggggccttcagcgtaccgctacagatttttatgccgagctgcagaacagcaccgatctgggctatgccaacggtaatcttgtgcacggtagcaaccagaaggagtccgtctttatgcgattgaacaatcggattaaagccctcgaggtcaacatgagcctcagtggaagatatctggaggagctctctcagaggtatagaaagcagatggaggagatgcagaaggcctttaataaaacaatagtgaaattgcagaatacctcacgaattgctgaagagcaggatcagaggcagaccgaagctattcagttgttacaggcgcagcttaccaatatgacacagctcgtgtcaaatttgtcggctaccgtggctgaactcaagcgcgaggtgtccgataggcagtcttacctggtaatcagccttgtgctgtgcgttgtgctgggactgatgctgtgcatgcagaggtgtcggaatacctcccagtttgacggagattacatatcaaagctcccgaaaagtaatcagtacccctcgccgaaacgatgcttttcgagctatgacgacatgaatctcaaacgtaggacttcctttcctctgatgagatctaagtctttgcaactgaccggtaaggaggtagaccccaacgacctttatatcgtggaacccctgaagttcagtccagagaaaaagaagaaaagatgtaagtacaaaatcgagaagattgagaccatcaaacctgaggagccgttgcacccaattgccaacggcgacatcaagggaagaaagccgtttactaaccagagagacttttccaatatgggagaggtctaccactcttcatataaaggcccacccagcgaaggctcctccgaaacctccagccagtccgaagagtcgtacttttgtggcatttcagcctgtacctcactatgcaacggtcagagtcagaaaacgaaaacagaaaaaagagcgctgaaacggcggcggtctaaggtccaggatcaagggaagctgattaagaccttgattcaaaccaaatctggatcgctgccatctctgcacgacattattaaagggaataaggaaattacagtcggtacctttggtgtaaccgccgtgtcaggccacatctag

SEQ ID NO: 190050 - DNA, 4221 bp, Artificial Sequence
  derived and/or modified sequence
atgaggggcttcctggcccggcccttcctgagcaccaaccagcacctggcccagtggggcagccccctgccccagggcaagggcctggtgcagctgcccagccagcacaccaggcacagccggcccttccacgagctgtgcagcaaggaggagaacagcgccaccgtgcccaagctgatcagcctggtggtgagcagcgagaccatcgacttcagcaacaagaccatggacagcagaagagactgggagcgggagaagaggatcctggagggcaagctgcagctgcccaaggccctggcccggacccagagggccagagatgagggccggcgggcctggaccagccgctggctgcagaggagaagaagccctgagagctgtgaggcccccctgagcgcccccctgtggggcccccagaggggcctgcccggccgggagcccctgcggagccgcagcgccagcgccatcgccctgcggaccatcggccacatcctggccctgctgctgcggctgctgcacctgggcctgggcagcggcggctgcagagaagatgtgccccccagcggccggggcaagaaggaggagaagatgaagaagcacagaagagccctggccctggtgtcctgcctcttcctgtgcagcctggtgtggctgcccagctggagggtgtgctgcaaggagagcagcagcgccagcgccagcagctactacagccaggatgacaactgtgccctggagaatgaagatgtgcagttccagaagaagaacacagagagcaagaagctgagcccccctgtggtggagaccctgcccaccgtggacctgcacgaggagagcagcaatgctgtggtggacagcgagaccgtggagaacatcagcagcagcagcaccagcgagatcacccccatcagcaagctggatgaaattgagaagagcggcaccatccccatcgccaagcccagcgagacagagcagagcgagacagactgtgatgtgggggaggccctggatgccagcgcccccatcgagcagcccagctttgtgagccccccagacagcctggtgggccagcacattgaaaatgtgagcagcagccacggcaagggcaagatcaccaagtcagaatttgagagcaaggtgtctgccagcgagcagggcggcggggaccccaagagcgccctgaatgccagtgacaacctgaagaatgaaagcagtgactacaccaagccaggggacatcgaccccacctctgtggccagccccaaggaccctgaggacatccccacctttgatgagtggaagaagaaggtgatggaggtggagaaggagaagagccagagcatgcacgccagcagcaatggaggcagccacgccaccaagaaggtgcagaagaacagaaacaactatgcctctgtggagtgtggggccaagatcctggccgccaaccctgaggccaagagcaccagcgccatcctgattgagaacatggacctgtacatgctgaacccctgcagcaccaagatctggtttgtgattgagctgtgtgagcccatccaggtgaagcagctggacatcgccaactatgagctgttcagcagcacccccaaggacttcctggtgtccatcagtgaccgctaccccaccaacaagtggatcaagctgggcaccttccacggcagagatgaaagaaatgtgcagagcttccccctggatgagcagatgtatgccaagtatgtgaaggtggagctgctgagccactttggaagtgagcacttctgccccctgagcctcatccgggtgtttggcacctccatggtggaggagtatgaggagattgctgacagccagtaccacagcgagcggcaggagctgtttgatgaagattatgactaccccctggactacaacacaggagaggacaagagcagcaagaacctgctgggcagcgccaccaatgccatcctgaacatggtgaacattgctgccaacatcctgggcgccaagacagaggacctgacagagggcaacaagagcatcagtgaaaatgccacagccacagctgcccccaagatgcctgagagcacccctgtgtccacccctgtgcccagcccagaatatgtgaccacagaggtgcacacccatgacatggagcccagcaccccagacacccccaaggagagccccatcgtgcagctggtgcaggaggaggaggaggaggccagccccagcacagtgaccctgctgggcagcggggagcaggaggatgagagcagcccctggtttgaaagtgagacccagatcttctgcagcgagctgaccaccatctgctgcatcagcagcttcagcgagtacatctacaagtggtgcagcgtgcgggtggccctgtaccggcagaggagcaggacagccctgagcaagggcaaggactacctggtgctggcccagccccccctgctgctgcctgctgagagcgtggatgtgtctgtgctgcagcccctgagcggggagctggagaacaccaacatcgagcgggaggccgagaccgtggtgctgggggacctgagcagctccatgcaccaggatgacctggtgaaccacacagtggatgctgtggagctggagcccagccacagccagaccctgagccagagcctgctgctggacatcaccccagagatcaaccccctgcccaagattgaggtgtctgagagcgtggagtatgaagctggccacatccccagccctgtgatcccccaggagagctctgtggagattgacaatgaaacagagcagaagtctgagagcttcagcagcattgagaagcccagcatcacctatgagaccaacaaggtgaatgagctgatggacaacatcatcaaggaggatgtgaacagcatgcagatcttcaccaagctgtctgagaccatcgtgccccccatcaacacagccaccgtgcctgacaatgaagatggagaggccaagatgaacattgctgacacagccaagcagaccctcatctctgtggtggacagcagcagcctgcctgaggtgaaggaggaggagcagagcccagaagatgccctgctgcggggcctgcagaggacagccacagacttctatgcagagctgcagaacagcacagacctgggctacgccaatggaaacctggtgcacggcagcaaccagaaggagagcgtcttcatgaggctgaacaaccgcatcaaggccctggaggtgaacatgagcctgagcggccgctacctggaggagctgagccagcgctacaggaagcagatggaggagatgcagaaggccttcaacaagaccatcgtgaagctgcagaacaccagcagaattgctgaggagcaggaccagaggcagacagaggccatccagctgctgcaggcccagctgaccaacatgacccagctggtgagcaacctgagcgccaccgtggccgagctgaagcgggaggtgtctgaccggcagagctacctggtgatcagcctggtgctgtgtgtggtgctgggcctgatgctgtgcatgcagcgctgcaggaacaccagccagtttgatggagactacatcagcaagctgcccaagagcaaccagtaccccagccccaagcgctgcttcagcagctatgatgacatgaacctgaagaggaggaccagcttccccctgatgaggagcaagagcctgcagctgaccgggaaggaggtggaccccaatgacctgtacatcgtggagcccctgaagttcagccctgagaagaagaagaagcgctgcaagtacaagattgagaagattgagaccatcaagccagaggagcccctgcaccccatcgccaacggggacatcaagggcaggaagcccttcaccaaccagagggacttcagcaacatgggagaggtgtaccacagcagctacaagggccccccatctgagggcagcagcgagaccagcagccagagcgaggagagctacttctgtggcatcagcgcctgcaccagcctgtgcaatggccagagccagaagaccaagacagagaagagggccctgaagagaagaagaagcaaggtgcaggaccagggcaagctgatcaagaccctcatccagaccaagagcggcagcctgcccagcctgcatgacatcatcaagggcaacaaggagatcaccgtgggcacctttggagtgacagctgtgtctggccacatctag

SEQ ID NO: 190051 - DNA, 4221 bp, Artificial Sequence
  derived and/or modified sequence
atgcggggcttcctggcccggcccttcctgagcaccaaccagcacctcgcacagtggggttctcccctgcctcagggaaaggggctcgtgcagctcccatcacagcacaccaggcactctcgtccatttcacgagctgtgtagcaaagaagagaattccgccaccgtccctaagttaatcagtctggtggtgtcatctgagacaatcgactttagcaataagaccatggacagccgccgagactgggagagagagaagcgcattctcgaaggaaagctgcagctacccaaggctttggccaggacccaaagagcgagagatgaaggtcgcagagcatggacaagtcgatggctccagcgccggcgtagtcccgaatcctgcgaagctccgctcagcgcccctctttggggcccacagcgggggcttccggggcgggaaccacttagatcaaggtcagcatcggccatagccttaagaactatagggcacatcctggccctcctactgaggctcttacatttaggtctggggagcggtggctgccgcgaagacgtccccccatcaggccggggaaagaaggaagaaaagatgaagaagcacaggcgcgccctggctctagtatcctgcctgtttctctgtagtctcgtgtggctcccatcatggcgagtctgctgtaaggagtcttcctcggcctctgcgtcttcttactattcacaagacgacaattgtgcgctggaaaacgaggacgtccaattccagaagaagaatactgagagtaagaaactgagcccacccgttgtggagactctcccgaccgtggacttgcacgaggagtccagtaacgctgtggtggactctgagacagtagaaaatatttcttcttcctcaacgagcgagataactcccatctccaagcttgatgagattgagaagagtggaactatcccaattgcaaagccctctgagacagagcagtctgaaaccgactgcgatgtcggtgaagcccttgatgcgtcagcaccgatcgaacagccgagcttcgtgtccccccccgactcactagtgggacagcatatagaaaatgtctcttcttctcacggtaaagggaaaattactaaatctgagttcgagtcaaaggtctcagccagtgaacagggaggtggtgatcctaagagcgctcttaacgcatccgataatctcaaaaatgaaagttcagactacaccaagcccggggatattgatccgaccagcgttgcctctcccaaagatcccgaagatattccgacattcgatgagtggaaaaaaaaagtgatggaggttgaaaaggagaaatctcagagtatgcatgctagttctaatggaggtagtcatgccacaaagaaagtgcagaaaaatcggaataattatgcttcggtggagtgcggtgcgaaaatccttgcggccaacccggaagcaaagagcaccagcgctattcttattgagaacatggacctgtacatgctaaacccatgttccaccaagatctggttcgtaattgagctgtgcgagcccattcaggtcaaacagctggacatagccaattacgagctgttctccagcactcccaaagatttcctggtatccattagcgaccgctacccgaccaataagtggattaaactggggacgttccatgggagagacgaacggaacgtgcaaagcttccctctagacgaacaaatgtatgccaagtatgtcaaagtggaattgcttagtcatttcgggtccgagcatttctgccctctctctttgatcagagtgtttggaacttccatggtggaagagtacgaggagattgccgactcacaataccatagtgaaagacaggagctattcgacgaagattacgactacccactcgattacaatacgggtgaagataagtcaagtaagaacttgctgggcagtgctactaatgccattttgaacatggtgaacatcgcagccaacatcctgggggccaagaccgaggacctcactgaaggaaacaagtccatttccgagaatgcaaccgcaactgccgctcccaagatgcccgaatctactcctgtgagtaccccggtcccatcacctgagtacgtcacaacagaagttcacactcatgacatggagccaagtacgccagatacccccaaagagtctcctatcgtgcagctagtgcaggaggaggaggaggaagccagcccatcaacagtgaccctcctggggagtggggaacaggaggatgaatcctctccttggttcgagagcgagacacagatcttctgttctgagttgacgaccatctgctgtatctcctcctttagcgagtatatttataaatggtgcagcgtgcgggtcgcgctgtaccgccagcggtcgcggacagcactcagcaaaggcaaggactacctcgtactggcacagccgcctctcctgctgcctgccgaaagcgtggacgtttcagtccttcagccgctgagcggcgagttagaaaatacgaacatcgaacgcgaggcggagactgttgtgctgggcgacctgagtagttcgatgcatcaggatgacctggtcaatcacaccgtggatgccgtcgaattggagccgagccatagtcagaccctctcccaatctctgctcctagacattacccctgaaatcaaccctctgccaaagatagaagtgtctgaaagcgttgagtacgaggcaggacacatcccgtccccagtcatcccccaagaaagctcagtcgagattgacaacgagacagagcagaaatctgaatcattttcttctatcgaaaagcctagcatcacatatgagacaaacaaggttaatgagttgatggataacattattaaggaggacgtgaattccatgcagatctttaccaaactgagcgagacaattgtccctccgattaacaccgcaaccgtgcccgataatgaggatggggaagccaaaatgaacattgccgacaccgcaaaacaaactcttatttccgtagtggactcttctagcttgccagaggttaaagaagaagaacaatctcctgaggatgctttactgagaggtttgcagcgtactgcgactgatttttatgctgagctgcagaatagcaccgacctgggatacgccaacggtaacttggtgcatggctctaatcagaaggaatctgttttcatgagactcaacaatcgaatcaaggctttggaggtcaacatgtccctatcagggcgttatttggaggaactatctcaacgctatcgtaagcaaatggaagagatgcagaaagccttcaacaagacgattgtaaagctccaaaataccagccgtatcgccgaggaacaggatcagaggcagacagaggcgattcaactgctgcaagcccagttgacaaacatgacacagttggtgagcaatctgtcagcgactgttgctgagctgaaacgagaggtgtcagatcggcaatcgtatctcgttatttctctggtcttgtgtgtggtgctggggctgatgctctgtatgcagagatgtcgcaatacatcacagtttgatggtgactacatcagcaaactgcccaaatccaatcagtacccctcacccaaacgttgcttcagctcgtacgatgacatgaacctcaagagacgcacctcgttccccctcatgcggtccaagagtctacagcttacagggaaggaagttgaccctaacgacctgtacatagtggaacctttgaagttttcaccagaaaagaaaaagaagcggtgtaaatacaagatagagaagatcgagacaatcaaaccggaagagccgttgcaccccattgcaaacggtgatattaagggaagaaaaccgttcacgaatcagcgcgacttcagcaacatgggcgaagtctatcactcgtcctataagggccctccaagcgagggctcgtccgagactagcagccagagcgaggagtcctatttctgcggaattagcgcctgcacctccttatgtaacggacagtcgcagaagaccaagacggagaaaagagccctcaagcggagacgtagtaaagtacaggatcaagggaaacttataaagaccctgatccagaccaagtctgggtcattaccatccctccatgacattataaaaggcaacaaagaaattactgtgggcactttcggcgtcaccgccgtgtccgggcacatctag

SEQ ID NO: 190052 - DNA, 4221 bp, Artificial Sequence
  derived and/or modified sequence
atgcggggttttctcgccagaccctttttgtccactaatcagcatttggcacagtgggggtcacccctgcctcaggggaagggcttggtgcagctgccaagtcagcacactcgccatagccgcccattccacgaattgtgcagtaaagaagaaaacagcgctaccgtgccgaagctcattagtctggtggtatcttctgagacaattgatttctctaacaagactatggatagcagaagagactgggagcgagagaagcgtatcctggaggggaagctacagttgccgaaggctctggcgcgaacccagcgagccagagatgagggacggagagcttggacgtctaggtggcttcaacgccgtaggtctccagagagctgcgaggctccactgagcgcccctctgtggggccctcagaggggactcccagggagagagcctctgcgaagccgatctgcctcggctatagctctgcgtacaatcgggcacatcctggctttgctactacgtcttcttcacctggggctgggatccggcggatgtcgtgaggacgttccacccagcggaagaggtaaaaaagaggaaaaaatgaagaaacaccgcagggcccttgcgctggtatcatgcctgttcctctgctctctggtgtggctgccatcatggcgtgtgtgttgcaaagaatctagcagcgcttctgcctcctcttattacagccaggacgataactgcgcactggaaaacgaagatgtacaatttcaaaagaagaacacggaatcaaagaagctttctcctcccgtggtggaaactctacccactgttgacctacatgaggagtcgtctaacgcagtggtggactctgagacagtagaaaatatcagctctagcagtacctccgaaatcacgccgatcagtaaacttgacgaaatagaaaaaagcggaactatcccaatcgccaaaccgtcggagacggaacagagcgaaactgattgcgatgtgggggaagcattagacgcctctgcgccaatagagcagccatcatttgtgtcgccacctgactctctggttgggcagcacattgagaacgtgagctcctcccatggaaaaggcaagattacaaaatccgagtttgaaagtaaagtgtccgcgagtgagcaggggggtggcgaccccaagtccgctctgaacgcatcggataatctcaaaaacgagtcctccgattatacaaaacccggagacattgatccgacatccgtagctagtcccaaggatcctgaagatattcccacctttgatgagtggaaaaagaaggttatggaagtggaaaaagagaagagccagtcaatgcacgcctccagcaacggaggatcacacgcgactaagaaggttcagaagaatagaaataactacgcttctgttgaatgtggggctaaaatcttggccgctaatcctgaggcaaagtccacttcggctatattgattgagaacatggatctgtacatgctgaacccgtgcagtacgaaaatttggtttgtcattgaactctgtgaacctatccaggtgaaacaactggacatcgcaaactacgaactgttcagttctaccccaaaggattttctcgttagtatcagtgaccgatatcccaccaacaagtggatcaagctcggcacctttcacggccgagacgaacgcaacgttcagtcctttcccctcgacgaacagatgtacgccaagtatgtcaaagtcgaattgctcagccatttcggtagtgagcacttctgccctttgtctctcatcagagtattcggaacctctatggtggaggagtatgaagagatagccgactcacagtaccactcggagaggcaagagctttttgatgaagattacgattacccgctcgactacaacacaggtgaggataaatccagcaaaaacctgctgggttcggctaccaacgcgatccttaacatggtgaacatcgcggctaatattctcggggctaaaacggaagacttaacagaagggaacaaaagcatcagtgaaaatgcgacagccacggcagctcccaagatgccagaaagcacccccgtcagtacacccgtaccttcaccagaatatgtcactacagaggtgcacacccatgacatggaaccttcgacgccggatacccctaaggagtcccctatcgtccagctggtgcaggaggaggaggaagaggcatccccatccacagtgaccttacttgggtctggggagcaggaggatgagagcagtccatggttcgaaagcgagactcagatcttttgcagcgaactcactaccatctgctgcatcagcagcttttcggaatatatctacaagtggtgcagcgtgagggtagccctgtaccgccagagatctcgaacagcgttgtccaagggtaaagattatcttgttctggctcaaccacctttgctcttgcctgcggagtctgtggacgtctctgtgctccagcctctaagcggagagctggaaaacacgaacatcgaacgtgaggctgaaacggtggttctgggggatctgagcagcagtatgcatcaggatgacttagtgaaccatacagtcgatgctgtagaactggagccatcacactctcagaccctctcccagtccctgctactggatatcacccctgagatcaatcctttgccaaagatagaagtctccgagagcgttgagtatgaagctggtcatattcctagtccagtgattccgcaggagagctcagttgagatcgacaatgagaccgaacagaagtcagagagcttttccagcatagagaagccatcaatcacctacgaaacaaataaggtcaacgaactgatggacaacatcatcaaagaggatgttaattccatgcaaatttttactaagctgagcgaaactatcgtccctccaatcaatacagcgacagtgcctgataacgaggatggcgaggctaaaatgaacattgcggacaccgccaaacaaactctgatttccgtcgtagacagttcatcactgcctgaggttaaggaagaggagcagagccctgaggacgcccttctgagggggttgcagcggactgccaccgacttttatgcagagctgcagaactctaccgacctcggctacgcaaacggaaatctggtgcacgggtctaaccagaaggagagcgtctttatgagactgaacaatcggatcaaggcgctcgaggtgaacatgtcactctcaggtcgctatctggaggaactctcacaacgatataggaagcagatggaagaaatgcaaaaggcctttaacaagactattgtgaaacttcagaatacatctagaatcgccgaggaacaggatcagagacagacggaagctattcagttgctccaagcccagctgaccaacatgactcagctggtgagcaacttgagcgcaactgttgctgaactgaaacgcgaagtctccgaccgacagtcctaccttgtaatctccttagtcctctgtgtcgtgttgggcttgatgttatgtatgcagcgctgtaggaacacttcccagttcgatggtgattacatttctaaacttcccaaatctaatcagtatccgtcacccaaacgatgtttcagctcctacgacgacatgaacctcaagcggaggactagctttcccctaatgaggagcaagtctctccagctgaccgggaaagaggtggaccccaatgatctgtacattgtggaacctctgaagtttagtcccgaaaaaaaaaagaaacgatgcaaatataagatcgagaagattgaaaccatcaagcctgaggagccactgcaccctatcgccaatggcgacattaaaggtagaaagccctttactaaccaacgggacttcagtaacatgggcgaagtgtatcattcaagctacaaaggcccaccatcagaaggatcttccgaaacgtcatctcaaagtgaagaatcatatttctgtgggatttcagcatgcacttccctttgcaacggacagagtcagaagacaaagacagagaaaagagcactgaagagacgcaggtctaaggtgcaggaccaaggaaagctgataaagactctcattcagacaaagagtggatctctgccaagcttacacgacattatcaagggaaataaggagatcactgtaggcacattcggagtcactgctgtctcggggcacatttag

SEQ ID NO: 190053 - protein, 109 aa, Artificial Sequence
  derived and/or modified sequence
MDWIRLTKSGKDLTGLKGRLIEVTEEELKKHNKKDDCWICIRGFVYNVSPYMEYHPGGEDELMRAAGSDGTELFDQVHRWVNYESMLKECLVGRMAIKPAVLKGKLWHL

SEQ ID NO: 190054 - protein, 521 aa, Artificial Sequence
  derived and/or modified sequence
MLNVPSQSFPAPRSQQRVASGGRSKVPLKQGRSLMDWIRLTKSGKDLTGLKGRLIEVTEEELKKHNKKDDCWICIRGFVYNVSPYMEYHPGGEDELMRAAGSDGTELFDQVHRWVNYESMLKECLVGRMAIKPAVLKDYREEEKKVLNGMLPKSQVTDTLAKEGPSYPSYDWFQTDSLVTIAIYTKQKDINLDSIIVDHQNDSFRAETIIKDCLYLIHIGLSHEVQEDFSVRVVESVGKIEIVLQKKENTSWDFLGHPLKNHNSLIPRKDTGLYYRKCQLISKEDVTHDTRLFCLMLPPSTHLQVPIGQHVYLKLPITGTEIVKPYTPVSGSLLSEFKEPVLPNNKYIYFLIKIYPTGLFTPELDRLQIGDFVSVSSPEGNFKISKFQELEDLFLLAAGTGFTPMVKILNYALTDIPSLRKVKLMFFNKTEDDIIWRSQLEKLAFKDKRLDVEFVLSAPISEWNGKQGHISPALLSEFLKRNLDKSKVLVCICGPVPFTEQGVRLLHDLNFSKNEIHSFTA

SEQ ID NO: 190055 - DNA, 330 bp, Artificial Sequence
  derived and/or modified sequence
atggattggatcagactgaccaagtcgggcaaggatctaacgggcctcaaggggcggctaattgaagtcactgaggaggagcttaagaagcacaacaagaaggatgactgctggatatgcatcagggggttcgtgtacaatgtgtccccctatatggagtaccatcccggaggtgaagatgaacttatgcgggcagccgggagcgacggcaccgaactgtttgatcaggtccacagatgggtcaactatgaatctatgttaaaggagtgtctagtggggcgtatggctattaagcccgctgtgctgaaaggcaagctgtggcacctgtag

SEQ ID NO: 190056 - DNA, 1566 bp, Artificial Sequence
  derived and/or modified sequence
atgctcaacgtaccctcgcagtcttttcctgcaccccgctctcagcaacgggtggcctctggtggacggtccaaagtcccattgaagcaggggcgctccctgatggactggatccgcctgactaagagtggaaaggacctaactgggctgaaaggccggttgatagaagtaacggaagaagaactaaagaaacacaacaaaaaagacgattgttggatttgtattcggggattcgtgtataacgtcagtccctatatggaataccaccccgggggcgaggatgagcttatgcgtgccgccgggagcgacggtacagagttgttcgatcaggtccaccgttgggtgaattatgagtcgatgctgaaggagtgcctggtggggagaatggctatcaaacctgccgtattgaaagattacagggaagaggaaaagaaggtcctcaacgggatgcttccaaaaagtcaggtgaccgatacattagccaaagaaggaccatcgtatccatcttacgattggttccaaactgattctcttgtcacgattgcaatttatacaaagcagaaggacataaatttagacagcatcattgtggatcatcagaatgacagttttcgcgcagagacaatcatcaaggactgtctttacctgattcacataggtctctcgcacgaggtacaggaggacttctccgtccgtgtggttgaatctgtggggaaaatcgagattgtgctccaaaaaaaagagaacacctcctgggatttcttgggccaccctctgaaaaatcacaattccctgatcccgcgcaaagacacaggcctctattaccggaagtgccagttaatatcaaaagaggatgttactcacgacaccagactgttctgtttaatgctgcccccatcaacgcatttacaggtgccgatcggacagcatgtgtacttaaaactgcccattacaggcaccgagattgtaaagccttacactccggtctccggatcgttgttgtccgaatttaaggagcccgtgttacccaacaacaaatatatttacttcctgatcaaaatttaccctactggcctctttacacccgagctcgatcgcctccagattggggacttcgtttccgtgagctcgccggagggaaattttaagatttcaaagtttcaggagctggaagatctgtttctcctcgcggctggaacgggtttcacgcctatggtgaagattctgaattatgccctgaccgacattccttctctaaggaaggtgaaactgatgtttttcaataagacagaggacgacatcatttggagatcgcaactcgagaagctcgccttcaaggataagagactagacgtggaatttgtactaagcgcccccatctctgagtggaacggtaagcagggacacatttctccggccctcctgtcagaatttctcaagcgtaatctcgataaatccaaagtcctcgtctgcatctgtgggccagttccatttaccgaacagggggtcagactgctgcacgacctgaactttagcaagaacgagattcattcgttcactgcgtag

SEQ ID NO: 190057 - DNA, 330 bp, Artificial Sequence
  derived and/or modified sequence
atggactggatccggctgaccaagagcggcaaggacctgaccggcctgaagggccgcctgattgaggtgacagaggaggagctgaagaagcacaacaagaaggatgactgctggatctgcatccggggctttgtgtacaacgtgagcccctacatggagtaccaccctggaggagaagatgagctgatgagagctgctggcagtgatggaacagagctgtttgaccaggtgcaccgctgggtgaactatgaatccatgctgaaggaatgtctggtgggccgcatggccatcaagccagctgtgctgaagggcaagctgtggcacctgtag

SEQ ID NO: 190058 - DNA, 1566 bp, Artificial Sequence
  derived and/or modified sequence
atgctgaatgtgcccagccagagcttccctgcccccaggagccagcagagggtggccagcggcggccgcagcaaggtgcccctgaagcagggccgcagcctgatggactggatccggctgaccaagagcggcaaggacctgaccggcctgaagggccgcctgattgaggtgacagaggaggagctgaagaagcacaacaagaaggatgactgctggatctgcatccggggctttgtgtacaacgtgagcccctacatggagtaccaccctggaggagaagatgagctgatgagagctgctggcagtgatggaacagagctgtttgaccaggtgcaccgctgggtgaactatgaatccatgctgaaggaatgtctggtgggccgcatggccatcaagccagctgtgctgaaggactaccgggaggaggagaagaaggtgctgaatggcatgctgcccaagagccaggtgacagacaccctggccaaggagggccccagctaccccagctatgactggttccagacagacagcctggtgaccatcgccatctacaccaagcagaaggacatcaacctggacagcatcatcgtggaccaccagaatgacagcttccgggcagagaccatcatcaaggactgcctgtacctgatccacatcggcctgagccatgaggtgcaggaggacttctctgtgcgggtggtggagagcgtgggcaagattgagatcgtgctgcagaagaaggagaacacctcctgggacttcctgggccaccccctgaagaaccacaacagcctcatccccaggaaggacaccggcctgtactacaggaagtgccagctgatcagcaaggaggatgtgacccatgacaccaggctcttctgcctgatgctgccccccagcacccacctgcaggtgcccatcggccagcacgtgtacctgaagctgcccatcaccggcacagagatcgtgaagccctacacccctgtgtctggcagcctgctgtctgagttcaaggagcctgtgctgcccaacaacaagtacatctacttcctgatcaagatctaccccaccggcctcttcaccccagagctggaccggctgcagattggagactttgtgtctgtgagcagccctgagggcaacttcaagatcagcaagttccaggagctggaggacctcttcctgctggccgccggcaccggcttcacccccatggtgaagatcctgaactatgccctgacagacatccccagcctgaggaaggtgaagctgatgttcttcaacaagacagaagatgacatcatctggaggagccagctggagaagctggccttcaaggacaagaggctggatgtggagtttgtgctgagcgcccccatcagcgagtggaatggcaagcagggccacatcagccctgccctgctgtctgagttcctgaagaggaacctggacaagagcaaggtgctggtgtgcatctgtggccctgtgcccttcacagagcagggcgtgcggctgctgcatgacctgaacttcagcaagaatgagatccacagcttcaccgcctag

SEQ ID NO: 190059 - DNA, 330 bp, Artificial Sequence
  derived and/or modified sequence
atggactggatccggctgaccaagagcggcaaggacctgaccggcctgaagggacgtctgattgaggtaaccgaggaggagcttaagaagcacaataagaaagacgactgttggatctgtatccgcggttttgtgtacaacgtatctccatatatggagtaccatcctggaggtgaagacgaactgatgcgcgctgctggtagcgatggtaccgagctgttcgatcaagtgcaccggtgggttaactatgagtccatgctgaaggagtgcctagtgggaagaatggccataaagcccgctgttctgaagggtaaactttggcatttgtag

SEQ ID NO: 190060 - DNA, 1566 bp, Artificial Sequence
  derived and/or modified sequence
atgctgaacgtgcccagccagagcttccccgccccccggagccagcagcgggtcgcctctggcgggagatccaaggtgccactgaagcagggccgctcacttatggattggattagactgacaaaatctgggaaagacttgactggactaaaaggccgcttaatcgaagttaccgaagaggagctgaagaaacacaacaagaaggatgattgctggatatgcatccgtgggttcgtttacaatgtgtccccctatatggagtatcatccgggcggggaagacgagctcatgcgggccgctggatccgacggtaccgagcttttcgatcaggtgcatcgctgggtcaattatgaatctatgctcaaagaatgcctcgtagggagaatggccattaaaccagcagtgcttaaagactaccgcgaagaggaaaagaaggtcctcaacggtatgctcccgaagtcacaggtgaccgatacgctcgccaaggaaggtcccagctacccgtcgtatgactggttccagaccgactctctggtgactatcgcaatatacacaaaacagaaagacatcaatctcgactccattatcgtagaccatcagaacgacagcttccgtgcggaaaccatcatcaaggattgtctatacctgattcatatcggtctgagccacgaggtgcaggaagatttctcagtgagggtggtggagagtgtggggaagattgagattgtattgcagaagaaagagaacactagttgggactttctaggccatcccctgaagaatcataatagtttgattccgcggaaagatactggcctttactatcggaaatgtcagttgatcagtaaggaagatgtgacacacgatactcgtcttttctgcctgatgctccccccaagcacacatctgcaggtccccataggccagcacgtttatctcaaactccctattactggcactgaaatagtgaaaccatataccccagtgtccgggagcctactgtccgaatttaaagaacccgtactgccgaataacaaatatatatatttccttatcaagatttaccccacggggctgtttacaccagagctggatagactgcagatcggagactttgtcagcgtctctagcccggaaggaaactttaaaattagtaagttccaggagttagaagacctgtttctgcttgctgcaggaacagggtttacaccaatggttaagatcctgaattacgctctcaccgacatcccctctcttaggaaggtcaaactgatgttctttaacaaaactgaggatgacattatttggagaagtcagctcgagaagcttgctttcaaagacaaaagactggatgtcgagtttgttctttcagcacctattagcgagtggaatggcaaacagggtcacattagtccggccctcttgagtgagtttcttaagagaaatctggataaaagtaaggtactggtctgcatttgcggtcccgtccccttcaccgaacaaggggttagacttctgcacgacttaaacttctccaagaacgaaattcattccttcacagcttag

SEQ ID NO: 190061 - DNA, 330 bp, Artificial Sequence
  derived and/or modified sequence
atggactggatccggttaaccaagagcgggaaggacctcaccgggctgaagggcagacttattgaggtcacagaagaggaactaaagaagcataacaaaaaggacgactgctggatctgtatccggggatttgtgtataacgtgagcccatatatggagtatcaccctgggggagaggacgaactgatgagggcagccggaagcgacggcaccgagttgttcgaccaggtacacaggtgggtcaattacgagtccatgctgaaagagtgtctggttggtcgtatggccatcaagcctgcagtgcttaagggaaaactctggcacctgtag

SEQ ID NO: 190062 - DNA, 1566 bp, Artificial Sequence
  derived and/or modified sequence
atgctgaatgtcccctcgcagtcctttcctgcaccaagatcacagcagagggtggccagtggtggcagaagcaaagtaccactaaagcagggccgtagtctcatggattggataagactgaccaaaagtggaaaggatttgaccgggctgaaaggtaggctgatcgaagtgaccgaagaagaattgaagaaacataataagaaagacgactgctggatttgtatccggggttttgtctacaacgtgagcccctacatggaatatcatccaggtggcgaggacgaactgatgagggcagccggatcagacggaaccgagctgtttgaccaggtccacagatgggtgaattacgaatctatgctcaaggagtgtctggttggccgtatggcaatcaagccagctgtgcttaaggactatcgggaggaggagaagaaggttctgaatgggatgctgccaaagtctcaggtgactgatacactggctaaagaggggccttcttatcccagctatgattggttccagactgacagcttggtaaccatagcgatctacactaaacagaaagacatcaatttggacagcattatagtagatcatcaaaacgattcgttccgcgctgagactatcattaaagactgcctatacctgatccacatagggctgtcacatgaagtgcaggaggatttctctgttcgagttgtagaaagcgtaggcaagatcgaaattgttctccagaagaaggagaatacaagttgggatttcttgggccatccattaaagaaccataactccttaattcctcgtaaggacaccggcctgtactaccgaaaatgccagctgattagcaaagaagatgtgacacatgacacaagattgttctgcctcatgctcccaccctcaacccacttgcaggttcccattgggcaacacgtctaccttaaacttccaattacgggaaccgaaatagtgaagccctatactccagtcagcggctcactgctgtccgaatttaaggagccagtcctgcctaataataagtatatatacttcctcataaagatttatcctacaggtctgttcacccctgaactggaccggctgcaaattggcgactttgtgtcagtaagttccccagagggcaactttaagatctccaaattccaggaactagaagacttatttctcctcgctgctggcactggattcacccccatggtgaaaatcttgaattatgctctgactgacatcccatctctcaggaaggttaagctgatgttctttaataaaacagaggacgatattatctggcggtcccagctagagaaactggctttcaaagacaaacgcctggatgtcgagtttgtgttgagtgctcctataagtgaatggaacgggaagcagggacacatttcccccgctctgctctctgaatttctgaagaggaacctggacaagtccaaggtcctggtttgcatttgcggaccagttccatttacagagcagggtgtccggctactgcatgacttaaacttctccaagaacgagatacacagtttcaccgcttag

SEQ ID NO: 190063 - DNA, 768 bp, Artificial Sequence
  derived and/or modified sequence
gcctcacccctggcgaccccggaagtgggtcgggggcttggcctctgcccggccacagagccggagctggaggtgctgtcccgtctggcggcgatccccgggcagggcccggggccggggtttgaagatgctgaacgtcccttcccagtctttcccggcccccaggtcgcagcagcgtgtcgcctccggggggcgtagcaaggtacctttaaaacagggcagaagccttatggattggattcgactgaccaaaagtggaaaggatctaacgggattaaaaggcaggttaattgaagtaactgaagaagaacttaagaaacacaacaaaaaagatgattgttggatatgcataagaggtttcgtttataatgtcagcccttatatggagtatcatcctggtggagaagatgaactaatgagagcagcaggatcagatggtactgaactttttgatcaggttcatcgttgggtcaattatgaatccatgctgaaagaatgcctggttggcagaatggccattaaacctgctgttctgaaaggcaaactctggcacctgtagagctgaggatggagatagacaccaggacctatagtgggctgagacattactttcaaagatttcttttactgtcacagcactgtgagcaaggacaagacatctattgaatgggctgcctgccagttggaagttcaacttttgtaaagtcagtcaaagttctttcttctagaagcctcagtttcctcattggtaaaatggagacaatttag

SEQ ID NO: 190064 - DNA, 2255 bp, Artificial Sequence
  derived and/or modified sequence
tgcgtcagaatgcgcctcacccctggcgaccccggaagtgggtcgggggcttggcctctgcccggccacagagccggagctggaggtgctgtcccgtctggcggcgatccccgggcagggcccggggccggggtttgaagatgctgaacgtcccttcccagtctttcccggcccccaggtcgcagcagcgtgtcgcctccggggggcgtagcaaggtacctttaaaacagggcagaagccttatggattggattcgactgaccaaaagtggaaaggatctaacgggattaaaaggcaggttaattgaagtaactgaagaagaacttaagaaacacaacaaaaaagatgattgttggatatgcataagaggtttcgtttataatgtcagcccttatatggagtatcatcctggtggagaagatgaactaatgagagcagcaggatcagatggtactgaactttttgatcaggttcatcgttgggtcaattatgaatccatgctgaaagaatgcctggttggcagaatggccattaaacctgctgttctgaaagactatcgtgaggaggaaaagaaagtcttaaatggcatgcttcccaagagccaagtgacagatacacttgccaaagaaggtcctagttatccaagctatgattggttccaaacagactctttagtcaccattgccatatatactaaacagaaggatatcaatttagactcaataatagttgatcatcagaatgattcctttagagcagaaacaattattaaggattgtttatatcttatacatattgggctaagccatgaggttcaggaagatttttctgtgcgggttgttgagagtgtgggaaaaatagagattgttctacaaaaaaaagagaatacttcttgggactttcttggccatcccctgaagaatcataattcacttattccaaggaaagatacaggtttgtactacagaaagtgccagttaatttccaaggaagatgttactcatgatacgaggcttttctgtttgatgctgccaccaagcactcatcttcaagtgcccattgggcaacatgtttacctcaagctacctattacaggtacagaaatagtaaagccatatacacctgtatctggttccttactctcagagttcaaggaaccagttcttcccaacaataaatacatctactttttgataaaaatctatcccactggactcttcacaccagagcttgatcgtcttcagattggagattttgtttctgtaagcagtcctgagggcaattttaaaatatccaagttccaagaattagaagatctctttttgttggcagctggaacaggcttcacaccaatggttaaaatactgaattatgctttgactgatatacccagtctcaggaaagtgaagctgatgttcttcaataaaacagaagatgatataatttggagaagccaattggagaaattagcatttaaagataaaagactggatgttgaatttgttctctcagcacctatttctgaatggaatggcaaacagggacatatttcaccagctcttctttctgaatttttgaaaagaaatttggacaaatccaaagttctcgtctgcatttgtggaccagtgccatttacagaacaaggagtaaggttgctgcatgatctcaacttttccaaaaatgagatccatagttttacagcataatgaagagctgtcattgtcctttattcaactagtttatctaaatttgtgattgcttagggttttttaagagaacatttttgtacataacaaaaggttaactagaatccagccttcagtttcttaaatgaaatcaaatgttccttcagtacaggtaacttcttggctttcttttgtaccacaacttattttactactgatatttgacctggaaagttaatcatggcaacaaatacatacaggattctttgttatgaatcacaaatttccttgccatttaaattatatcactgttctacaataagcacttgtgttttatgacatgataaagtaaatgatcacttcgatcatgtttctatgctgtaaaatgtcttattagcaatacagattaaattttaccttgcactgttaactcaggaaatgatcatttatgtccttgttattaatgttaaaacatagaatgttataacttattaagtgatccaaacatttttttgtgtgtgtatggcattgatgcagaatagaataaaattatacttaagttctttttaa

SEQ ID NO: 190065 - DNA, 330 bp, Artificial Sequence
  derived and/or modified sequence
atggactggatcagactgaccaagagcggcaaggacctgaccggcctgaagggcagactgatcgaggtgaccgaggaggagctgaagaagcacaacaagaaggacgactgctggatctgcatcagaggcttcgtgtacaacgtgagcccctacatggagtaccaccccggcggcgaggacgagctgatgagagccgccggcagcgacggcaccgagctgttcgaccaggtgcacagatgggtgaactacgagagcatgctgaaggagtgcctggtgggcagaatggccatcaagcccgccgtgctgaagggcaagctgtggcacctgtag

SEQ ID NO: 190066 - DNA, 1566 bp, Artificial Sequence
  derived and/or modified sequence
atgctgaacgtgcccagccagagcttccccgcccccagaagccagcagagagtggccagcggcggcagaagcaaggtgcccctgaagcagggcagaagcctgatggactggatcagactgaccaagagcggcaaggacctgaccggcctgaagggcagactgatcgaggtgaccgaggaggagctgaagaagcacaacaagaaggacgactgctggatctgcatcagaggcttcgtgtacaacgtgagcccctacatggagtaccaccccggcggcgaggacgagctgatgagagccgccggcagcgacggcaccgagctgttcgaccaggtgcacagatgggtgaactacgagagcatgctgaaggagtgcctggtgggcagaatggccatcaagcccgccgtgctgaaggactacagagaggaggagaagaaggtgctgaacggcatgctgcccaagagccaggtgaccgacaccctggccaaggagggccccagctaccccagctacgactggttccagaccgacagcctggtgaccatcgccatctacaccaagcagaaggacatcaacctggacagcatcatcgtggaccaccagaacgacagcttcagagccgagaccatcatcaaggactgcctgtacctgatccacatcggcctgagccacgaggtgcaggaggacttcagcgtgagagtggtggagagcgtgggcaagatcgagatcgtgctgcagaagaaggagaacaccagctgggacttcctgggccaccccctgaagaaccacaacagcctgatccccagaaaggacaccggcctgtactacagaaagtgccagctgatcagcaaggaggacgtgacccacgacaccagactgttctgcctgatgctgccccccagcacccacctgcaggtgcccatcggccagcacgtgtacctgaagctgcccatcaccggcaccgagatcgtgaagccctacacccccgtgagcggcagcctgctgagcgagttcaaggagcccgtgctgcccaacaacaagtacatctacttcctgatcaagatctaccccaccggcctgttcacccccgagctggacagactgcagatcggcgacttcgtgagcgtgagcagccccgagggcaacttcaagatcagcaagttccaggagctggaggacctgttcctgctggccgccggcaccggcttcacccccatggtgaagatcctgaactacgccctgaccgacatccccagcctgagaaaggtgaagctgatgttcttcaacaagaccgaggacgacatcatctggagaagccagctggagaagctggccttcaaggacaagagactggacgtggagttcgtgctgagcgcccccatcagcgagtggaacggcaagcagggccacatcagccccgccctgctgagcgagttcctgaagagaaacctggacaagagcaaggtgctggtgtgcatctgcggccccgtgcccttcaccgagcagggcgtgagactgctgcacgacctgaacttcagcaagaacgagatccacagcttcaccgcctag

SEQ ID NO: 190067 - protein, 527 aa, Artificial Sequence
  derived and/or modified sequence
MSLCGARANAKMMAAYNGGTSAAAAGHHHHHHHHLPHLPPPHLHHHHHPQHHLHPGSAAAVHPVQQHTSSAAAAAAAAAAAAAMLNPGQQQPYFPSPAPGQAPGPAAAAPAQVQAAAAATVKAHHHQHSHHPQQQLDIEPDRPIGYGAFGVVWSVTDPRDGKRVALKKMPNVFQNLVSCKRVFRELKMLCFFKHDNVLSALDILQPPHIDYFEEIYVVTELMQSDLHKIIVSPQPLSSDHVKVFLYQILRGLKYLHSAGILHRDIKPGNLLVNSNCVLKICDFGLARVEELDESRHMTQEVVTQYYRAPEILMGSRHYSNAIDIWSVGCIFAELLGRRILFQAQSPIQQLDLITDLLGTPSLEAMRTACEGAKAHILRGPHKQPSLPVLYTLSSQATHEAVHLLCRMLVFDPSKRISAKDALAHPYLDEGRLRYHTCMCKCCFSTSTGRVYTSDFEPVTNPKFDDTFEKNLSSVRQVKEIIHQFILEQQKGNRVPLCINPQSAAFKSFISSTVAQPSEMPPSPLVWE

SEQ ID NO: 190068 - DNA, 1584 bp, Artificial Sequence
  derived and/or modified sequence
atgagcctgtgcggcgccagagccaacgccaagatgatggccgcctacaacggcggcaccagcgccgccgccgccggccaccaccaccaccaccaccaccacctgccccacctgccccccccccacctgcaccaccaccaccacccccagcaccacctgcaccccggcagcgccgccgccgtgcaccccgtgcagcagcacaccagcagcgccgccgccgccgccgccgccgccgccgccgccgccgccatgctgaaccccggccagcagcagccctacttccccagccccgcccccggccaggcccccggccccgccgccgccgcccccgcccaggtgcaggccgccgccgccgccaccgtgaaggcccaccaccaccagcacagccaccacccccagcagcagctggacatcgagcccgacagacccatcggctacggcgccttcggcgtggtgtggagcgtgaccgaccccagagacggcaagagagtggccctgaagaagatgcccaacgtgttccagaacctggtgagctgcaagagagtgttcagagagctgaagatgctgtgcttcttcaagcacgacaacgtgctgagcgccctggacatcctgcagcccccccacatcgactacttcgaggagatctacgtggtgaccgagctgatgcagagcgacctgcacaagatcatcgtgagcccccagcccctgagcagcgaccacgtgaaggtgttcctgtaccagatcctgagaggcctgaagtacctgcacagcgccggcatcctgcacagagacatcaagcccggcaacctgctggtgaacagcaactgcgtgctgaagatctgcgacttcggcctggccagagtggaggagctggacgagagcagacacatgacccaggaggtggtgacccagtactacagagcccccgagatcctgatgggcagcagacactacagcaacgccatcgacatctggagcgtgggctgcatcttcgccgagctgctgggcagaagaatcctgttccaggcccagagccccatccagcagctggacctgatcaccgacctgctgggcacccccagcctggaggccatgagaaccgcctgcgagggcgccaaggcccacatcctgagaggcccccacaagcagcccagcctgcccgtgctgtacaccctgagcagccaggccacccacgaggccgtgcacctgctgtgcagaatgctggtgttcgaccccagcaagagaatcagcgccaaggacgccctggcccacccctacctggacgagggcagactgagataccacacctgcatgtgcaagtgctgcttcagcaccagcaccggcagagtgtacaccagcgacttcgagcccgtgaccaaccccaagttcgacgacaccttcgagaagaacctgagcagcgtgagacaggtgaaggagatcatccaccagttcatcctggagcagcagaagggcaacagagtgcccctgtgcatcaacccccagagcgccgccttcaagagcttcatcagcagcaccgtggcccagcccagcgagatgccccccagccccctggtgtgggagtag

SEQ ID NO: 190069 - DNA, 1584 bp, Artificial Sequence
  derived and/or modified sequence
atgtccctctgcggagcacgggcaaacgctaaaatgatggctgcatacaatggaggaacttctgcagccgccgccggacaccatcatcaccaccatcaccatctacctcatctgccaccaccacacctgcaccatcatcaccatccacagcaccacctgcaccccggcagcgccgctgcggtgcacccagtgcagcagcatacaagttccgccgccgcagccgctgcggcagccgcggccgctgccgctatgctcaatcccggacagcagcagccgtattttccttcccctgccccaggtcaggccccagggcccgccgctgccgccccagcccaggtgcaagccgctgctgccgccactgtgaaggctcatcaccaccagcattcacaccacccacaacagcaactggatattgagcccgacaggccaattgggtatggcgctttcggcgtcgtgtggagcgtgaccgatcctcgtgatgggaaacgggttgctctcaaaaaaatgcctaacgtcttccagaacctggttagttgcaaaagggtgttccgggagctcaagatgctgtgtttttttaaacatgacaacgtgctctccgccctggacattctgcaaccaccccacattgattacttcgaggaaatatatgtggtgaccgagctgatgcaatctgacctccataagatcatagtttcaccgcagcctctctcatcggatcacgtgaaagtgtttttataccagatccttcgcggcctaaagtatctgcacagtgctggtattctgcaccgcgatattaaacctgggaaccttttagttaactccaattgtgtgctgaaaatatgtgactttggactggccagagtcgaagaattggacgaaagccggcacatgacccaggaggttgttactcagtattatcgagcccccgagatattgatggggtctcggcactactctaatgccattgacatttggtccgttgggtgtatctttgcggagttgctgggcagacgcatcctcttccaggctcagtcccccatccagcaactggacctaatcaccgatctactgggcacgcctagcttggaagcgatgcgaaccgcgtgcgagggggctaaggctcatatcctgcggggtccacacaaacagccatccctgccggtcctttacacccttagctctcaggcaacccacgaagccgttcacctgctgtgtcgtatgctagtctttgacccttcaaaacggatctcagcaaaggacgccctggcccacccgtaccttgatgaggggcggttaaggtaccatacgtgcatgtgcaagtgctgttttagcacatccactggcagagtgtatacatctgacttcgagccagtcaccaaccctaaatttgacgacacattcgagaaaaatctttcgagcgtaagacaagtgaaagagatcatacaccaattcatcctggagcagcagaagggcaaccgtgtacccctgtgtatcaacccacagtccgccgcttttaagtcttttataagcagcactgtggcacagccttcagagatgcccccctcccctctggtgtgggaatag

SEQ ID NO: 190070 - DNA, 1584 bp, Artificial Sequence
  derived and/or modified sequence
atgagcctgtgtggggcccgggccaatgccaagatgatggccgcctacaatggaggcaccagcgctgctgctgctggccaccaccaccaccaccaccaccacctgccccacctgcccccaccccacctgcaccaccaccaccacccccagcaccacctgcaccctggcagcgctgctgctgtgcaccctgtgcagcagcacaccagcagcgctgctgctgctgctgctgctgctgctgctgctgctgccatgctgaaccctggccagcagcagccctacttccccagccctgcccctggccaggcccctggccctgctgctgctgccccagcccaggtgcaggccgctgctgctgccaccgtgaaggcccaccaccaccagcacagccaccacccccagcagcagctggacatcgagccagaccggcccatcggctacggggcctttggagtggtgtggagcgtgacagaccccagagatggcaagagggtggccctgaagaagatgcccaacgtgttccagaacctggtgtcctgcaagagggtcttccgggagctgaagatgctgtgcttcttcaagcatgacaacgtgctgagcgccctggacatcctgcagcccccccacatcgactactttgaggagatctacgtggtgacagagctgatgcagagcgacctgcacaagatcatcgtgagcccccagcccctgagcagtgaccacgtgaaggtgttcctgtaccagatcctgcggggcctgaagtacctgcacagcgctggcatcctgcaccgggacatcaagccaggcaacctgctggtgaacagcaactgtgtgctgaagatctgtgactttggcctggcccgggtggaggagctggatgagagccgccacatgacccaggaggtggtgacccagtactaccgggcccctgagatcctgatgggcagccgccactacagcaatgccatcgacatctggagcgtgggctgcatctttgctgagctgctgggccgccgcatcctcttccaggcccagagccccatccagcagctggacctgatcacagacctgctgggcacccccagcctggaggccatgaggacagcctgtgagggcgccaaggcccacatcctgcggggcccccacaagcagcccagcctgcctgtgctgtacaccctgagcagccaggccacccatgaggccgtgcacctgctgtgcaggatgctggtgtttgaccccagcaagaggatcagcgccaaggatgccctggcccacccctacctggatgagggccgcctgcgctaccacacctgcatgtgcaagtgctgcttcagcaccagcacaggccgggtgtacaccagtgactttgagcctgtgaccaaccccaagtttgatgacacctttgagaagaacctgagctctgtgcggcaggtgaaggagatcatccaccagttcatcctggagcagcagaagggcaacagagtgcccctgtgcatcaacccccagagcgctgccttcaagagcttcatcagcagcacagtggcccagcccagcgagatgccacccagccccctggtgtgggagtag

SEQ ID NO: 190071 - DNA, 1584 bp, Artificial Sequence
  derived and/or modified sequence
atgagcctgtgcggcgcccgggccaacgccaagatgatggccgcctacaatggtgggaccagtgccgcagccgcaggtcaccaccaccatcaccaccaccacctcccacacctccctcctcctcatctgcaccaccaccaccatcctcagcatcacttgcaccccgggtccgccgccgcagtccaccctgtgcagcagcatacttcttccgctgcagccgcggccgccgccgcagccgcagctgctgctatgttgaaccctggacagcagcagccttacttcccttcacccgcgccaggccaggcacctggcccggccgctgccgcacccgctcaggtccaagcagcagctgcggcaactgtcaaagcccaccaccatcagcacagccatcatccacagcagcagcttgacatcgaacctgatcgcccaatcggatatggagccttcggggtggtgtggtccgtgactgatcccagggatggtaaacgggtagcgctcaagaaaatgcctaacgttttccaaaatctggtgtcttgtaagagagtgttccgcgagttaaagatgttgtgcttttttaaacacgacaacgtgttgagtgccttagatatcttgcagccacctcacatagactacttcgaagagatctacgtcgtcaccgagctcatgcagagcgatctgcacaaaataatcgtctcacctcagcccctgagttcggaccatgttaaagtgtttctgtatcagatcctgcgcggattgaaatacctccacagtgccggcattctccacagagacattaagccaggaaatctactggtaaatagcaattgcgtactgaagatttgcgacttcggactcgcgcgagtggaggaactggacgagtcacgccatatgactcaggaggtggtgacacagtattatagggcacctgagatcctgatgggctctcgccattactctaatgcaatagacatctggtcagtgggatgcatcttcgcagaactgttgggcagacgaatcctctttcaggcccaatcaccaattcagcagttggacctgatcaccgacctattgggcactccatctttagaggcaatgcgcaccgcgtgtgagggagcaaaggctcatatccttcgggggccccataagcagccatccctgcccgtcctttacactctgtcctcacaagctactcacgaggcggtccatttgctatgcaggatgctggtgtttgatccttccaaaagaatcagtgccaaggatgcgctcgcgcacccttaccttgacgagggccggctgcggtaccatacttgtatgtgcaaatgctgtttctccacctcaaccggcagagtgtatacttcagacttcgaacctgtgacgaaccctaaattcgacgataccttcgagaagaacttgtctagtgtgagacaagtgaaggaaataatccaccaattcatattggagcagcaaaaaggaaatagagtacctctctgtattaatccacaatcagcagccttcaagtcttttatatcatcgacagttgctcaaccatctgagatgcccccttcaccattggtctgggaatag

SEQ ID NO: 190072 - DNA, 4047 bp, Artificial Sequence
  derived and/or modified sequence
ccccggctctctttctcctctctgtcctgctgtcgcctcctctcctcactccagcctccttccctggcttattctgcccaggaaagtttggaacccccgccccccctccccaatcaggtcaacctgactaggagtagggggagatgtaggaaggcctgagagttcggggggggggaagctggaagctggtttcccagaaaatttccccccatcttctccatttagggtggtgggaattttttttaatcctgtttttgaggaggtggtaggtgtttagaaaaggatgtgggaatggaaggggtagatgagtcaaccctctttcaagattccaagggtggtgtgttacctgatccttttcgtgtgtggagttcagggggtcgggaggtttggcctttattcccacattcaaagttggaacctcccccaaattaagaatggagttttagtacccacttgtggcaggaatcctggggggaaggggtccttttttcctttttcttttcttttttcccttttttttccttttggcaacccacacccttccacacacgctcaccccaaaattaaacaccaagatcctctaacttgtttggattgactgatgaagacataaagctctatgttttttgaggtggagtgagtggtttttcttcatttttaaatggccaaatgacagcttgacccagtttgctttccaatcaaagggcatttattttgaatgtctctttgtggcgcaagagccaacgcaaaaatgatggcggcttacaatggcggtacatctgcagcagcagcaggtcaccaccaccaccatcaccaccaccttccacacctccctcctcctcacctgcaccaccaccaccaccctcaacaccatcttcatccggggtcggctgccgctgtacaccctgtacagcagcacacctcttcggcagctgcggcagccgcagcagcggctgcagctgcagccatgttaaaccctgggcaacaacagccatatttcccatcaccggcaccggggcaggctcctggaccagctgcagcagccccagctcaggtacaggctgccgcagctgctacagttaaggcgcaccatcatcagcactcgcatcatccacagcagcagctggatattgagccggatagacctattggatatggagcctttggtgttgtctggtcagtaacagatccaagagatggaaagagagtagcgctcaaaaagatgcccaacgtcttccagaatctggtctcttgcaaaagggtcttccgggaattgaagatgttgtgtttttttaagcatgataatgtactctctgcccttgacatactccaacctccacacattgactattttgaagaaatatatgttgtcacagaattgatgcagagtgacctacataaaattatcgtctctcctcaaccactcagctcagatcatgtcaaagtttttctttatcagattttgcgaggtttgaaatatctccattcagctggcattttacatcgagacattaagccagggaatctccttgtgaacagcaactgtgttctaaagatttgtgattttggattggccagagtggaagaattagatgaatcccgtcatatgactcaggaagttgttactcagtattatcgggctccagaaatcctgatgggcagccgtcattacagcaatgctattgacatctggtctgtgggatgtatctttgcagaactactaggacgaagaatattgtttcaggcacagagtcccattcagcagttggatttgatcacggatctgttgggcacaccatcactggaagcaatgaggacagcttgtgaaggcgctaaggcacatatactcaggggtcctcataaacagccatctcttcctgtactctataccctgtctagccaggctacacatgaagctgttcatctcctttgcaggatgttggtctttgatccatccaaaagaatatccgctaaggatgccttagcccacccctacctagatgaagggcgactacgatatcacacatgtatgtgtaaatgttgcttttccacctccactggaagagtttataccagtgactttgagcctgtcaccaatcccaaatttgatgacactttcgagaagaacctcagttctgtccgacaggttaaagaaattattcatcagttcattttggaacagcagaaaggaaacagagtgcctctctgcatcaaccctcagtctgctgcttttaagagctttattagttccactgttgctcagccatctgagatgcccccatctcctctggtgtgggagtgatggtggaagataatgtactactgaagatgtaatgtagctttccactggagtctgggatttgcaattctggaggttaatcatgcttgtactgtaattttactaatgaagttttaaattaacaaccactacttgtatgatatgaataatatttagaaatgttactagacttttaatcttgtaaagtggttgtgcttttagaagaaaaatattttacccagagttgcacatgttttatgaatttagtgcagctgttatggctcacctcagaacaaaagagaattgaaccaaatttgggagtttggggttttatgttttgtttttcttttctaaaatgaagtgagattgttcacacacacacacacacacacacacacacacaaacacaaaggacagtcatacattttgatatttgagccattcctaaagatttggggttttctaaaactaaagaatctaggaaccttgcctgcgaccaatcatggagccacgtgagctgatcgtggctgcacctggggggagggtagggaggaggggcatgccacctaatgatcaagccctataattagcttctcattagagccgtgatggtgatgtgtgctgtctaaaatccaatgttgtgggtagagagaatgagtttgtgactaggagagactaaacttttgttttccttacccagtataaatatatatatatatatttaatctatttttattagaagtttttctgctctttcttacataaaagaaccccaagcatgcatctttcatgtgtgtaaataattcatttctgggctaatttcaaaagaatcccaatattgctgtatagaaagagaactagcttgcacattttaggtctgtgaaattttgtgagacttttcctgcactggacagtaaaaaaataataaaagacaaaaacaaatttaaaaaaaaatttaagccacaaaaaaaggcacatagggaattatgtcaaatgtgtttgtgtccttaggcaaagctgtgggagtcttgaaatgtcacagtagtaaataacttattactttttgacaagttctttttttctgttggaacactgaattcttctgtgcatatgtacatatgaatacaaatcgaaggcctctacctcctggagttatacaacttggcttgtttacctccacatgctgatgatgactattttttttttttgagttcagtgtggagacttgaaacttgaatgtcccttccaacttttatattaaaaataaaaagacaagaaaattgaagatcatttttcacctgtacaaggaatactaatggatcgtcttaaaattggtctaggaaaaaaccttggtgtgtgttatggacaattaactgttaaagttattgtaagttatctgtatttagcagagtattttcaacttgagtgatctgagctgaatttgaagactattaataagttatgtttggaagttttaacttcaatgaagtaattatttgctgtgaaagaaacaaacattgaattactaaacaaagatggtgcaatatctttgttttttttttatgaggctcctgagaatcaacccaactgaagcatttcaattcacttgaatgagaaacgtgtttagtatcaaaagagcccaagaagacactggtgtgaaaggtacaatctcagaggttggtcaattaccgtggcacactttctggtcactttgtacaatgtagatttgaagtacagtggtgaaaacattaaatgtgacatttgaaaaa

SEQ ID NO: 190073 - DNA, 1584 bp, Artificial Sequence
  derived and/or modified sequence
atgtcactgtgtggagctagggccaatgccaagatgatggcggcttacaacgggggtacatcagcagcggcagcgggacatcaccaccatcatcaccaccacctacctcaccttccacccccacatctacatcaccaccaccatcctcagcaccatttgcatccgggaagcgctgcagcggtccatcccgtacagcagcatactagctctgcagccgctgctgccgcagctgccgctgccgctgcagctatgctgaatcccggtcaacaacaaccttactttccttctcccgctccagggcaggcccctggtcctgcagcggctgctccagctcaagtgcaggcggctgccgcagcaactgtgaaggcccaccatcatcaacactcccatcatcctcagcagcagctggacatcgaaccggatagaccgatcggatatggggcatttggagtggtttggtccgtaacagatccccgagacggcaaaagagtcgcactgaaaaagatgcctaacgtttttcagaacttagttagctgcaagagagtgttcagggaacttaaaatgttgtgtttttttaaacacgacaatgtcctttcggctttagacattttacagccacctcacattgattattttgaagagatctatgtcgttacagagctgatgcagtccgacctgcataagatcatcgtttccccccagcccctgagctccgaccatgttaaggtgttcctgtatcaaatcctgcggggtctcaagtacctccactctgccggaatcctgcatcgcgacatcaagccaggcaacctgttggtgaactctaattgcgttctcaagatctgtgacttcggactggctcgcgtggaagaattagacgaaagccggcacatgacccaggaggtggtgacacagtattatcgtgccccagagatcttgatgggctctagacattactccaacgctatcgatatctggtctgtcggatgtatctttgccgaattactggggcgtcggatcctcttccaggcgcaatcccctatccagcaacttgacctgataaccgatttgctaggtaccccctcactggaggcaatgcggacagcgtgtgagggggcaaaggcccatattctgagagggcctcacaaacaacctagcctcccagtgctgtacacactgagctctcaggccactcacgaagcagtgcatctgctttgccgtatgcttgtttttgacccatcaaagaggatcagtgccaaggacgccctagcccatccgtatctcgacgaaggcagattgagatatcacacctgtatgtgcaaatgttgcttcagtacgagcaccgggcgtgtctacacctctgatttcgaacctgttacaaaccccaagtttgacgataccttcgaaaaaaacctgtcttcggtgagacaagttaaggagatcattcatcagttcattctcgaacaacagaagggcaaccgcgtgccgttatgcatcaacccacagagcgcagctttcaagagtttcatctcatccactgtggcccagccaagtgagatgccaccgagccccctggtgtgggagtag

SEQ ID NO: 190074 - protein, 556 aa, Artificial Sequence
  derived and/or modified sequence
MGFWILAILTILMYSTAAKFSKQSWGLENEALIVRCPRQGKPSYTVDWYYSQTNKSIPTQERNRVFASGQLLKFLPAAVADSGIYTCIVRSPTFNRTGYANVTIYKKQSDCNVPDYLMYSTVSGSEKNSKIYCPTIDLYNWTAPLEWFKNCQALQGSRYRAHKSFLVIDNVMTEDAGDYTCKFIHNENGANYSVTATRSFTVKDEQGFSLFPVIGAPAQNEIKEVEIGKNANLTCSACFGKGTQFLAAVLWQLNGTKITDFGEPRIQQEEGQNQSFSNGLACLDMVLRIADVKEEDLLLQYDCLALNLHGLRRHTVRLSRKNPIDHHSIYCIIAVCSVFLMLINVLVIILKMFWIEATLLWRDIAKPYKTRNDGKLYDAYVVYPRNYKSSTDGASRVEHFVHQILPDVLENKCGYTLCIYGRDMLPGEDVVTAVETNIRKSRRHIFILTPQITHNKEFAYEQEVALHCALIQNDAKVILIEMEALSELDMLQAEALQDSLQHLMKVQGTIKWREDHIANKRSLNSKFWKHVRYQMPVPSKIPRKASSLTPLAAQKQ

SEQ ID NO: 190075 - protein, 259 aa, Artificial Sequence
  derived and/or modified sequence
MGFWILAILTILMYSTAAKFSKQSWGLENEALIVRCPRQGKPSYTVDWYYSQTNKSIPTQERNRVFASGQLLKFLPAAVADSGIYTCIVRSPTFNRTGYANVTIYKKQSDCNVPDYLMYSTVSGSEKNSKIYCPTIDLYNWTAPLEWFKNCQALQGSRYRAHKSFLVIDNVMTEDAGDYTCKFIHNENGANYSVTATRSFTVKVWCQSFCKLKKSLIFSNTHWIQSLMRGFVMVYYGVHKCCRVVFNLCLQYFQHHQWP

SEQ ID NO: 190076 - protein, 38 aa, Artificial Sequence
  derived and/or modified sequence
MGFWILAILTILMYSTAAKFSKQSWGLENEALIVRCPR

SEQ ID NO: 190077 - DNA, 1671 bp, Artificial Sequence
  derived and/or modified sequence
atgggtttttggattctcgcaatcctcactatcctcatgtattctaccgctgctaagttctccaagcagtcatggggtcttgaaaatgaggcgctaattgtgcgatgccctcgtcagggcaaaccaagctacacagtcgattggtactattctcagacaaacaaatccattccaacccaagagcgaaatcgagtttttgcctccggtcagctactgaagtttctgccagctgccgttgccgactctggtatttatacatgtatagttcgatcccctacatttaatagaaccggttacgccaatgtgaccatctacaaaaagcagtccgattgcaacgtacccgactatctcatgtattcaacagtgagtggcagcgagaagaactcgaagatttactgtcccacgattgatttgtataattggactgcaccactggaatggttcaagaattgtcaagctctccagggatcacgatacagggctcataagtcgttccttgttatagataatgtgatgaccgaggatgcaggagattacacctgtaagtttatccacaatgagaatggggctaactatagcgtcacagcgaccaggtcctttaccgtgaaagacgagcagggctttagcctcttccccgtgattggtgctcctgcacagaatgaaattaaagaggttgagatcggcaaaaatgcgaacctgacctgttccgcttgcttcggcaagggaacacagttcctggctgctgtcttgtggcagctgaacgggactaagataacagacttcggagaaccaaggattcagcaagaagagggacaaaatcagtccttttcaaatggccttgcgtgcttggacatggtgctgagaattgccgatgtgaaagaagaagatctcctgctgcaatacgattgcttggccctcaacctgcacgggttgcgacggcacacagtgcgtctgagtcgaaaaaatcctattgaccaccacagtatttactgtattatcgcggtgtgcagtgtgtttctgatgttaatcaatgtcctggtgatcatcctgaagatgttttggatcgaagcaacactgctgtggcgcgacatcgctaaaccctacaagacacggaatgacggaaaactctatgacgcgtacgtggtttatcccagaaactacaagagcagtacagacggtgcatcacgcgtcgaacactttgtacatcaaattctgcctgacgttctggagaacaagtgtggttacaccctctgcatctacgggagagatatgctaccaggggaagatgtggtgaccgcagtagagacaaacattcggaagtccagaaggcatatctttatactcacaccccagattactcataataaagaatttgcctacgaacaggaagtagcgctacactgcgcgctcattcaaaacgatgccaaggtcatcctcattgagatggaggccctgagtgagctggatatgctgcaagctgaggcactccaggacagtctgcagcaccttatgaaggtgcagggcactatcaaatggcgcgaggatcacatcgccaacaaacgctcgttaaattcaaaattttggaagcatgtcagataccagatgcctgtccctagtaagatccccagaaaagcttcttccctgacgcctctggccgctcaaaagcagtag

SEQ ID NO: 190078 - DNA, 2058 bp, Artificial Sequence
  derived and/or modified sequence
aaagagaggctggctgttgtatttagtaaagctataaagctgtaagagaaattggctttctgagttgtgaaactgtgggcagaaagttgaggaagaaagaactcaagtacaacccaatgaggttgagatataggctactcttcccaactcagtcttgaagagtatcaccaactgcctcatgtgtggtgaccttcactgtcgtatgccagtgactcatctggagtaatctcaacaacgagttaccaatacttgctcttgattgataaacagaatggggttttggatcttagcaattctcacaattctcatgtattccacagcagcaaagtttagtaaacaatcatggggcctggaaaatgaggctttaattgtaagatgtcctagacaaggaaaacctagttacaccgtggattggtattactcacaaacaaacaaaagtattcccactcaggaaagaaatcgtgtgtttgcctcaggccaacttctgaagtttctaccagctgcagttgctgattctggtatttatacctgtattgtcagaagtcccacattcaataggactggatatgcgaatgtcaccatatataaaaaacaatcagattgcaatgttccagattatttgatgtattcaacagtatctggatcagaaaaaaattccaaaatttattgtcctaccattgacctctacaactggacagcacctcttgagtggtttaagaattgtcaggctcttcaaggatcaaggtacagggcgcacaagtcatttttggtcattgataatgtgatgactgaggacgcaggtgattacacctgtaaatttatacacaatgaaaatggagccaattatagtgtgacggcgaccaggtccttcacggtcaaggatgagcaaggcttttctctgtttccagtaatcggagcccctgcacaaaatgaaataaaggaagtggaaattggaaaaaacgcaaacctaacttgctctgcttgttttggaaaaggcactcagttcttggctgccgtcctgtggcagcttaatggaacaaaaattacagactttggtgaaccaagaattcaacaagaggaagggcaaaatcaaagtttcagcaatgggctggcttgtctagacatggttttaagaatagctgacgtgaaggaagaggatttattgctgcagtacgactgtctggccctgaatttgcatggcttgagaaggcacaccgtaagactaagtaggaaaaatccaattgatcatcatagcatctactgcataattgcagtatgtagtgtatttttaatgctaatcaatgtcctggttatcatcctaaaaatgttctggattgaggccactctgctctggagagacatagctaaaccttacaagactaggaatgatggaaagctctatgatgcttatgttgtctacccacggaactacaaatccagtacagatggggccagtcgtgtagagcactttgttcaccagattctgcctgatgttcttgaaaataaatgtggctataccttatgcatttatgggagagatatgctacctggagaagatgtagtcactgcagtggaaaccaacatacgaaagagcaggcggcacattttcatcctgacccctcagatcactcacaataaggagtttgcctacgagcaggaggttgccctgcactgtgccctcatccagaacgacgccaaggtgatacttattgagatggaggctctgagcgagctggacatgctgcaggctgaggcgcttcaggactccctccagcatcttatgaaagtacaggggaccatcaagtggagggaggaccacattgccaataaaaggtccctgaattctaaattctggaagcacgtgaggtaccaaatgcctgtgccaagcaaaattcccagaaaggcctctagtttgactcccttggctgcccagaagcaatagtgcctgctgtgatgtgcaaaggcatctgagtttgaagctttcctgacttctcctagctggcttatgcccctgcactgaagtgtgaggagcaggaatattaaagggattcaggcctc

SEQ ID NO: 190079 - DNA, 1671 bp, Artificial Sequence
  derived and/or modified sequence
atgggcttctggatcctggccatcctgaccatcctgatgtacagcacagctgccaagttcagcaagcagagctggggcctggagaatgaggccctgattgtgcgctgcccccggcagggcaagcccagctacacagtggactggtactacagccagaccaacaagagcatccccacccaggagaggaacagagtgtttgccagcggccagctgctgaagttcctgcctgctgctgtggccgacagcggcatctacacctgcatcgtgcgcagccccaccttcaacagaacaggctacgccaacgtgaccatctacaagaagcagagcgactgcaatgtgcctgactacctgatgtacagcacagtgtctggcagcgagaagaacagcaagatctactgccccaccatcgacctgtacaactggacagcccccctggagtggttcaagaactgccaggccctgcagggcagccgctaccgggcccacaagagcttcctggtgattgacaacgtgatgacagaagatgctggggactacacctgcaagttcatccacaatgaaaatggagccaactacagcgtgacagccaccaggagcttcaccgtgaaggatgagcagggcttcagcctcttccctgtgattggagccccagcccagaatgagatcaaggaggtggagatcggcaagaatgccaacctgacctgcagcgcctgcttcggcaagggcacccagttcctggccgctgtgctgtggcagctgaatggcaccaagatcacagactttggagagccccgcatccagcaggaggagggccagaaccagagcttcagcaatggcctggcctgcctggacatggtgctgagaattgctgatgtgaaggaggaggacctgctgctgcagtatgactgcctggccctgaacctgcacggcctgcggcggcacacagtgcggctgagcaggaagaaccccatcgaccaccacagcatctactgcatcatcgctgtgtgcagcgtcttcctgatgctgatcaacgtgctggtgatcatcctgaagatgttctggattgaggccaccctgctgtggagggacatcgccaagccctacaagaccagaaatgatggcaagctgtatgatgcctacgtggtgtaccccaggaactacaagagcagcacagatggagccagccgggtggagcactttgtgcaccagatcctgcctgatgtgctggagaacaagtgtggctacaccctgtgcatctacggccgggacatgctgcccggggaggatgtggtgacagctgtggagaccaacatcaggaagagccgccgccacatcttcatcctgaccccccagatcacccacaacaaggagtttgcctatgagcaggaggtggccctgcactgtgccctgatccagaatgatgccaaggtgatcctgattgagatggaggccctgtctgagctggacatgctgcaggccgaggccctgcaggacagcctgcagcacctgatgaaggtgcagggcaccatcaagtggagggaggaccacatcgccaacaagaggagcctgaacagcaagttctggaagcacgtgcgctaccagatgcctgtgcccagcaagatccccaggaaggccagcagcctgacccccctggccgcccagaagcagtag

SEQ ID NO: 190080 - DNA, 1671 bp, Artificial Sequence
  derived and/or modified sequence
atgggcttctggatcctggccatcctgaccatcctgatgtacagcacagcagcaaaattttccaaacagtcttgggggctcgagaacgaagctctcatcgttcgttgccctcggcagggcaaaccatcgtacaccgtagattggtactattctcagacgaataaatccatacccacacaggaaagaaatcgagtattcgccagcgggcaactactaaagttcctgcccgcagcagtcgcagatagcggcatctacacctgcatcgtccgctcccccacttttaataggactggctatgctaatgttaccatctacaaaaaacagagtgactgtaatgttcccgattatctgatgtattccaccgtcagtggttctgagaagaacagcaaaatctactgccctaccatcgacctgtacaattggactgctcccctggaatggttcaagaactgtcaggcacttcagggctcccgctacagggcacacaagtccttcctcgtgatagacaacgtcatgaccgaagacgcgggtgactacacatgtaagttcattcacaacgagaatggagccaattactcagtgacagctacacggagtttcaccgtgaaggatgagcagggctttagccttttccccgtcatcggagctcccgctcagaatgaaatcaaggaagtggaaataggtaaaaatgccaatctgacctgtagcgcgtgtttcggaaaggggactcagtttctggctgcagtgctatggcagctcaacggcacaaaaatcactgacttcggagagcctcgtatccagcaggaagagggccaaaaccagtccttttctaatggtctggcatgcctggatatggttcttcggatcgccgacgttaaggaggaggacttgttacttcagtacgattgtctggcactcaacctacacggcctgcgtcgacacacagttcgcctttctaggaaaaaccctatcgatcaccatagcatttattgcattattgcagtttgttctgtctttctcatgctaattaatgttctggtgataatactaaagatgttctggatcgaggccacactgttatggcgggatatagccaaaccctacaagacacgcaatgacgggaagctttatgacgcttatgtggtctatcctcgcaattacaaaagcagtactgacggtgcttcccgagttgagcattttgtccaccagatactaccggacgtgcttgagaacaagtgtggatacactctttgtatttatggccgcgatatgcttccgggagaggatgtcgtcactgccgtggaaacaaatattaggaagtcacgacgacatattttcatcctgactccccagattacccataacaaggagttcgcctatgaacaggaggtcgcccttcactgcgccctgatacagaacgacgctaaggtgatcttgatcgaaatggaagcactgtcagagcttgatatgctgcaggccgaggcactgcaggattccttacagcaccttatgaaggtacaagggacaattaagtggcgggaggatcatattgctaacaaacggagcctgaactccaaattctggaagcacgtgagataccagatgcccgtacctagcaagatcccaaggaaggcaagttcactcacgccattggccgcacaaaaacaatag

SEQ ID NO: 190081 - DNA, 1671 bp, Artificial Sequence
  derived and/or modified sequence
atgggcttttggatccttgcaatccttacaatactcatgtacagtacagcggcaaagttctccaaacagagctggggactggagaatgaagcactgattgtccgatgccctagacaagggaaacccagctacacagtggattggtactatagtcagactaacaaatctattcctacccaggagagaaatcgcgtctttgcatccggacagctgctgaaattcctgcctgccgcagtggccgacagcggcatttacacctgcatagtgcggtcacccaccttcaatcggaccggctatgcaaatgtgactatttataaaaaacagagtgactgcaatgtcccagactatctcatgtattctaccgtgagcggaagcgaaaagaatagtaagatttattgccccactattgatttgtataactggactgcgccacttgaatggtttaagaattgccaggctttacagggctctcgctaccgtgctcataagtcttttctggtcatcgataatgttatgaccgaggatgcaggtgactacacatgtaaatttattcacaacgagaacggggctaactacagtgtgaccgccacaagatcatttacagtgaaggatgagcagggattcagtctgttccccgtgattggcgctcctgcgcaaaacgaaatcaaggaagtcgaaatcggtaagaacgctaacctgacgtgctccgcctgtttcggaaagggcacccagttcctggcagcagtactgtggcaactgaacggcaccaagattaccgactttggggagccccgtattcagcaagaggaagggcaaaaccagtcattcagcaatgggctcgcatgcctggacatggtactgcgcattgccgatgttaaggaggaggacctcctgttacagtatgattgcctcgccctcaacctgcatggcttgcgacggcatacagtgagactgtccaggaagaatccaatcgaccaccactccatctactgcatcatcgctgtgtgtagtgttttcttgatgctgattaacgtactagtgattattctgaaaatgttctggattgaagcgacgcttctgtggcgagatatcgctaagccctataagacacggaatgacggcaaactgtatgacgcttacgtcgtgtatcccaggaactataagtccagtacagatggcgctagccgggttgagcactttgtgcaccagatcctacccgacgtgctggagaataagtgcggatacaccctctgtatctacggacgggatatgctcccaggcgaagacgtcgtaacagcagtggaaactaatatacgcaaatctagaaggcacatattcatccttactcctcagattacccataacaaggaattcgcctatgagcaagaagttgccctgcactgtgccctgatacagaacgacgctaaagtcattctcatcgaaatggaggctctgtctgaactggatatgttgcaggctgaagcgcttcaggactccctgcagcatttgatgaaggtacagggaacaattaagtggagagaagaccatatagccaacaagcgtagcttgaatagtaaattttggaaacatgtccgctatcaaatgcctgtcccaagtaagattcccaggaaagcatcctccctcacgcctcttgctgcgcagaagcagtag

SEQ ID NO: 190082 - DNA, 1671 bp, Artificial Sequence
  derived and/or modified sequence
atgggattctggatactcgctattctgacaattctgatgtatagcaccgccgctaaattctcgaaacagtcttggggcctggagaatgaagccctaatcgtgcgctgtccaaggcaaggtaagccatcatacaccgtggactggtactacagccaaaccaataaaagcattcctactcaggagcgcaatagagtatttgcatctggccagcttttaaagttcctgccagccgcagtggcagacagcgggatttatacctgtattgtacgatctcctacattcaatcgcacaggatacgccaacgtgacaatctacaagaaacagtctgattgtaacgtccccgattaccttatgtacagtaccgtctccggctccgagaaaaatagtaaaatctattgtccgaccattgatttatataattggacggctccgctagagtggtttaaaaattgccaggcgctgcaaggctctcggtacagagcccataagtcctttctggtgattgacaacgttatgacggaggatgccggcgattatacatgcaagtttattcataatgagaatggggcaaactacagtgtgaccgccaccagatctttcacagttaaagacgagcagggattcagcctgtttccagtgatcggtgctcccgcacagaacgaaatcaaggaagtagaaatcggcaagaacgcaaatctgacctgttccgcctgtttcggcaaagggactcagtttcttgccgctgtgttatggcagctgaacggcacaaagattacagacttcggtgaacccagaattcagcaggaagagggtcagaaccagtcttttagcaacggtctggcgtgccttgacatggtgctgaggatagccgacgtaaaggaggaagacctgctgctccagtatgactgtctggctcttaaccttcatgggctcagacggcacacagttagactttcaagaaagaacccaattgaccatcatagtatttactgcataattgctgtttgctctgtcttcctgatgctaattaatgtccttgtgataattctgaaaatgttttggatcgaagccaccctgctgtggagagatattgctaagccttataagacaagaaatgatgggaagctgtacgatgcctatgttgtgtacccacgcaattacaagagctctaccgatggagcgtctagagtggaacacttcgttcaccagatcctccctgatgtgcttgagaataagtgtggctatacactgtgtatttatgggcgcgatatgttacccggagaggacgtggttacggctgttgaaactaatatccgtaaaagcagacgccatatctttattttgaccccgcaaatcacacataacaaggaattcgcttatgaacaggaggtggccctgcactgcgcactaattcagaatgatgcgaaagtcatcctgattgagatggaggcactcagcgagttggatatgttgcaggctgaggcccttcaggattcgctgcagcacctcatgaaagtccaaggaactatcaagtggcgcgaggaccatatcgctaacaaacgcagtcttaatagcaaattctggaagcacgtgaggtaccaaatgcccgtcccgtctaagatccctaggaaagctagttcactgacccccctcgcggcacagaaacagtag

SEQ ID NO: 190083 - DNA, 1671 bp, Artificial Sequence
  derived and/or modified sequence
atgggcttttggatcctcgccatcctgaccatcctcatgtactcaactgccgcaaagttctcaaaacagtcctggggactggaaaacgaagcccttatcgtcaggtgcccacgacagggtaagccgtcatatacagtggattggtactattcccagacaaacaaaagtattcccacccaagagagaaacagggtgtttgcctccggtcaactcttgaaattcctacctgctgccgtagctgattccggcatctacacgtgcatcgtacgcagcccgacctttaatcgaaccggctatgccaacgtgacaatttacaaaaaacagagtgactgcaatgtacccgactatctgatgtattcaactgtctctgggtctgaaaaaaactcaaagatctattgcccgacgatcgatttgtataactggacggcaccgctggaatggttcaagaactgtcaagccctgcaagggagccggtatagggctcacaaatcctttcttgtaatcgataatgtaatgaccgaggatgctggcgattatacttgtaaatttattcataatgagaacggtgcgaattactcagtgacagcaaccagatcctttacggttaaggatgagcagggcttttctttatttccagtgataggcgcccccgcacagaatgagatcaaggaagtggaaataggcaagaacgcgaacttgacctgcagcgcatgttttggtaaaggaactcagtttctggcggcagtgctttggcagttgaatggtacgaagattacagacttcggcgagcctaggatccaacaggaggaaggacagaaccagtcattctcaaatggtctcgcttgtctggacatggttttgcgaattgccgacgttaaagaggaagatttactattgcaatacgattgccttgcattaaacctccacggcttaagaagacacaccgtgcggctgagccgcaagaatcctatcgaccatcactctatttattgtatcatcgccgtctgctctgtgttcttaatgctgatcaacgttctagtaatcatactgaagatgttttggattgaggctaccttgttgtggagggacattgccaaaccttacaaaacaagaaatgatggaaagctctacgatgcatatgtggtctacccccgcaattacaaatcaagcaccgacggcgcctcaagggttgagcactttgtgcaccagatattgcctgacgtgctcgagaacaaatgcggttatactttgtgcatctatggcagagatatgctcccaggggaagatgtcgtcaccgcggtggagaccaacattcgaaaatcccggagacacatattcatacttactccacaaataacacacaataaggaattcgcttacgagcaggaggtggcattgcactgtgctctgatccaaaatgacgctaaagtgattctcatcgagatggaagctctgtctgaattagatatgctccaggctgaagccttacaggactctctgcaacatctgatgaaagttcagggcacaattaaatggcgagaggatcacatagctaacaagcgaagccttaactcaaagttctggaaacatgtcagataccagatgcctgtcccctccaagattccgcgcaaggcctcaagtctaaccccactcgctgctcaaaaacagtag

SEQ ID NO: 190084 - DNA, 1671 bp, Artificial Sequence
  derived and/or modified sequence
atgggcttctggatcctggccatcctgaccatcctgatgtacagcaccgccgccaagttcagcaagcagagctggggcctggagaacgaggccctgatcgtgagatgccccagacagggcaagcccagctacaccgtggactggtactacagccagaccaacaagagcatccccacccaggagagaaacagagtgttcgccagcggccagctgctgaagttcctgcccgccgccgtggccgacagcggcatctacacctgcatcgtgagaagccccaccttcaacagaaccggctacgccaacgtgaccatctacaagaagcagagcgactgcaacgtgcccgactacctgatgtacagcaccgtgagcggcagcgagaagaacagcaagatctactgccccaccatcgacctgtacaactggaccgcccccctggagtggttcaagaactgccaggccctgcagggcagcagatacagagcccacaagagcttcctggtgatcgacaacgtgatgaccgaggacgccggcgactacacctgcaagttcatccacaacgagaacggcgccaactacagcgtgaccgccaccagaagcttcaccgtgaaggacgagcagggcttcagcctgttccccgtgatcggcgcccccgcccagaacgagatcaaggaggtggagatcggcaagaacgccaacctgacctgcagcgcctgcttcggcaagggcacccagttcctggccgccgtgctgtggcagctgaacggcaccaagatcaccgacttcggcgagcccagaatccagcaggaggagggccagaaccagagcttcagcaacggcctggcctgcctggacatggtgctgagaatcgccgacgtgaaggaggaggacctgctgctgcagtacgactgcctggccctgaacctgcacggcctgagaagacacaccgtgagactgagcagaaagaaccccatcgaccaccacagcatctactgcatcatcgccgtgtgcagcgtgttcctgatgctgatcaacgtgctggtgatcatcctgaagatgttctggatcgaggccaccctgctgtggagagacatcgccaagccctacaagaccagaaacgacggcaagctgtacgacgcctacgtggtgtaccccagaaactacaagagcagcaccgacggcgccagcagagtggagcacttcgtgcaccagatcctgcccgacgtgctggagaacaagtgcggctacaccctgtgcatctacggcagagacatgctgcccggcgaggacgtggtgaccgccgtggagaccaacatcagaaagagcagaagacacatcttcatcctgaccccccagatcacccacaacaaggagttcgcctacgagcaggaggtggccctgcactgcgccctgatccagaacgacgccaaggtgatcctgatcgagatggaggccctgagcgagctggacatgctgcaggccgaggccctgcaggacagcctgcagcacctgatgaaggtgcagggcaccatcaagtggagagaggaccacatcgccaacaagagaagcctgaacagcaagttctggaagcacgtgagataccagatgcccgtgcccagcaagatccccagaaaggccagcagcctgacccccctggccgcccagaagcagtag

SEQ ID NO: 190085 - protein, 739 aa, Artificial Sequence
  derived and/or modified sequence
MDALKPPCLWRNHERGKKDRDSCGRKNSEPGSPHSLEALRDAAPSQGLNFLLLFTKMLFIFNFLFSPLPTPALICILTFGAAIFLWLITRPQPVLPLLDLNNQSVGIEGGARKGVSQKNNDLTSCCFSDAKTMYEVFQRGLAVSDNGPCLGYRKPNQPYRWLSYKQVSDRAEYLGSCLLHKGYKSSPDQFVGIFAQNRPEWIISELACYTYSMVAVPLYDTLGPEAIVHIVNKADIAMVICDTPQKALVLIGNVEKGFTPSLKVIILMDPFDDDLKQRGEKSGIEILSLYDAENLGKEHFRKPVPPSPEDLSVICFTSGTTGDPKGAMITHQNIVSNAAAFLKCVEHAYEPTPDDVAISYLPLAHMFERIVQAVVYSCGARVGFFQGDIRLLADDMKTLKPTLFPAVPRLLNRIYDKVQNEAKTPLKKFLLKLAVSSKFKELQKGIIRHDSFWDKLIFAKIQDSLGGRVRVIVTGAAPMSTSVMTFFRAAMGCQVYEAYGQTECTGGCTFTLPGDWTSGHVGVPLACNYVKLEDVADMNYFTVNNEGEVCIKGTNVFKGYLKDPEKTQEALDSDGWLHTGDIGRWLPNGTLKIIDRKKNIFKLAQGEYIAPEKIENIYNRSQPVLQIFVHGESLRSSLVGVVVPDTDVLPSFAAKLGVKGSFEELCQNQVVREAILEDLQKIGKESGLKTFEQVKAIFLHPEPFSIENGLLTPTLKAKRGELSKYFRTQIDSLYEHIQD

SEQ ID NO: 190086 - DNA, 2220 bp, Artificial Sequence
  derived and/or modified sequence
atggatgcgctgaaaccgccatgtctatggagaaaccatgaacgcggtaaaaaagacagagattcatgtgggcgaaaaaattcggagccaggaagcccacatagcttggaggcccttagggatgccgctcccagccagggccttaatttcctcttactgttcaccaaaatgctgtttatattcaactttttgttctctcctctgcccacccccgcattgatctgtattctgaccttcggagccgccatttttctgtggttgattacacgaccacaacctgtgctccccttgctggacctgaacaatcagtctgtcggaattgaagggggtgccaggaagggggtttctcaaaaaaataacgatctcaccagctgttgtttttccgacgctaaaactatgtacgaagtgtttcagcggggcttggccgtgagtgacaatgggccatgccttgggtaccgcaaacccaaccagccctacagatggttgtcatacaagcaggtctctgaccgcgctgaatacctcggttcgtgtcttttacataaggggtacaagagcagcccagatcaatttgtcggaatctttgctcagaaccggcctgaatggatcatctctgagctagcctgttatacatattccatggtggccgtgcccctctatgatactctcggccccgaggctatcgttcacatcgtgaataaggctgatatcgcaatggtgatctgtgataccccacagaaagcactggtgctgatagggaacgtggaaaaagggttcactccatcactgaaggtcatcatcctgatggatccattcgacgatgatcttaagcagcggggcgagaagtccggaattgagatcctcagcttgtatgacgcagagaatctgggaaaggagcactttcggaaaccagtgcctccctcgccggaggacctgtctgtgatttgctttactagcggcaccaccggtgacccaaagggtgccatgatcacacaccagaacattgtgagtaacgctgcagcctttctcaagtgtgtggaacatgcctacgagccaaccccggacgacgtcgctatttcatatttgcctctggcccatatgttcgagcgaatcgtccaggccgtggtttattcatgtggggcccgggtggggttctttcagggcgacattaggctgcttgctgacgatatgaaaaccctgaaaccgaccttgtttcccgctgtgccccgactcctcaacagaatctacgataaggttcaaaacgaagccaaaactcctctcaaaaagtttctcctgaagctggccgtgtcaagcaaattcaaggagttacagaaaggcatcatcaggcatgattccttttgggataagttaattttcgccaagatccaggattccctgggaggccgagtacgggtgattgtgaccggggccgctccaatgagcacaagtgtgatgactttcttcagagccgccatgggatgccaggtgtacgaggcctacggccagaccgaatgcacagggggttgtactttcaccctgccaggtgactggacgtccggacacgttggcgtgccgctagcctgcaactacgtcaaactggaggatgtagctgacatgaactacttcactgtgaacaacgaaggagaggtttgcatcaagggaaccaacgtattcaaaggataccttaaggatccggagaaaacgcaggaggcgctcgatagcgatggctggctacacaccggcgatattggccgttggctgcccaatggcaccttgaagataatcgaccggaaaaaaaacattttcaaattggcccagggcgagtatatcgcccctgagaagatcgagaacatctataatagatctcagcccgtccttcagatttttgtgcacggcgaatctctgagatctagtcttgtgggggtggtcgtacctgacaccgatgtgctgccttcctttgctgcaaaactgggcgtgaaagggtctttcgaagagttgtgccagaaccaagtggtgcgggaagctatcctggaggaccttcagaaaataggaaaagaatccggcctgaaaacattcgaacaagtgaaggccatctttctacaccctgaaccattcagtattgagaacggcctgttgacacccacgttaaaggcgaagcgcggtgaactctcaaagtacttccgcactcaaatcgattccctatacgagcatatccaggactag

SEQ ID NO: 190087 - DNA, 2220 bp, Artificial Sequence
  derived and/or modified sequence
atggatgccctgaagccaccctgcctgtggagaaatcatgagcggggcaagaaggaccgggacagctgtggcaggaagaacagcgagcccggcagcccccacagcctggaggccctgagagatgctgcccccagccagggcctgaacttcctgctgctcttcaccaagatgctgttcatcttcaacttcctgttcagccccctgcccaccccagccctgatctgcatcctgacctttggagctgccatcttcctgtggctgatcacccggccccagcctgtgctgcccctgctggacctgaacaaccagagcgtgggcattgaaggaggagccaggaaaggagtgtcccagaagaacaatgacctgaccagctgctgcttcagtgatgccaagaccatgtatgaggtgttccagaggggcctggccgtgtctgacaatggcccctgcctgggctacaggaagcccaaccagccctaccgctggctgagctacaagcaggtgtctgacagagctgagtacctgggcagctgcctgctgcacaagggctacaagagcagcccagaccagtttgtgggcatctttgcccagaacagacctgagtggatcatcagcgagctggcctgctacacctacagcatggtggccgtgcccctgtatgacaccctgggccctgaggccatcgtgcacatcgtgaacaaggctgacatcgccatggtgatctgtgacaccccccagaaggccctggtgctgattggaaatgtggagaagggcttcacccccagcctgaaggtgatcatcctgatggacccctttgatgatgacctgaagcagagaggagagaagagcggcatcgagatcctgagcctgtatgatgctgagaacctgggcaaggagcacttcaggaagcctgtgccccccagccctgaggacctgagcgtcatctgcttcaccagcggcaccactggagaccccaagggggccatgatcacccaccagaacatcgtgtccaatgctgctgccttcctgaagtgtgtggagcacgcctatgagcccaccccagatgatgtggccatctcctacctgcccctggcccacatgtttgagcgcatcgtgcaggccgtggtgtacagctgtggggcccgggtgggcttcttccagggcgacatccggctgctggctgatgacatgaagaccctgaagcccaccctcttccctgctgtgccccggctgctgaaccgcatctatgacaaggtgcagaatgaggccaagacccccctgaagaagttcctgctgaagctggccgtgagcagcaagttcaaggagctgcagaagggcatcatcagacatgacagcttctgggacaagctgatctttgccaagatccaggacagcctgggcggccgggtgcgggtcatcgtgactggagctgcccccatgagcacctctgtgatgaccttcttccgggccgccatgggctgccaggtgtatgaggcctacggccagacagaatgtactggaggctgcaccttcaccctgcccggggactggaccagcggccacgtgggcgtgcccctggcctgcaactacgtgaagctggaggatgtggccgacatgaactacttcaccgtgaacaatgaaggagaggtgtgcatcaagggcaccaacgtgttcaagggctacctgaaggaccctgagaagacccaggaggccctggacagtgatggctggctgcacactggagacatcggccgctggctgcccaacggcaccctgaagatcatcgacaggaagaagaacatcttcaagctggcccagggcgagtacatcgcccctgagaagattgagaacatctacaacagaagccagcctgtgctgcagatctttgtgcacggggagagcctgcggagcagcctggtgggcgtggtggtgcctgacacagatgtgctgcccagctttgctgccaagctgggcgtgaagggcagctttgaggagctgtgccagaaccaggtggtgcgggaggccatcctggaggacctgcagaagattggcaaggagagcggcctgaagacctttgagcaggtgaaggccatcttcctgcaccctgagcccttcagcattgaaaatggcctgctgacccccaccctgaaggccaagagaggagagctgagcaagtacttccgcacccagattgacagcctgtatgagcacatccaggactag

SEQ ID NO: 190088 - DNA, 2220 bp, Artificial Sequence
  derived and/or modified sequence
atggacgccctgaagcccccctgcctgtggcggaaccacgagcgggggaagaaagaccgtgactcctgcggaaggaagaactcagaacccggatccccgcattcattggaggcactccgtgacgccgcaccctctcagggcctgaattttctgttgttgtttactaaaatgttgtttatatttaatttcctgttcagtcccctacctaccccagcactgatctgtattttgaccttcggggctgctatctttctttggttaatcactagacctcagccagtcctaccactgcttgatttgaataatcagagcgtgggaatcgagggaggagctcgaaaaggggtgagccagaagaacaatgatcttacttcctgttgtttctccgacgcaaaaacaatgtacgaggtgttccagcggggactggctgtctcagacaatgggccttgcctgggctatcgtaaacctaatcagccatatcggtggttgagttacaaacaggtaagcgatcgcgctgagtatctcggatcctgtctactccacaaggggtacaagtcctctccagaccagttcgtgggaatcttcgcccagaacagacctgagtggataatatccgagctggcctgctacacatactcaatggtcgcggttcctctgtatgacaccctgggtccagaggccattgttcacatcgtgaataaagctgacattgccatggtgatttgtgatacaccccaaaaggccttggtgctcataggaaacgtcgaaaagggcttcaccccctctttgaaggttattattctgatggacccatttgacgacgatttgaagcaacgtggtgaaaaatcagggattgagatcttgagcctgtacgatgctgagaacttgggaaaagaacacttcaggaagccagttccccccagtcctgaagacctgtcagttatatgcttcacttcaggaaccacgggtgatcctaaaggagccatgatcactcaccagaacatcgtgtcaaatgcggccgcttttctgaaatgcgttgagcatgcttatgaacctacacctgatgatgtggcaataagttacctccccctggctcacatgttcgagcggatcgtgcaggcagtcgtctactcgtgtggagccagggtgggattcttccagggagatatccgactcttagcagacgatatgaaaaccctcaagcccaccctgtttccggccgtgcctagattactgaaccgaatttacgacaaggttcagaacgaagctaaaaccccattaaagaaatttctgcttaaactcgcagtgtctagcaagttcaaggaactgcaaaaggggattatccggcatgattccttctgggataagctgattttcgccaagattcaggattccctggggggaagagtcagggtcatagtgaccggcgcagcccccatgtcaacatctgtgatgaccttcttccgcgcagcaatgggttgtcaggtatacgaagcctatggtcagactgaatgtacaggtggctgcaccttcaccctcccaggagattggacttcaggacacgtcggcgtgcccctagcttgcaattacgtcaaattagaagacgttgccgacatgaactactttactgtgaacaatgagggcgaggtgtgcattaaaggcaccaacgtgtttaagggatatttgaaggacccggagaaaacacaggaggcactcgatagtgatggttggctgcataccggcgacattggacggtggctcccgaacggaacactgaaaatcatcgatcgcaaaaagaacattttcaagttagcccagggagagtatatcgcacctgagaaaatcgaaaacatctataataggtcacagccagtgctccaaattttcgtgcatggagaatctctgcgcagctctctagtgggtgttgttgtgcctgacacggatgtcttgccaagttttgccgctaaactaggggttaaaggaagtttcgaagagctgtgccagaatcaggtggtaagggaagcaatattagaggatttgcagaagatcggcaaggagagcggcctgaaaacctttgagcaggtaaaagcaattttcctacaccctgaacccttcagtatcgaaaacgggctccttacccccacattgaaggccaagagaggcgagctcagtaagtactttcgtacgcagatcgactccctgtacgagcacatccaggactag

SEQ ID NO: 190089 - DNA, 2220 bp, Artificial Sequence
  derived and/or modified sequence
atggacgcgctgaaaccgccatgtctctggcgaaatcacgagagaggaaaaaaagatcgagatagctgcggcaggaagaatagtgagcctggctcgccacattcccttgaggcacttcgtgacgcagcacccagccaaggactgaattttttgcttctattcacaaagatgctgttcatatttaacttcctgttttcaccactaccaactccagcgctcatctgtatactcaccttcggtgctgctatttttctgtggcttattacgcgtccgcagcctgtgctacctctgctggaccttaataaccagagtgtcggcattgaggggggtgcgcgaaaaggcgtgtcccaaaaaaacaatgacctgacctcctgctgctttagcgacgctaagactatgtatgaggtgttccagcgtggcttggccgtttccgacaatgggccatgcctagggtataggaaacccaatcagccttatagatggctgtcttacaagcaagtctcagaccgggcagaatatctgggctcatgcctgctgcataaaggatataagtcaagccccgaccaatttgtggggattttcgcacagaaccgccctgagtggataatttctgagctcgcctgctatacctactccatggtggctgtcccactgtatgacactttagggcctgaggccatagtccatattgtgaacaaggcggacattgccatggtgatctgtgacactccgcagaaggctttggtgctaattggaaatgtcgaaaaaggattcactccatccttaaaggttatcattttaatggacccgtttgacgacgatctcaagcagcggggagagaagtctggaatagagattctgtccctctatgatgcagagaacctcggtaaagagcactttcgcaagcccgtgcctcccagccctgaagacttgagtgtaatttgtttcacttctgggactaccggagaccccaagggcgcaatgattactcaccagaacattgttagtaacgcagctgcttttctgaaatgtgtggagcacgcctatgagccgacacccgacgacgtggctataagctacctgccactagctcacatgtttgagcggattgtgcaagcagtcgtatactcgtgtggtgccagagtggggttcttccagggcgacatacgcctcctggcagacgacatgaaaaccctgaagcccaccctgtttccagcagtgcctcggcttctgaaccgaatttatgataaggtgcagaatgaggccaagacaccgctcaagaaatttctgctaaagctagcagtgtcatctaagttcaaggagcttcagaagggtataatccggcacgactctttctgggataagctcatctttgctaaaattcaagactcacttgggggtcgtgtgagggtgattgtcactggggctgcccctatgagcacaagcgttatgacatttttccgcgctgccatggggtgtcaggtgtacgaggcttacgggcagaccgagtgcaccggcggatgcaccttcaccctcccaggggattggacaagcggacacgtcggcgttccactcgcatgcaactatgtaaagctcgaggatgtggctgatatgaattactttacagtgaacaatgaaggcgaagtctgcattaagggtactaatgtttttaaaggctacctgaaagatccggaaaagactcaagaggctctggacagtgatggctggttacacaccggagacataggacgctggcttcccaacggaaccctgaaaatcattgatagaaagaaaaacatcttcaaactggctcagggggaatatatcgccccagaaaaaatcgaaaacatatataatcggtctcagccagtacttcagatcttcgtgcatggcgaatcactgcggtcatcgctggtgggagttgtagtgcccgataccgatgtactgcctagttttgctgctaaactgggggtcaagggtagctttgaggagctgtgccagaatcaggtggtaagggaggccatcctggaggatctgcagaagattggcaaggagtctggtttgaaaactttcgaacaggtaaaagccatcttcctgcatccagaacccttcagcattgaaaatggtttgctgactcctacgctgaaggcgaagcggggagaactgagtaagtacttccgcacgcagattgactcactgtacgaacatattcaggattag

SEQ ID NO: 190090 - DNA, 2220 bp, Artificial Sequence
  derived and/or modified sequence
atggacgccctgaagcccccctgcctgtggagaaaccacgagagaggcaagaaggacagagacagctgcggcagaaagaacagcgagcccggcagcccccacagcctggaggccctgagagacgccgcccccagccagggcctgaacttcctgctgctgttcaccaagatgctgttcatcttcaacttcctgttcagccccctgcccacccccgccctgatctgcatcctgaccttcggcgccgccatcttcctgtggctgatcaccagaccccagcccgtgctgcccctgctggacctgaacaaccagagcgtgggcatcgagggcggcgccagaaagggcgtgagccagaagaacaacgacctgaccagctgctgcttcagcgacgccaagaccatgtacgaggtgttccagagaggcctggccgtgagcgacaacggcccctgcctgggctacagaaagcccaaccagccctacagatggctgagctacaagcaggtgagcgacagagccgagtacctgggcagctgcctgctgcacaagggctacaagagcagccccgaccagttcgtgggcatcttcgcccagaacagacccgagtggatcatcagcgagctggcctgctacacctacagcatggtggccgtgcccctgtacgacaccctgggccccgaggccatcgtgcacatcgtgaacaaggccgacatcgccatggtgatctgcgacaccccccagaaggccctggtgctgatcggcaacgtggagaagggcttcacccccagcctgaaggtgatcatcctgatggaccccttcgacgacgacctgaagcagagaggcgagaagagcggcatcgagatcctgagcctgtacgacgccgagaacctgggcaaggagcacttcagaaagcccgtgccccccagccccgaggacctgagcgtgatctgcttcaccagcggcaccaccggcgaccccaagggcgccatgatcacccaccagaacatcgtgagcaacgccgccgccttcctgaagtgcgtggagcacgcctacgagcccacccccgacgacgtggccatcagctacctgcccctggcccacatgttcgagagaatcgtgcaggccgtggtgtacagctgcggcgccagagtgggcttcttccagggcgacatcagactgctggccgacgacatgaagaccctgaagcccaccctgttccccgccgtgcccagactgctgaacagaatctacgacaaggtgcagaacgaggccaagacccccctgaagaagttcctgctgaagctggccgtgagcagcaagttcaaggagctgcagaagggcatcatcagacacgacagcttctgggacaagctgatcttcgccaagatccaggacagcctgggcggcagagtgagagtgatcgtgaccggcgccgcccccatgagcaccagcgtgatgaccttcttcagagccgccatgggctgccaggtgtacgaggcctacggccagaccgagtgcaccggcggctgcaccttcaccctgcccggcgactggaccagcggccacgtgggcgtgcccctggcctgcaactacgtgaagctggaggacgtggccgacatgaactacttcaccgtgaacaacgagggcgaggtgtgcatcaagggcaccaacgtgttcaagggctacctgaaggaccccgagaagacccaggaggccctggacagcgacggctggctgcacaccggcgacatcggcagatggctgcccaacggcaccctgaagatcatcgacagaaagaagaacatcttcaagctggcccagggcgagtacatcgcccccgagaagatcgagaacatctacaacagaagccagcccgtgctgcagatcttcgtgcacggcgagagcctgagaagcagcctggtgggcgtggtggtgcccgacaccgacgtgctgcccagcttcgccgccaagctgggcgtgaagggcagcttcgaggagctgtgccagaaccaggtggtgagagaggccatcctggaggacctgcagaagatcggcaaggagagcggcctgaagaccttcgagcaggtgaaggccatcttcctgcaccccgagcccttcagcatcgagaacggcctgctgacccccaccctgaaggccaagagaggcgagctgagcaagtacttcagaacccagatcgacagcctgtacgagcacatccaggactag

SEQ ID NO: 190091 - DNA, 3353 bp, Artificial Sequence
  derived and/or modified sequence
aaaaccaggaagtgaagtccccgagcacgttagaaagcctgacatggcctgactcgggacagctcagagcagggcagaactggggacactctgggccggccttctgcctgcatggacgctctgaagccaccctgtctctggaggaaccacgagcgagggaagaaggacagggactcgtgtggcaggaagaactcagagccgggaagcccccattcactagaagcactgagagatgcggccccctcgcagggtctgaatttcctgctgctgttcacaaagatgctttttatctttaactttttgttttccccacttccgaccccggcgttgatctgcatcctgacatttggagctgccatcttcttgtggctgatcaccagacctcaacccgtcttacctcttcttgacctgaacaatcagtctgtgggaattgagggaggagcacggaagggggtttcccagaagaacaatgacctaacaagttgctgcttctcagatgccaagactatgtatgaggttttccaaagaggactcgctgtgtctgacaatgggccctgcttgggatatagaaaaccaaaccagccctacagatggctatcttacaaacaggtgtctgatagagcagagtacctgggttcctgtctcttgcataaaggttataaatcatcaccagaccagtttgtcggcatctttgctcagaataggccagagtggatcatctccgaattggcttgttacacgtactctatggtagctgtacctctgtatgacaccttgggaccagaagccatcgtacatattgtcaacaaggctgatatcgccatggtgatctgtgacacaccccaaaaggcattggtgctgatagggaatgtagagaaaggcttcaccccgagcctgaaggtgatcatccttatggacccctttgatgatgacctgaagcaaagaggggagaagagtggaattgagatcttatccctatatgatgctgagaacctaggcaaagagcacttcagaaaacctgtgcctcctagcccagaagacctgagcgtcatctgcttcaccagtgggaccacaggtgaccccaaaggagccatgataacccatcaaaatattgtttcaaatgctgctgcctttctcaaatgtgtggagcatgcttatgagcccactcctgatgatgtggccatatcctacctccctctggctcatatgtttgagaggattgtacaggctgttgtgtacagctgtggagccagagttggattcttccaaggggatattcggttgctggctgacgacatgaagactttgaagcccacattgtttcccgcggtgcctcgactccttaacaggatctacgataaggtacaaaatgaggccaagacacccttgaagaagttcttgttgaagctggctgtttccagtaaattcaaagagcttcaaaagggtatcatcaggcatgatagtttctgggacaagctcatctttgcaaagatccaggacagcctgggcggaagggttcgtgtaattgtcactggagctgcccccatgtccacttcagtcatgacattcttccgggcagcaatgggatgtcaggtgtatgaagcttatggtcaaacagaatgcacaggtggctgtacatttacattacctggggactggacatcaggtcacgttggggtgcccctggcttgcaattacgtgaagctggaagatgtggctgacatgaactactttacagtgaataatgaaggagaggtctgcatcaagggtacaaacgtgttcaaaggatacctgaaggaccctgagaagacacaggaagccctggacagtgatggctggcttcacacaggagacattggtcgctggctcccgaatggaactctgaagatcatcgaccgtaaaaagaacattttcaagctggcccaaggagaatacattgcaccagagaagatagaaaatatctacaacaggagtcaaccagtgttacaaatttttgtacacggggagagcttacggtcatccttagtaggagtggtggttcctgacacagatgtacttccctcatttgcagccaagcttggggtgaagggctcctttgaggaactgtgccaaaaccaagttgtaagggaagccattttagaagacttgcagaaaattgggaaagaaagtggccttaaaacttttgaacaggtcaaagccatttttcttcatccagagccattttccattgaaaatgggctcttgacaccaacattgaaagcaaagcgaggagagctttccaaatactttcggacccaaattgacagcctgtatgagcacatccaggattaggataaggtacttaagtacctgccggcccactgtgcactgcttgtgagaaaatggattaaaaactattcttacatttgttttgcctttcctcctatttttttttaacctgttaaactctaaagccatagcttttgttttatattgagacatataatgtgtaaacttagttcccaaataaatcaatcctgtctttcccatcttcgatgttgctaatattaaggcttcagggctacttttatcaacatgcctgtcttcaagatcccagtttatgttctgtgtccttcctcatgatttccaaccttaatactattagtaaccacaagttcaagggtcaaagggaccctctgtgccttcttctttgttttgtgataaacataacttgccaacagtctctatgcttatttacatcttctactgttcaaactaagagatttttaaattctgaaaaactgcttacaattcatgttttctagccactccacaaaccactaaaattttagttttagcctatcactcatgtcaatcatatctatgagacaaatgtctccgatgctcttctgcgtaaattaaattgtgtactgaagggaaaagtttgatcataccaaacatttcctaaactctctagttagatatctgacttgggagtattaaaaattgggtctatgacatattgtccaaaaggaatgctgttcttaaagcattatttacagtaggaactggggagtaaatctgttccctacagtttgctgctgagctggaagctgtgggggaaggagttgacaggtgggcccagtgaacttttccagtaaatgaagcaagcactgaataaaaacctcctgaactgggaacaaagatctacaggcaagcaagatgcccacacaacaggcttattttctgtgaaggaaccaactgatctcccccacccttggattagagttcctgctctaccttacccacagataacacatgttgtttctacttgtaaatgtaaagtctttaaaataaactattacagatactta

SEQ ID NO: 190092 - DNA, 3351 bp, Artificial Sequence
  derived and/or modified sequence
cttactgtcagaggttactacaagtgtttgaacaggtaacttctacctttgaacttctgttgtgacagattcaaaggttccaggggagtgtgttggccactctcaggacagtacacagtagcttcgggtgtgtcccagtcagtcctaggagctgtggaaagagtagaagtgcctgaatgtggtgctgaatcaatacagccagctgtgaggggagcacttcctggacccaggaagggagagtcttcttccaaggtctgaatttcctgctgctgttcacaaagatgctttttatctttaactttttgttttccccacttccgaccccggcgttgatctgcatcctgacatttggagctgccatcttcttgtggctgatcaccagacctcaacccgtcttacctcttcttgacctgaacaatcagtctgtgggaattgagggaggagcacggaagggggtttcccagaagaacaatgacctaacaagttgctgcttctcagatgccaagactatgtatgaggttttccaaagaggactcgctgtgtctgacaatgggccctgcttgggatatagaaaaccaaaccagccctacagatggctatcttacaaacaggtgtctgatagagcagagtacctgggttcctgtctcttgcataaaggttataaatcatcaccagaccagtttgtcggcatctttgctcagaataggccagagtggatcatctccgaattggcttgttacacgtactctatggtagctgtacctctgtatgacaccttgggaccagaagccatcgtacatattgtcaacaaggctgatatcgccatggtgatctgtgacacaccccaaaaggcattggtgctgatagggaatgtagagaaaggcttcaccccgagcctgaaggtgatcatccttatggacccctttgatgatgacctgaagcaaagaggggagaagagtggaattgagatcttatccctatatgatgctgagaacctaggcaaagagcacttcagaaaacctgtgcctcctagcccagaagacctgagcgtcatctgcttcaccagtgggaccacaggtgaccccaaaggagccatgataacccatcaaaatattgtttcaaatgctgctgcctttctcaaatgtgtggagcatgcttatgagcccactcctgatgatgtggccatatcctacctccctctggctcatatgtttgagaggattgtacaggctgttgtgtacagctgtggagccagagttggattcttccaaggggatattcggttgctggctgacgacatgaagactttgaagcccacattgtttcccgcggtgcctcgactccttaacaggatctacgataaggtacaaaatgaggccaagacacccttgaagaagttcttgttgaagctggctgtttccagtaaattcaaagagcttcaaaagggtatcatcaggcatgatagtttctgggacaagctcatctttgcaaagatccaggacagcctgggcggaagggttcgtgtaattgtcactggagctgcccccatgtccacttcagtcatgacattcttccgggcagcaatgggatgtcaggtgtatgaagcttatggtcaaacagaatgcacaggtggctgtacatttacattacctggggactggacatcaggtcacgttggggtgcccctggcttgcaattacgtgaagctggaagatgtggctgacatgaactactttacagtgaataatgaaggagaggtctgcatcaagggtacaaacgtgttcaaaggatacctgaaggaccctgagaagacacaggaagccctggacagtgatggctggcttcacacaggagacattggtcgctggctcccgaatggaactctgaagatcatcgaccgtaaaaagaacattttcaagctggcccaaggagaatacattgcaccagagaagatagaaaatatctacaacaggagtcaaccagtgttacaaatttttgtacacggggagagcttacggtcatccttagtaggagtggtggttcctgacacagatgtacttccctcatttgcagccaagcttggggtgaagggctcctttgaggaactgtgccaaaaccaagttgtaagggaagccattttagaagacttgcagaaaattgggaaagaaagtggccttaaaacttttgaacaggtcaaagccatttttcttcatccagagccattttccattgaaaatgggctcttgacaccaacattgaaagcaaagcgaggagagctttccaaatactttcggacccaaattgacagcctgtatgagcacatccaggattaggataaggtacttaagtacctgccggcccactgtgcactgcttgtgagaaaatggattaaaaactattcttacatttgttttgcctttcctcctatttttttttaacctgttaaactctaaagccatagcttttgttttatattgagacatataatgtgtaaacttagttcccaaataaatcaatcctgtctttcccatcttcgatgttgctaatattaaggcttcagggctacttttatcaacatgcctgtcttcaagatcccagtttatgttctgtgtccttcctcatgatttccaaccttaatactattagtaaccacaagttcaagggtcaaagggaccctctgtgccttcttctttgttttgtgataaacataacttgccaacagtctctatgcttatttacatcttctactgttcaaactaagagatttttaaattctgaaaaactgcttacaattcatgttttctagccactccacaaaccactaaaattttagttttagcctatcactcatgtcaatcatatctatgagacaaatgtctccgatgctcttctgcgtaaattaaattgtgtactgaagggaaaagtttgatcataccaaacatttcctaaactctctagttagatatctgacttgggagtattaaaaattgggtctatgacatattgtccaaaaggaatgctgttcttaaagcattatttacagtaggaactggggagtaaatctgttccctacagtttgctgctgagctggaagctgtgggggaaggagttgacaggtgggcccagtgaacttttccagtaaatgaagcaagcactgaataaaaacctcctgaactgggaacaaagatctacaggcaagcaagatgcccacacaacaggcttattttctgtgaaggaaccaactgatctcccccacccttggattagagttcctgctctaccttacccacagataacacatgttgtttctacttgtaaatgtaaagtctttaaaataaactattacagata

SEQ ID NO: 190093 - DNA, 3353 bp, Artificial Sequence
  derived and/or modified sequence
taaaaccaggaagtgaagtccccgagcacgttagaaagcctgacatggcctgactcgggacagctcagagcagggcagaactggggacactctgggccggccttctgcctgcatggacgctctgaagccaccctgtctctggaggaaccacgagcgagggaagaaggacagggactcgtgtggcaggaagaactcagagccgggaagcccccattcactagaagcactgagagatgcggccccctcgcagggtctgaatttcctgctgctgttcacaaagatgctttttatctttaactttttgttttccccacttccgaccccggcgttgatctgcatcctgacatttggagctgccatcttcttgtggctgatcaccagacctcaacccgtcttacctcttcttgacctgaacaatcagtctgtgggaattgagggaggagcacggaagggggtttcccagaagaacaatgacctaacaagttgctgcttctcagatgccaagactatgtatgaggttttccaaagaggactcgctgtgtctgacaatgggccctgcttgggatatagaaaaccaaaccagccctacagatggctatcttacaaacaggtgtctgatagagcagagtacctgggttcctgtctcttgcataaaggttataaatcatcaccagaccagtttgtcggcatctttgctcagaataggccagagtggatcatctccgaattggcttgttacacgtactctatggtagctgtacctctgtatgacaccttgggaccagaagccatcgtacatattgtcaacaaggctgatatcgccatggtgatctgtgacacaccccaaaaggcattggtgctgatagggaatgtagagaaaggcttcaccccgagcctgaaggtgatcatccttatggacccctttgatgatgacctgaagcaaagaggggagaagagtggaattgagatcttatccctatatgatgctgagaacctaggcaaagagcacttcagaaaacctgtgcctcctagcccagaagacctgagcgtcatctgcttcaccagtgggaccacaggtgaccccaaaggagccatgataacccatcaaaatattgtttcaaatgctgctgcctttctcaaatgtgtggagcatgcttatgagcccactcctgatgatgtggccatatcctacctccctctggctcatatgtttgagaggattgtacaggctgttgtgtacagctgtggagccagagttggattcttccaaggggatattcggttgctggctgacgacatgaagactttgaagcccacattgtttcccgcggtgcctcgactccttaacaggatctacgataaggtacaaaatgaggccaagacacccttgaagaagttcttgttgaagctggctgtttccagtaaattcaaagagcttcaaaagggtatcatcaggcatgatagtttctgggacaagctcatctttgcaaagatccaggacagcctgggcggaagggttcgtgtaattgtcactggagctgcccccatgtccacttcagtcatgacattcttccgggcagcaatgggatgtcaggtgtatgaagcttatggtcaaacagaatgcacaggtggctgtacatttacattacctggggactggacatcaggtcacgttggggtgcccctggcttgcaattacgtgaagctggaagatgtggctgacatgaactactttacagtgaataatgaaggagaggtctgcatcaagggtacaaacgtgttcaaaggatacctgaaggaccctgagaagacacaggaagccctggacagtgatggctggcttcacacaggagacattggtcgctggctcccgaatggaactctgaagatcatcgaccgtaaaaagaacattttcaagctggcccaaggagaatacattgcaccagagaagatagaaaatatctacaacaggagtcaaccagtgttacaaatttttgtacacggggagagcttacggtcatccttagtaggagtggtggttcctgacacagatgtacttccctcatttgcagccaagcttggggtgaagggctcctttgaggaactgtgccaaaaccaagttgtaagggaagccattttagaagacttgcagaaaattgggaaagaaagtggccttaaaacttttgaacaggtcaaagccatttttcttcatccagagccattttccattgaaaatgggctcttgacaccaacattgaaagcaaagcgaggagagctttccaaatactttcggacccaaattgacagcctgtatgagcacatccaggattaggataaggtacttaagtacctgccggcccactgtgcactgcttgtgagaaaatggattaaaaactattcttacatttgttttgcctttcctcctatttttttttaacctgttaaactctaaagccatagcttttgttttatattgagacatataatgtgtaaacttagttcccaaataaatcaatcctgtctttcccatcttcgatgttgctaatattaaggcttcagggctacttttatcaacatgcctgtcttcaagatcccagtttatgttctgtgtccttcctcatgatttccaaccttaatactattagtaaccacaagttcaagggtcaaagggaccctctgtgccttcttctttgttttgtgataaacataacttgccaacagtctctatgcttatttacatcttctactgttcaaactaagagatttttaaattctgaaaaactgcttacaattcatgttttctagccactccacaaaccactaaaattttagttttagcctatcactcatgtcaatcatatctatgagacaaatgtctccgatgctcttctgcgtaaattaaattgtgtactgaagggaaaagtttgatcataccaaacatttcctaaactctctagttagatatctgacttgggagtattaaaaattgggtctatgacatattgtccaaaaggaatgctgttcttaaagcattatttacagtaggaactggggagtaaatctgttccctacagtttgctgctgagctggaagctgtgggggaaggagttgacaggtgggcccagtgaacttttccagtaaatgaagcaagcactgaataaaaacctcctgaactgggaacaaagatctacaggcaagcaagatgcccacacaacaggcttattttctgtgaaggaaccaactgatctcccccacccttggattagagttcctgctctaccttacccacagataacacatgttgtttctacttgtaaatgtaaagtctttaaaataaactattacagatactt

SEQ ID NO: 190094 - DNA, 3380 bp, Artificial Sequence
  derived and/or modified sequence
gccagaggatggaatgccacaggccccacttcgtctcccagcccttcatctttcttccatgtccaaaggcggctccccagaggccaagggctcagctcttgtgttctctgagactgtggcacagctcaccctggcttccttagtaggaagcttttaagaactgctctgtagaaagaacaaaccctaatctagctccagcaaagagccaggatcatgctgaacttcctgtgagccttcgtgggggatcgaggctggagaaagtgctgcttcattctgaggtctgaatttcctgctgctgttcacaaagatgctttttatctttaactttttgttttccccacttccgaccccggcgttgatctgcatcctgacatttggagctgccatcttcttgtggctgatcaccagacctcaacccgtcttacctcttcttgacctgaacaatcagtctgtgggaattgagggaggagcacggaagggggtttcccagaagaacaatgacctaacaagttgctgcttctcagatgccaagactatgtatgaggttttccaaagaggactcgctgtgtctgacaatgggccctgcttgggatatagaaaaccaaaccagccctacagatggctatcttacaaacaggtgtctgatagagcagagtacctgggttcctgtctcttgcataaaggttataaatcatcaccagaccagtttgtcggcatctttgctcagaataggccagagtggatcatctccgaattggcttgttacacgtactctatggtagctgtacctctgtatgacaccttgggaccagaagccatcgtacatattgtcaacaaggctgatatcgccatggtgatctgtgacacaccccaaaaggcattggtgctgatagggaatgtagagaaaggcttcaccccgagcctgaaggtgatcatccttatggacccctttgatgatgacctgaagcaaagaggggagaagagtggaattgagatcttatccctatatgatgctgagaacctaggcaaagagcacttcagaaaacctgtgcctcctagcccagaagacctgagcgtcatctgcttcaccagtgggaccacaggtgaccccaaaggagccatgataacccatcaaaatattgtttcaaatgctgctgcctttctcaaatgtgtggagcatgcttatgagcccactcctgatgatgtggccatatcctacctccctctggctcatatgtttgagaggattgtacaggctgttgtgtacagctgtggagccagagttggattcttccaaggggatattcggttgctggctgacgacatgaagactttgaagcccacattgtttcccgcggtgcctcgactccttaacaggatctacgataaggtacaaaatgaggccaagacacccttgaagaagttcttgttgaagctggctgtttccagtaaattcaaagagcttcaaaagggtatcatcaggcatgatagtttctgggacaagctcatctttgcaaagatccaggacagcctgggcggaagggttcgtgtaattgtcactggagctgcccccatgtccacttcagtcatgacattcttccgggcagcaatgggatgtcaggtgtatgaagcttatggtcaaacagaatgcacaggtggctgtacatttacattacctggggactggacatcaggtcacgttggggtgcccctggcttgcaattacgtgaagctggaagatgtggctgacatgaactactttacagtgaataatgaaggagaggtctgcatcaagggtacaaacgtgttcaaaggatacctgaaggaccctgagaagacacaggaagccctggacagtgatggctggcttcacacaggagacattggtcgctggctcccgaatggaactctgaagatcatcgaccgtaaaaagaacattttcaagctggcccaaggagaatacattgcaccagagaagatagaaaatatctacaacaggagtcaaccagtgttacaaatttttgtacacggggagagcttacggtcatccttagtaggagtggtggttcctgacacagatgtacttccctcatttgcagccaagcttggggtgaagggctcctttgaggaactgtgccaaaaccaagttgtaagggaagccattttagaagacttgcagaaaattgggaaagaaagtggccttaaaacttttgaacaggtcaaagccatttttcttcatccagagccattttccattgaaaatgggctcttgacaccaacattgaaagcaaagcgaggagagctttccaaatactttcggacccaaattgacagcctgtatgagcacatccaggattaggataaggtacttaagtacctgccggcccactgtgcactgcttgtgagaaaatggattaaaaactattcttacatttgttttgcctttcctcctatttttttttaacctgttaaactctaaagccatagcttttgttttatattgagacatataatgtgtaaacttagttcccaaataaatcaatcctgtctttcccatcttcgatgttgctaatattaaggcttcagggctacttttatcaacatgcctgtcttcaagatcccagtttatgttctgtgtccttcctcatgatttccaaccttaatactattagtaaccacaagttcaagggtcaaagggaccctctgtgccttcttctttgttttgtgataaacataacttgccaacagtctctatgcttatttacatcttctactgttcaaactaagagatttttaaattctgaaaaactgcttacaattcatgttttctagccactccacaaaccactaaaattttagttttagcctatcactcatgtcaatcatatctatgagacaaatgtctccgatgctcttctgcgtaaattaaattgtgtactgaagggaaaagtttgatcataccaaacatttcctaaactctctagttagatatctgacttgggagtattaaaaattgggtctatgacatattgtccaaaaggaatgctgttcttaaagcattatttacagtaggaactggggagtaaatctgttccctacagtttgctgctgagctggaagctgtgggggaaggagttgacaggtgggcccagtgaacttttccagtaaatgaagcaagcactgaataaaaacctcctgaactgggaacaaagatctacaggcaagcaagatgcccacacaacaggcttattttctgtgaaggaaccaactgatctcccccacccttggattagagttcctgctctaccttacccacagataacacatgttgtttctacttgtaaatgtaaagtctttaaaataaactattacagatactt

SEQ ID NO: 190095 - DNA, 3281 bp, Artificial Sequence
  derived and/or modified sequence
taaaaccaggaagtgaagtccccgagcacgttagaaagcctgacatggcctgactcgggacagctcagagcagggcagaactggggacactctgggccggccttctgcctgcatggacgctctgaagccaccctgtctctggaggaaccacgagcgagggaagaaggacagggactcgtgtggcaggaagaactcagagccgggaagcccccattcactagaagcactgagagatgcggccccctcgcagggtctgaatttcctgctgctgttcacaaagatgctttttatctttaactttttgttttccccacttccgaccccggcgttgatctgcatcctgacatttggagctgccatcttcttgtggctgatcaccagacctcaacccgtcttacctcttcttgacctgaacaatcagtctgtgggaattgagggaggagcacggaagggggtttcccagaagaacaatgacctaacaagttgctgcttctcagatgccaagactatgtatgaggttttccaaagaggactcgctgtgtctgacaatgggccctgcttgggatatagaaaaccaaaccagccctacagatggctatcttacaaacaggtgtctgatagagcagagtacctgggttcctgtctcttgcataaaggttataaatcatcaccagaccagtttgtcggcatctttgctcagaataggccagagtggatcatctccgaattggcttgttacacgtactctatggtagctgtacctctgtatgacaccttgggaccagaagccatcgtacatattgtcaacaaggctgatatcgccatggtgatctgtgacacaccccaaaaggcattggtgctgatagggaatgtagagaaaggcttcaccccgagcctgaaggtgatcatccttatggacccctttgatgatgacctgaagcaaagaggggagaagagtggaattgagatcttatccctatatgatgctgagaacctaggcaaagagcacttcagaaaacctgtgcctcctagcccagaagacctgagcgtcatctgcttcaccagtgggaccacaggtgaccccaaaggagccatgataacccatcaaaatattgtttcaaatgctgctgcctttctcaaatgtgtggagcatgcttatgagcccactcctgatgatgtggccatatcctacctccctctggctcatatgtttgagaggattgtacaggctgttgtgtacagctgtggagccagagttggattcttccaaggggatattcggttgctggctgacgacatgaagactttgaagcccacattgtttcccgcggtgcctcgactccttaacaggatctacgataaggtacaaaatgaggccaagacacccttgaagaagttcttgttgaagctggctgtttccagtaaattcaaagagcttcaaaagggtatcatcaggcatgatagtttctgggacaagctcatctttgcaaagatccaggacagcctgggcggaagggttcgtgtaattgtcactggagctgcccccatgtccacttcagtcatgacattcttccgggcagcaatgggatgtcaggtgtatgaagcttatggtcaaacagaatgcacaggtggctgtacatttacattacctggggactggacatcaggtcacgttggggtgcccctggcttgcaattacgtgaagctggaagatgtggctgacatgaactactttacagtgaataatgaaggagaggtctgcatcaagggtacaaacgtgttcaaaggatacctgaaggaccctgagaagacacaggaagccctggacagtgatggctggcttcacacaggagacattggtcgctggctcccgaatggaactctgaagatcatcgaccgtaaaaagaacattttcaagctggcccaaggagaatacattgcaccagagaagatagaaaatatctacaacaggagtcaaccagtgttacaaatttttgtacacggggagagcttacggtcatccttagtaggagtggtggttcctgacacagatgtacttccctcatttgcagccaagcttggggtgaagggctcctttgaggaactgtgccaaaaccaagtcaaagccatttttcttcatccagagccattttccattgaaaatgggctcttgacaccaacattgaaagcaaagcgaggagagctttccaaatactttcggacccaaattgacagcctgtatgagcacatccaggattaggataaggtacttaagtacctgccggcccactgtgcactgcttgtgagaaaatggattaaaaactattcttacatttgttttgcctttcctcctatttttttttaacctgttaaactctaaagccatagcttttgttttatattgagacatataatgtgtaaacttagttcccaaataaatcaatcctgtctttcccatcttcgatgttgctaatattaaggcttcagggctacttttatcaacatgcctgtcttcaagatcccagtttatgttctgtgtccttcctcatgatttccaaccttaatactattagtaaccacaagttcaagggtcaaagggaccctctgtgccttcttctttgttttgtgataaacataacttgccaacagtctctatgcttatttacatcttctactgttcaaactaagagatttttaaattctgaaaaactgcttacaattcatgttttctagccactccacaaaccactaaaattttagttttagcctatcactcatgtcaatcatatctatgagacaaatgtctccgatgctcttctgcgtaaattaaattgtgtactgaagggaaaagtttgatcataccaaacatttcctaaactctctagttagatatctgacttgggagtattaaaaattgggtctatgacatattgtccaaaaggaatgctgttcttaaagcattatttacagtaggaactggggagtaaatctgttccctacagtttgctgctgagctggaagctgtgggggaaggagttgacaggtgggcccagtgaacttttccagtaaatgaagcaagcactgaataaaaacctcctgaactgggaacaaagatctacaggcaagcaagatgcccacacaacaggcttattttctgtgaaggaaccaactgatctcccccacccttggattagagttcctgctctaccttacccacagataacacatgttgtttctacttgtaaatgtaaagtctttaaaataaactattacagatactt

SEQ ID NO: 190096 - protein, 755 aa, Artificial Sequence
  derived and/or modified sequence
MASVHESLYFNPMMTNGVVHANVFGIKDWVTPYKIAVLVLLNEMSRTGEGAVSLMERRRLNQLLLPLLQGPDITLSKLYKLIEESCPQLANSVQIRIKLMAEGELKDMEQFFDDLSDSFSGTEPEVHKTSVVGLFLRHMILAYSKLSFSQVFKLYTALQQYFQNGEKKTVEDADMELTSRDEGERKMEKEELDVSVREEEVSCSGPLSQKQAEFFLSQQASLLKNDETKALTPASLQKELNNLLKFNPDFAEAHYLSYLNNLRVQDVFSSTHSLLHYFDRLILTGAESKSNGEEGYGRSLRYAALNLAALHCRFGHYQQAELALQEAIRIAQESNDHVCLQHCLSWLYVLGQKRSDSYVLLEHSVKKAVHFGLPYLASLGIQSLVQQRAFAGKTANKLMDALKDSDLLHWKHSLSELIDISIAQKTAIWRLYGRSTMALQQAQMLLSMNSLEAVNAGVQQNNTESFAVALCHLAELHAEQGCFAAASEVLKHLKERFPPNSQHAQLWMLCDQKIQFDRAMNDGKYHLADSLVTGITALNSIEGVYRKAVVLQAQNQMSEAHKLLQKLLVHCQKLKNTEMVISVLLSVAELYWRSSSPTIALPMLLQALALSKEYRLQYLASETVLNLAFAQLILGIPEQALSLLHMAIEPILADGAILDKGRAMFLVAKCQVASAASYDQPKKAEALEAAIENLNEAKNYFAKVDCKERIRDVVYFQARLYHTLGKTQERNRCAMLFRQLHQELPSHGVPLINHL

SEQ ID NO: 190097 - protein, 219 aa, Artificial Sequence
  derived and/or modified sequence
MLSPCLSSYFVGLFLRHMILAYSKLSFSQVFKLYTALQQYFQNGEKKTVEDADMELTSRDEGERKMEKEELDVSVREEEVSCSGPLSQKQAEFFLSQQASLLKNDETKALTPASLQKELNNLLKFNPDFAEAHYLSYLNNLRVQDVFSSTHSLLHYFDRLILTGAESKSNGEEGYGRSLRYAALNLAALHCRFGHYTSPPWEYSPLFNRELLLGRRQTS

SEQ ID NO: 190098 - protein, 44 aa, Artificial Sequence
  derived and/or modified sequence
MAEGELKDMEQFFDDLSDSFSGTEPEVHKTSVVGLFLRHMILAY

SEQ ID NO: 190099 - protein, 357 aa, Artificial Sequence
  derived and/or modified sequence
MDALKDSDLLHWKHSLSELIDISIAQKTAIWRLYGRSTMALQQAQMLLSMNSLEAVNAGVQQNNTESFAVALCHLAELHAEQGCFAAASEVLKHLKERFPPNSQHAQLWMLCDQKIQFDRAMNDGKYHLADSLVTGITALNSIEGVYRKAVVLQAQNQMSEAHKLLQKLLVHCQKLKNTEMVISVLLSVAELYWRSSSPTIALPMLLQALALSKEYRLQYLASETVLNLAFAQLILGIPEQALSLLHMAIEPILADGAILDKGRAMFLVAKCQVASAASYDQPKKAEALEAAIENLNEAKNYFAKVDCKERIRDVVYFQARLYHTLGKTQERNRCAMLFRQLHQELPSHGVPLINHL

SEQ ID NO: 190100 - DNA, 2268 bp, Artificial Sequence
  derived and/or modified sequence
atggcctctgtccacgagagcctgtatttcaatccaatgatgaccaatggtgttgttcacgccaacgtctttggcatcaaagactgggtgacaccctacaaaattgctgtattggtgctgctgaatgaaatgtcacggaccggtgagggggctgtaagcctgatggaaagacggaggttgaaccagctgcttctccctctgctccaggggccagatattaccttatctaaactctataaactaatagaggagtcctgtcctcagctcgctaactctgtgcagattcgcatcaagctgatggcggaaggtgaattgaaggacatggagcagttttttgacgacctcagtgactctttttcggggaccgaacccgaagtgcacaaaaccagcgttgtgggcctgttcctccgccacatgatacttgcatattcaaagctgtcctttagccaggtgtttaaactctacactgcactccagcagtacttccagaacggcgagaagaaaacagtcgaggacgcagatatggagttgaccagccgtgacgagggagaacgcaagatggaaaaggaggaacttgacgtgtccgtgcgggaagaagaagttagctgtagcggtccactgtcccagaagcaggctgagttctttttgtctcaacaggcctccctgctgaagaatgacgagacaaaggcccttacccctgcctccctgcagaaggagctgaacaaccttctgaagtttaatccagactttgccgaggcgcattacttaagctatctcaacaacctcagagtgcaggatgtgtttagcagcacccattctcttttgcactacttcgatagactgattcttacaggggctgaaagcaagtccaatggcgaggagggttacggcaggagcctgcgctacgccgcactcaacctggccgcccttcactgtagattcggccactaccagcaggccgagctggccctgcaggaggcaataaggatcgctcaggaatccaatgaccatgtgtgcctacagcattgtcttagttggttatatgtgctcggccaaaagcggtctgattcttatgtgttgcttgagcacagtgtgaagaaggccgtccactttgggctgccctacctggcttcactcggcattcagagtctggtacagcaaagagccttcgcgggaaaaacagctaacaagcttatggatgcactgaaggatagcgatctgctgcattggaaacacagccttagcgagctcattgatatcagtattgctcaaaagacagcgatatggagactatacggccgcagtactatggcccttcagcaggcacaaatgctactgtccatgaatagtctggaagctgttaatgcaggggtacagcagaataacaccgagtcatttgctgtcgcattatgtcatctcgccgagcttcacgcggagcaaggatgttttgcagccgcttccgaggtgttaaagcacttaaaagagcgattcccacctaactcacagcatgcccagctttggatgttgtgcgaccaaaaaattcagtttgaccgagctatgaatgacggaaagtatcatttagctgatagtctcgttaccgggatcacggcgctcaattcaatcgaaggggtgtataggaaagccgtggtcttgcaggctcagaaccagatgagtgaagctcacaaactgctccagaagttgctcgtgcattgccagaagctgaaaaacacggaaatggttatatctgtcttgttgtcagtggctgagctgtattggcggagctcttctcctactatcgctttgccgatgctgctacaggcgctggctctgagcaaagagtaccgcttacagtatctcgcatctgagactgtgttaaacttggctttcgcacaactgatcctcggcatacccgaacaagcattatccctgctgcatatggctattgagcccatcctggctgacggcgccattttagataagggacgtgccatgttcctggtggcgaagtgccaggttgcgagcgccgcctcatatgaccagcccaagaaagcggaagccctggaagccgcaatcgagaacctcaacgaggcgaaaaattatttcgctaaggtcgactgtaaagagcggatcagagatgtggtttactttcaagcgcggctgtatcacacattgggcaaaacgcaggagcggaaccgctgcgcaatgctgtttcgacaactgcatcaggagctgcctagccacggcgtgcctctgattaatcatctttag

SEQ ID NO: 190101 - DNA, 2268 bp, Artificial Sequence
  derived and/or modified sequence
atggcctctgtgcatgagagcctgtacttcaaccccatgatgaccaacggggtggtgcacgccaacgtgtttggcatcaaggactgggtgaccccctacaagattgctgtgctggtgctgctgaatgagatgagcaggactggagagggcgctgtgtccctgatggagcggcggcggctgaaccagctgctgctgcccctgctgcagggccctgacatcaccctgagcaagctgtacaagctgattgaggagagctgcccccagctggccaacagcgtgcagatccgcatcaagctgatggccgagggggagctgaaggacatggagcagttctttgatgacctgagtgacagcttcagcggcacagagcctgaggtgcacaagacctctgtggtgggcctcttcctgcggcacatgatcctggcctacagcaagctgtccttcagccaggtgttcaagctgtacacagccctgcagcagtacttccagaatggagagaagaagacagtggaggatgctgacatggagctgaccagcagagatgaaggagagaggaagatggagaaggaggagctggatgtgtctgtgcgggaggaggaggtgtcctgcagcggccccctgagccagaagcaggccgagttcttcctgagccagcaggccagcctgctgaagaatgatgagaccaaggccctgaccccagccagcctgcagaaggagctgaacaacctgctgaagttcaacccagactttgctgaggcccactacctgagctacctgaacaacctgcgggtgcaggatgtgttcagcagcacccacagcctgctgcactactttgacaggctcatcctgaccggggctgagagcaagagcaatggagaggagggctacggccgcagcctgcgctatgctgccctgaacctggccgccctgcactgccgcttcggccactaccagcaggccgagctggccctgcaggaggccatccgcatcgcccaggagagcaatgaccacgtgtgcctgcagcactgcctgtcctggctgtatgtgctgggccagaagagaagtgacagctatgtgctgctggagcacagcgtgaagaaggctgtgcacttcggcctgccctacctggccagcctgggcatccagagcctggtgcagcagagggcctttgctgggaagacagccaacaagctgatggatgccctgaaggacagcgacctgctgcactggaagcacagcctgtctgagctgattgacatcagcatcgcccagaagacagccatctggaggctgtatggccgcagcaccatggccctgcagcaggcccagatgctgctgtccatgaacagcctggaggccgtgaatgctggggtgcagcagaacaacacagagagctttgctgtggccctgtgccacctggccgagctgcacgccgagcagggctgctttgctgctgccagcgaggtgctgaagcacctgaaggagcgcttcccccccaacagccagcacgcccagctgtggatgctgtgtgaccagaagatccagtttgaccgggccatgaatgatggcaagtaccacctggccgacagcctggtgacaggcatcacagccctgaacagcattgaaggagtgtacaggaaggctgtggtgctgcaggcccagaaccagatgtctgaggcccacaagctgctgcagaagctgctggtgcactgccagaagctgaagaacacagagatggtgatctctgtgctgctgtctgtggccgagctgtactggaggagcagcagccccaccatcgccctgcccatgctgctgcaggccctggccctgagcaaggagtaccgcctgcagtacctggccagcgagaccgtgctgaacctggcctttgcccagctgatcctgggcatccctgagcaggccctgagcctgctgcacatggccatcgagcccatcctggctgatggagccatcctggacaagggccgggccatgttcctggtggccaagtgccaggtggccagcgctgccagctatgaccagcccaagaaggccgaggccctggaggccgccatcgagaacctgaatgaggccaagaactactttgccaaggtggactgcaaggagcgcatcagagatgtggtgtacttccaggcccggctgtaccacaccctgggcaagacccaggagaggaacagatgtgccatgctgttccggcagctgcaccaggagctgcccagccatggagtgcccctcatcaaccacctgtag

SEQ ID NO: 190102 - DNA, 2268 bp, Artificial Sequence
  derived and/or modified sequence
atggccagcgtgcacgagagcctgtacttcaaccccatgatgaccaatggcgtggtgcatgccaatgtgttcgggatcaaggactgggtgactccgtacaagatcgctgttctggtgctgctgaatgagatgtcacgcactggtgaaggcgccgtcagccttatggaacgccgcagactgaaccagctacttttgccgctactgcaaggccctgacattacccttagcaagctgtacaaacttatagaggagagctgccctcagctggccaatagtgtccagattcgaatcaagttaatggccgagggagagttgaaggatatggagcagtttttcgatgacctgtctgattcattctctggcactgagccagaggtgcataagacgagcgtggttggcctttttctcagacacatgattctggcttattctaaactgtctttttctcaggtgtttaaactgtacacagccctgcagcagtacttccagaacggcgaaaagaagaccgtcgaggatgcagatatggagctgacatcccgcgacgaaggtgagagaaagatggagaaggaagagctagacgtgtccgttagagaggaggaagtgagctgcagcggcccccttagccagaagcaggctgaattttttctctcgcagcaggcatccctgctgaagaatgacgaaacaaaggctctgacaccagcttccttacaaaaagagctgaataatctactgaagttcaacccagactttgctgaggcccactacctttcttacctcaacaatcttcgagtacaagatgtgtttagtagtacccattccctgcttcactatttcgaccgactgattctgacaggggccgagtctaagagcaacggggaggaaggatacggaagaagcttgcggtacgccgctttaaacctggccgcactacactgccgatttggacattatcagcaggcagagctcgccttacaggaagccatccggattgcgcaagagagcaatgatcacgtatgtttgcagcactgtctgtcctggctgtacgtactcggacagaaaagaagcgattcctacgtactgctcgagcattccgtgaaaaaagccgtgcatttcggactcccctacctggcctcccttggcatccagtctctcgttcagcagcgggccttcgctggcaagacggcgaacaaacttatggatgcacttaaggactcagatctgctgcactggaaacacagcctgtcagagctaatagacatcagcatcgcccaaaaaaccgcaatatggagactgtatggacgatcgactatggcgctgcaacaggcacagatgctgttgagcatgaatagcctcgaggcagtcaatgcaggcgttcaacagaataacaccgagtcttttgcggtcgcactgtgccatttggctgagctgcacgcggaacagggctgtttcgccgcagcctccgaggtccttaagcacctgaaagaaaggtttccccccaacagccaacacgcccaactgtggatgttgtgtgatcagaaaatccagtttgatagggcaatgaacgatggaaagtaccatttggccgactctctagtcaccggcattaccgccctaaacagtattgaaggggtctaccgcaaagccgtagtgcttcaggctcaaaatcagatgtctgaagctcataaactcctgcagaaacttttggtccactgccagaagctgaagaataccgagatggttatcagcgtgctgcttagcgtggcagaattgtactggcgatctagttccccaacgatcgccctgccaatgcttctccaggccctggctcttagcaaggaataccgactgcagtatctcgcgagtgaaacagtgttaaacctggccttcgcccagcttattctgggcattccagaacaggcgctgtcactcctgcatatggccattgaacctatcctggcagacggtgctatcctggacaaaggccgcgcgatgtttctggtggccaagtgccaggtggctagtgcagcttcatacgaccagcctaaaaaagctgaggctctagaagcggccatcgagaatctgaacgaagcgaaaaactatttcgcgaaggtggattgtaaggaaaggattcgggacgtagtctactttcaggcaaggctttaccacaccctcggaaaaacacaagagagaaatcggtgtgcgatgctattccgccaattacaccaggaactcccatcacatggagtgccattaataaatcatctctag

SEQ ID NO: 190103 - DNA, 2513 bp, Artificial Sequence
  derived and/or modified sequence
gcggatgtctgtttcctgggatattgtgagggcgggcggagatgtagacccggtagtgttgtgccttgtggtgacaactggcggcagcgcgccgcgggcccgagacttagtctcgggccgccatggccagcgtccacgagagcctctacttcaatcccatgatgaccaatggggttgtgcacgccaatgtgttcggcatcaaggactgggtgacgccgtacaagatcgcggtgctggtgctgctgaacgagatgagccgcacaggcgagggcgccgtcagcctcatggagcggcggaggctcaaccagctgctcctgcccctgctgcagggcccagatattacactgtcaaaactttacaagttaattgaagagtcttgtccacagctggcaaattcagtgcagatcagaatcaaactgatggctgaaggcgagttgaaggatatggaacagttttttgatgacctttcagattctttctctggaactgaaccagaggttcacaaaacaagtgtagtaggtttgtttctgcgtcacatgatcttggcctacagtaagctttctttcagccaagtgtttaaactgtacactgcccttcagcagtacttccagaatggtgagaaaaagacagtggaggatgctgatatggaactgaccagtagagatgagggtgaaagaaaaatggaaaaagaagaacttgatgtatctgtaagagaagaggaggtatcttgcagtgggcctctgtcccaaaaacaagcagaattttttctttctcaacaggcttctttgctaaagaatgatgagactaaggccctcactccagcttccttgcagaaggaattaaacaatttgttgaaatttaatcctgattttgctgaagcgcattatctcagctacttaaacaacctccgtgtccaagatgttttcagttcaacacacagtctcctccattattttgatcgtctgattcttaccggagccgaaagcaaaagtaatggggaagagggctatggccggagcttgagatacgccgctctgaatcttgccgccctgcactgccgcttcggtcactatcaacaggcagagctcgccctgcaggaggcaattaggattgcccaggagtccaacgatcacgtgtgtctccagcactgtttgagctggctttatgtgctggggcagaagagatccgatagctatgttctgctggagcattctgtgaagaaggcagtacattttgggttaccgtacctcgcctccctgggaatacagtcccttgttcaacagagagcttttgctgggaagacggcaaacaagctgatggatgccctaaaggactccgacctcctgcactggaaacacagcctgtcagagctcatcgatatcagcatcgcacagaaaacggccatctggaggctgtatggccgcagcaccatggcactgcaacaggcccagatgttgctgagcatgaacagcctggaggcggtgaatgcgggcgtgcagcagaacaacacagagtcctttgctgtcgcactctgccacctcgcagagctacacgcggagcagggctgttttgctgcagcttctgaagtgttaaagcacttgaaggaacgatttccgcctaatagtcagcacgcccagttatggatgctatgtgatcaaaaaatacagtttgacagagcaatgaatgatggcaaatatcatttggctgattcacttgttacaggaatcacagctctcaatagcatagagggtgtttataggaaagcggttgtattacaagctcagaaccaaatgtcagaggcacataagcttttacaaaaattgttggttcattgtcagaaactgaagaacacagaaatggtgatcagtgtcctactgtccgtggcagagctgtactggcgatcttcctcccctaccatcgcgctgcccatgctcctgcaggctctggccctctccaaggagtaccggttacagtacttggcctctgaaacagtgctgaacttggcttttgcgcagctcattcttggaatcccagaacaggccttaagtcttctccacatggccatcgagcccatcttggctgacggggctatcctggacaaaggtcgtgccatgttcttagtggccaagtgccaggtggcttcagcagcttcctacgatcagccgaagaaagcagaagctctggaggctgccatcgagaacctcaatgaagccaagaactattttgcaaaggttgactgcaaagagcgcatcagggacgtcgtttacttccaggccagactctaccataccctggggaagacccaggagaggaaccggtgtgcgatgctcttccggcagctgcatcaggagctgccctctcatggggtacccttgataaaccatctctagagaggacatccctgctgggctgctgtgcagagtataagattttggacttgttcatgtcccctctctccctataaatgatgtatttgtgacaccctatcttgtcaataaacagcattctgatta

SEQ ID NO: 190104 - DNA, 1508 bp, Artificial Sequence
  derived and/or modified sequence
tttcagttcaacacacagtctcctccattattttgatcgtctgattcttaccggagccgaaagcaaaagtaatggggaagagggctatggccggagcttgagatacgccgctctgaatcttgccgccctgcactgccgcttcggtcactaagctggctttatgtgctggggcagaagagatccgatagctatgttctgctggagcattctgtgaagaaggcagtacattttgggttaccgtacctcgcctccctgggaatacagtcccttgttcaacagagagcttttgctgggaagacggcaaacaagctgatggatgccctaaaggactccgacctcctgcactggaaacacagcctgtcagagctcatcgatatcagcatcgcacagaaaacggccatctggaggctgtatggccgcagcaccatggcactgcaacaggcccagatgttgctgagcatgaacagcctggaggcggtgaatgcgggcgtgcagcagaacaacacagagtcctttgctgtcgcactctgccacctcgcagagctacacgcggagcagggctgttttgctgcagcttctgaagtgttaaagcacttgaaggaacgatttccgcctaatagtcagcacgcccagttatggatgctatgtgatcaaaaaatacagtttgacagagcaatgaatgatggcaaatatcatttggctgattcacttgttacaggaatcacagctctcaatagcatagagggtgtttataggaaagcggttgtattacaagctcagaaccaaatgtcagaggcacataagcttttacaaaaattgttggttcattgtcagaaactgaagaacacagaaatggtgatcagtgtcctactgtccgtggcagagctgtactggcgatcttcctcccctaccatcgcgctgcccatgctcctgcaggctctggccctctccaaggagtaccggttacagtacttggcctctgaaacagtgctgaacttggcttttgcgcagctcattcttggaatcccagaacaggccttaagtcttctccacatggccatcgagcccatcttggctgacggggctatcctggacaaaggtcgtgccatgttcttagtggccaagtgccaggtggcttcagcagcttcctacgatcagccgaagaaagcagaagctctggaggctgccatcgagaacctcaatgaagccaagaactattttgcaaaggttgactgcaaagagcgcatcagggacgtcgtttacttccaggccagactctaccataccctggggaagacccaggagaggaaccggtgtgcgatgctcttccggcagctgcatcaggagctgccctctcatggggtacccttgataaaccatctctagagaggacatccctgctgggctgctgtgcagagtataagattttggacttgttcatgtcccctctctccctataaatgatgtatttgtgacaccctatcttgtcaataaacagcattctgatt

SEQ ID NO: 190105 - DNA, 2268 bp, Artificial Sequence
  derived and/or modified sequence
atggccagcgtgcatgagagcctttattttaatcctatgatgacaaatggggtggtgcacgcaaacgtgttcggcataaaggattgggtgactccatataagatcgccgtactggtgctgctgaacgaaatgagcagaacaggcgagggcgcagtgtctctcatggaacgcaggcgcttgaaccagctgctgctgcccctgttgcagggtcccgacatcaccttgtctaagctgtacaaacttatcgaggagtcatgcccgcagctggccaacagcgtccaaatcaggattaaactcatggccgagggcgaattaaaagatatggaacagttcttcgacgacctttccgactccttttcgggtaccgaacccgaggtgcataagacctccgtcgtgggcctgtttctccgccacatgattctcgcatactccaagttgtcgttttcacaggtgtttaagctgtacacagcgctgcagcaatacttccagaacggggaaaagaagacagtggaagacgcagatatggaactcacttctagagatgaaggcgagcggaaaatggagaaagaggagttagatgtatctgtgcgagaagaggaggtgtcttgcagcggcccactgtctcaaaagcaagctgagtttttcttatcccaacaagcctccctcctgaagaatgacgaaacaaaggcactgacaccggcaagtctgcaaaaggagcttaataacttgttgaaattcaatcccgatttcgctgaggcccactatctatcatatttaaataacttgcgcgtccaagacgtattcagctccacgcatagtctgctgcattactttgatcggctcatcctgacaggagccgagtcaaaatccaacggagaggagggatatgggagatccttaagatatgcagctctcaatctcgccgcactgcactgccggtttggccattaccagcaggcagaactggcgttgcaggaagctattcggattgctcaggaaagcaacgaccatgtgtgcctgcaacactgcttgagctggctctacgtgttgggccagaaaagatccgattcctatgtgctacttgaacatagtgtcaaaaaggcggtccattttggattgccctacctcgcttctctgggtattcaatctctggtccaacagcgcgcatttgctgggaagacagccaataagctgatggacgctctgaaagatagcgacctcttacactggaaacattctttgtcagaattgattgacattagcattgctcaaaagacggctatctggcgactgtatgggaggagcaccatggccctccagcaggcgcaaatgcttctttctatgaactcactggaggcagtgaatgctggcgtgcagcagaataacactgaaagttttgcagtggccctatgccacctggctgagctgcatgccgagcaagggtgctttgctgcagcaagcgaagtgctgaagcatctgaaggaaagattcccaccgaattcccagcacgctcagctgtggatgttgtgtgaccagaagattcaatttgacagggccatgaatgacggaaagtatcacctagctgatagtctggtgaccggaattaccgctttgaacagcattgaaggggtctataggaaagccgttgtgttgcaggcccaaaaccaaatgtcggaagcccataagctgctgcagaaactgttagtccattgccagaaactgaagaacaccgaaatggtcatcagtgtcttactgtcagttgctgaactctattggcgctcgtctagccctacgatcgcccttcctatgcttttgcaagccctcgcactgagcaaagagtacagactacagtacttggctagcgaaactgtcctgaacctggcctttgctcaattgattctgggcatcccggaacaggcactcagcttgctccatatggccatcgaaccaattttagcagatggcgcaatcctggacaaaggtagagccatgttccttgtggccaaatgccaggtggcctcagcggcatcctatgatcaacccaagaaggcggaagctctcgaagctgcgatcgagaacctcaatgaagctaagaactattttgcaaaggtagactgcaaggagcgaattagagacgtggtttatttccaggcccgtctgtaccacaccctgggcaagacacaggagagaaaccggtgcgcaatgctcttcaggcaattgcatcaggagctgccgtctcacggcgtgcctctcattaaccatctttag

SEQ ID NO: 190106 - DNA, 2268 bp, Artificial Sequence
  derived and/or modified sequence
atggccagcgtgcacgagagcctgtacttcaaccccatgatgaccaacggcgtggtgcacgccaacgtgttcggcatcaaggactgggtgaccccctacaagatcgccgtgctggtgctgctgaacgagatgagcagaaccggcgagggcgccgtgagcctgatggagagaagaagactgaaccagctgctgctgcccctgctgcagggccccgacatcaccctgagcaagctgtacaagctgatcgaggagagctgcccccagctggccaacagcgtgcagatcagaatcaagctgatggccgagggcgagctgaaggacatggagcagttcttcgacgacctgagcgacagcttcagcggcaccgagcccgaggtgcacaagaccagcgtggtgggcctgttcctgagacacatgatcctggcctacagcaagctgagcttcagccaggtgttcaagctgtacaccgccctgcagcagtacttccagaacggcgagaagaagaccgtggaggacgccgacatggagctgaccagcagagacgagggcgagagaaagatggagaaggaggagctggacgtgagcgtgagagaggaggaggtgagctgcagcggccccctgagccagaagcaggccgagttcttcctgagccagcaggccagcctgctgaagaacgacgagaccaaggccctgacccccgccagcctgcagaaggagctgaacaacctgctgaagttcaaccccgacttcgccgaggcccactacctgagctacctgaacaacctgagagtgcaggacgtgttcagcagcacccacagcctgctgcactacttcgacagactgatcctgaccggcgccgagagcaagagcaacggcgaggagggctacggcagaagcctgagatacgccgccctgaacctggccgccctgcactgcagattcggccactaccagcaggccgagctggccctgcaggaggccatcagaatcgcccaggagagcaacgaccacgtgtgcctgcagcactgcctgagctggctgtacgtgctgggccagaagagaagcgacagctacgtgctgctggagcacagcgtgaagaaggccgtgcacttcggcctgccctacctggccagcctgggcatccagagcctggtgcagcagagagccttcgccggcaagaccgccaacaagctgatggacgccctgaaggacagcgacctgctgcactggaagcacagcctgagcgagctgatcgacatcagcatcgcccagaagaccgccatctggagactgtacggcagaagcaccatggccctgcagcaggcccagatgctgctgagcatgaacagcctggaggccgtgaacgccggcgtgcagcagaacaacaccgagagcttcgccgtggccctgtgccacctggccgagctgcacgccgagcagggctgcttcgccgccgccagcgaggtgctgaagcacctgaaggagagattcccccccaacagccagcacgcccagctgtggatgctgtgcgaccagaagatccagttcgacagagccatgaacgacggcaagtaccacctggccgacagcctggtgaccggcatcaccgccctgaacagcatcgagggcgtgtacagaaaggccgtggtgctgcaggcccagaaccagatgagcgaggcccacaagctgctgcagaagctgctggtgcactgccagaagctgaagaacaccgagatggtgatcagcgtgctgctgagcgtggccgagctgtactggagaagcagcagccccaccatcgccctgcccatgctgctgcaggccctggccctgagcaaggagtacagactgcagtacctggccagcgagaccgtgctgaacctggccttcgcccagctgatcctgggcatccccgagcaggccctgagcctgctgcacatggccatcgagcccatcctggccgacggcgccatcctggacaagggcagagccatgttcctggtggccaagtgccaggtggccagcgccgccagctacgaccagcccaagaaggccgaggccctggaggccgccatcgagaacctgaacgaggccaagaactacttcgccaaggtggactgcaaggagagaatcagagacgtggtgtacttccaggccagactgtaccacaccctgggcaagacccaggagagaaacagatgcgccatgctgttcagacagctgcaccaggagctgcccagccacggcgtgcccctgatcaaccacctgtag

SEQ ID NO: 190107 - protein, 599 aa, Artificial Sequence
  derived and/or modified sequence
MDPGDAAILESSLRILYRLFESVLPPLPAALQSRMNVIDHVRDMAAAGLHSNVRLLSSLLLTMSNNNPELFSPPQKYQLLVYHADSLFHDKEYRNAVSKYTMALQQKKALSKTSKVRPSTGNSASTPQSQCLPSEIEVKYKMAECYTMLKQDKDAIAILDGIPSRQRTPKINMMLANLYKKAGQERPSVTSYKEVLRQCPLALDAILGLLSLSVKGAEVASMTMNVIQTVPNLDWLSVWIKAYAFVHTGDNSRAISTICSLEKKSLLRDNVDLLGSLADLYFRAGDNKNSVLKFEQAQMLDPYLIKGMDVYGYLLAREGRLEDVENLGCRLFNISDQHAEPWVVSGCHSFYSKRYSRALYLGAKAIQLNSNSVQALLLKGAALRNMGRVQEAIIHFREAIRLAPCRLDCYEGLIECYLASNSIREAMVMANNVYKTLGANAQTLTLLATVCLEDPVTQEKAKTLLDKALTQRPDYIKAVVKKAELLSREQKYEDGIALLRNALANQSDCVLHRILGDFLVAVNEYQEAMDQYSIALSLDPNDQKSLEGMQKMEKEESPTDATQEEDVDDMEGSGEEGDLEGSDSEAAQWADQEQWFGMQ

SEQ ID NO: 190108 - DNA, 1800 bp, Artificial Sequence
  derived and/or modified sequence
atggaccccggcgacgccgccatcctggagagcagcctgagaatcctgtacagactgttcgagagcgtgctgccccccctgcccgccgccctgcagagcagaatgaacgtgatcgaccacgtgagagacatggccgccgccggcctgcacagcaacgtgagactgctgagcagcctgctgctgaccatgagcaacaacaaccccgagctgttcagccccccccagaagtaccagctgctggtgtaccacgccgacagcctgttccacgacaaggagtacagaaacgccgtgagcaagtacaccatggccctgcagcagaagaaggccctgagcaagaccagcaaggtgagacccagcaccggcaacagcgccagcaccccccagagccagtgcctgcccagcgagatcgaggtgaagtacaagatggccgagtgctacaccatgctgaagcaggacaaggacgccatcgccatcctggacggcatccccagcagacagagaacccccaagatcaacatgatgctggccaacctgtacaagaaggccggccaggagagacccagcgtgaccagctacaaggaggtgctgagacagtgccccctggccctggacgccatcctgggcctgctgagcctgagcgtgaagggcgccgaggtggccagcatgaccatgaacgtgatccagaccgtgcccaacctggactggctgagcgtgtggatcaaggcctacgccttcgtgcacaccggcgacaacagcagagccatcagcaccatctgcagcctggagaagaagagcctgctgagagacaacgtggacctgctgggcagcctggccgacctgtacttcagagccggcgacaacaagaacagcgtgctgaagttcgagcaggcccagatgctggacccctacctgatcaagggcatggacgtgtacggctacctgctggccagagagggcagactggaggacgtggagaacctgggctgcagactgttcaacatcagcgaccagcacgccgagccctgggtggtgagcggctgccacagcttctacagcaagagatacagcagagccctgtacctgggcgccaaggccatccagctgaacagcaacagcgtgcaggccctgctgctgaagggcgccgccctgagaaacatgggcagagtgcaggaggccatcatccacttcagagaggccatcagactggccccctgcagactggactgctacgagggcctgatcgagtgctacctggccagcaacagcatcagagaggccatggtgatggccaacaacgtgtacaagaccctgggcgccaacgcccagaccctgaccctgctggccaccgtgtgcctggaggaccccgtgacccaggagaaggccaagaccctgctggacaaggccctgacccagagacccgactacatcaaggccgtggtgaagaaggccgagctgctgagcagagagcagaagtacgaggacggcatcgccctgctgagaaacgccctggccaaccagagcgactgcgtgctgcacagaatcctgggcgacttcctggtggccgtgaacgagtaccaggaggccatggaccagtacagcatcgccctgagcctggaccccaacgaccagaagagcctggagggcatgcagaagatggagaaggaggagagccccaccgacgccacccaggaggaggacgtggacgacatggagggcagcggcgaggagggcgacctggagggcagcgacagcgaggccgcccagtgggccgaccaggagcagtggttcggcatgcagtag

SEQ ID NO: 190109 - DNA, 1800 bp, Artificial Sequence
  derived and/or modified sequence
atggatcccggcgacgctgcaatcctggagtccagcctgagaatactgtatcgcttgtttgaaagtgtgcttccaccactgcccgccgcactgcagtctcgaatgaatgttattgaccatgtgcgcgatatggccgctgccgggcttcactccaatgttaggctcctgtcatccctgctgctgaccatgtctaacaacaacccagagctgttctcaccccctcagaaataccagctgttggtgtaccatgcagacagcctgtttcatgataaagaatacaggaatgctgttagcaaatataccatggctttacagcagaaaaaggcgttatccaagacatctaaggtgcggcctagtactggcaactccgcatctacaccccagtcacaatgcctccccagtgagatcgaagtaaagtacaaaatggccgagtgctacaccatgctgaaacaggataaggatgcaattgcaatcctggatggcattcccagtcggcagagaacccccaagatcaatatgatgctcgccaacctgtataagaaagccgggcaggagcgtccatccgtgaccagttacaaggaggtgctgcggcagtgtcccctagccctggacgcaatattagggctgctaagtctgagcgttaaaggggctgaagttgcatctatgaccatgaatgtgattcagaccgttcctaacctggactggctgtcagtttggataaaagcatacgcattcgttcacacaggtgataactctcgggcaatttcaacgatctgttcactagaaaagaagtccttactgcgagacaacgtggacctgctgggctccctggctgacctgtacttcagggcgggtgataataaaaatagcgtgctcaaattcgaacaggcccaaatgctcgatccatacctcattaagggaatggacgtctatggttacctcctagcacgcgaaggccggctggaagatgtcgagaacttgggttgtcgtctgttcaacataagcgaccaacatgcggagccgtgggtggtgtctggctgtcattctttctacagcaagcgatacagccgggctctttacctaggcgccaaggccattcagctgaatagtaattcagtgcaagccctcctgttgaagggggccgccctaagaaatatggggcgggtgcaggaggccataatccacttccgagaggcgatccgtctggccccttgccggcttgattgttacgaagggttgatagagtgctacctggcatcaaatagcatcagagaagctatggtcatggccaataacgtgtacaaaacactgggggccaacgcacaaaccctcacccttctggctactgtgtgtctcgaagaccctgtgactcaagagaaggcaaagacgcttcttgacaaggctctgacccagcgacccgactatataaaagccgtcgtgaagaaagccgagctcctgtcacgggaacagaagtacgaggacggtatcgcattgctgcgcaatgcacttgccaatcagtccgattgcgttctacatcgcattcttggtgacttcctggtggccgtgaacgaatatcaagaggcaatggaccaatactctattgcactgagcctggaccctaatgatcagaaaagtctggagggcatgcagaaaatggagaaagaggagtctcctacggatgctacccaggaagaggatgtggacgatatggagggaagtggagaagagggagacctcgaggggtcagattccgaagccgcacagtgggccgaccaagaacagtggttcggtatgcagtag

SEQ ID NO: 190110 - DNA, 1800 bp, Artificial Sequence
  derived and/or modified sequence
atggaccctggagatgctgccatcctggagagcagcctgcgcatcctgtaccgcctgtttgagagcgtgctgccccccctgcctgctgccctgcagagcaggatgaatgtcatcgaccacgtgcgggacatggctgctgctggcctgcacagcaatgtgcggctgctgagcagcctgctgctgaccatgagcaacaacaaccctgagctgttcagccccccccagaagtaccagctgctggtgtaccacgccgacagcctcttccatgacaaggagtacagaaatgctgtgtccaagtacaccatggccctgcagcagaagaaggccctgagcaagaccagcaaggtgcggcccagcacaggcaacagcgccagcaccccccagagccagtgcctgcccagcgagattgaggtgaagtacaagatggccgagtgctacaccatgctgaagcaggacaaggatgccatcgccatcctggatggcatccccagccggcagaggacccccaagatcaacatgatgctggccaacctgtacaagaaggccggccaggagcggcccagcgtgaccagctacaaggaggtgctgcggcagtgccccctggccctggatgccatcctgggcctgctgagcctgtctgtgaagggagctgaggtggcctccatgaccatgaatgtcatccagacagtgcccaacctggactggctgtctgtgtggatcaaggcctatgcctttgtgcacactggagacaacagccgggccatcagcaccatctgcagcctggagaagaagagcctgctgcgggacaacgtggacctgctgggcagcctggccgacctgtacttccgggccggggacaacaagaacagcgtgctgaagtttgagcaggcccagatgctggacccctacctgatcaagggcatggatgtgtatggctacctgctggcccgggagggccgcctggaggatgtggagaacctgggctgccgcctcttcaacatcagtgaccagcacgccgagccctgggtggtgtctggctgccacagcttctacagcaagcgctacagccgggccctgtacctgggcgccaaggccatccagctgaacagcaacagcgtgcaggccctgctgctgaagggagctgccctgaggaacatgggccgggtgcaggaggccatcatccacttccgggaggccatccggctggccccctgccgcctggactgctatgagggcctgattgagtgctacctggccagcaacagcatccgggaggccatggtgatggccaacaacgtgtacaagaccctgggcgccaatgcccagaccctgaccctgctggccaccgtgtgcctggaggaccctgtgacccaggagaaggccaagaccctgctggacaaggccctgacccagaggccagactacatcaaggctgtggtgaagaaggccgagctgctgagccgggagcagaagtatgaagatggcatcgccctgctgagaaatgccctggccaaccagagcgactgtgtgctgcaccgcatcctgggggacttcctggtggccgtgaatgagtaccaggaggccatggaccagtacagcatcgccctgagcctggaccccaatgaccagaagagcctggagggcatgcagaagatggagaaggaggagagccccacagatgccacccaggaggaggatgtggatgacatggagggcagcggggaggagggggacctggagggcagtgacagcgaggccgcccagtgggccgaccaggagcagtggtttggcatgcagtag

SEQ ID NO: 190111 - DNA, 1800 bp, Artificial Sequence
  derived and/or modified sequence
atggaccccggcgacgccgccatcctggagagcagcctgcggatcctctacaggctctttgaaagtgtgctgccccctttgcccgcagcactgcaatctagaatgaacgttatcgaccatgtgcgtgatatggcggctgctggcttgcattcaaacgtgaggctgctgagctctctgctgcttactatgtccaacaacaaccccgaactgttctcacccccacagaagtatcaactcctcgtgtaccatgctgacagccttttccatgataaggagtaccgaaacgccgtgtccaagtatactatggcacttcaacagaaaaaagccctgtcaaagacaagcaaggtgcgcccctccactggtaactccgcctccactccacaatctcagtgcttgccaagtgaaattgaagtcaagtataagatggccgaatgttatacgatgctgaaacaggacaaggatgcaatagctatattggatgggatccccagcagacaaagaacccccaagattaacatgatgctggcaaacctatacaaaaaggccgggcaagaaagaccgtccgtgacatcatataaggaggtccttcgtcaatgcccactcgccctggacgctatcctgggactgttgtctctaagtgtaaagggagcggaggtggcttccatgaccatgaacgtgatccagactgtccctaacctagattggttatcagtgtggattaaagcctatgcctttgtacacactggcgataattcaagagccattagcaccatatgtagccttgagaagaaatcgttgctcagagacaatgttgacctgctcggctccctggccgatctgtactttcgagctggggataacaagaatagcgtccttaaattcgaacaggcacagatgcttgatccatatttgatcaaaggtatggatgtttatggctacttgctggcccgagagggccgtcttgaggatgtcgagaacctcggctgtagactgttcaacatttccgatcagcacgccgagccttgggtggtatctgggtgtcattcattctactccaaaagatatagcagagcgctgtacctgggagccaaagccatccagctgaacagtaattcagtgcaagcactgctgctgaagggagctgccctgaggaacatgggacgggtgcaagaagctattatccacttccgggaggcaattcgccttgctccatgcagactggactgctacgagggcctgatcgaatgctacttggcttctaattccatccgggaggccatggtaatggccaataatgtctacaagaccctgggtgcaaacgcccagacactgaccttgctggctactgtctgtttggaagaccccgttacccaggagaaggcgaaaacattactcgacaaggcccttacacagcgtccagattatatcaaagcagtcgtcaagaaggcagaactgctctcccgggagcagaaatacgaggatggtatcgctctgcttagaaatgcattagccaaccaatctgactgtgtcttacacagaatccttggagacttcctggtagccgtgaatgagtaccaggaggccatggatcaatatagcatcgctctgagtctggaccccaatgatcagaagtccctagaggggatgcagaagatggagaaagaggagtcccctacagatgctacccaggaagaggacgtggacgacatggaagggagtggagaggagggcgatctggaagggagcgatagtgaggcagcccagtgggccgaccaggagcagtggttcggtatgcagtag

SEQ ID NO: 190112 - DNA, 1800 bp, Artificial Sequence
  derived and/or modified sequence
atggaccccggtgacgcagccatactggagtcgagcctgaggatcctttaccggttgttcgagagtgtgctgccaccccttcctgcggctctccagtcaagaatgaatgtgatcgatcatgttcgggacatggccgctgctggcctgcactctaatgtacgcctcctctctagtcttttgttaacaatgagcaacaataatcctgaactattctctcctcctcagaagtaccagctcctcgtgtatcatgcagatagcctatttcatgataaagaatatagaaatgccgtcagtaaatatacgatggccctgcagcaaaagaaagctctgtccaagacctctaaagtgcgcccatctaccgggaatagtgcaagtaccccccagtctcaatgcctcccttctgagattgaggtcaagtacaagatggccgaatgttacactatgctgaaacaggacaaggatgctattgcaatactggacggtataccctcccgccagcggacccctaaaatcaatatgatgctcgcaaatctgtacaagaaggccggtcaggagagaccttcagtcactagttataaggaggtgctccgccaatgtccactcgccttggacgcaatattgggactgctgagcctgagcgtgaaaggagccgaagtggcatccatgacgatgaatgtgatccagacagtgcccaatttggactggcttagtgtctggataaaggcttacgcctttgttcataccggcgataacagccgagctatctccaccatttgcagtctcgagaagaagtctctcttgcgcgacaacgtggacttgttaggcagtctggcagatctatacttccgagctggggacaacaagaactcagtgctcaaatttgaacaagcccagatgctggatccatacctgatcaaggggatggacgtttatggctatctgctcgctcgagaaggacgtttggaagatgtggaaaatctcgggtgcaggctgttcaacatcagcgatcagcacgccgagccatgggtcgtgagtgggtgtcactccttctacagcaagaggtacagccgggctctataccttggggcaaaggccatacagttgaacagtaatagcgtccaggccttactcctgaagggagcggcactgagaaacatgggaagagtacaagaggctatcattcactttagggaggcaatcaggttggctccatgcaggttagactgctatgagggactcattgaatgctatctagcatccaactccattagagaagcaatggtgatggcaaacaacgtgtacaagacactcggagcaaacgcgcagaccctgacattactcgctactgtttgcctcgaggaccccgtgacccaggagaaagctaaaactttgttggacaaggccttgacacagagaccggactacatcaaagccgtggttaaaaaagccgaattgttatcacgggagcagaagtacgaggatggaatcgctttactacggaacgcactggcaaatcagtccgactgcgtgttacacaggatactgggggatttcttggtagctgtgaacgaataccaagaggccatggatcagtactctattgctctgtcactggatccaaacgaccagaagtccctggagggaatgcaaaaaatggagaaggaggagtcacccacagatgccactcaggaagaggatgttgacgacatggagggaagcggcgaggaaggggatctggagggctctgactccgaagcagcacagtgggccgaccaggagcagtggttcggaatgcagtag

SEQ ID NO: 190113 - DNA, 3045 bp, Artificial Sequence
  derived and/or modified sequence
gatggaccccggcgacgccgccattttggagtcttccctaaggatcctctaccggcttttcgagtcagtgctgccgccgctgcccgcggctttgcagagcaggatgaatgtgatagaccacgtgcgggacatggcggccgcggggctgcactccaacgtgcggctcctcagcagcttgttacttacaatgagtaataacaaccctgagttattctccccacctcagaagtaccagcttttggtgtatcatgcagattctctctttcatgataaggaatatcggaatgctgtgagtaagtataccatggctttacagcagaagaaagcgctaagtaaaacttcaaaagtgagaccttcaactggaaattctgcatctactccacaaagtcagtgtcttccatctgaaattgaagtgaaatacaaaatggctgaatgttatacaatgctaaaacaagataaagatgccattgctatacttgatgggatcccttcaagacaaagaactcccaaaataaacatgatgctggcaaacctgtacaagaaggctggtcaggagcgcccttcagtcaccagctataaggaggtgctgaggcagtgcccattagcccttgatgccattctaggcttgttgtccctttctgtaaaaggggcagaggtggcatccatgacaatgaatgtgatccaaaccgtgcctaacttggactggctctctgtgtggatcaaagcgtatgcttttgtgcacactggtgacaactcaagagcaatcagtaccatctgttcactagagaaaaaatccttattgcgagataacgtggacctattgggaagcttggcagatctgtacttcagagctggagacaataaaaactctgtcctcaagtttgaacaggcacagatgttggatccttatctgataaaaggaatggatgtatatggctacctactggcacgagaagggcggctagaggatgttgagaaccttggatgccgccttttcaatatctctgatcagcatgcagaaccgtgggtggtttctggctgtcacagcttctatagcaaacgctactcccgggccctctatttaggagccaaggccattcagctgaacagtaatagtgttcaagctctgctacttaagggagcagcacttaggaacatgggcagagtccaagaagcaataatccactttcgggaggccatacggctcgcaccttgtcgcttagattgttatgaaggtcttatcgaatgttacttagcctccaacagtattcgagaagcaatggtaatggctaacaacgtttacaaaactctgggagcaaatgcacagacccttacccttttagccaccgtttgtcttgaagacccagtgacacaggagaaagccaaaacattattagataaagccctgacccaaaggccagattacattaaggctgtggtgaaaaaagcagaactacttagcagagaacagaaatatgaagatggaattgctttgctgaggaacgcactggctaatcagagtgactgtgtcctgcatcggatcctaggagatttccttgtagctgtcaatgagtatcaggaggcaatggaccagtatagtatagcactaagtttggaccccaatgaccagaagtctctagaggggatgcagaagatggagaaggaggagagtcccacggatgccactcaggaggaggatgtggacgacatggaagggagtggggaagaaggggacctggagggcagcgacagtgaggcggcccagtgggctgaccaggagcagtggttcggcatgcagtgagggggcggcagctccatggccgcagtggcctgccctgctctgagcacttccgtggactgaaggaaccgtaggagcctgctctcagaaggacaatgattcagcatgtgattgcagcaggggtctctgccccctcgctcccaattcctagtcgtgacttcatttctaaaacagagcctgaccaaccttccatgtatctccatcctcccctgctccagccagggaggactgagggagtgccccgagacccacgcacatgttggggcttctgggccaagagtactttttatataactaatttctaaatccaaaagctcaaggaatagacagtgttctgtgacatggattggtttgaaggagttacccaccatcccagcacgataatgtcatctcccaagttggatggcagcacgatctggccctagggagcttcctgttcccagaagtcattgtcctgggctatccagatgtccctagtaaatcttgcttccttctgcaatgttagtaatgccttaagctgacagttgctattttgcagaacagttttcctctttgcttagctagtaacttgcctctgagcctgggctgatctgagaaacaggtgtgacaagagcatgaaccagaggtgcacctggggcagttccctaataaaactggtttgtacagtcatggtgttggggtgatcagaatggaagcccttttcaaaatagactcttagtatttttgtcttattcgcaatgcattgattcagccccagaattatttgccagaaatagactttcttcccctggtgttgggagccaggagggttggaaagctcaggaaccctgagctggttcatctgtttgcatattgggtaggttaatttccctggagcctgagagtctttggccagatttcagctgcgtctgcctggctcttttgctgcagctgtgagattggggtctggttccagcagtctgtcactggtcagcctgagtatcacaccctgagctctggggctgggagtttcttcccacaccctctcccttgtgccttaagttgcgatggctctgagtatacaattaatcggaggtgaggggtgggtgtcacagctaatcccaaattcaaaaattagtccaaggtgctgcaaaatataaatttgatgtcagtagaaagtcgtatcctaaaatgtaaaaactgtaagtgtacagtagttaatgagctcagaacatctgataactgcaatttaaaatgggcaaaaagtt

SEQ ID NO: 190114 - protein, 3530 aa, Artificial Sequence
  derived and/or modified sequence
MAKEEDEEKKAKKGKKGKKAPEPEKPKRSLKGTSRLFMGFRDRTPKISKKGQFRSASAFFWGLHTGPQKTKRKRKARTVLKSTSKLMTQMRMGKKKRAMKGKKPSFMVIRFPGRRGYGRLRPRARSLSKASTAINWLTKKFLLKKAEESGSEQATVDAWLQRSSSRMGSRKLPFPSGAEILRPGGRLRRFPRSRSIYASGEPLGFLPFEDEAPFHHSGSRKSLYGLEGFQDLGEYYDYHRDGDDYYDRQSLHRYEEQEPYLAGLGPYSPAWPPYGDHYYGYPPEDPYDYYHPDYYGGPFDPGYTYGYGYDDYEPPYAPPSGYSSPYSYHDGYEGEAHPYGYYLDPYAPYDAPYPPYDLPYHTPYDVPYFDPYGVHYTVPYAEGVYGGGDEAIYPPEVPYFYPEESASAFVYPWVPPPIPSPHNPYAHAMDDIAELEEPEDAGVERQGTSFRLPSAAFFEQQGMDKPARSKLSLIRKFRLFPRPQVKLFGKEKLEVPLPPSLDIPLPLGDADEEEDEEELPPVSAVPYGHPFWGFLTPRQRNLQRALSAFGAHRGLGFGPEFGRPVPRPATSLARFLKKTLSEKKPIARLRGSQKARAGGPAVREAAYKRFGYKLAGMDPEKPGTPIVLRRAQPRARSSNDARRPPAPQPAPRTLSHWSALLSPPVPPRPPSSGPPPAPPLSPALSGLPRPASPYGSLRRHPPPWAAPAHVPPAPQASWWAFVEPPAVSPEVPPDLLAFPGPRPSFRGSRRRGAAFGFPGASPRASRRRAWSPLASPQPSLRSSPGLGYCSPLAPPSPQLSLRTGPFQPPFLPPARRPRSLQESPAPRRAAGRLGPPGSPLPGSPRPPSPPLGLCHSPRRSSLNLPSRLPHTWRRLSEPPTRAVKPQVRLPFHRPPRAGAWRAPLEHRESPREPEDSETPWTVPPLAPSWDVDMPPTQRPPSPWPGGAGSRRGFSRPPPVPENPFLQLLGPVPSPTLQPEDPAADMTRVFLGRHHEPGPGQLTKSAGPTPEKPEEEATLGDPQLPAETKPPTPAPPKDVTPPKDITPPKDVLPEQKTLRPSLSYPLAACDQTRATWPPWHRWGTLPQAAAPLAPIRAPEPLPKGGERRQAAPGRFAVVMPRVQKLSSFQRVGPATLKPQVQPIQDPKPRACSLRWSCLWLRADAYGPWPRVHTHPQSCHLGPGAACLSLRGSWEEVGPPSWRNKMHSIRNLPSMRFREQHGEDGVEDMTQLEDLQETTVLSNLKIRFERNLIYTYIGSILVSVNPYQMFGIYGPEQVQQYNGRALGENPPHLFAVANLAFAKMLDAKQNQCIIISGESGSGKTEATKLILRYLAAMNQKREVMQQIKILEATPLLESFGNAKTVRNDNSSRFGKFVEIFLEGGVISGAITSQYLLEKSRIVFQAKNERNYHIFYELLAGLPAQLRQAFSLQEAETYYYLNQGGNCEIAGKSDADDFRRLLAAMEVLGFSSEDQDSIFRILASILHLGNVYFEKYETDAQEVASVVSAREIQAVAELLQISPEGLQKAITFKVTETMREKIFTPLTVESAVDARDAIAKVLYALLFSWLITRVNALVSPRQDTLSIAILDIYGFEDLSFNSFEQLCINYANENLQYLFNKIVFQEEQEEYIREQIDWQEITFADNQPCINLISLKPYGILRILDDQCCFPQATDHTFLQKCHYHHGANPLYSKPKMPLPEFTIKHYAGKVTYQVHKFLDKNHDQVRQDVLDLFVRSRTRVVAHLFSSHAPQAAPQRLGKSSSVTRLYKAHTVAAKFQQSLLDLVEKMERCNPLFMRCLKPNHKKEPGLFEPDVVMAQLRYSGVLETVRIRKEGFPVRLPFQGFIDRYCCLVALKHDLPANGDMCVSVLSRLCKVMPNMYRVGVSKLFLKEHLYQLLESMREHVLNLAALTLQRCLRGFFIKRRFRSLRHKIILLQSRARGYLARQRYQQMRRSLVKFRSLVHAYVSRRRYLKLRAEWRCQVEGALLWEQEELSKREVVAVGHLEVPAELAGLLQAVAGLGLAQVPQVAPVRTPRLQAEPRVTLPLDINNYPMAKFVQCHFKEPAFGMLTVPLRTPLTQLPAEHHAEAVSIFKLILRFMGDPHLHGARENIFGNYIVQKGLAVPELRDEILAQLANQVWHNHNAHNAERGWLLLAACLSGFAPSPCFNKYLLKFVSDYGRNGFQAVCQHRLMQAMGRAQQQGSGAARTLPPTQLEWTATYEKASMALDVGCFNGDQFSCPVHSWSTGEEVAGDILRHRGLADGWRGWTVAMKNGVQWAELAGHDYVLDLVSDLELLRDFPRQKSYFIVGTEGPAASRGGPKVVFGNSWDSDEDMSTRPQPQEHMPKVLDSDGYSSHNQDGTNGETEAQRGTATHQESDSLGEPAVPHKGLDCYLDSLFDPVLSYGDADLEKPTAIAYRMKGGGQPGGGSSSGTEDTPRRPPEPKPIPGLDASTLALQQAFIHKQAVLLAREMTLQATALQQQPLSAALRSLPAEKPPAPEAQPTSVGTGPPAKPVLLRATPKPLAPAPLAKAPRLPIKPVAAPVLAQDQASPETTSPSPELVRYSTLNSEHFPQPTQQIKNIVRQYQQPFRGGRPEALRKDGGKVFMKRPDPHEEALMILKGQMTHLAAAPGTQVSREAVALVKPVTSAPRPSMAPTSALPSRSLEPPEELTQTRLHRLINPNFYGYQDAPWKIFLRKEVFYPKDSYSHPVQLDLLFRQILHDTLSEACLRISEDERLRMKALFAQNQLDTQKPLVTESVKRAVVSTARDTWEVYFSRIFPATGSVGTGVQLLAVSHVGIKLLRMVKGGQEAGGQLRVLRAYSFADILFVTMPSQNMLEFNLASEKVILFSARAHQVKTLVDDFILELKKDSDYVVAVRNFLPEDPALLAFHKGDIIHLQPLEPPRVGYSAGCVVRRKVVYLEELRRRGPDFGWRFGTIHGRVGRFPSELVQPAAAPDFLQLPTEPGRGRAAAVAAAVASAAAAQEVGRRREGPPVRARSADHGEDALALPPYTMLEFAQKYFRDPQRRPQDGLRLKSKEPRESRTLEDMLCFTKTPLQESLIELSDSSLSKMATDMFLAVMRFMGDAPLKGQSDLDVLCNLLKLCGDHEVMRDECYCQVVKQITDNTSSKQDSCQRGWRLLYIVTAYHSCSEVLHPHLTRFLQDVSRTPGLPFQGIAKACEQNLQKTLRFGGRLELPSSIELRAMLAGRSSKRQLFLLPGGLERHLKIKTCTVALDVVEEICAEMALTRPEAFNEYVIFVVTNRGQHVCPLSRRAYILDVASEMEQVDGGYMLWFRRVLWDQPLKFENELYVTMHYNQVLPDYLKGLFSSVPASRPSEQLLQQVSKLASLQHRAKDHFYLPSVREVQEYIPAQLYRTTAGSTWLNLVSQHRQQTQALSPHQARAQFLGLLSALPMFGSSFFFIQSCSNIAVPAPCILAINHNGLNFLSTETHELMVKFPLKEIQSTRTQRPTANSSYPYVEIALGDVAAQRTLQLQLEQGLELCRVVAVHVENLLSAHEKRLTLPPSEITLL

SEQ ID NO: 190115 - protein, 478 aa, Artificial Sequence
  derived and/or modified sequence
MLEFAQKYFRDPQRRPQDGLRLKSKEPRESRTLEDMLCFTKTPLQESLIELSDSSLSKMATDMFLAVMRFMGDAPLKGQSDLDVLCNLLKLCGDHEVMRDECYCQVVKQITDNTSSKQDSCQRGWRLLYIVTAYHSCSEVLHPHLTRFLQDVSRTPGLPFQGIAKACEQNLQKTLRFGGRLELPSSIELRAMLAGRSSKRQLFLLPGGLERHLKIKTCTVALDVVEEICAEMALTRPEAFNEYVIFVVTNRGQHVCPLSRRAYILDVASEMEQVDGGYMLWFRRVLWDQPLKFENELYVTMHYNQVLPDYLKGLFSSVPASRPSEQLLQQVSKLASLQHRAKDHFYLPSVREVQEYIPAQLYRTTAGSTWLNLVSQHRQQTQALSPHQARAQFLGLLSALPMFGSSFFFIQSCSNIAVPAPCILAINHNGLNFLSTETHVSGLSLALPSPPSVPWSPTPSKRPRPPAAEAQFHCLPPS

SEQ ID NO: 190116 - protein, 184 aa, Artificial Sequence
  derived and/or modified sequence
MNMLSSLSPTVVLPDYLKGLFSSVPASRPSEQLLQQVSKLASLQHRAKDHFYLPSVREVQEYIPAQLYRTTAGSTWLNLVSQHRQQTQALSPHQARAQFLGLLSALPMFGSSFFFIQSCSNIAVPAPCILAINHNGLNFLSTETHVSGLSLALPSPPSVPWSPTPSKRPRPPAAEAQFHCLPPS

SEQ ID NO: 190117 - protein, 244 aa, Artificial Sequence
  derived and/or modified sequence
MRDECYCQVVKQITDNTSSKQDSCQRGWRLLYIVTAYHSCSEVLHPHLTRFLQDVSRTPGLPFQGIAKACEQNLQKTLRFGGRLELPSSIELRAMLAGRSSKRQLFLLPGGLERHLKIKTCTVALDVVEEICAEMALTRPEAFNEYVIFVVTNRGGKSRSTSQPSSTVQRQARPGSTWSASTGSRHRRSAPTRPVPSFWASSAPYLCSAPPSSSSRAAATLLCQPLASLPSTTMASTFSAQRLM

SEQ ID NO: 190118 - protein, 142 aa, Artificial Sequence
  derived and/or modified sequence
MVKGGQEAGGQLRVLRAYSFADILFVTMPSQNMLEFNLASEKVILFSARAHQVKTLVDDFILELKKDSDYVVAVRNFLPEDPALLAFHKGDIIHLQPLEPPRVGYSAGCVVRRKVVYLEELRRRGPDFGVCPRTWNPIRGAS

SEQ ID NO: 190119 - DNA, 10593 bp, Artificial Sequence
  derived and/or modified sequence
atggccaaagaagaagatgaggaaaagaaggcaaaaaaaggcaagaagggcaagaaagcccccgaaccggagaaaccaaagagatccctcaaagggacaagtcggcttttcatgggctttcgagaccggaccccaaaaattagcaagaaaggtcaattccgttccgcctccgcgtttttttggggcctacataccgggccccagaagaccaaacgtaagcgcaaggccagaacggtgcttaagagtacatcaaaacttatgacacagatgcgaatgggtaagaagaaaagagccatgaaggggaagaagccctcattcatggtgatccggtttcccggtagacgcggatatggccggctgcgcccccgtgcacgaagcctaagtaaggctagtaccgccatcaattggctcacaaagaagttcctgctcaaaaaggcggaggaatctggctctgaacaggcgaccgtagacgcctggctgcagaggtcatccagtcgcatggggtctaggaagctgccttttccttcgggcgccgaaattctgaggcccggcgggcgactccgtcgattcccgagatcccggtctatctatgcatccggcgaacctctgggtttcctcccattcgaagacgaagccccatttcatcactcagggtcccgaaaatccttgtacggactcgaagggttccaggacctgggagagtattatgactaccatcgggacggggatgactattacgatcgccagagccttcacaggtacgaggagcaggaaccatacctcgctgggttagggccatatagccctgcctggccgccttacggggaccactattatgggtacccaccagaagatccctacgactactaccacccagactactatggtggaccatttgatcccggttatacctacggttacggttacgatgattatgagcctccctacgctcctccaagcggttatagctctccatatagctatcacgatggatacgagggggaggcccatccctatggctactacctagacccctatgcaccgtatgatgccccatatcccccttatgacctaccataccataccccttacgatgtgccttactttgatccctacggagttcactatactgtcccgtacgccgagggggtgtacggcgggggtgacgaggccatatatcctcccgaggtgccttatttttaccctgaggagtctgccagtgctttcgtatatccctgggtcccacctccaattcccagcccccataacccttacgcccatgctatggacgatatcgcagaattagaggagcctgaggatgctggtgtcgagaggcaggggacaagctttaggttaccatctgccgctttcttcgaacagcaggggatggataaacctgccaggtcaaagttgtcgctgattcgtaaatttcgcctctttccccgacctcaggtgaagctatttggcaaagagaagctcgaagtccccctgccacccagcttggatattcccctgcctctgggcgatgcagacgaggaagaggatgaagaggagctgccaccagtctcagccgtcccttatggccaccccttttggggatttctcacaccccgacagcgtaacctgcagcgcgctctgagcgccttcggcgcacataggggcctgggtttcgggcctgagtttggaaggccagtaccgcgcccagcaacctcattagccaggtttctcaagaaaacgctgagcgaaaaaaagcctattgccaggctcaggggctctcagaaggcgagggctggagggcccgctgtgcgagaggcggcctataagaggttcggctataagctggccggcatggaccctgagaagcccggcacaccaatcgtgctccggagagcacagcctagagctagatccagtaacgatgcccgtcggccgcccgccccccagcccgctccgcgaacactgtcccactggtcagcactgctgagtcctccagtaccgccgagaccccctagctccggacctccccccgctccgcccctctcccccgccctgtcagggctgcctcgacctgcatctccatacggctctctgaggcggcatccacccccctgggccgcgccagcccacgttccacctgctccacaggcatcctggtgggctttcgttgaaccccccgctgtctcacctgaggtccctccggacttgctagcatttccaggccctcgtccctcctttaggggcagccgtcgtcgaggggccgcttttggctttcccggggcatcccctagagcctcaagaagaagggcctggtcccctctggcttccccacagccctcactgcgctcatcccctggcctcggttattgcagccccctggcacccccctcaccccaactgtcattacggacaggcccattccagccaccttttctcccccctgctagacgacctaggagcttgcaggaaagcccggcgccacggagagcggcaggtagactaggcccacccgggtcgcctttgcccgggtcaccacgtcccccaagcccccccctcggtctgtgtcatagcccaagaaggagcagcctcaatctcccttcccggttgccacatacgtggaggagactctctgaaccaccaactcgagcagtgaaacctcaggtgaggctgccatttcatagacctccacgggctggagcttggcgggccccgttagagcacagggagagccccagagaaccagaggactctgaaactccctggaccgttccacctctggctcctagttgggatgttgatatgcctcctacccagagacctccgtcgccttggcccggtggcgctgggtctcgacgcgggttctctcgtccaccacctgtgccagaaaaccctttcctgcagctgctcgggccagtcccgtccccaaccctgcagcccgaggatcccgctgctgacatgacaagggtgttcctgggaaggcatcacgagccaggacccgggcagcttacaaagtcagccgggccaacgcccgagaagcccgaagaagaagctacactgggagacccccagctaccggcagaaacaaaacctcccacacctgcaccacctaaagatgtgacgccacccaaggacataacaccccccaaggacgtactgcccgagcagaagacgctgcgtccttccttgagctaccccttagctgcatgtgatcagactcgtgccacttggcctccttggcaccgctggggcactcttcctcaggctgccgcccccttggctcctatccgggctccagaacctttaccaaaagggggagagcggcgccaagcagccccagggaggtttgccgttgttatgcccagagtccaaaagctctcctctttccagagggtgggcccagccaccctgaagccccaagtgcagcctatacaggaccccaaaccccgagcctgctcgctcaggtggtcatgtctatggctgcgggccgatgcttatggcccctggccccgggtgcacacccacccccaaagctgtcacctagggcctggggctgcgtgtctttcactgagagggtcttgggaggaagtggggccccccagctggaggaacaaaatgcattctatcagaaacctgccgagtatgaggtttagagaacagcacggcgaggatggggtcgaggatatgactcagctggaggacttgcaggagactaccgttctttcaaacttgaagatacgctttgaaaggaacctgatttatacctacatcgggtctattttggttagtgtgaacccctatcaaatgttcggcatttacgggccggaacaggttcagcagtacaacgggcgagctcttggagaaaatcccccacacctgtttgcggttgctaatctcgctttcgccaagatgctcgacgccaagcaaaatcagtgcataattatttccggagagtccggctccggcaagaccgaagccacaaagctcattctgagatacttggccgcaatgaaccagaaaagggaagtgatgcagcaaattaaaatactagaggcaacaccattactggaatctttcgggaatgccaagaccgtcaggaacgacaactctagcagattcgggaagtttgtggaaattttcctcgaaggaggtgtgatatccggagccatcaccagccaatatctgctggaaaaatctcggatcgtattccaggccaagaatgaacgcaattatcatattttctatgaactcttagctgggctgcctgcccagctccgacaggccttctcactgcaagaggcagaaacttattattacctgaatcaaggcggcaactgcgagatagccggaaaaagcgacgcggacgatttcaggaggctcttagctgccatggaggtcctgggtttcagcagtgaagatcaggatagtatcttcaggatcctcgccagtattctccacctcgggaacgtgtattttgaaaaatacgaaacagatgctcaggaagtggctagtgtggtctctgctcgagagatacaggcagtggctgagttgctgcagatttccccggaaggccttcagaaggctattacattcaaggtgacagaaacaatgcgggaaaagatcttcactccattgactgtggagtcagctgtagatgctagggacgctatcgccaaagtgctgtacgccttactgttcagttggctcattacgagggtgaacgcactggtctcacctcggcaggacactctgtcaatcgcgatcctcgacatctatggcttcgaagacctgagttttaacagctttgagcagctctgtataaactacgcgaacgagaatctacagtacctcttcaacaaaatcgtgttccaggaagagcaagaggagtacatcagagagcagatcgactggcaagaaatcacatttgccgacaaccaaccgtgcatcaatctaatctccctgaaaccttatggaattcttagaatcctcgatgaccagtgttgcttcccacaggctactgaccacacgttcttgcaaaaatgtcattatcaccacggggcaaatccactttatagtaagcctaagatgcctcttccagagttcaccatcaagcattacgccggaaaggtaacttatcaggtccacaaatttctggacaagaaccatgaccaggttaggcaggacgtgctggatctgttcgtccgttccaggaccagggtagtggcccatcttttttcttcacacgctcctcaggccgccccccaaaggttggggaaatcctccagtgttactcggctgtacaaagcccacaccgtagccgcaaagtttcagcagtcactgctagatctggtagagaagatggagcggtgcaatccgcttttcatgaggtgtctaaagcccaatcacaaaaaagagcccgggctctttgaacccgacgtcgtgatggctcaactgagatacagcggcgttttagagaccgttagaatcagaaaggaaggtttccccgtgcggctgcctttccagggcttcatcgaccgatactgctgtctggtcgccctcaaacatgatctccctgctaacggagacatgtgtgtgtctgttctttcgcggctatgcaaagttatgccaaacatgtatagggttggcgtgtctaagctgttcctgaaggaacacctgtaccagttgcttgagtccatgcgggagcacgtcttaaaccttgcggccttgacccttcaacgctgcctgcgcggcttctttatcaaacgccgctttcgatctctccggcacaagataattctgcttcaatcgagagcccggggctatttggcaagacagagatatcaacaaatgcggaggtccctggtcaagttccgcagcttagttcacgcttacgtctcccggcgtcggtacttgaagcttagggccgaatggcgttgtcaggtcgagggggccctgctgtgggagcaagaggaactcagtaaacgggaggtggtggccgtgggtcacttggaagtgcctgccgaactggctggcttgttgcaagcagttgccggcctcggtctggcccaggtgccacaggtggcccccgttaggacaccccgactgcaagctgagcctagagttaccctgcctctcgatattaacaactatccgatggccaaatttgtgcagtgccattttaaggagcccgccttcgggatgctcacagtgcccttaaggacccctctgactcaactgccagctgaacaccatgctgaggcggtgtccatttttaagctcatcctgcggtttatgggagatccgcaccttcacggagcccgtgagaacatcttcgggaattatatcgtccagaaagggctcgcggtccctgaactccgggatgagatcctcgctcaactggcaaaccaggtctggcacaaccacaacgcgcataacgccgagcgggggtggttgctcctcgctgcctgtctcagcgggtttgcaccttccccttgcttcaacaagtatctcttaaagttcgtctctgactacgggcggaacggattccaagccgtttgtcagcaccgcctgatgcaggccatgggaagagcccagcagcagggcagcggcgcggcacgcactctgccacccactcagttagagtggacagctacgtacgagaaggctagcatggctctggatgtaggttgttttaatggggaccaattctcctgccctgtgcattcgtggagtactggtgaggaggtggcgggcgacatactaagacatcggggcttagccgatggctggaggggatggactgtagccatgaaaaacggggttcagtgggccgagctggcggggcacgattacgttctcgaccttgtgagtgacctggaattgttgcgagacttccccagacaaaaaagttacttcatcgtggggaccgaaggaccagccgcaagtaggggcggtccgaaagtggttttcggtaactcttgggattcagacgaagacatgagcacccgacctcagccacaagagcatatgcctaaggtactggattccgatggatattcctcccacaatcaagacggtacgaatggcgagaccgaagcccagcggggtacagccacacatcaagaatctgactcactgggcgaaccagctgtgccacacaaaggcctggactgttatctcgatagcctcttcgatccagtgctttcttatggtgatgctgacttagaaaagcccactgctattgcctatcgcatgaagggtggagggcagccaggcgggggcagcagcagcgggacagaagacactcccagacgcccacctgagcctaagccaattccaggcttggacgcatctacattggcactgcaacaggcctttatacataaacaagcagtgctgctggcccgcgagatgacgctgcaagccaccgctctgcaacaacagcctttaagcgccgctctgagatccctccccgccgaaaagccacctgccccagaggctcaacctacttccgtcggaacaggacctcccgcaaagccagtgctgctgagggcgacacccaagcctctggccccagccccactggccaaagcgcctcgtttgcccattaaacctgtggctgcccccgtcctggcccaggatcaggccagccccgagacaacgagcccctccccggagctggtgcgctacagtacactaaacagcgagcattttccccagcctacccagcagataaaaaacattgtccgccagtaccagcagccatttcgcggaggaagacctgaagccctccgcaaagacggaggaaaggtttttatgaaaaggcctgacccacatgaggaagcactaatgatcctgaagggacagatgacccacttggccgctgcccctggaacccaagtgtctagggaggcggtggccttggtgaagccggtgactagcgcccctcggccatcgatggccccaactagcgctctcccttcccggagtctggaacctcccgaggagctgacgcagacgcggttacatagactgataaatccaaatttttacggttatcaggacgcaccatggaaaatttttctccgaaaggaggtgttttaccccaaggacagttattcccaccccgtgcagcttgacctcttgttccgccagattctccatgacaccttgtcagaggcctgcttgagaatttccgaagatgagagacttaggatgaaggctttgtttgcccagaaccagcttgatacccaaaagcccctcgttaccgagtctgtgaagcgtgccgtggtcagtacagcccgggatacctgggaggtatacttttctagaatctttcccgcgactggaagcgtcggcactggagtgcaacttctagcagtcagccacgtgggcattaagctgcttcgtatggtgaagggaggccaggaagccggcggacaactccgcgtccttcgcgcatacagttttgccgacattttgtttgtaactatgccatcccagaatatgttggagtttaatttggcgagtgagaaggtgatcctcttctcagcgcgggctcaccaggtcaaaacactcgtggacgacttcatcttggaacttaaaaaggatagcgattacgtagtcgcagtccgcaacttccttcctgaggatccggccctgttagccttccataagggagatataattcaccttcaacccctggaacccccacgggttgggtactctgcagggtgtgtggtgcgaaggaaagtggtttatctggaggagctccggagacggggtcctgacttcggatggcggttcggtacaatacatggtcgggtgggacggttccctagtgaacttgttcaacctgccgccgcgccagactttctccagctgcccacggagcctggtcgcggccgagcggcagcagtagccgccgcggtagcctccgccgcggcagcccaggaagtcggccggcggcgagagggaccacctgtacgggcaagatctgcagatcacggagaagacgcattagccctcccaccatacacaatgctggaattcgcacagaaatatttccgcgatccccagcgacggccccaggacggcctcagactgaagtctaaggagccgcgcgaaagtaggacgcttgaggacatgctgtgtttcactaaaacacccctgcaggaatctttgattgagctgagtgactccagtctgtcaaagatggctaccgacatgtttctcgccgttatgcgttttatgggggatgcaccgctgaaaggacagtcggacttagacgtactctgcaacctgctgaaactatgtggggatcacgaagtaatgagggacgagtgttactgccaagtggtaaagcagataacagacaacacgtcctccaaacaagactcctgtcaacggggctggagattgttatacatagttaccgcgtaccattcctgttcagaagtactacacccgcaccttaccagatttctgcaggacgtctcacgaactccgggactgccattccagggaatcgctaaggcgtgcgagcaaaatttgcagaagactctccgcttcggaggtcgcctcgagcttcctagctcaattgaattaagggccatgctggcgggcagatcaagcaagcggcagctctttctccttcccggcggactggaaagacacctaaagataaagacatgcaccgtggccctggatgtggtggaggagatttgcgccgaaatggcactaacccgtcccgaagcgtttaatgaatacgtgatctttgttgtgaccaatagagggcagcatgtttgtcccctcagcagacgcgcctacatcctggacgtggccagtgagatggaacaagtggatggtggttacatgttatggtttcggcgagtgctgtgggatcagcctttgaaattcgaaaacgagctgtatgtcacaatgcactacaatcaggtgcttccagattacctgaaaggacttttttcttctgtgcccgcttctcgaccgagcgaacagctcctgcagcaagtgagtaagctggcatccctccagcacagagctaaggaccacttctacctgccaagcgtgagggaagttcaagagtacatcccagcccagctctacagaactacagctgggtccacctggctcaacctggtttctcagcacagacagcagacccaggcactctctccgcatcaggcaagagcccaattcctgggcctcctgtcagccttacccatgtttggatcttctttcttcttcatacagagctgttcgaatatagcggtgcctgcaccttgcatattggcgattaaccacaatggcctgaactttctttcgacagaaacccacgagttgatggtgaagttccccttgaaggagatacaatctacccggacacagcggccaaccgctaactcatcttacccatacgtcgaaattgctcttggagacgtggctgcacagagaacactgcaattgcagttagagcaggggttagagctgtgcagggtggttgccgtgcacgtggaaaaccttctctctgcccacgaaaaacgtctgactctgccaccgtccgagatcacattattgtag

SEQ ID NO: 190120 - DNA, 555 bp, Artificial Sequence
  derived and/or modified sequence
atgaacatgctatcctcccttagccctaccgtcgttctgccagactaccttaagggactatttagcagtgttccagcgtcgcggccctccgaacaactcctacagcaggtgtcaaaattggcttcgcttcagcaccgcgctaaggaccacttctacctccccagtgtgagagaagtccaggaatacatccccgctcagctgtaccgaactactgctggtagcacatggctcaatctggtgtcgcagcatcgacagcagactcaggctctgagcccccaccaggcccgtgcacaatttcttggcctgttgtcagcgctgcctatgttcggcagctccttcttcttcatacaatcatgctcaaacatagccgtgccggccccttgcatcctggctattaaccataatggacttaactttttgagcacggagacccatgtgagcggactttctctggctctcccatcgcctccttcagtgccgtggagccccacaccatctaagcgtccccgtcccccagcagccgaggctcaatttcactgcttaccgccctcctag

SEQ ID NO: 190121 - DNA, 735 bp, Artificial Sequence
  derived and/or modified sequence
atgcgcgatgaatgctattgtcaggtggtcaaacaaatcacagataacacatctagtaaacaggactcttgtcagagagggtggagacttctgtacatcgtcaccgcttaccacagctgttctgaggtgttacacccccacttaacccgattcctgcaggatgtgtcacggacccccgggctaccatttcaggggatagctaaggcatgcgaacaaaacttgcagaagaccctcagattcgggggccgactggagctgccaagttccattgaactccgtgcaatgcttgccggacgctccagtaaacgccaactgtttctgctgccggggggactggagcggcaccttaagattaaaacatgtactgtcgcgctcgatgtggtggaggaaatttgcgctgagatggctctaacccgtcctgaagcttttaacgagtatgtaatcttcgtggtcactaatcgcggggggaagtcaagatctaccagccagccttcgagcactgtgcagcggcaggcgcgcccgggctccacctggtcagcctcaacagggagtcgtcaccgcagaagcgcgccaacccggccggtgcccagcttttgggccagcagcgccccctacctttgtagtgcccccccatcctcctcttcccgggcggccgccaccctgctgtgtcaacccctcgcttcactgccatcaacaacgatggcatcaacattttcagctcagcggttgatgtag

SEQ ID NO: 190122 - DNA, 429 bp, Artificial Sequence
  derived and/or modified sequence
atggtgaaaggtggccaggaagccggtgggcagctccgcgttctccgggcctactcttttgccgacatactctttgtcacgatgccctcccagaatatgctggagtttaatctggcctcagagaaagttattttgttttcggcccgggctcaccaagtgaagacactggtagacgattttatcctggagcttaaaaaggactccgactacgtggttgctgtgcgtaatttcttgcctgaggatcctgccctcctggcctttcacaagggtgatatcatccatctgcagcccctcgagcccccccgcgtcggctatagtgccgggtgtgttgtgaggagaaaagtggtatacctggaagagttgcgtaggcggggacctgatttcggagtgtgtccccggacatggaaccccatacggggcgccagctag

SEQ ID NO: 190123 - DNA, 10593 bp, Artificial Sequence
  derived and/or modified sequence
atggccaaggaggaggatgaggagaagaaggccaagaagggcaagaagggcaagaaggcccctgagcctgagaagcccaagaggagcctgaagggcaccagccgcctcttcatgggcttccgggacaggacccccaagatcagcaagaagggccagttccgcagcgccagcgccttcttctggggcctgcacacaggcccccagaagaccaagaggaagaggaaggccaggacagtgctgaagagcaccagcaagctgatgacccagatgaggatgggcaagaagaagagggccatgaagggcaagaagcccagcttcatggtgatccgcttccctggccggcggggctacggccgcctgcggccccgggcccggagcctgagcaaggccagcacagccatcaactggctgaccaagaagttcctgctgaagaaggccgaggagagcggcagcgagcaggccaccgtggatgcctggctgcagaggagcagcagcaggatgggcagcaggaagctgcccttccccagcggggctgagatcctgcggcctgggggccgcctgcggcgcttccccaggagccgcagcatctatgccagcggggagcccctgggcttcctgccctttgaagatgaggcccccttccaccacagcggcagcaggaagagcctgtatggcctggagggcttccaggacctgggggagtactatgactaccacagagatggagatgactactatgaccggcagagcctgcacagatatgaggagcaggagccctacctggccggcctgggcccctacagccctgcctggccaccctacggggaccactactacggctacccacctgaggacccctatgactactaccacccagactactatggaggcccctttgatcctggctacacctacggctacggctatgatgattatgagcccccctatgccccacccagcggctacagcagcccctacagctaccatgatggctatgaaggagaggcccacccctacggctactacctggacccctatgccccctatgatgccccctacccaccctatgacctgccctaccacaccccctatgatgtgccctactttgacccctacggcgtgcactacacagtgccctatgcagagggcgtgtatggaggaggagatgaggccatctacccacctgaggtgccctacttctacccagaggagagcgccagcgcctttgtgtacccctgggtgcccccacccatccccagcccccacaacccctatgcccacgccatggatgacattgctgagctggaggagccagaagatgctggggtggagcggcagggcaccagcttccggctgcccagcgctgccttctttgagcagcagggcatggacaagccagcccggagcaagctgagcctcatcaggaagttccgcctcttcccccggccccaggtgaagctgtttgggaaggagaagctggaggtgcccctgccccccagcctggacatccccctgcccctgggagatgctgatgaggaggaggatgaggaggagctgccccctgtgtctgctgtgccctacggccaccccttctggggcttcctgaccccccggcagaggaacctgcagagggccctgagcgcctttggagcccaccggggcctgggctttggacctgagtttggccggcctgtgcccaggcctgccaccagcctggcccgcttcctgaagaagaccctgtctgagaagaagcccatcgcccggctgcggggcagccagaaggcccgggccggcggccctgctgtgcgggaggccgcctacaagcgcttcggctacaagctggccggcatggaccctgagaagccaggcacccccatcgtgctgcggcgggcccagccccgggcccggagcagcaatgatgcccggcggcccccagccccccagcctgcccccaggaccctgagccactggagcgccctgctgagcccccctgtgccccccaggcctcccagcagcggccccccaccagccccacccctgagccctgccctgagcggcctgcccaggcctgccagcccctacggcagcctgcggcggcaccccccaccctgggccgccccagcccacgtgcccccagccccccaggcctcctggtgggcctttgtggagcccccagctgtgtccccagaggtgcccccagacctgctggccttccctggcccccggcccagcttccggggcagcagaagaagaggagctgccttcggcttccctggggccagcccccgggccagcagaagaagagcctggagccccctggccagcccccagcccagcctgcggagcagccctggcctgggctactgcagccccctggccccacccagcccccagctgagcctgaggacaggccccttccagccccccttcctgcccccagcccggcggcccaggagcctgcaggagagccctgcccccaggagagctgctggccgcctgggccccccaggcagccccctgcccggcagcccccggccccccagcccccccctgggcctgtgccacagcccccggcgcagcagcctgaacctgcccagccggctgccccacacctggaggcggctgtctgagccccccaccagggctgtgaagccccaggtgcggctgcccttccaccggccccccagggctggggcctggagggcccccctggagcaccgggagagcccccgggagcctgaggacagcgagaccccctggacagtgccccccctggcccccagctgggatgtggacatgccacccacccagaggcctcccagcccctggccaggaggagctggcagccggcggggcttcagccggcccccacctgtgcctgagaaccccttcctgcagctgctgggccctgtgcccagccccaccctgcagccagaagatcctgctgctgacatgaccagggtcttcctgggccgccaccacgagcccggccctggccagctgaccaagtctgctggccccaccccagagaagccagaggaggaggccaccctgggggacccccagctgcctgctgagaccaagccacccaccccagccccacccaaggatgtgaccccacccaaggacatcaccccacccaaggatgtgctgcctgagcagaagaccctgcggcccagcctgagctaccccctggccgcctgtgaccagacccgggccacctggccaccctggcaccgctggggcaccctgccccaggccgccgcccccctggcccccatccgggcccctgagcccctgcccaagggcggggagcggcggcaggccgcccctggccgctttgctgtggtgatgccccgggtgcagaagctgagcagcttccagagggtgggccctgccaccctgaagccccaggtgcagcccatccaggaccccaagccccgggcctgcagcctgcgctggagctgcctgtggctgcgggcagatgcctacggcccctggccccgggtgcacacccacccccagagctgccacctgggccctggagctgcctgcctgagcctgcggggctcctgggaggaggtgggccccccatcctggaggaacaagatgcacagcatccggaacctgcccagcatgaggttccgggagcagcacggagaagatggagtggaggacatgacccagctggaggacctgcaggagaccaccgtgctgagcaacctgaagatccgctttgagaggaacctgatctacacctacatcggcagcatcctggtgtctgtgaacccctaccagatgtttggcatctacggccctgagcaggtgcagcagtacaacggccgggccctgggggagaaccccccccacctgtttgctgtggccaacctggcctttgccaagatgctggatgccaagcagaaccagtgcatcatcatcagcggggagagcggcagcggcaagacagaggccaccaagctgatcctgcgctacctggccgccatgaaccagaagcgggaggtgatgcagcagatcaagatcctggaggccacccccctgctggagagctttggaaatgccaagacagtgagaaatgacaacagcagcagatttgggaagtttgtggagatcttcctggagggcggcgtcatcagcggggccatcaccagccagtacctgctggagaagagcagaattgtgttccaggccaagaatgaaagaaactaccacatcttctatgagctgctggccggcctgcctgcccagctgcggcaggccttcagcctgcaggaggccgagacctactactacctgaaccagggcggcaactgtgaaattgctgggaagagtgatgctgatgacttccggcggctgctggccgccatggaggtgctgggcttcagcagcgaggaccaggacagcatcttccgcatcctggccagcatcctgcacctgggcaatgtgtactttgagaagtatgaaacagatgcccaggaggtggcctctgtggtgtctgcccgggagatccaggccgtggccgagctgctgcagatcagccctgagggcctgcagaaggccatcaccttcaaggtgacagagaccatgagggagaagatcttcacccccctgactgtggagagcgctgtggatgccagagatgccatcgccaaggtgctgtatgccctgctcttctcctggctgatcaccagggtgaatgccctggtgagcccccggcaggacaccctgagcatcgccatcctggacatctacggctttgaggacctgtccttcaacagctttgagcagctgtgcatcaactatgccaatgaaaacctgcagtacctgttcaacaagatcgtgttccaggaggagcaggaggagtacatccgggagcagattgactggcaggagatcacctttgctgacaaccagccctgcatcaacctgatcagcctgaagccctacggcatcctgcgcatcctggatgaccagtgctgcttcccccaggccacagaccacaccttcctgcagaagtgccactaccaccacggggccaaccccctgtacagcaagcccaagatgcccctgcctgagttcaccatcaagcactacgccggcaaggtgacctaccaggtgcacaagttcctggacaagaaccacgaccaggtgcggcaggatgtgctggacctgtttgtgcgcagcaggaccagggtggtggcccacctgttcagcagccacgccccccaggccgccccccagaggctgggcaagagcagctctgtgacccggctgtacaaggcccacacagtggccgccaagttccagcagagcctgctggacctggtggagaagatggagcgctgcaaccccctcttcatgcgctgcctgaagcccaaccacaagaaggagcccggcctgtttgagccagatgtggtgatggcccagctgcgctacagcggcgtgctggagaccgtgcgcatcaggaaggagggcttccctgtgcggctgcccttccagggcttcatcgaccgctactgctgcctggtggccctgaagcatgacctgcctgccaacggggacatgtgtgtgtctgtgctgagccggctgtgcaaggtgatgcccaacatgtacagagtgggcgtgtccaagctgttcctgaaggagcacctgtaccagctgctggagagcatgagggagcacgtgctgaacctggccgccctgaccctgcagcgctgcctgcggggcttcttcatcaagaggcgcttccgcagcctgcggcacaagatcatcctgctgcagagccgggcccggggctacctggcccggcagcgctaccagcagatgagaagaagcctggtgaagttccgcagcctggtgcacgcctacgtgtccagaagacgctacctgaagctgcgggcagagtggcgctgccaggtggagggcgccctgctgtgggagcaggaggagctgagcaagcgggaggtggtggccgtgggccacctggaggtgcctgctgagctggccggcctgctgcaggccgtggccggcctgggcctggcccaggtgccccaggtggcccctgtgaggaccccccggctgcaggccgagccccgggtgaccctgcccctggacatcaacaactaccccatggccaagtttgtgcagtgccacttcaaggagcccgccttcggcatgctgactgtgcccctgcggacccccctgacccagctgcctgctgagcaccacgccgaggccgtgtccatcttcaagctgatcctgcgcttcatgggagacccccacctgcacggggcccgggagaacatctttggaaactacatcgtgcagaagggcctggccgtgcctgagctgagagatgagatcctggcccagctggccaaccaggtgtggcacaaccacaatgcccacaatgctgagcggggctggctgctgctggccgcctgcctgagcggctttgcccccagcccctgcttcaacaagtacctgctgaagtttgtgtctgactatggaagaaatggcttccaggccgtgtgccagcaccggctgatgcaggccatgggccgggcccagcagcagggcagcggggccgcccggaccctgccccccacccagctggagtggacagccacctatgagaaggcctccatggccctggatgtgggctgcttcaacggggaccagttcagctgccctgtgcacagctggagcactggagaggaggtggccggggacatcctgcggcaccggggcctggctgatggctggaggggctggacagtggccatgaagaatggagtgcagtgggccgagctggccggccatgactatgtgctggacctggtgtctgacctggagctgctgcgggacttcccccggcagaagagctacttcatcgtgggcacagagggccctgctgccagcagaggaggccccaaggtggtgtttggaaacagctgggacagtgatgaggacatgagcacccggccccagccccaggagcacatgcccaaggtgctggacagtgatggctacagcagccacaaccaggacggcaccaatggagaaacagaggcccagaggggcacagccacccaccaggagagtgacagcctgggggagcctgctgtgccccacaagggcctggactgctacctggacagcctgtttgatcctgtgctgtcctatggagatgctgacctggagaagcccacagccatcgcctacaggatgaagggcggcggccagcccggcggcggcagcagcagcggcacagaggacaccccaagaagacctcctgagcccaagcccatccctggcctggatgccagcaccctggccctgcagcaggccttcatccacaagcaggccgtgctgctggcccgggagatgaccctgcaggccacagccctgcagcagcagcccctgtctgctgccctgcggagcctgcctgctgagaagcccccagcccctgaggcccagcccacctctgtgggcactggacctccagccaagcctgtgctgctgcgggccacccccaagcccctggccccagcccccctggccaaggccccccggctgcccatcaagcctgtggccgcccctgtgctggcccaggaccaggccagccctgagaccaccagccccagccctgagctggtgcgctacagcaccctgaacagcgagcacttcccccagcccacccagcagatcaagaacatcgtgcggcagtaccagcagcccttccggggcggccggcctgaggccctgaggaaggatggcggcaaggtgttcatgaagaggccagacccccatgaggaggccctgatgatcctgaagggccagatgacccacctggccgccgcccctggcacccaggtgtcccgggaggccgtggccctggtgaagcctgtgaccagcgccccccggcccagcatggcccccaccagcgccctgcccagccgcagcctggagcccccagaggagctgacccagacccggctgcacaggctcatcaaccccaacttctacggctaccaggatgccccctggaagatcttcctgaggaaggaggtgttctaccccaaggacagctacagccaccctgtgcagctggacctgctcttccggcagatcctgcatgacaccctgtctgaggcctgcctgcgcatcagtgaagatgagcggctgaggatgaaggccctgtttgcccagaaccagctggacacccagaagcccctggtgacagagagcgtgaagagagctgtggtgtccacagcccgggacacctgggaggtgtacttcagccgcatcttccctgccaccggctctgtgggcactggagtgcagctgctggccgtgagccacgtgggcatcaagctgctgaggatggtgaagggcggccaggaggccggcggccagctgcgggtgctgcgggcctacagctttgctgacatcctgtttgtgaccatgcccagccagaacatgctggagttcaacctggccagcgagaaggtgatcctcttcagcgcccgggcccaccaggtgaagaccctggtggatgacttcatcctggagctgaagaaggacagcgactatgtggtggccgtgaggaacttcctgcctgaagatcctgccctgctggccttccacaagggggacatcatccacctgcagcccctggagcccccccgggtgggctacagcgctggctgtgtggtgcggaggaaggtggtgtacctggaggagctgcggcggcggggccctgactttggctggaggtttggcaccatccacggccgggtgggccgcttccccagcgagctggtgcagcctgctgctgccccagacttcctgcagctgcccacagagcccggccggggccgggctgctgctgtggccgctgctgtggccagcgctgctgctgcccaggaggtgggcagaagaagagagggcccccctgtgcgggcccggtctgctgaccacggggaggatgccctggccctgcccccctacaccatgctggagtttgcccagaagtacttccgggacccccagaggcggccccaggacggcctgcggctgaagagcaaggagccccgggagagcaggaccctggaggacatgctgtgcttcaccaagacccccctgcaggagagcctcatcgagctgagtgacagcagcctgagcaagatggccacagacatgttcctggccgtgatgaggttcatgggagatgcccccctgaagggccagagcgacctggatgtgctgtgcaacctgctgaagctgtgtggggaccacgaggtgatgagagatgagtgctactgccaggtggtgaagcagatcacagacaacaccagcagcaagcaggacagctgccagaggggctggaggctgctgtacatcgtgacagcctaccacagctgcagcgaggtgctgcacccccacctgacccgcttcctgcaggatgtgtccaggaccccaggcctgcccttccagggcatcgccaaggcctgtgagcagaacctgcagaagaccctgcgctttggaggccgcctggagctgcccagcagcattgagctgcgggccatgctggccggccgcagcagcaagaggcagctgttcctgctgcccggcggcctggagcggcacctgaagatcaagacctgcaccgtggccctggatgtggtggaggagatctgtgccgagatggccctgaccaggcctgaggccttcaatgaatatgtgatctttgtggtgaccaacagaggccagcacgtgtgccccctgagcagaagagcctacatcctggatgtggccagcgagatggagcaggtggatggcggctacatgctgtggttccggcgggtgctgtgggaccagcccctgaagtttgaaaatgagctgtatgtgaccatgcactacaaccaggtgctgcctgactacctgaagggcctcttcagctctgtgcctgccagccggcccagcgagcagctgctgcagcaggtgtccaagctggccagcctgcagcaccgggccaaggaccacttctacctgcccagcgtgcgggaggtgcaggagtacatcccagcccagctgtaccgcaccacagctggcagcacctggctgaacctggtgtcccagcaccggcagcagacccaggccctgagcccccaccaggcccgggcccagttcctgggcctgctgagcgccctgcccatgtttggcagcagcttcttcttcatccagagctgcagcaacattgctgtgcctgccccctgcatcctggccatcaaccacaacggcctgaacttcctgagcacagagacccatgagctgatggtgaagttccccctgaaggagatccagagcaccaggacccagaggcccacagccaacagcagctacccctacgtggagatcgccctgggagatgtggccgcccagaggaccctgcagctgcagctggagcagggcctggagctgtgccgggtggtggccgtgcacgtggagaacctgctgagcgcccacgagaagaggctgaccctgcccccatctgagatcaccctgctgtag

SEQ ID NO: 190124 - DNA, 555 bp, Artificial Sequence
  derived and/or modified sequence
atgaacatgctgagcagcctgagccccaccgtggtgctgcctgactacctgaagggcctcttcagctctgtgcctgccagccggcccagcgagcagctgctgcagcaggtgtccaagctggccagcctgcagcaccgggccaaggaccacttctacctgcccagcgtgcgggaggtgcaggagtacatcccagcccagctgtaccgcaccacagctggcagcacctggctgaacctggtgtcccagcaccggcagcagacccaggccctgagcccccaccaggcccgggcccagttcctgggcctgctgagcgccctgcccatgtttggcagcagcttcttcttcatccagagctgcagcaacattgctgtgcctgccccctgcatcctggccatcaaccacaacggcctgaacttcctgagcacagagacccacgtgtctggcctgagcctggccctgcccagcccccccagcgtgccctggagccccacccccagcaagaggcccaggcctcctgctgctgaggcccagttccactgcctgccccccagctag

SEQ ID NO: 190125 - DNA, 735 bp, Artificial Sequence
  derived and/or modified sequence
atgagagatgagtgctactgccaggtggtgaagcagatcacagacaacaccagcagcaagcaggacagctgccagaggggctggaggctgctgtacatcgtgacagcctaccacagctgcagcgaggtgctgcacccccacctgacccgcttcctgcaggatgtgtccaggaccccaggcctgcccttccagggcatcgccaaggcctgtgagcagaacctgcagaagaccctgcgctttggaggccgcctggagctgcccagcagcattgagctgcgggccatgctggccggccgcagcagcaagaggcagctgttcctgctgcccggcggcctggagcggcacctgaagatcaagacctgcaccgtggccctggatgtggtggaggagatctgtgccgagatggccctgaccaggcctgaggccttcaatgaatatgtgatctttgtggtgaccaacagaggaggcaagagccgcagcaccagccagcccagcagcacagtgcagaggcaggcccggcccggcagcacctggagcgccagcacaggcagccgccacagaagaagtgcccccaccaggcctgtgcccagcttctgggccagcagcgccccctacctgtgcagcgccccacccagcagcagcagcagagctgctgccaccctgctgtgccagcccctggccagcctgcccagcaccaccatggccagcaccttcagcgcccagaggctgatgtag

SEQ ID NO: 190126 - DNA, 429 bp, Artificial Sequence
  derived and/or modified sequence
atggtgaagggcggccaggaggccggcggccagctgcgggtgctgcgggcctacagctttgctgacatcctgtttgtgaccatgcccagccagaacatgctggagttcaacctggccagcgagaaggtgatcctcttcagcgcccgggcccaccaggtgaagaccctggtggatgacttcatcctggagctgaagaaggacagcgactatgtggtggccgtgaggaacttcctgcctgaggaccctgccctgctggccttccacaagggggacatcatccacctgcagcccctggagcccccccgggtgggctacagcgctggctgtgtggtgcggaggaaggtggtgtacctggaggagctgcggcggcggggccctgactttggagtgtgccccaggacctggaaccccatccggggggccagctag

SEQ ID NO: 190127 - DNA, 10593 bp, Artificial Sequence
  derived and/or modified sequence
atggccaaggaggaggacgaggagaagaaggccaagaagggcaagaaggggaagaaagcccctgaaccggagaagcccaagcgaagcttaaaaggcaccagtcggctgttcatggggttccgcgaccgcacgccaaagatcagcaagaaaggccagttccggagtgcctcagccttcttttgggggctacatacgggcccacagaaaacaaagaggaagcgcaaggcgcgtactgtgctgaagagcacatcaaagctgatgacgcagatgcgtatgggaaagaagaaaagggcgatgaagggtaagaagccaagcttcatggtgattcgcttccccggacgaagaggatacggcagattacggcccagggcccgatctctgtccaaggcaagcacagccatcaattggctcacaaagaaatttctcctgaagaaagccgaggaatcgggctccgagcaggcaaccgtagacgcttggttgcagcgaagctcttctagaatgggttcgcgcaagctcccctttccatctggcgcggaaattctgcggccgggtggcaggcttcgccggtttccaagatcccgctctatttacgcctccggcgaacccctgggattcctgcctttcgaagacgaggctccctttcaccactcaggctcaaggaagtctctctatgggttagaagggttccaggaccttggtgagtattacgactatcacagagacggggacgattactatgatagacagtcacttcataggtacgaagagcaggagccctatcttgcagggctggggccgtattctccggcctggcctccttatggcgatcactattacggataccctcctgaagatccatacgactactaccaccccgattattacggcgggccattcgacccaggctatacttatggttatggatatgatgattatgagcccccctacgctcccccatccggctacagctctccatattcataccacgacgggtacgagggggaagctcacccttatggctactatctggatccctatgccccatacgacgccccataccccccttatgatttgccttatcatacgccatacgatgtgccatatttcgacccatacggcgttcactatactgtaccttatgctgaaggggtctacggtggcggcgatgaggctatctacccacctgaagttccctatttctaccccgaggaaagcgcctctgcattcgtttacccctgggttcctccccccattccttcaccacacaacccatatgcacatgccatggacgatattgctgagctggaagagcccgaggacgcgggcgtggaacgacagggaaccagcttcaggcttcccagtgccgcgttttttgagcaacaaggcatggacaagccggctcgttcaaagcttagtttgattcgaaagttccgactctttccccgcccgcaggtgaagttatttggtaaagagaaattagaagtgcctcttccgcctagtctggacattcccctgccattgggcgacgctgacgaagaggaagacgaggaagagctgccccccgtatccgcagtcccttatggacaccctttctgggggttcctcactcctcgtcaacgcaacctgcaacgagcgctgagcgcattcggcgcccaccggggcctcggcttcggacctgaatttggaagacccgtcccgaggccggctactagtctggcgcggttccttaagaaaacactgagcgagaaaaagcctatcgcccgattgaggggtagtcagaaggcccgcgctggcggaccagcagtgcgagaggccgcatacaaacgcttcggatacaagttggcagggatggaccctgagaagcccggcacgccaatcgtgctccggagagcccagcctagagctcgtagtagtaacgatgcacggaggcccccggctccgcagcccgcgcctcgcactctgagccactggtcagcgttactgtcacccccagtgcccccgaggccaccaagctctgggccgcccccagcaccaccactgagtccagcactgtcaggactgccccgtccggccagcccttatggttccttgaggcgacaccctcctccttgggctgcccccgcccatgtcccgcccgccccccaagccagctggtgggccttcgtagaaccacctgctgtgtcccccgaggtgcctccagatttacttgcatttccgggccctagaccctccttccgcggctcgcggagaaggggcgcagctttcggcttccctggagcttctccacgcgcatctcgtcgaagggcttggtcacccctcgcaagcccccagcccagtctccgcagctcccctggacttgggtactgctcccccctggcacctccctcacctcagctgtcattgagaactggaccctttcagccgcctttcctgccacctgcccggcgtccaagatctttgcaggaaagccccgcacctcgtagagccgccgggcgcctcgggccaccagggtcaccattgcctggaagcccccgcccgcctagcccccctttgggtctgtgccacagtccacgtagatcctccttgaaccttccgtcacggctgccccatacctggcgccgtctgagcgagccaccaactcgggccgtcaagccccaagttcggctgccttttcaccgtccccctcgggccggtgcctggcgcgccccactcgagcaccgggaaagccctagagagcccgaggactccgaaacaccctggaccgtgccccctttggcaccatcctgggatgtggatatgcccccgacccagcgacctcccagcccgtggccaggaggagcagggtctcgacgagggttcagccgcccccctccagtgcccgagaacccctttctacaactccttggccctgtaccctctccaacacttcagcccgaggacccggcagccgacatgaccagggtgtttctcggtcgccatcacgagccaggcccaggacagttgaccaagagtgccggacccacaccagagaagccggaagaggaagcgacccttggtgacccccagcttccggcggagacaaagccacccacacccgccccaccaaaggacgttaccccacccaaggacatcacccctccaaaagatgtactgccagaacagaagacccttaggccgtctctgtcttaccctctcgctgcatgcgaccagacccgggctacttggcctccctggcaccgctgggggaccttaccacaggccgccgccccccttgccccaatcagagcccccgaacccctgccaaaaggcggagaaagacggcaggcagcacccgggcgctttgccgtcgttatgcctcgcgttcagaagctctcttctttccagcgcgtggggccagcaaccctgaaacctcaagttcagcccattcaagacccgaagccccgcgcctgttctctgagatggtcttgcctgtggctgcgagccgacgcatatggcccctggccacgcgtgcatacccatccccaatcatgccatttaggccctggagccgcctgtcttagcctgagaggttcttgggaagaggtgggccctccctcttggagaaacaagatgcacagtatacggaacctccctagcatgcgtttccgggagcagcatggagaagatggggtggaggatatgactcagttggaggatctgcaagagacgaccgtgctgtcaaatctgaagatccggtttgagagaaatctgatctatacatatatcggcagcatccttgtgagcgttaacccatatcagatgttcgggatttatgggccagagcaggtgcaacaatacaacggacgcgcattaggagaaaacccaccccatctatttgccgttgctaatctggcctttgctaagatgttagacgcgaagcagaatcagtgcatcattatctctggcgagagcggctcgggaaagacagaagctaccaagttgattcttagatacttagctgctatgaatcaaaagcgggaggtaatgcagcaaatcaagattctggaggcaaccccgttactggagtctttcggcaatgctaagaccgtgcgcaacgacaatagcagccgtttcggaaagttcgtcgagattttccttgaaggcggcgtgattagcggagcgatcacctcacagtaccttctggagaagagccgaatcgtgtttcaggccaaaaacgagaggaactatcacatcttctacgagctcctcgccggactgccggcgcagctgagacaggccttcagtcttcaggaggccgaaacatactattatctgaaccagggagggaactgcgagatcgccggcaaaagtgatgctgacgatttccgacggttgctcgctgcaatggaagtgctggggttctcttctgaggatcaggatagtatttttcgaatactggcatccattctgcatctcgggaacgtgtactttgaaaagtacgagactgatgcacaggaggtcgcttccgtggtgtcggcaagggaaatccaggctgtggctgagctactacagatctctccggaagggttgcaaaaagctatcactttcaaggtgactgaaactatgcgcgagaaaatctttacgcccctgaccgtcgagtccgccgtcgacgcaagggatgccatcgccaaggtgctatatgcactcctatttagctggctgatcacacgcgttaacgccctcgtgtctccacggcaggatactcttagtatcgctatacttgatatctatgggtttgaggacctttcctttaattctttcgaacagctgtgtatcaactacgcaaacgaaaatctgcagtatttattcaataaaatcgttttccaagaggagcaggaggagtacatccgcgagcaaattgattggcaggaaatcactttcgccgacaatcaaccgtgtatcaacctcattagtttaaaaccgtacgggatactcaggatactcgatgatcaatgctgctttccacaggcaacggatcatacctttctgcagaagtgtcactatcatcatggcgcaaacccattgtacagcaagcccaaaatgccactgccagaattcacaatcaagcattatgccgggaaggtgacataccaagtgcataaattcctggataagaaccatgatcaggtgagacaggacgtactagacctgttcgttaggtccaggacacgggttgttgctcacttattcagctctcacgccccccaggccgccccccagagattgggtaagtcttcaagtgtgactcgcctgtacaaagcacacacggtggctgccaaattccagcaatctctcttagacttggttgaaaagatggagaggtgtaatcccctgttcatgagatgcctcaaacccaatcataagaaggaacccgggctttttgagccagatgtcgtgatggctcagttacggtattccggagtgctggagacggttcggatcagaaaggaaggatttcctgtgcggctgccctttcaaggttttattgacagatattgctgcctcgtggctctcaaacacgatctccccgctaacggcgatatgtgcgtgtctgtgttaagccggctttgtaaagtgatgcccaacatgtatagggtcggcgtgagtaagcttttcctcaaggagcacctgtaccaacttctggagtcaatgagggagcatgtcctgaacctggcggcattgacattgcaacgatgcctccgcgggttctttatcaagaggagatttaggtccttgagacacaaaataatcttactacaaagccgcgcccgggggtacttggccaggcagcgctaccagcagatgagacggtccctcgtgaagtttcgctcccttgtacatgcgtacgtatccagaagacgatatcttaaactacgggccgaatggcggtgtcaggtggaaggagcgcttctgtgggaacaggaagagctgtccaaacgcgaggtggtggcagtgggccatctagaggttcctgcagaacttgctggcttacttcaagcagttgccggtcttgggctggcccaggtgcctcaggtcgcccccgtacggactccacggctgcaagcagaaccccgggtgacattaccgcttgacataaataactatccaatggctaagtttgtacaatgccattttaaggagcctgccttcgggatgctgaccgtccctctgaggacacccttaactcagttgccagctgagcaccatgccgaggccgtcagcattttcaaactgattctccggttcatgggtgatcctcacctgcacggggctcgcgagaacatatttggcaattatatcgttcaaaagggactagccgtgcctgagctcagagatgagattctggcacagctcgccaatcaagtttggcacaatcataacgcacataatgccgaacgggggtggctgctgctagcggcatgcctgtcaggctttgcacctagtccctgttttaataagtacctcctaaagttcgtatccgactatggacgcaacggatttcaggctgtgtgccaacaccgcctgatgcaggccatggggagagcgcagcagcagggatctggcgctgcccggacccttcccccgactcaactagaatggactgccacatatgaaaaagcctccatggcacttgatgttggctgctttaatggcgatcagttttcctgccctgttcactcctggagcactggggaggaggttgcgggagatattttgcgacatagaggactggcagatggctggaggggctggaccgttgccatgaaaaatggagtgcagtgggccgaactcgctggtcacgattacgtactggaccttgtgagtgacctggagcttcttcgagactttcctaggcaaaagtcttatttcatcgtgggaacagagggcccagctgcctctagaggcgggcctaaggtcgtgtttgggaacagctgggacagtgacgaggacatgtcaacaaggcctcaacctcaggagcacatgcccaaggtgcttgattcagacggatacagttctcataaccaggatgggacgaatggcgaaacagaggctcaacggggaacagctactcaccaagagtcggactccctgggcgagccagccgtgcctcacaaagggctggactgctaccttgattcattgtttgaccccgtgctttcctacggtgatgctgacctcgaaaaacctacggctattgcttacaggatgaagggaggcggccagcctgggggaggtagctcctctgggactgaggacacacctaggcgcccgcccgaacctaagcccattccgggattggatgctagtaccctggccttgcagcaagcttttatccataagcaggcggtacttctggctagggaaatgactctgcaggcgactgctctacagcaacagccactgagcgccgcgttacgatctttacctgccgaaaagcccccggccccagaggctcagcctactagtgtgggtacgggcccacctgccaaacccgtgctgctgcgggccacccctaagccacttgcacccgctcctctcgcgaaggctccacgcctgccaattaaaccggtcgccgcacctgttttggctcaagatcaagcatcccccgaaacaacctcaccctcaccagagctggtgagatacagcactctgaactccgagcactttccccagcccacacagcaaattaagaatattgtgagacagtatcagcagccatttcgtggtggacggccagaagcgcttcgaaaggatggaggcaaggtgttcatgaagagacccgacccacacgaagaagcacttatgatcctaaaagggcaaatgacccatctggccgcagcacctggaacccaggtctcccgtgaagcggtggccctagtcaagcctgtgacaagtgctccccgcccatctatggcacccacaagtgctctgccatcacggtctctggagcctcctgaggagctgacccagactaggctgcaccgtctgattaaccccaacttttacgggtatcaggacgctccgtggaagattttcctgagaaaagaagttttctatcccaaggattcttattctcaccctgttcagctcgatctgttgttccgacagattttacatgacacactcagcgaggcctgtctgcgcatctccgaagatgagcggcttaggatgaaagccctcttcgcacagaaccagttggatacccagaagcccctcgtcacagaatccgttaaacgcgcggtcgttagcaccgccagagatacttgggaagtatacttctctaggattttccctgctactgggagcgtagggacaggtgtccagcttctggcagtgtcgcatgtgggcattaaactgctccgtatggtcaaaggcggtcaggaggccggcgggcaacttcgagtactgagagcatattcgtttgccgatatcctgtttgtcactatgccctctcagaatatgctggagttcaacctggcatccgaaaaggtgattctgtttagtgcaagggcccaccaagtgaaaacgctcgtggatgattttatcttggaactcaaaaaggatagcgattatgtcgtggccgtgcggaactttctgccggaggatccagctctgctagccttccataagggtgatattatccatttgcagcccctggagccccctcgggttggatactcggctggctgcgtcgtgcggcgaaaggttgtttacctggaggaattacgtagacgcggcccagacttcggctggagatttggcacaatccacggccgcgtcggacggttcccttctgagctggtccagcctgccgccgcccccgatttcctgcagcttccaaccgagccaggacgcggtagggcagccgccgtggcagccgcagtggcttccgcagcagcggctcaagaagtcgggcggcggagagagggccctccggtccgtgctcggtcagccgatcacggagaagacgccctcgccctgcccccttacaccatgttggaatttgcccagaaatactttagggaccctcagaggagaccccaggacggtctcagactgaagagcaaggaacctagagagagccgtactttggaggacatgctttgcttcacaaagacgcccctgcaggagagtttaatcgagttgtcggacagctccttgagtaagatggccacagacatgtttctggccgtcatgcggttcatgggtgacgcgccactgaaaggacagagtgacctggacgtactgtgtaacctgctgaagttgtgtggcgatcatgaagtgatgagggacgagtgctactgccaggtggtgaaacagatcaccgacaacacgtccagcaagcaagactcctgtcaaaggggctggaggcttctctacatcgtgaccgcataccattcttgctctgaggtcctccacccgcacctgacacgcttcctgcaggatgtttctcgaacccctggtttgcccttccagggaatcgccaaggcttgcgagcagaacttgcaaaagaccctgcgctttggcgggcggctagagttgccctcaagcatcgaactgcgcgctatgttggccggaagaagttcaaaaagacagctctttctgttaccgggaggcctggagcgtcaccttaaaattaagacgtgcactgttgctctggatgtcgtggaggaaatctgcgccgagatggccctgacacggcctgaagctttcaacgagtatgtcatcttcgtggttaccaaccgcgggcagcacgtgtgcccgctgagtagacgcgcctacattttagacgtagccagcgagatggaacaagttgacgggggatacatgctgtggtttcgcagggtcctgtgggaccagccactgaaattcgaaaatgaactgtatgtgactatgcactataaccaggttctccctgattatctgaaaggcttgtttagttcagtccctgcaagtcggccctcagaacagctgctgcagcaagtgagcaagctggcctcccttcaacaccgggcaaaggatcatttctatttgccctctgtcagagaggtgcaggagtatatccccgcacagttgtaccgaacaaccgctggtagtacgtggctgaatctggtgtctcaacatcgccaacagacccaagccctgtcaccccatcaggcgcgcgcccagttcctgggactgctgtcggccttacctatgtttggttcatctttcttttttatacagtcctgctccaatattgcagtgccggcgccctgtatcttagctatcaaccataatgggctgaatttcctgtccactgagacacatgagctgatggtgaaatttcctctgaaagagattcagagcactagaacccagcgaccgacggccaattcatcatacccttatgtggaaattgccctcggcgacgtcgctgcccaaagaactttgcaattgcagctggagcagggattggagctttgtagagtagtggcagtgcacgtggaaaacttattgtctgcacatgaaaagagattgactctccctcccagcgaaatcactctactctag

SEQ ID NO: 190128 - DNA, 11863 bp, Artificial Sequence
  derived and/or modified sequence
gggctgggcctcccttccccataacactgagctgctctgctgggccaaccgtgctcctgggccagccagaggacccccatgaggcggcatgcaggcggggagcaggccacagaacgcagggtgaaacccaaggcgctctagaggagatgaattatggatccgccctcccggaatcctggctcggccctccccacgccacccagggccagtcgggtctgctcacagcccgaggaggccgcgtgtccagccgcgggcaagagacagagcaggtccctgtgtctccaagtccctgagcccgtgacaccggccccaggccctgtagagagcaggcagccaccatggcgaaggaggaagatgaggagaagaaagccaagaaagggaagaaggggaagaaggcaccggagccggagaagcccaaacggagcctgaaggggacgtcgcggctgttcatgggcttccgcgaccgtacacccaagatctccaagaagggccagttccgcagcgcctcggccttcttctggggcctccacaccggcccccagaagaccaagcgcaagaggaaggcccgcaccgtgctcaagtccacgtcaaagctcatgacgcagatgcgcatgggcaagaagaagcgggcgatgaagggcaagaagccgtccttcatggtgatccgcttcccaggccgccgtggctacggccgcctgcggccgcgcgcccggtcactcagcaaagcgtccacggccatcaactggctcacaaaaaagttcctcctcaagaaggccgaggagtcgggcagcgaacaggccacagtggacgcctggctgcagcgctcgagctcccgcatgggctcccgcaaactccccttcccgtcgggtgccgagatcctgcggcctgggggccggctccggaggttcccccgcagccgcagcatctacgcgtcaggcgagcccctgggcttcctgcccttcgaggacgaggccccattccatcactcgggctcccgcaagtcgctgtacgggcttgagggcttccaggacctgggcgagtattatgactatcaccgcgacggcgacgactactacgaccggcagtcactccaccgctacgaggagcaggaaccctacctggcgggcctcggcccctacagcccggcctggccaccctacggcgaccactactacgggtacccgcccgaggatccctacgactactaccaccccgactattacggtggcccctttgatccggggtacacctacggctacggctacgacgattacgaacccccatatgcgcccccgtcggggtactcgtctccttacagctaccacgatgggtacgagggcgaggcgcacccttatggctactacctggatccctatgcgccgtacgacgcgccatacccaccctatgacctcccataccacactccctacgatgtaccctactttgatccctacggagtccactacaccgtcccctatgccgaaggcgtctatggcggtggggacgaggccatctacccccccgaggtgccctatttttacccggaggagtcggcttcggcctttgtgtacccctgggtaccaccgcccatcccgtcgccccacaacccgtatgcccacgccatggatgacatcgccgagctggaggaaccagaggacgcgggcgtagagcgtcaggggacctccttccgcctgcccagcgccgccttcttcgagcagcaaggcatggataagcccgccaggtccaagctgtccctcatccgcaagttccgcctcttcccgcgaccccaggtgaagctgtttgggaaggagaagctggaggtgcccctgccaccctctctggacattcctctccccttgggggatgcggacgaagaagaggacgaggaggagctgcccccggtttccgctgtgccctacggccaccctttctggggcttcctcacgccgcgccagcgcaacctccagcgcgcgctgtcggccttcggcgcccaccggggcctgggcttcggccctgagtttggccgccccgtgcctcgccctgccacctcgcttgcgcggttcctcaagaagacgctgtcggagaagaagcccatcgcgcggctcaggggcagccagaaggcccgggcgggcggccctgctgtcagggaggcggcctacaaacgcttcggctacaagctggctggcatggaccccgagaagcccggcacgcccatcgtgctgaggagggcccagccacgcgctcgcagcagcaacgacgcgcgccgcccgcccgcgccacagcccgcgcccaggaccctctcccactggagcgcgctcctgtctccgcccgtgcccccgcggcccccaagctccgggcccccgcccgcgccgccgctctccccggcgctctcgggcctgccccggccggcctcgccctacggctccctccgccgccacccgccgccctgggccgccccagcgcacgtgccaccggcgccgcaggccagctggtgggccttcgtggagccccctgccgtgagcccggaggtgccccccgacctactagccttcccagggccccgaccctcgttcaggggctcccgccggagaggggcggctttcggcttccccggggcctctccacgggcgtcgcggaggcgagcttggtcaccgctggcctcgccccagccctcgctgaggagctcgccgggcctcggctactgctcacccttggcgcccccgtcgcctcagctgtccttgcgcacgggccccttccagccgcccttcctgcccccggcccgccggccccgctcgctgcaggagtccccagccccacgccgagccgctgggcgcctgggcccacccggctcgccgctgccgggctcacccaggccgccctcgccgcccctggggctctgccacagcccgcggcgcagctccctgaatctgccctcgcgcctcccgcacacgtggcggcgcctcagcgagccacccactcgggctgtgaagccgcaagtgcgcctgcccttccaccgaccgcccagggccggggcctggcgggcgcccctggaacaccgggagagcccgcgagaacccgaggactcagagacgccctggactgtgcccccactggcccccagctgggacgtggacatgcctcccacccaacgcccaccctccccctggccaggaggtgcaggcagccgccgaggcttttccaggccaccccctgtgccggaaaacccctttctccagctcctgggccctgtgccatcccccaccctccagcctgaggatccagctgctgatatgaccagggtcttcctgggcagacaccatgagccggggcctggacagctcaccaaatcagctggcccaacccctgagaagcctgaagaagaggccaccctgggggacccccagctgccagcagagaccaagcctccaaccccagcacctcccaaggatgtcactccccccaaggatatcactccccccaaggatgtcctcccagagcaaaagacattaaggcccagcctctcatacccactggctgcgtgtgaccagaccagggccacatggccaccatggcaccgctggggaacactgccccaagccgcagcccccttggcgcccatcagggccccagagcccctgcccaaggggggtgaacggcgccaggcagcccctgggcgttttgctgtggtcatgcctcgtgtgcagaagctgagctctttccagcgagttgggcctgcaaccctgaagcctcaagtccagcccattcaggaccccaagccaagagcctgtagtcttcgctggtcctgcctctggcttcgggcagatgcctatggaccctggccacgagtacacacccatccccagtcctgccacctgggccctggagctgcctgcctgtcccttaggggctcctgggaggaggtcggcccgccaagctggcggaacaagatgcactccatccgcaacctgccatccatgcggttccgtgagcagcacggggaggatggtgtggaggacatgacacagctggaagacctccaggaaaccactgtgctgtccaacctcaagattagatttgaacggaacctcatctacacatacattgggagcatcctggtgtcggtgaacccataccaaatgtttggaatctatgggccggagcaggtgcagcagtacaacggacgggccctgggagagaatcccccgcacctctttgctgttgcaaatctcgccttcgccaaaatgctcgatgccaaacagaaccagtgcataatcattagtggagagagcggctctggcaaaactgaggccaccaagctgattctgcgctacctggccgccatgaaccagaaacgggaggtcatgcagcagataaagatcctggaggcaacacccctcttggagtccttcggtaatgccaaaaccgtcaggaacgacaactccagccgctttgggaagtttgtggaaatctttctggaagggggcgtgatctctggtgccataacctcccagtacctgcttgagaaatccaggatcgtgtttcaggccaaaaacgagaggaattaccacatcttctacgagttgctggccgggttgcctgcccagctcaggcaggcctttagcctgcaagaggctgagacctactactatctgaaccagggtgggaactgtgagatagcaggaaagagcgatgcagatgactttcgccggctcctggctgccatggaggtgttgggcttcagcagtgaggaccaggacagcatcttccgcatcctggcctccatcctgcacctgggcaacgtctactttgagaagtatgagacggatgcacaggaggtggcctcagtggtgagtgcccgagagatccaggccgtggcagagctgctgcagatctcccctgagggcctgcagaaggccatcaccttcaaagtgaccgagacaatgcgagagaagatcttcacgcccctaactgtggagagcgctgtggatgccagggacgccatcgccaaggtcttgtatgcactgctgttcagctggctcatcaccagggtcaacgcgctggtgtccccaaggcaggacacactgtccatcgccatcctggacatctatggtttcgaggacctgagcttcaacagctttgagcagctgtgtattaactacgcaaacgagaaccttcagtaccttttcaacaagatcgtcttccaggaggagcaggaggagtacatccgtgagcagatagactggcaggagatcacctttgctgacaaccagccctgcatcaacctcatctcactgaagccttatggcatcctgcggatccttgacgaccagtgttgctttccccaggctacagaccacaccttcctacagaagtgccactaccatcatggcgccaacccgctctattccaaacccaagatgccgctgcctgagttcaccatcaagcactatgcaggcaaggtcacctaccaggtgcacaagttcctggacaagaaccacgaccaagtgcgccaggatgtgctggacctgttcgtacggagccggacacgggtggtggcacacctcttctccagccatgccccacaggctgcccctcagcgcctgggcaagagcagctccgtcactcggctctacaaggcgcacactgtggccgccaagttccagcagtcactcctggatctggtggaaaagatggagaggtgcaaccccttgttcatgcgttgcctgaagcccaaccacaagaaggagccaggtctctttgagccagatgtggtaatggcacaattacgctattcaggggtgctggagaccgtgaggatccgcaaggagggatttccagtgcgcctgcctttccaggggttcatcgacaggtactgctgtctagtggccctcaagcatgacctgccggctaatggggacatgtgtgtgtcagtgctgagtcgcctgtgcaaagtcatgccaaacatgtaccgtgttggggtcagcaagctgttccttaaggaacacctataccagctgctggagagtatgcgagagcatgtcctgaatctggcagccctcactctgcagcgctgcctccgtggcttcttcattaagcggcgattccgctctctgcgccacaagatcatcctgctgcaaagccgggcccgtggctaccttgccaggcaacgctatcagcagatgaggaggagtctggtgaagttccggtccctggtacacgcatacgtgagccgccgacgctatctcaagctgagggcagagtggaggtgccaggtggagggggcgctgctgtgggagcaggaggagctgagcaagcgggaggtagtcgctgtggggcacctggaggtaccggctgagctggctgggctcttgcaagcagtggcaggcctcgggctggcccaggtgcctcaggtggcccctgtgaggactcctcgactccaggctgagccccgtgtcacactgcccctggacatcaacaactatcctatggccaagtttgtccagtgccacttcaaggaacctgcctttgggatgctgacagtgcccctgaggacacccctcacgcagctgccagccgagcaccatgcagaagccgtgagcatcttcaagctgatcctgcgcttcatgggcgacccccacctgcatggtgcccgggagaacatcttcgggaactacatcgtgcagaaggggctggcggtgcctgagctgcgggatgagatcctggcacagctggccaatcaggtgtggcacaatcacaatgcccacaatgctgagcggggctggctgctgctggccgcctgcctcagtggctttgcaccttccccgtgcttcaacaagtaccttctcaagtttgtgtctgattatgggcggaatggcttccaggctgtgtgtcagcaccgcctcatgcaggccatgggccgggcccaacagcagggctcgggggctgcccgcaccttacccccgacccagctcgagtggacagcgacctatgagaaggccagcatggcgctggacgtgggctgcttcaatggtgaccagttctcctgcccggtgcactcctggagtacgggggaagaggtggctggagacattctgaggcacagggggctggcagatggctggcgcggctggaccgtggccatgaagaatggtgtccagtgggcagagctggctggccacgactacgtgttagacctggtgtcggacctggagctgctcagggacttccctcgacagaagtcctacttcattgtgggcacagaggggcctgcagccagcaggggaggccccaaagtggtgtttgggaacagctgggactcggatgaggacatgtccactagaccccagccccaggagcacatgcccaaagtacttgactctgatgggtacagcagccacaatcaggacggtacaaatggggagactgaggcccaaagagggacagcaacccaccaagagtcagacagtcttggagagcctgctgtgccccacaaggggctggactgctacctggatagcctctttgaccctgtgctgtcctacggggatgcggacctggagaagccaacagccattgcctaccgcatgaaagggggaggccagcccggtggaggcagcagtagtggtactgaagacacccccaggagacccccagagccaaagccaatcccaggcctggatgcctccacattggctctgcagcaagccttcatccacaaacaggccgtgctgctggcccgggagatgaccctgcaggccacggcactccagcagcagcccctgagtgctgccctgagatccttgcccgcagagaaacccccagcaccagaggcacagccgacgtctgtaggcaccggtccccctgccaaacccgtgctcctgcgtgccactccaaagcccttggccccagcccctctggccaaggctccaaggctccccatcaagcctgtggctgcccctgttctagctcaggatcaggcttctccagaaaccacttcaccctccccagagctggtccggtactctacgctcaactctgagcacttcccacagcccacacagcagatcaagaatattgtcaggcagtaccagcagccgttccggggaggccggcctgaggccctcaggaaggatggcgggaaagtgttcatgaagcggccagaccctcatgaggaggccctgatgatcctgaaagggcagatgacccacctggcagctgcacctggcacccaggtgtccagagaggccgtggccctggtgaagccggtgaccagtgcaccaaggccatccatggcacccacttcagctctgccctcgcgatcgctggagccccctgaggaactcacgcagacgcggctgcaccgcctcatcaatcccaacttctacggctatcaggacgccccctggaagatcttcctgcgcaaagaggtgttttaccccaaggacagctacagccatcctgtgcagcttgacctcctgttccggcagatcctgcacgacacgctctccgaggcctgccttcgcatctctgaggatgagaggctcaggatgaaggccttgtttgcccagaaccagctggacacacagaagcctctggtaacggaaagcgtgaagcgggccgtggtcagcactgcacgagacacctgggaggtctacttctcccgcatcttccccgccacgggcagcgtgggcactggtgtgcagctcctagctgtgtcccacgtgggcatcaaactcctgaggatggtcaagggtggccaggaggccggcgggcagctgcgggtcctgcgtgcatacagctttgcagatatcctgtttgtgaccatgccctcccagaacatgctggagttcaacctggccagtgagaaggtcatcctcttctcagcccgagcgcaccaggtcaagaccctggtagatgacttcatcttggagctgaagaaggactctgactacgtggtcgctgtgaggaacttcctgcctgaggaccctgcgctgctggctttccacaagggtgacatcatacacctgcagcccctagagccacctcgagtgggctacagtgctggctgcgtggttcgcaggaaggtggtgtacctggaggagctgcgacgtagaggccccgactttggctggaggttcgggaccatccacgggcgcgtgggccgcttcccttcggagctggtgcagcccgctgctgcccccgacttcctgcagctgccaacggagccaggccgcggccgagcagccgccgtggccgctgctgtggcctctgcagccgctgcacaggaggtgggccgcaggagagagggtcccccagtcagggcccgctctgctgaccatggggaggacgccctggcgctcccaccctacacaatgctcgagtttgcccagaagtatttccgagaccctcagaggagaccccaggatggcctcaggctgaaatccaaggagcctcgggagtccagaaccttggaggacatgctttgcttcaccaagactcccctccaggaatccctcatcgaactcagcgacagcagcctcagcaagatggccaccgacatgttcctagctgtaatgaggttcatgggggatgccccactgaagggccagagtgacctggacgtgctttgtaacctcctgaagctgtgcggggaccatgaggtcatgcgggatgaatgttactgccaagttgtgaagcagatcacagacaataccagctccaagcaggacagctgccagcgaggctggaggctgctgtatatcgtgaccgcctaccacagctgctctgaggtcctccacccacacctcactcgcttcctccaagacgtgagccggaccccaggcctgccctttcaggggatcgccaaggcctgcgagcagaacctgcagaaaaccttgcgcttcggaggtcgtctggagctccccagcagcatagagcttcgggccatgttggcaggccgcagttccaagaggcaactctttcttcttcctggaggccttgaacgccatctcaaaatcaaaacatgcactgtggccctggacgtggtggaagagatatgtgctgagatggctctgacacgccctgaggccttcaatgaatatgttatcttcgttgtcaccaaccgtggccagcatgtgtgcccactcagtcgccgtgcttacatcctggatgtggcctcagagatggagcaggtggacggcggctacatgctctggttccggcgtgtgctctgggatcagccactcaagttcgagaatgagctatatgtgaccatgcactacaaccaggtcctgcctgactacctgaagggactcttcagcagtgtgccggccagccggcccagcgagcagctgctgcagcaggtgtccaagctggcttcactgcagcatcgcgccaaggaccacttctacctgccgagcgtgcgggaagtccaggagtacatcccagcccagctctaccgtacaacggcaggctcgacctggctcaacctggtcagccagcaccggcagcagacacaggcgctcagcccccaccaggcccgtgcccagtttctgggcctcctcagcgccttacctatgttcggctcctccttcttcttcatccagagctgcagcaacattgctgtgccagccccttgcatccttgccatcaaccacaatggcctcaactttctcagcacagagactcatgaattgatggtgaagttccccctgaaggagatccagtcgacgcggacccagcggcccacggccaactccagctacccctatgtggagattgcgctgggggacgtggcggcccagcgcaccttgcagctgcagctggagcagggactggaactgtgtcgtgtggtggccgtgcacgtggagaacctgctcagtgcccatgagaagcggctcacattgccccccagcgagatcaccctgctctgacccagcccccagccctccagtaccttctgccagaagactcactgtgtggcctcagagaaatcactgaacctctcaggatcaatgacccctgtaaggggccagagccttggaggacactaagaggaggcaggaggagcaactcaaatccccaagaacacaagaagacccatcctgaactgggatggaatggcagcatgcaaacttggatcagatagcaggaggaactttcaaaagtctggcccactgtgcagtggagcagaaggcaggaccatgaggcctcctgccatgtacccattgcagaccctgcccctaactcctgcctatgacacagaagccccacaccagttgcccagatgaactggcctctgcctttggtttactcagggtctgatgttggaatctgctccaactccacaccctagcccttacatgtcctcctaaggggcccctccttgtgctgccagtcagcctggatttctggtctttggttatttctgtgcaaacaaaaggtgtgcctggcagccatttctccatggagttgctaagtggccggaaaacaagcctgagggaggaggcaggagttggagttaccttaggcccctgattcactgcctatgaacagaccatcccccactccttgggtatccccaaccccagacccccatcacttgatgggccacacaagtttgagagtggtacaagggagaagtttgggaaaagccttcttggaaaatgggacattagcattgagttttgaaagatgagtaggagtttgctaagaatagatggaagacagcaggataaacattccagagaaaatcatgtttattccctgctgtatcttccagaacctaggaggatgcctaacagagagtaagcacttaaaaaatatttgtcatatgaatgaaaaaataaacgagtgaatgttgata

SEQ ID NO: 190129 - DNA, 998 bp, Artificial Sequence
  derived and/or modified sequence
ctttgtaacctcctgaagctgtgcggggaccatgaggtcatgcgggatgaatgttactgccaagttgtgaagcagatcacagacaataccagctccaagcaggacagctgccagcgaggctggaggctgctgtatatcgtgaccgcctaccacagctgctctgaggtcctccacccacacctcactcgcttcctccaagacgtgagccggaccccaggcctgccctttcaggggatcgccaaggcctgcgagcagaacctgcagaaaaccttgcgcttcggaggtcgtctggagctccccagcagcatagagcttcgggccatgttggcaggccgcagttccaagaggcaactctttcttcttcctggaggccttgaacgccatctcaaaatcaaaacatgcactgtggccctggacgtggtggaagagatatgtgctgagatggctctgacacgccctgaggccttcaatgaatatgttatcttcgttgtcaccaaccgtggcgggaagtccaggagtacatcccagcccagctctaccgtacaacggcaggctcgacctggctcaacctggtcagccagcaccggcagcagacacaggcgctcagcccccaccaggcccgtgcccagtttctgggcctcctcagcgccttacctatgttcggctcctccttcttcttcatccagagctgcagcaacattgctgtgccagccccttgcatccttgccatcaaccacaatggcctcaactttctcagcacagagactcatgtaagagctggggaagtgttggatgggcgtggactgtcactgtcacctgcagggactggaactgtgtcgtgtggtggccgtgcacgtggagaacctgctcagtgcccatgagaagcggctcacattgccccccagcgagatcaccctgctctgacccagcccccagccctccagtaccttctgccagaagactcactgtgtggcctcagagaaatcactgaacctctc

SEQ ID NO: 190130 - DNA, 1009 bp, Artificial Sequence
  derived and/or modified sequence
atttagggggcggggccgggtgtgaagcaaggccagggggcagtcggacagtacccactgaagccccgcccctgcaggtgttttaccccaaggacagctacagccatcctgtgcagcttgacctcctgttccggcagcccagaaccagctggacacacagaagcctctggtaacggaaagcgtgaagcgggccgtggtcagcactgcacgagacacctgggaggtctacttctcccgcatcttccccgccacgggcagcgtgggcactggtgtgcagctcctagctgtgtcccacgtgggcatcaaactcctgaggatggtcaagggtggccaggaggccggcgggcagctgcgggtcctgcgtgcatacagctttgcagatatcctgtttgtgaccatgccctcccagaacatgctggagttcaacctggccagtgagaaggtcatcctcttctcagcccgagcgcaccaggtcaagaccctggtagatgacttcatcttggagctgaagaaggactctgactacgtggtcgctgtgaggaacttcctgcctgaggaccctgcgctgctggctttccacaagggtgacatcatacacctgcagcccctagagccacctcgagtgggctacagtgctggctgcgtggttcgcaggaaggtggtgtacctggaggagctgcgacgtagaggccccgactttggtgtgtgccccagaacctggaaccccatacggggcgcatcctagtttcacccactcgtggtgcagatgcacagtgagggtttcttggtgcccgaaagtggcctgggctggtcaggtctcctaaggtccagccgtggcctgtcagtatctgttggtggccagacagcccagccctctgctttgcctgaggggtctccgtgggcatttccatgtttgtggcctgaatctctctttatgtctccacatgacctgagagtccacaaaccctgctttgcctttttgcttcacttcccctttatggtcctgtgg

SEQ ID NO: 190131 - DNA, 555 bp, Artificial Sequence
  derived and/or modified sequence
atgaacatgctgagcagcctgagccccaccgtggtgctgcccgactacctcaagggattgttttccagcgttccagcatctcgtccttccgagcaactgttgcagcaggtgtctaaactggcatcactgcagcatcgagcgaaagaccacttctacctgccgagcgtgcgcgaggtccaagaatatatcccagctcagctatatagaaccaccgccggctccacatggctgaacctcgtgtcacagcaccgtcaacaaactcaggccctgagtcctcatcaggcaagagctcaatttctgggactgttgtcagccttgccgatgtttggaagctcatttttttttatacaaagctgcagcaatattgccgtacccgccccctgcattttggcgattaaccacaacggattgaacttcctgtccaccgaaacacacgtctccgggctttctttggcactgccctcacccccttctgtgccctggtcaccgactccaagcaaacgaccccgtccacccgccgctgaagcacagttccattgcctgcccccttcatag

SEQ ID NO: 190132 - DNA, 735 bp, Artificial Sequence
  derived and/or modified sequence
atgcgggacgagtgctactgccaggtggtgaagcagatcaccgacaacacatcttcaaagcaagattcgtgccagagggggtggaggctgctttacatagtgaccgcttatcactcgtgttctgaagtgctgcacccacacctaacgagatttctgcaggatgtctcccggaccccaggccttccattccagggtatcgcgaaggcgtgcgaacagaacttacaaaaaacacttcgctttggcggaagattagaattaccctcaagtatagagctgagggctatgctggctggtagatcttcaaaacgtcagctgttcctcctgccgggcgggctggagagacatctcaaaatcaagacctgtaccgtggcattagacgtcgtagaagaaatctgtgcagaaatggctctgactcgaccagaggccttcaatgaatatgttattttcgtcgtgacaaatcgcggggggaaaagccggtcgaccagtcaaccaagctcaactgtgcagcggcaggcacgaccgggctctacttggtccgctagcaccggatctaggcacaggcgaagtgccccaacccggccggttccatccttctgggcgtcatctgccccctacctgtgcagcgctcccccctcgtcttctagccgcgccgccgctactctcctgtgtcagccgttggcctcgcttccttccaccactatggcctctaccttcagcgctcaacgtcttatgtag

SEQ ID NO: 190133 - DNA, 429 bp, Artificial Sequence
  derived and/or modified sequence
atggtgaagggcggccaggaggccggcggccagctgcgggtgctgcgtgcctattccttcgccgatattctgtttgttactatgccatcccagaacatgttggagtttaacctcgccagcgagaaggtgattttgttcagcgcaagggcccatcaggtcaaaaccctagtcgacgacttcatccttgagcttaaaaaagacagcgactacgtcgtggcagtgcgaaattttctgcctgaagaccccgctctgcttgcattccacaaaggagatattatccacctccagcccctggagcctcctcgcgtaggctatagcgctggttgcgtcgtccgaagaaaagtggtgtatctcgaagagttacgaaggcgaggcccagattttggcgtctgtccacgcacgtggaaccccattcgaggagcttcctag

SEQ ID NO: 190134 - DNA, 10593 bp, Artificial Sequence
  derived and/or modified sequence
atggcaaaggaggaggatgaggagaaaaaggctaaaaaaggcaaaaagggcaaaaaggccccagagccagaaaaacctaagcggagcttaaagggaacatctaggctcttcatgggttttagggataggacccccaagatctcaaaaaaggggcagttcagatcagcctctgcatttttttggggcctccacaccggaccccagaaaacaaaacgaaaacgtaaggctaggaccgttctcaaatcgacgtcaaagttgatgacacagatgcgcatgggaaaaaagaagcgcgctatgaaagggaagaaaccctctttcatggtgattcggttccctggccgaagagggtatgggagattgcgtcccagggctcgctctctgtctaaagcttctaccgctatcaattggctgaccaagaaattcctactgaagaaggccgaggagtctggctccgaacaggctactgttgatgcctggcttcagagatcttccagtcgaatggggtctcggaaactaccctttccatcaggggctgaaatattgcgcccagggggtagacttcgccgatttcccagaagcaggtcaatatatgctagtggagaacccctgggcttcctaccttttgaagatgaggctcctttccatcattctgggtcaaggaagtctctgtacgggttggagggatttcaggacctgggagaatactatgactatcatcgcgatggtgatgactactatgaccggcaatccctccatagatacgaggagcaggagccttacctggctgggctcggcccttattcccccgcttggcctccttatggtgaccattactacggctaccctcccgaggacccgtacgactattatcaccccgattactacggcggtccttttgatcccggatatacctacggatacggctatgacgactatgagccaccttacgcgcctccatctggatactcgagcccctactcatatcacgacgggtatgagggggaggctcatccttacggatactatctcgacccgtatgctccgtacgatgcaccttacccgccttacgacctgccctaccacacaccttacgacgtcccttattttgatccttatggtgttcactacaccgtgccgtacgccgagggggtatatggcggtggggacgaggccatctatccccctgaagtgccctacttttaccctgaggaatcagcatcggctttcgtctatccgtgggtgcctccgccaatcccgagccctcataacccatatgctcacgctatggacgatatagccgagctggaagaacctgaggacgccggagtggaacgccagggcacctcctttcgcctgccctcagccgctttcttcgaacaacaaggcatggacaaaccggctcgaagtaagttgagtctgattcgcaagtttagactgtttcccagacctcaggttaagctatttgggaaggaaaagctggaggtccccttaccacctagcctggatatcccactgcccctgggagacgccgatgaagaagaagatgaagaggagctacctcctgtgagcgctgtgccttacgggcacccattttggggctttctgaccccacggcagaggaatttacagcgcgcactgagcgcgtttggcgctcaccgtgggctcgggtttggcccagaattcggccgaccagttccccgaccagcaaccagcctggctcgattcctgaagaagacattgagcgagaaaaagccgattgcacggctgcgtggctcccagaaagcccgagctggtgggcctgcagtgagagaagcggcatacaaaaggtttggctacaaacttgccggtatggacccagaaaagccaggcacccctatcgttctgagacgcgctcaaccgagggcacgtagctcgaatgacgccaggcggcctcccgctcctcaacccgcacccagaaccctctcgcactggtctgccctgctgtcgccaccagtaccgccaaggccgccttcttctggcccacccccagcccctcctctgtcacctgcgctgtctgggctgccccgacccgcttctccatacggatcactgaggcgccacccgcctccatgggctgcacccgctcacgtaccaccggctccacaggcgtcttggtgggccttcgtagagcctcccgcagtaagtccggaagtaccacctgacctgctcgcttttccaggacccaggcccagctttcgcggatcaagaagaaggggggcagccttcggattccccggtgcatcgccaagagccagtcgccgtcgggcatggagcccactggcctctccccagcccagcctcagatcctctcctggccttggctattgtagccccttagctccgcctagtcctcaacttagcttaagaaccggcccttttcagcctccatttctccctcccgcacgacgtccacgatcactgcaggaaagccccgcacctcggagagccgcagggaggctgggacctccgggtagccctcttcccggttcccctagacctccctctcccccattgggcttgtgccattcgccacgaagaagcagcctgaatctgcccagccgacttcctcacacttggcgtcgactgtccgaacccccaacgcgagccgttaagccgcaggtgcggctcccatttcacagacccccaagagctggagcttggcgtgctccgctcgagcatagagagtcccccagggagccagaggactcggagaccccctggaccgttccacccctcgcaccttcgtgggacgtagatatgcctcctacacagcggccacctagcccctggccgggaggcgcagggtcccgccgaggcttttccagacctcccccagtgcctgagaatcccttcctgcagctgctggggcctgtgccttcacccaccctgcaacctgaggaccctgcagccgacatgaccagagttttcctgggcaggcaccacgagcctggacccggacagttgaccaaaagtgcagggccaactccggaaaaacctgaggaagaggccaccctcggggaccctcaattgcctgctgagacaaaaccccctacacccgctccacctaaagatgtgacaccaccaaaggacataacgccacctaaggatgtcttgcctgagcaaaaaaccctgcgcccaagcctcagctacccacttgccgcatgtgaccagactagagcgacgtggcccccatggcaccgatgggggacgctccctcaggcagccgctcctttggctccgatcagggcccctgaaccgctgccaaagggtggcgaacgcaggcaagctgcgcctggtcggtttgccgtggtcatgcccagggtgcaaaaattgtcaagctttcagcgagtgggccctgctaccctcaagcctcaggttcaaccaatccaggaccccaaaccacgtgcttgttccttaagatggagttgtctctggcttcgagccgacgcatatggcccatggccacgggtccatactcatcctcagagttgtcatctaggaccaggagctgcatgcctgagcttgcgcggaagctgggaggaggttggcccaccaagctggaggaataagatgcattccatccggaacttgccaagcatgcgctttagggaacaacacggcgaagacggagtggaggatatgacgcagctagaggatctacaggagactactgtgctgtccaatctgaagattcggttcgaacgaaatttgatctacacgtacataggcagcatccttgtttctgtgaacccctatcagatgtttggaatttatggaccagagcaggtgcaacagtataatggcagggccttaggcgaaaatccccctcacctcttcgctgtagctaatttggcattcgctaagatgttggatgccaagcagaaccagtgcattattatctccggggagtcagggtccggcaagaccgaagcgaccaaactgatattacgatatctggctgcaatgaaccagaaacgggaagttatgcagcagattaaaatcctcgaggccacgcctttgctggagtcattcgggaacgcgaaaacagtcaggaacgataattcgagtcgatttggaaagtttgtcgaaattttcttggaggggggagtgattagcggagcaattactagtcaatacctgctcgaaaaaagtcgtatagttttccaggcgaaaaatgaacgaaattatcatatcttttatgaactactggcaggtctccctgcccagcttcggcaagcattctccctgcaggaagccgagacctattattatttgaatcagggcggtaattgcgagattgccggaaaatctgacgccgatgactttcggagactgcttgccgcaatggaagtcctagggttcagcagcgaagaccaggattctatttttcggattcttgcttccatcctgcatttgggcaatgtttacttcgagaagtacgaaacagacgctcaggaagtcgcttccgtggtgtcagcccgagaaattcaagccgtggccgagctgttgcagatcagtcccgaggggctccagaaggctatcacttttaaggtcacagaaacgatgagagagaagatattcactcccttgacagttgaaagtgcggttgatgcacgagacgcgattgctaaggttctgtacgccctgctgttctcctggctcatcacccgagtgaatgctcttgtgtccccacgccaagatacactctcaatcgccatcctggacatttatgggttcgaagatcttagttttaacagtttcgaacagttgtgtatcaactatgccaacgaaaacctgcaatacttgttcaacaaaatcgttttccaggaagagcaggaagagtatatacgtgaacagatagattggcaagagatcacttttgccgataaccagccgtgcatcaatttgattagtctgaaaccgtacggcatcctgcgaattctcgatgaccaatgttgctttcctcaggctacagatcatactttcctgcagaaatgccactatcatcacggcgctaaccctctgtactccaagccaaaaatgcctctgcctgagttcacaatcaagcattacgcagggaaggttacttatcaggtgcacaagtttttggacaaaaatcacgaccaggtgagacaggacgtgctggacttgttcgttcggtcaaggacgagagtggtggctcacctctttagctctcacgcacctcaggccgctcctcaaagattgggcaagtcctcgtctgtgacgaggctttataaagcacataccgtagcggcaaagttccagcagtcactcttggacctggtggaaaagatggagcgctgcaacccgttatttatgaggtgcttgaaaccaaaccataaaaaagaacccggactgtttgaacccgatgtggtaatggctcaattgcgatattcaggtgtcctcgagactgtgagaatacgcaaggagggctttccagtacggctgccttttcaagggttcatcgatagatactgctgtctcgtggccctcaaacatgacctccccgctaatggggacatgtgcgtgtctgtgttgagccggttgtgcaaggtgatgcctaatatgtatcgggttggcgtgagcaagctgtttctgaaagaacacctctatcaactgttggagtctatgagagagcatgtattaaatcttgccgctctcactctgcagcggtgcctgcgtgggttctttatcaagcgtcgattccgctcattgagacacaagataattttactgcaatcccgagctcggggatatctggctcggcaaaggtatcagcaaatgagacgttcattagtcaaatttaggtctcttgtacatgcatacgtctcgcggaggcgatacctgaagctgcgcgctgagtggagatgccaggtggagggagctctcttgtgggaacaggaagagttgtccaaaagagaggttgtggcggtcggccacctcgaggtgccagccgaactcgctggtctattgcaagccgtcgcaggactcggccttgcacaggtgccacaagtagcgcctgtaaggactcccagattgcaggcggagcctcgcgttacactgcctctggatattaataactacccaatggcaaagttcgtgcagtgccactttaaggaaccggcttttggcatgctgacggtgccactcagaacacctctgacacaacttccagcagagcaccatgctgaggccgtctccatcttcaagttgatcttacgtttcatgggggatcctcacctgcacggcgcacgcgaaaacatctttggcaactatatcgtgcagaaaggtctggcagtgccagagctgagagatgaaatattggcacagcttgctaatcaggtgtggcacaatcataatgcccataatgccgaacggggttggctgctgttagcagcctgcctgtcaggtttcgccccatcaccatgttttaataagtacctgctcaagtttgtctccgattacggccgtaatggatttcaggcggtatgtcaacatcggctgatgcaggcaatgggcagggcgcagcagcaagggtcgggcgcagccagaacactgcctccgacacagctggaatggaccgcaacctacgagaaggcgtctatggctcttgatgtcgggtgcttcaatggcgatcagtttagctgcccagtgcattcttggtctaccggggaagaggttgccggtgacattctgaggcacagaggtctcgctgacggttggagaggttggactgtggctatgaaaaatggtgttcagtgggcagaacttgcgggtcatgattacgtcctggatctcgtgagcgacttggaattgttacgagatttcccccgacagaagtcttattttatagtagggaccgaaggaccagccgcttctaggggtggacctaaggtcgtctttggaaacagctgggatagcgacgaggatatgagcactagacctcagccacaggagcacatgcctaaggtcctcgattccgatggatacagctctcacaatcaggatggcactaacggcgaaaccgaggctcagcgcggaacagctacgcatcaggagtctgatagcctcggcgaacctgccgtgccccataaaggcctagattgttatctcgattctctgtttgatcccgtgctgtcctatggagacgctgacctagaaaagcccactgccatcgcctacaggatgaagggaggcggacagcccggagggggaagtagttccgggacggaggatacccccagaagacctcctgaaccaaagcctatcccagggctagatgccagtactctcgctcttcagcaggcatttattcataaacaagctgtcctactggctcgagagatgaccctccaggccacagcgcttcagcaacagccactgtccgccgctttgcgttctctccccgctgaaaagcctccagcccctgaagctcagccaacatctgttggcactgggcctcccgcaaagcctgtactactcagagctactccaaagcctcttgcaccggctccactcgcgaaggctccacgtttgcctatcaaacccgtagcagcacccgttctcgcccaggaccaggcctcccccgagactaccagtcctagtccggagctggtgcggtactcaaccctgaactcggaacatttccctcagcctacacagcagatcaaaaacatcgttaggcagtaccagcagcccttcaggggagggcgtcctgaggccctgcgcaaggacggcggaaaggtttttatgaaacggcctgacccccatgaggaggctctgatgattctcaaaggtcagatgactcacttagccgcagccccaggcactcaggtgtctagagaggcagtggctctggtgaaacctgtgacttcggcgcctaggccctctatggcccctacaagcgctctacctagccgctctctggagccaccagaggaactgactcaaacgcgcctccataggctgatcaatccaaatttttatggataccaagacgccccatggaagatttttctcagaaaagaagtgttttatcccaaagactcatactcccaccccgtccaactggatctcctatttcgacaaatactccatgacacactgtccgaggcctgtctgcgtatctcagaggatgagcgtctgcggatgaaagccctgttcgctcagaaccagcttgacacccaaaagcccctagtgactgagtccgtgaagcgcgctgtggtaagcacagccagagatacgtgggaggtgtacttcagcagaatcttccccgcaaccggctctgtgggaactggggttcaattgttggccgtgtcccacgtgggcatcaaactcttgcgaatggtgaaaggcggtcaggaggcaggcggtcagttgagagtgttgcgcgcttattctttcgctgacatactttttgttacaatgccaagccagaatatgctggagtttaacttggcatccgaaaaagtcatactcttttcagcaagggcacaccaagtgaagaccctggtcgacgacttcatcctcgaactcaagaaggactccgactacgtcgtcgccgttcgcaacttcctgcccgaagaccctgctctcctggccttccataaaggagacattatccatcttcaacctctggaaccaccccgtgtaggctattctgctgggtgcgtcgtgagaagaaaagtggtttatcttgaagaactgcgccgtcgcggacctgattttggttggaggttcgggaccatccacggcagagtcggaaggtttccatctgaactggtgcagcccgctgcggcacccgactttctgcagttgcccaccgagcccggtcggggtcgggctgcggctgtggccgcagccgtggctagtgccgctgcagcacaagaggtcggacgacgccgtgaagggcctcccgtgcgagctagatcagccgatcacggcgaggacgcactggcactgcccccttatactatgctggaattcgctcagaaatactttagggacccacagcggagaccccaggacggcttgcggctgaagtcaaaggaacccagggagagtcggacactggaagatatgctctgctttacaaaaacgccactacaggaatccctcattgagttgtcggattcctctctgagcaagatggcgacagatatgttcttggctgtcatgaggtttatgggtgacgctcccctgaaaggccagagtgatctggacgtgctgtgtaacctcctaaagctgtgtggggatcacgaggtcatgcgcgatgagtgttactgccaggtggtcaaacaaatcacagacaatactagctcaaaacaggactcgtgccaaagggggtggagactgctctacatcgtgaccgcgtaccatagttgctcagaagtgcttcatccgcacctaacaaggtttctccaagatgtttctcgtactccaggattaccatttcagggcatagcaaaggcctgcgaacaaaaccttcaaaaaacactgcgtttcggaggtcgcctggagctgccttccagcatagagctccgggcaatgttagccggaagatcaagcaagcgccagttattcctccttcctggcggactggagcgccacctgaaaattaagacatgtacggtcgcactggacgttgtcgaggaaatttgcgccgagatggcgctcaccagacccgaagcttttaacgagtacgtaatattcgtggtaactaaccggggtcagcacgtctgcccattgtctaggcgcgcttatatcttggatgtcgccagcgaaatggaacaggtcgatggcggatacatgttatggtttcggcgagtgttgtgggatcagcctttaaagtttgagaacgaactgtatgtaaccatgcactataatcaagtgctgcctgactatctcaagggcttgttttcctccgttcccgcttcccgtcccagtgagcagctgctccagcaggtgtcgaaactcgccagcctccagcaccgcgcaaaagaccacttttatctgccctctgtgcgggaagtgcaggagtacataccagcccagctttatcggaccaccgccggatctacatggttgaacctggtgtcccagcataggcaacagacacaagccctgtcgcctcatcaggcgagagcccagttcctcggacttctgtccgctcttcctatgtttggttcctctttctttttcattcaatcctgttcaaacatcgccgtgcctgctccttgtatcttggctatcaatcataatggccttaatttccttagcacagagacacacgagctcatggtgaaattccctctcaaagaaatccagtctacccgaacacagcgacctactgccaactctagctatccctatgttgaaatcgccctgggcgatgtggccgctcagcggacactgcagcttcagctggagcagggcctcgaactgtgcagggtggtggctgtacacgttgaaaatctgctgtcagcccatgaaaaacgcctgacactaccaccctcggagatcaccctgctatag

SEQ ID NO: 190135 - DNA, 555 bp, Artificial Sequence
  derived and/or modified sequence
atgaatatgctgtcttcactgagtccgacagtagtgctacctgattaccttaaaggtctcttctcctccgtgcccgcatcccggccatctgagcagctgcttcagcaggtgtctaagttagcatccctgcaacaccgtgcgaaagatcacttctacctgccctctgtgcgtgaggtgcaagaatatattcccgcacagctctataggactacggccggatccacttggctcaacttagttagtcagcatcgccagcagacgcaagccctgtctcctcatcaggctcgcgctcagtttcttggactcctatccgctcttccgatgttcggctctagttttttctttattcaaagttgcagcaatatagccgttccagccccatgtattctggccatcaatcacaacggactgaacttcttgagtacagagactcacgtgagcggattgtcgctggccctcccctctcctcccagtgtcccatggtccccaaccccttccaagcgtccacggccacccgcagcagaagcccaatttcactgtttgccacctagctag

SEQ ID NO: 190136 - DNA, 735 bp, Artificial Sequence
  derived and/or modified sequence
atgagagatgagtgttactgccaggttgtgaaacagattacagacaacacatcatccaaacaggattcatgtcagcggggatggcgcctgctgtacattgttaccgcgtatcactcatgttccgaagttctgcatcctcatctgactcgctttctccaggacgtttccagaactcccggtctcccttttcagggcatagctaaagcctgcgaacagaatctgcaaaaaacccttcgctttggagggcgactggagctgccaagcagtatcgagctccgggctatgctcgctggtagatcttccaagcgacagttgtttcttcttccgggtgggttggagcgccatctcaaaatcaagacctgtaccgttgctcttgacgttgtagaagagatctgtgcagaaatggcactcacccgtcccgaagcctttaatgaatacgttatatttgtagtcacaaatcgcggtggcaagagcagatctacttctcagccctccagcaccgtacagaggcaggctagacccggatccacttggagtgccagcactggctctagacaccgcaggtccgcgcctactaggccagtaccatcattctgggcctcgtctgccccttatctctgctccgctcctccttccagttcaagtcgggcagcagcgaccttactgtgccagccccttgcctccttgccttcaactactatggcttcaactttttcagcacaaagactcatgtag

SEQ ID NO: 190137 - DNA, 429 bp, Artificial Sequence
  derived and/or modified sequence
atggtgaaaggcggtcaggaagcaggagggcagctgcgcgtcctgagggcttactccttcgcagacatactgttcgtcactatgccttcacaaaacatgcttgaattcaacctggccagcgaaaaagtgatacttttttctgcccgagcccaccaggtgaaaaccctggtcgatgactttatcctggagcttaagaaagacagtgattatgtggtagctgtcagaaatttcttacccgaagatcctgctctgttggcatttcataagggggatatcattcatctccagccattggaaccgcctcgggtcggatactcagctgggtgtgtggtgcgacgtaaggtggtatacctagaggaacttcggagacggggtccggattttggggtttgcccaaggacatggaatccaataaggggggcttcttag

SEQ ID NO: 190138 - DNA, 10593 bp, Artificial Sequence
  derived and/or modified sequence
atggccaaggaggaggacgaggagaagaaggccaagaagggcaagaagggcaagaaggcccccgagcccgagaagcccaagagaagcctgaagggcaccagcagactgttcatgggcttcagagacagaacccccaagatcagcaagaagggccagttcagaagcgccagcgccttcttctggggcctgcacaccggcccccagaagaccaagagaaagagaaaggccagaaccgtgctgaagagcaccagcaagctgatgacccagatgagaatgggcaagaagaagagagccatgaagggcaagaagcccagcttcatggtgatcagattccccggcagaagaggctacggcagactgagacccagagccagaagcctgagcaaggccagcaccgccatcaactggctgaccaagaagttcctgctgaagaaggccgaggagagcggcagcgagcaggccaccgtggacgcctggctgcagagaagcagcagcagaatgggcagcagaaagctgcccttccccagcggcgccgagatcctgagacccggcggcagactgagaagattccccagaagcagaagcatctacgccagcggcgagcccctgggcttcctgcccttcgaggacgaggcccccttccaccacagcggcagcagaaagagcctgtacggcctggagggcttccaggacctgggcgagtactacgactaccacagagacggcgacgactactacgacagacagagcctgcacagatacgaggagcaggagccctacctggccggcctgggcccctacagccccgcctggcccccctacggcgaccactactacggctacccccccgaggacccctacgactactaccaccccgactactacggcggccccttcgaccccggctacacctacggctacggctacgacgactacgagcccccctacgccccccccagcggctacagcagcccctacagctaccacgacggctacgagggcgaggcccacccctacggctactacctggacccctacgccccctacgacgccccctaccccccctacgacctgccctaccacaccccctacgacgtgccctacttcgacccctacggcgtgcactacaccgtgccctacgccgagggcgtgtacggcggcggcgacgaggccatctacccccccgaggtgccctacttctaccccgaggagagcgccagcgccttcgtgtacccctgggtgcccccccccatccccagcccccacaacccctacgcccacgccatggacgacatcgccgagctggaggagcccgaggacgccggcgtggagagacagggcaccagcttcagactgcccagcgccgccttcttcgagcagcagggcatggacaagcccgccagaagcaagctgagcctgatcagaaagttcagactgttccccagaccccaggtgaagctgttcggcaaggagaagctggaggtgcccctgccccccagcctggacatccccctgcccctgggcgacgccgacgaggaggaggacgaggaggagctgccccccgtgagcgccgtgccctacggccaccccttctggggcttcctgacccccagacagagaaacctgcagagagccctgagcgccttcggcgcccacagaggcctgggcttcggccccgagttcggcagacccgtgcccagacccgccaccagcctggccagattcctgaagaagaccctgagcgagaagaagcccatcgccagactgagaggcagccagaaggccagagccggcggccccgccgtgagagaggccgcctacaagagattcggctacaagctggccggcatggaccccgagaagcccggcacccccatcgtgctgagaagagcccagcccagagccagaagcagcaacgacgccagaagaccccccgccccccagcccgcccccagaaccctgagccactggagcgccctgctgagcccccccgtgccccccagaccccccagcagcggccccccccccgccccccccctgagccccgccctgagcggcctgcccagacccgccagcccctacggcagcctgagaagacacccccccccctgggccgcccccgcccacgtgccccccgccccccaggccagctggtgggccttcgtggagccccccgccgtgagccccgaggtgccccccgacctgctggccttccccggccccagacccagcttcagaggcagcagaagaagaggcgccgccttcggcttccccggcgccagccccagagccagcagaagaagagcctggagccccctggccagcccccagcccagcctgagaagcagccccggcctgggctactgcagccccctggccccccccagcccccagctgagcctgagaaccggccccttccagccccccttcctgccccccgccagaagacccagaagcctgcaggagagccccgcccccagaagagccgccggcagactgggcccccccggcagccccctgcccggcagccccagaccccccagcccccccctgggcctgtgccacagccccagaagaagcagcctgaacctgcccagcagactgccccacacctggagaagactgagcgagccccccaccagagccgtgaagccccaggtgagactgcccttccacagaccccccagagccggcgcctggagagcccccctggagcacagagagagccccagagagcccgaggacagcgagaccccctggaccgtgccccccctggcccccagctgggacgtggacatgccccccacccagagaccccccagcccctggcccggcggcgccggcagcagaagaggcttcagcagacccccccccgtgcccgagaaccccttcctgcagctgctgggccccgtgcccagccccaccctgcagcccgaggaccccgccgccgacatgaccagagtgttcctgggcagacaccacgagcccggccccggccagctgaccaagagcgccggccccacccccgagaagcccgaggaggaggccaccctgggcgacccccagctgcccgccgagaccaagccccccacccccgccccccccaaggacgtgaccccccccaaggacatcaccccccccaaggacgtgctgcccgagcagaagaccctgagacccagcctgagctaccccctggccgcctgcgaccagaccagagccacctggcccccctggcacagatggggcaccctgccccaggccgccgcccccctggcccccatcagagcccccgagcccctgcccaagggcggcgagagaagacaggccgcccccggcagattcgccgtggtgatgcccagagtgcagaagctgagcagcttccagagagtgggccccgccaccctgaagccccaggtgcagcccatccaggaccccaagcccagagcctgcagcctgagatggagctgcctgtggctgagagccgacgcctacggcccctggcccagagtgcacacccacccccagagctgccacctgggccccggcgccgcctgcctgagcctgagaggcagctgggaggaggtgggcccccccagctggagaaacaagatgcacagcatcagaaacctgcccagcatgagattcagagagcagcacggcgaggacggcgtggaggacatgacccagctggaggacctgcaggagaccaccgtgctgagcaacctgaagatcagattcgagagaaacctgatctacacctacatcggcagcatcctggtgagcgtgaacccctaccagatgttcggcatctacggccccgagcaggtgcagcagtacaacggcagagccctgggcgagaaccccccccacctgttcgccgtggccaacctggccttcgccaagatgctggacgccaagcagaaccagtgcatcatcatcagcggcgagagcggcagcggcaagaccgaggccaccaagctgatcctgagatacctggccgccatgaaccagaagagagaggtgatgcagcagatcaagatcctggaggccacccccctgctggagagcttcggcaacgccaagaccgtgagaaacgacaacagcagcagattcggcaagttcgtggagatcttcctggagggcggcgtgatcagcggcgccatcaccagccagtacctgctggagaagagcagaatcgtgttccaggccaagaacgagagaaactaccacatcttctacgagctgctggccggcctgcccgcccagctgagacaggccttcagcctgcaggaggccgagacctactactacctgaaccagggcggcaactgcgagatcgccggcaagagcgacgccgacgacttcagaagactgctggccgccatggaggtgctgggcttcagcagcgaggaccaggacagcatcttcagaatcctggccagcatcctgcacctgggcaacgtgtacttcgagaagtacgagaccgacgcccaggaggtggccagcgtggtgagcgccagagagatccaggccgtggccgagctgctgcagatcagccccgagggcctgcagaaggccatcaccttcaaggtgaccgagaccatgagagagaagatcttcacccccctgaccgtggagagcgccgtggacgccagagacgccatcgccaaggtgctgtacgccctgctgttcagctggctgatcaccagagtgaacgccctggtgagccccagacaggacaccctgagcatcgccatcctggacatctacggcttcgaggacctgagcttcaacagcttcgagcagctgtgcatcaactacgccaacgagaacctgcagtacctgttcaacaagatcgtgttccaggaggagcaggaggagtacatcagagagcagatcgactggcaggagatcaccttcgccgacaaccagccctgcatcaacctgatcagcctgaagccctacggcatcctgagaatcctggacgaccagtgctgcttcccccaggccaccgaccacaccttcctgcagaagtgccactaccaccacggcgccaaccccctgtacagcaagcccaagatgcccctgcccgagttcaccatcaagcactacgccggcaaggtgacctaccaggtgcacaagttcctggacaagaaccacgaccaggtgagacaggacgtgctggacctgttcgtgagaagcagaaccagagtggtggcccacctgttcagcagccacgccccccaggccgccccccagagactgggcaagagcagcagcgtgaccagactgtacaaggcccacaccgtggccgccaagttccagcagagcctgctggacctggtggagaagatggagagatgcaaccccctgttcatgagatgcctgaagcccaaccacaagaaggagcccggcctgttcgagcccgacgtggtgatggcccagctgagatacagcggcgtgctggagaccgtgagaatcagaaaggagggcttccccgtgagactgcccttccagggcttcatcgacagatactgctgcctggtggccctgaagcacgacctgcccgccaacggcgacatgtgcgtgagcgtgctgagcagactgtgcaaggtgatgcccaacatgtacagagtgggcgtgagcaagctgttcctgaaggagcacctgtaccagctgctggagagcatgagagagcacgtgctgaacctggccgccctgaccctgcagagatgcctgagaggcttcttcatcaagagaagattcagaagcctgagacacaagatcatcctgctgcagagcagagccagaggctacctggccagacagagataccagcagatgagaagaagcctggtgaagttcagaagcctggtgcacgcctacgtgagcagaagaagatacctgaagctgagagccgagtggagatgccaggtggagggcgccctgctgtgggagcaggaggagctgagcaagagagaggtggtggccgtgggccacctggaggtgcccgccgagctggccggcctgctgcaggccgtggccggcctgggcctggcccaggtgccccaggtggcccccgtgagaacccccagactgcaggccgagcccagagtgaccctgcccctggacatcaacaactaccccatggccaagttcgtgcagtgccacttcaaggagcccgccttcggcatgctgaccgtgcccctgagaacccccctgacccagctgcccgccgagcaccacgccgaggccgtgagcatcttcaagctgatcctgagattcatgggcgacccccacctgcacggcgccagagagaacatcttcggcaactacatcgtgcagaagggcctggccgtgcccgagctgagagacgagatcctggcccagctggccaaccaggtgtggcacaaccacaacgcccacaacgccgagagaggctggctgctgctggccgcctgcctgagcggcttcgcccccagcccctgcttcaacaagtacctgctgaagttcgtgagcgactacggcagaaacggcttccaggccgtgtgccagcacagactgatgcaggccatgggcagagcccagcagcagggcagcggcgccgccagaaccctgccccccacccagctggagtggaccgccacctacgagaaggccagcatggccctggacgtgggctgcttcaacggcgaccagttcagctgccccgtgcacagctggagcaccggcgaggaggtggccggcgacatcctgagacacagaggcctggccgacggctggagaggctggaccgtggccatgaagaacggcgtgcagtgggccgagctggccggccacgactacgtgctggacctggtgagcgacctggagctgctgagagacttccccagacagaagagctacttcatcgtgggcaccgagggccccgccgccagcagaggcggccccaaggtggtgttcggcaacagctgggacagcgacgaggacatgagcaccagaccccagccccaggagcacatgcccaaggtgctggacagcgacggctacagcagccacaaccaggacggcaccaacggcgagaccgaggcccagagaggcaccgccacccaccaggagagcgacagcctgggcgagcccgccgtgccccacaagggcctggactgctacctggacagcctgttcgaccccgtgctgagctacggcgacgccgacctggagaagcccaccgccatcgcctacagaatgaagggcggcggccagcccggcggcggcagcagcagcggcaccgaggacacccccagaagaccccccgagcccaagcccatccccggcctggacgccagcaccctggccctgcagcaggccttcatccacaagcaggccgtgctgctggccagagagatgaccctgcaggccaccgccctgcagcagcagcccctgagcgccgccctgagaagcctgcccgccgagaagccccccgcccccgaggcccagcccaccagcgtgggcaccggcccccccgccaagcccgtgctgctgagagccacccccaagcccctggcccccgcccccctggccaaggcccccagactgcccatcaagcccgtggccgcccccgtgctggcccaggaccaggccagccccgagaccaccagccccagccccgagctggtgagatacagcaccctgaacagcgagcacttcccccagcccacccagcagatcaagaacatcgtgagacagtaccagcagcccttcagaggcggcagacccgaggccctgagaaaggacggcggcaaggtgttcatgaagagacccgacccccacgaggaggccctgatgatcctgaagggccagatgacccacctggccgccgcccccggcacccaggtgagcagagaggccgtggccctggtgaagcccgtgaccagcgcccccagacccagcatggcccccaccagcgccctgcccagcagaagcctggagccccccgaggagctgacccagaccagactgcacagactgatcaaccccaacttctacggctaccaggacgccccctggaagatcttcctgagaaaggaggtgttctaccccaaggacagctacagccaccccgtgcagctggacctgctgttcagacagatcctgcacgacaccctgagcgaggcctgcctgagaatcagcgaggacgagagactgagaatgaaggccctgttcgcccagaaccagctggacacccagaagcccctggtgaccgagagcgtgaagagagccgtggtgagcaccgccagagacacctgggaggtgtacttcagcagaatcttccccgccaccggcagcgtgggcaccggcgtgcagctgctggccgtgagccacgtgggcatcaagctgctgagaatggtgaagggcggccaggaggccggcggccagctgagagtgctgagagcctacagcttcgccgacatcctgttcgtgaccatgcccagccagaacatgctggagttcaacctggccagcgagaaggtgatcctgttcagcgccagagcccaccaggtgaagaccctggtggacgacttcatcctggagctgaagaaggacagcgactacgtggtggccgtgagaaacttcctgcccgaggaccccgccctgctggccttccacaagggcgacatcatccacctgcagcccctggagccccccagagtgggctacagcgccggctgcgtggtgagaagaaaggtggtgtacctggaggagctgagaagaagaggccccgacttcggctggagattcggcaccatccacggcagagtgggcagattccccagcgagctggtgcagcccgccgccgcccccgacttcctgcagctgcccaccgagcccggcagaggcagagccgccgccgtggccgccgccgtggccagcgccgccgccgcccaggaggtgggcagaagaagagagggcccccccgtgagagccagaagcgccgaccacggcgaggacgccctggccctgcccccctacaccatgctggagttcgcccagaagtacttcagagacccccagagaagaccccaggacggcctgagactgaagagcaaggagcccagagagagcagaaccctggaggacatgctgtgcttcaccaagacccccctgcaggagagcctgatcgagctgagcgacagcagcctgagcaagatggccaccgacatgttcctggccgtgatgagattcatgggcgacgcccccctgaagggccagagcgacctggacgtgctgtgcaacctgctgaagctgtgcggcgaccacgaggtgatgagagacgagtgctactgccaggtggtgaagcagatcaccgacaacaccagcagcaagcaggacagctgccagagaggctggagactgctgtacatcgtgaccgcctaccacagctgcagcgaggtgctgcacccccacctgaccagattcctgcaggacgtgagcagaacccccggcctgcccttccagggcatcgccaaggcctgcgagcagaacctgcagaagaccctgagattcggcggcagactggagctgcccagcagcatcgagctgagagccatgctggccggcagaagcagcaagagacagctgttcctgctgcccggcggcctggagagacacctgaagatcaagacctgcaccgtggccctggacgtggtggaggagatctgcgccgagatggccctgaccagacccgaggccttcaacgagtacgtgatcttcgtggtgaccaacagaggccagcacgtgtgccccctgagcagaagagcctacatcctggacgtggccagcgagatggagcaggtggacggcggctacatgctgtggttcagaagagtgctgtgggaccagcccctgaagttcgagaacgagctgtacgtgaccatgcactacaaccaggtgctgcccgactacctgaagggcctgttcagcagcgtgcccgccagcagacccagcgagcagctgctgcagcaggtgagcaagctggccagcctgcagcacagagccaaggaccacttctacctgcccagcgtgagagaggtgcaggagtacatccccgcccagctgtacagaaccaccgccggcagcacctggctgaacctggtgagccagcacagacagcagacccaggccctgagcccccaccaggccagagcccagttcctgggcctgctgagcgccctgcccatgttcggcagcagcttcttcttcatccagagctgcagcaacatcgccgtgcccgccccctgcatcctggccatcaaccacaacggcctgaacttcctgagcaccgagacccacgagctgatggtgaagttccccctgaaggagatccagagcaccagaacccagagacccaccgccaacagcagctacccctacgtggagatcgccctgggcgacgtggccgcccagagaaccctgcagctgcagctggagcagggcctggagctgtgcagagtggtggccgtgcacgtggagaacctgctgagcgcccacgagaagagactgaccctgccccccagcgagatcaccctgctgtag

SEQ ID NO: 190139 - DNA, 555 bp, Artificial Sequence
  derived and/or modified sequence
atgaacatgctgagcagcctgagccccaccgtggtgctgcccgactacctgaagggcctgttcagcagcgtgcccgccagcagacccagcgagcagctgctgcagcaggtgagcaagctggccagcctgcagcacagagccaaggaccacttctacctgcccagcgtgagagaggtgcaggagtacatccccgcccagctgtacagaaccaccgccggcagcacctggctgaacctggtgagccagcacagacagcagacccaggccctgagcccccaccaggccagagcccagttcctgggcctgctgagcgccctgcccatgttcggcagcagcttcttcttcatccagagctgcagcaacatcgccgtgcccgccccctgcatcctggccatcaaccacaacggcctgaacttcctgagcaccgagacccacgtgagcggcctgagcctggccctgcccagcccccccagcgtgccctggagccccacccccagcaagagacccagaccccccgccgccgaggcccagttccactgcctgccccccagctag

SEQ ID NO: 190140 - DNA, 735 bp, Artificial Sequence
  derived and/or modified sequence
atgagagacgagtgctactgccaggtggtgaagcagatcaccgacaacaccagcagcaagcaggacagctgccagagaggctggagactgctgtacatcgtgaccgcctaccacagctgcagcgaggtgctgcacccccacctgaccagattcctgcaggacgtgagcagaacccccggcctgcccttccagggcatcgccaaggcctgcgagcagaacctgcagaagaccctgagattcggcggcagactggagctgcccagcagcatcgagctgagagccatgctggccggcagaagcagcaagagacagctgttcctgctgcccggcggcctggagagacacctgaagatcaagacctgcaccgtggccctggacgtggtggaggagatctgcgccgagatggccctgaccagacccgaggccttcaacgagtacgtgatcttcgtggtgaccaacagaggcggcaagagcagaagcaccagccagcccagcagcaccgtgcagagacaggccagacccggcagcacctggagcgccagcaccggcagcagacacagaagaagcgcccccaccagacccgtgcccagcttctgggccagcagcgccccctacctgtgcagcgccccccccagcagcagcagcagagccgccgccaccctgctgtgccagcccctggccagcctgcccagcaccaccatggccagcaccttcagcgcccagagactgatgtag

SEQ ID NO: 190141 - DNA, 429 bp, Artificial Sequence
  derived and/or modified sequence
atggtgaagggcggccaggaggccggcggccagctgagagtgctgagagcctacagcttcgccgacatcctgttcgtgaccatgcccagccagaacatgctggagttcaacctggccagcgagaaggtgatcctgttcagcgccagagcccaccaggtgaagaccctggtggacgacttcatcctggagctgaagaaggacagcgactacgtggtggccgtgagaaacttcctgcccgaggaccccgccctgctggccttccacaagggcgacatcatccacctgcagcccctggagccccccagagtgggctacagcgccggctgcgtggtgagaagaaaggtggtgtacctggaggagctgagaagaagaggccccgacttcggcgtgtgccccagaacctggaaccccatcagaggcgccagctag

SEQ ID NO: 190142 - protein, 606 aa, Artificial Sequence
  derived and/or modified sequence
MKVRSAGGDGDALCVTEEDLAGDDEDMPTFPCTQKGRPGPRCSRCQKNLSLHTSVRILYLFLALLLVAVAVLASLVFRKVDSLSEDISLTQSIYDKKLVLMQKNLQGLDPKALNNCSFCHEAGQLGPEIRKLQEELEGIQKLLLAQEVQLDQTLQAQEVLSTTSRQISQEMGSCSFSIHQVNQSLGLFLAQVRGWQATTAGLDLSLKDLTQECYDVKAAVHQINFTVGQTSEWIHGIQRKTDEETLTLQKIVTDWQNYTRLFSGLRTTSTKTGEAVKNIQATLGASSQRISQNSESMHDLVLQVMGLQLQLDNISSFLDDHEENMHDLQYHTHYAQNRTVERFESLEGRMASHEIEIGTIFTNINATDNHVHSMLKYLDDVRLSCTLGFHTHAEELYYLNKSVSIMLGTTDLLRERFSLLSARLDLNVRNLSMIVEEMKAVDTQHGEILRNVTILRGAPGPPGPRGFKGDMGVKGPVGGRGPKGDPGSLGPLGPQGPQGQPGEAGPVGERGPVGPRGFPGLKGSKGSFGTGGPRGQPGPKGDIGPPGPEGPPGSPGPSGPQGKPGIAGKTGSPGQRGAMGPKGEPGIQGPPGLPGPPGPPGSQSFY

SEQ ID NO: 190143 - DNA, 1821 bp, Artificial Sequence
  derived and/or modified sequence
atgaaggtgagatccgcaggcggtgatggcgacgccctgtgcgttaccgaagaggacctggctggagacgacgaggatatgccaacattcccctgcacccagaaaggtcgccctggaccccggtgtagtaggtgtcaaaaaaacctgagtcttcacaccagcgtaagaatcttgtatctgtttttagctctattgttggtcgctgtggcagtgctggcatccctggtgtttcgaaaggtggactctctgtcagaggacatcagtttaacccaaagtatttatgacaaaaagcttgtgctgatgcaaaaaaatttgcaagggctcgatccgaaggcgctaaacaattgttccttctgccacgaggccggccaactcgggccagagatcagaaagctgcaagaggagctcgaaggcatccaaaagcttctgctggcgcaggaggttcagctggaccagaccctccaggctcaagaggtgctgtctacgacaagtcggcagataagccaggaaatggggtcttgctcattttccatccatcaagtcaatcaatcacttggtctctttctggcccaggtgcgaggctggcaagccaccaccgccggcctggatctgtcccttaaagatctaacccaagagtgttatgatgtaaaagctgcggttcaccagattaatttcaccgtcggccagacctctgagtggattcacggtattcagaggaagactgatgaggagacattaacattgcagaaaatcgttacagactggcagaactacacccggctcttcagtgggctacgcacaacaagcaccaaaactggcgaagcagtgaaaaacatccaggccactttaggggcatcaagccaacgaatcagccagaacagcgagagcatgcacgacctggtccttcaggtgatgggtcttcagcttcaactggataatatctcatcatttctggacgatcacgaagaaaatatgcatgatctacagtatcatactcactacgcccagaaccgaactgttgagcggttcgaatcattagagggtcggatggcaagccacgagatagagataggaaccatatttacgaacattaacgccacagataaccatgtacactctatgctgaaatacctcgacgacgtccgcctgtcctgcaccctggggttccacacacacgcggaagaactatattatctcaacaagagcgtgagtatcatgctgggtaccacagatctgctgcgggaacggttttccctgctgtcagcccgtctggacctgaacgtccgtaacctatccatgatcgtagaggagatgaaagcggtggacactcagcacggcgagattctgcggaacgttacaattttaagaggagcccccggaccccctggccctcgagggtttaagggagacatgggagttaagggtccagtgggcggccggggccccaaaggagacccgggcagtcttgggccattgggtccccagggaccccagggccagcccggcgaggctgggccagtgggagagagggggccagtcggacccaggggcttcccaggactgaaaggttcaaagggcagctttgggaccggcggccctagagggcagcccgggccaaagggagacatcggcccacctggtccggaggggccccctggatcccccgggccatctggcccccaggggaaacctggtattgcagggaagacggggagtcctggccaaaggggagcaatggggcccaagggagagcccgggattcagggtccccccggccttcctgggccacccggccccccgggatcccagtccttttattag

SEQ ID NO: 190144 - DNA, 1821 bp, Artificial Sequence
  derived and/or modified sequence
atgaaggtgcgctctgctggaggagatggagatgccctgtgtgtgacagaggaggacctggccggagatgatgaggacatgcccaccttcccctgcacccagaagggccggcccggcccccgctgcagccgctgccagaagaacctgagcctgcacacctctgtgcgcatcctgtacctgttcctggccctgctgctggtggccgtggccgtgctggccagcctggtgttcaggaaggtggacagcctgtctgaggacatcagcctgacccagagcatctatgacaagaagctggtgctgatgcagaagaacctgcagggcctggaccccaaggccctgaacaactgcagcttctgccacgaggccggccagctgggccctgagatcaggaagctgcaggaggagctggagggcatccagaagctgctgctggcccaggaggtgcagctggaccagaccctgcaggcccaggaggtgctgagcaccaccagccggcagatcagccaggagatgggcagctgcagcttcagcatccaccaggtgaaccagagcctgggcctcttcctggcccaggtgcggggctggcaggccaccacagctggcctggacctgagcctgaaggacctgacccaggagtgctatgatgtgaaggctgctgtgcaccagatcaacttcaccgtgggccagaccagcgagtggattcatggcatccagaggaagacagatgaggagaccctgaccctgcagaagatcgtgacagactggcagaactacaccaggctcttcagcggcctgcggaccaccagcaccaagacaggagaggccgtgaagaacatccaggccaccctgggcgccagcagccagaggatcagccagaacagcgagagcatgcatgacctggtgctgcaggtgatgggcctgcagctgcagctggacaacatcagcagcttcctggatgaccacgaggagaacatgcatgacctgcagtaccacacccactacgcccagaacagaacagtggagagatttgagagcctggagggccgcatggccagccatgaaattgaaattggcaccatcttcaccaacatcaatgccacagacaaccacgtgcacagcatgctgaagtacctggatgatgtgcggctgagctgcaccctgggcttccacacccatgctgaggagctgtactacctgaacaagtctgtgtccatcatgctgggcaccacagacctgctgcgggagcgcttcagcctgctgagcgcccggctggacctgaatgtgaggaacctgtccatgattgtggaggagatgaaggctgtggacacccagcacggggagatcctgagaaatgtgaccatcctgcggggggcccctggccccccaggcccccggggcttcaagggggacatgggcgtgaagggccctgtgggcggccggggccccaagggggaccccggcagcctgggccccctgggcccccagggcccccagggccagcctggagaggccggccctgtgggggagcggggccctgtgggcccccggggcttccctggcctgaagggcagcaagggcagctttggcaccggcggcccccggggccagcccggccccaagggggacatcggccccccaggccctgagggccccccaggcagccctggccccagcggcccccagggcaagccaggcattgctgggaagacaggcagccctggccagagaggagccatgggccccaagggggagcccggcatccagggccccccaggcctgcccggccccccaggccccccaggcagccagagcttctactag

SEQ ID NO: 190145 - DNA, 1821 bp, Artificial Sequence
  derived and/or modified sequence
atgaaggtgcggagcgccggcggcgacggcgacgccctgtgcgtgacagaggaggacctggccggtgatgacgaggacatgcctacattcccctgtactcagaagggccgccctgggccacggtgttcccggtgtcaaaaaaacctcagtctacacaccagcgttaggattctgtatctatttctagcactcctgctggtggccgtggcagttctggcttcccttgtgtttaggaaggtggatagcttgtctgaagacatttctctgacccagtccatttacgacaagaagctggtcttgatgcaaaagaacctacagggccttgacccaaaggcccttaacaattgttccttctgccatgaggcaggccagctcgggcccgagatcagaaagctacaagaggaactggaaggtatccagaaactcctcttggcacaggaagtccagctagatcagacactccaggctcaagaggtcctttccaccacctctcggcagatcagccaggaaatgggctcatgctcgttcagtatacaccaggtgaaccagagcctcggactctttctggcacaggtgaggggctggcaagccaccaccgcgggattggacctttctttaaaagatctgactcaggagtgttatgatgtgaaggccgccgttcaccaaattaactttactgtgggccaaacttcagagtggatccacggaattcaacggaagaccgacgaggagacgctgaccctgcagaaaattgtgaccgattggcaaaactacacacgcctcttcagcggcctccgcacgacttctacaaaaacaggcgaagcggtaaaaaacatccaggccacattgggcgcatcctctcagagaattagccagaacagcgaatcgatgcacgacctcgtgcttcaagtgatgggcttacagctccagctagacaatatttcgagtttcttggatgaccatgaggaaaatatgcacgatctccagtaccacacacactacgctcaaaataggaccgtagagcgtttcgaaagtctggaaggcagaatggccagccatgagatcgaaatagggaccatctttacgaatatcaacgcaactgacaaccacgtccattcgatgttgaagtatttggacgacgtgagacttagctgtacactcggcttccatacccacgcagaagagctttattatcttaataagagcgtttcaataatgctgggcacaacagacctgctgcgagaaagattttcactgctgtctgctcggcttgatttgaatgtgagaaacttgtccatgattgttgaggaaatgaaggctgtagatactcagcacggtgaaatactccgcaatgtcactatcctgaggggcgctcccggcccaccggggcccagaggctttaaaggagacatgggggtcaaagggcccgttgggggacggggacccaaaggcgacccgggctctctcggccccctgggaccgcagggtccgcaaggccagcccggggaagctggtcccgtcggcgagcgcgggccagtgggcccccgtggctttcctgggctgaaggggtccaaagggtcattcggtaccggagggcctcgcggacagccaggccctaagggcgacattggtccacctggcccagaaggcccccctggctcccctgggccaagtggtccccaggggaaaccaggaatcgccggcaaaacaggttcaccaggccaacgcggcgccatgggaccaaagggcgagcccggcatccagggaccccccggattgcccgggcctccgggcccacccggctcccagagcttttattag

SEQ ID NO: 190146 - DNA, 1821 bp, Artificial Sequence
  derived and/or modified sequence
atgaaagtgaggtccgccggtggagacggagacgcgctctgcgtgaccgaagaagatttagcaggggacgatgaggacatgcccacatttccctgtacccagaaagggcgtccagggccacggtgctctcgctgccagaaaaacctttcattgcatacctctgtgcgcatcctttacctgtttctggccttgctgctggtcgccgtcgccgtgttggcaagcctggtttttagaaaagtggacagtctctcagaggatatctccttaacgcagagtatttatgacaaaaaattggtgctgatgcagaagaatctgcagggcctagatcctaaagccttgaataactgctccttttgccatgaagccggacagctgggacccgagattcgtaagctgcaagaagagctggagggcatccaaaaattattgctggcccaggaggttcaactggaccagactctgcaggctcaggaggtcctctccacgacctcgagacagatcagccaggagatgggcagctgcagcttctcgattcaccaagtgaaccaatctcttgggcttttccttgcccaggtgaggggatggcaagccacgacggcaggcctggacctatcattgaaggacctgacgcaggagtgttatgacgttaaggccgcagttcaccagattaacttcaccgttgggcagaccagcgagtggattcatgggattcaacgcaagaccgacgaggaaacactgaccctgcaaaagattgtcaccgactggcagaactacactaggttattcagcgggcttagaaccacaagcactaagacgggagaggccgtgaaaaacatccaggctaccctgggtgcaagctctcagcggatatctcagaattctgagtcaatgcatgatctcgtcctgcaggtgatgggactgcagctgcaactggataacatctcaagctttctggatgatcacgaggagaatatgcatgatctccagtaccatactcactatgcacagaaccggaccgtggaaaggttcgaatccttggaaggcaggatggcgtcgcatgagatcgaaatcggcaccatttttaccaacatcaacgccacggacaaccacgtacacagcatgctaaagtatctagacgatgtgcgccttagctgtactctggggtttcacacacatgcggaggagctgtattatcttaacaaaagcgttagcattatgctaggaaccaccgatctgctgcgagaaagattcagtctgctgtccgccaggctcgacttaaatgtgcgaaacttgtcaatgatagtggaggagatgaaagctgtcgacacacaacacggcgagattcttcgaaacgtaaccatcctgaggggggctccgggaccacccggtcccaggggattcaagggagatatgggggtgaaagggccagtgggcggacgcggtccgaagggagaccccggatcacttggtccgctcggaccccaggggcctcaggggcagcctggcgaggctggaccggttggcgagagaggccctgtggggcctcgtggattccccggattaaagggaagtaagggttcctttgggaccgggggtccccgaggccagccaggccctaaaggcgatattggcccacctggccctgaaggaccacccggatcaccaggaccctccgggccacagggaaagccagggatagcaggaaaaaccggatcccccggtcagaggggtgctatgggacctaagggggaaccaggtattcaaggcccaccaggcctgccagggccacctggtcctcctggcagccagtcattctattag

SEQ ID NO: 190147 - DNA, 3510 bp, Artificial Sequence
  derived and/or modified sequence
aggccccagaggaagagaccatgaaagtgaggtcggccggcggcgatggagatgccttgtgcgttacagaagaggacctggcgggtgacgacgaggacatgccgaccttcccatgcacccagaagggccggccagggccccgctgcagccgctgccagaagaacctatctttgcacacatcggtgcggattctttacctcttcctggccctgctcctggtggccgtggctgtgttggcctctctggttttcagaaaagtggactctctctccgaagacatctccttgacccagtctatttatgacaagaagcttgtgttaatgcagaaaaatctccagggcctggatccgaaagccctgaacaactgctctttctgccatgaagctgggcagctggggccagagatccgaaaactgcaggaggagctggagggaattcagaagctgcttctggcccaggaggtgcagctggaccagaccttacaggcccaggaggtgctctccaccaccagcagacaaatctcccaggagatgggcagttgctccttctccatccaccaggttaaccagtctctggggctcttcctggcccaggtgagaggctggcaggccaccacagctggcctggacctctctctgaaggacctcacccaggagtgctacgatgtcaaggctgcagtgcaccagatcaacttcaccgtggggcagacttccgagtggatccacgggatccagcggaagacagacgaggagaccctgaccctccagaagattgtcaccgactggcagaactacacacggctcttcagcggcctgcgcaccacctccaccaagactggagaggcggtcaagaacatccaggccaccctgggggcctcctcacagcgcatcagccagaactcagagagcatgcacgacctggtactccaggtcatgggcttgcagctgcagctggataacatctcgtccttcctggatgaccacgaagagaacatgcatgatcttcagtaccatacccactacgcccagaaccgcactgtggagaggtttgagtctctggaaggacgcatggcttctcacgagattgaaattggcaccatcttcaccaacatcaatgccaccgacaaccacgtgcacagcatgctcaagtacctggatgacgtgcggctctcctgcacgctgggcttccacacccatgccgaggagctctactacctgaacaagtctgtctccatcatgctgggcaccacagacctgctccgggagcgcttcagcctgctcagtgcccggctggacctcaacgtccggaacctctccatgatcgtggaggagatgaaggcagtggacacacagcatggagaaatccttcgcaatgtcaccatcctacgaggtgcccccggccctccaggaccaagaggattcaaaggagatatgggcgtgaaagggcctgttggcggcagaggcccgaaaggagaccccggcagcttgggccccctgggaccccagggtcctcaggggcaacctggagaggccgggcctgtgggagaaaggggccctgttggccctcgagggttcccaggcctcaaaggctcaaagggcagctttggaactggagggccgagaggacagccaggcccaaaaggggacatagggcccccagggccagaagggcccccggggtctccagggccctcagggcctcagggaaaaccgggaattgcagggaagacagggtcaccaggccagcggggggccatggggcctaagggtgaaccagggatccagggtccccctggtctcccggggcctccaggtccaccaggaagccagagcttctactgaggagggctgtggcagagccactgtcacacagaatgccggaggggcgcagagcagatccaggccccagaaagcctcacctacagacagctgtggtcctctgattccaatgagggggctccccagggctgaccctgcagctttgggctcccccatagtgactgtgccataggaaagcagcccctcctcacacatacatgtgcacatgcacacacatgcatgcacacacatgcacacatacacgcacatgcacacatacacatgcatgcacacatacacaggcatacatgcatgcacacacacatgcacgcacacacacatgcacacatacacgtgcacacatacacaggcacacatgcatgcacacatacacatgcacacacacatgcacacatatatgcacaggcacacacatgtacgcacacacacatgcactgcacacatatccatgcacacaaacacatatatacacatgcacatacacagatttttctgctggccaggtgggccaactgggtttccctggctgggcaggaggagagggcagaggaagaccccctctcctgtgactgagcctgccagggaggcagctacctcgggaggaaggtctcacatctgtctctgggcacccatgctggccagcagtttcccagggctccctggggttgaaaagccccaaggaaacctttgcgggtggggcgttactgccaaaactccagaggcaaagtggacctggcaaccacaagaccctccccataagcaggggaccagcatacccgggagctgtccctgtctgtcacagcacagtggggccacgaggctgacattctctggccttgcacacagtgccccctgagaagttcaacatttatttcttcacgtgtccagaaaattcctcaattcatccttgcctctgcccttcaggagcagcctggaaggaatccaagcaggagtttcatctgcatgggggcactctgcaggccctggaacattgggcctgagtggagatgggagacagaggcaggccagaaggttctctctgcacagctgcctcccttgctctccctgaggctggcctgccccattccccaagggggctcctctggagtggtggggaggattaggctgcagaagggccaaccccttgcaacagggcagctctcgcctcccgcacacggctctcctgatcacagctgcatgccgaccttgtcccaccgggacccacaatggcccgagccctctttgcatgggcagccagctggactaggagtgggaagggcctggacactcacagaggccccctctgtcatcactccttggcacccaccaacttcctgcacacactggcagagaggggcgctgggaaatcaccccacagggtggaggtctcctgttggctacactctaaagctgctttgccttcatgttcaaacagattcaggcaccaccccctccaccgcccgcaaggttagggcatagagttgtctccttcccaacacggacccagagagcagcccttccctgctcaaagcctttccgcaccctcctgactgtcctggatgtgcaactggtttgcactgcacaccccacggccatgtaactctcctgtccacatatgataataccattctgcatagtattactgactcagtaaagagctatttccaggagt

SEQ ID NO: 190148 - DNA, 1821 bp, Artificial Sequence
  derived and/or modified sequence
atgaaggtgagaagcgccggcggcgacggcgacgccctgtgcgtgaccgaggaggacctggccggcgacgacgaggacatgcccaccttcccctgcacccagaagggcagacccggccccagatgcagcagatgccagaagaacctgagcctgcacaccagcgtgagaatcctgtacctgttcctggccctgctgctggtggccgtggccgtgctggccagcctggtgttcagaaaggtggacagcctgagcgaggacatcagcctgacccagagcatctacgacaagaagctggtgctgatgcagaagaacctgcagggcctggaccccaaggccctgaacaactgcagcttctgccacgaggccggccagctgggccccgagatcagaaagctgcaggaggagctggagggcatccagaagctgctgctggcccaggaggtgcagctggaccagaccctgcaggcccaggaggtgctgagcaccaccagcagacagatcagccaggagatgggcagctgcagcttcagcatccaccaggtgaaccagagcctgggcctgttcctggcccaggtgagaggctggcaggccaccaccgccggcctggacctgagcctgaaggacctgacccaggagtgctacgacgtgaaggccgccgtgcaccagatcaacttcaccgtgggccagaccagcgagtggatccacggcatccagagaaagaccgacgaggagaccctgaccctgcagaagatcgtgaccgactggcagaactacaccagactgttcagcggcctgagaaccaccagcaccaagaccggcgaggccgtgaagaacatccaggccaccctgggcgccagcagccagagaatcagccagaacagcgagagcatgcacgacctggtgctgcaggtgatgggcctgcagctgcagctggacaacatcagcagcttcctggacgaccacgaggagaacatgcacgacctgcagtaccacacccactacgcccagaacagaaccgtggagagattcgagagcctggagggcagaatggccagccacgagatcgagatcggcaccatcttcaccaacatcaacgccaccgacaaccacgtgcacagcatgctgaagtacctggacgacgtgagactgagctgcaccctgggcttccacacccacgccgaggagctgtactacctgaacaagagcgtgagcatcatgctgggcaccaccgacctgctgagagagagattcagcctgctgagcgccagactggacctgaacgtgagaaacctgagcatgatcgtggaggagatgaaggccgtggacacccagcacggcgagatcctgagaaacgtgaccatcctgagaggcgcccccggcccccccggccccagaggcttcaagggcgacatgggcgtgaagggccccgtgggcggcagaggccccaagggcgaccccggcagcctgggccccctgggcccccagggcccccagggccagcccggcgaggccggccccgtgggcgagagaggccccgtgggccccagaggcttccccggcctgaagggcagcaagggcagcttcggcaccggcggccccagaggccagcccggccccaagggcgacatcggcccccccggccccgagggcccccccggcagccccggccccagcggcccccagggcaagcccggcatcgccggcaagaccggcagccccggccagagaggcgccatgggccccaagggcgagcccggcatccagggcccccccggcctgcccggcccccccggcccccccggcagccagagcttctactag

SEQ ID NO: 190149 - protein, 300 aa, Artificial Sequence
  derived and/or modified sequence
MKFLLDILLLLPLLIVCSLESFVKLFIPKRRKSVTGEIVLITGAGHGIGRLTAYEFAKLKSKLVLWDINKHGLEETAAKCKGLGAKVHTFVVDCSNREDIYSSAKKVKAEIGDVSILVNNAGVVYTSDLFATQDPQIEKTFEVNVLAHFWTTKAFLPAMTKNNHGHIVTVASAAGHVSVPFLLAYCSSKFAAVGFHKTLTDELAALQITGVKTTCLCPNFVNTGFIKNPSTSLGPTLEPEEVVNRLMHGILTEQKMIFIPSSIAFLTTLERILPERFLAVLKQKISVKFDAVIGYKMKAQ

SEQ ID NO: 190150 - DNA, 903 bp, Artificial Sequence
  derived and/or modified sequence
atgaaattcttacttgacatcctgctgcttctgcctttgctcatcgtatgttcacttgagtccttcgtgaagctttttattccgaagcgccgaaagtccgtgacaggtgagatagttcttattacaggggctgggcatggaataggccggctgacggcttacgagtttgccaagctgaaaagtaagctcgtgctctgggacattaataagcacggcttagaggagaccgctgcaaagtgcaaaggcctcggagccaaggtgcacaccttcgtggtcgactgtagtaacagggaggacatctacagctccgcgaagaaggtgaaggcggagatcggggacgtttcgatcctcgtaaataacgccggggtggtttacacttctgatctcttcgctacccaagacccccagatagagaagacattcgaagtaaacgtacttgcacatttttggacaactaaggcattcctgccagccatgaccaagaacaaccatgggcatatagtgactgtcgcaagcgcggccgggcacgtttcagtcccttttctgctggcctactgtagcagcaagtttgcagcagtgggattccacaagaccctgacagatgagctggctgcactacaaatcacaggcgtgaaaactacttgtctgtgtccgaattttgttaacaccggttttatcaagaatccgtccacttccctcggacccaccctggagccagaggaggtcgttaaccggttaatgcacggtattctgactgaacagaagatgattttcatcccttcatctattgccttcttgaccactctggagaggatcctgcctgagaggtttctcgcggtgttgaagcagaagatctcggtgaagtttgacgccgtgattggatacaaaatgaaggcccaatag

SEQ ID NO: 190151 - DNA, 1885 bp, Artificial Sequence
  derived and/or modified sequence
tggtgtaaaagacaatcgcggccacacaccgcgtgggggctgcgcaaagcagaactaggaagctttgctccggtctggacttcgtccctcccagatctctgagctagcaagcactgcagcccgagccaattgcgaaagaccaacaaagcccagcccagcggaaggaacggtttcggagttgtttttctttgatacgggagttcctccttgctctcgcccctactctttctggtgttagatcgagctaccctctaaaagcagtttagagtggtaaaaaaaaaaaaaaacacaccaaacgctcgcagccacaaaagggatgaaatttcttctggacatcctcctgcttctcccgttactgatcgtctgctccctagagtccttcgtgaagctttttattcctaagaggagaaaatcagtcaccggcgaaatcgtgctgattacaggagctgggcatggaattgggagactgactgcctatgaatttgctaaacttaaaagcaagctggttctctgggatataaataagcatggactggaggaaacagctgccaaatgcaagggactgggtgccaaggttcatacctttgtggtagactgcagcaaccgagaagatatttacagctctgcaaagaaggtgaaggcagaaattggagatgttagtattttagtaaataatgctggtgtagtctatacatcagatttgtttgctacacaagatcctcagattgaaaagacttttgaagttaatgtacttgcacatttctggactacaaaggcatttcttcctgcaatgacgaagaataaccatggccatattgtcactgtggcttcggcagctggacatgtctcggtccccttcttactggcttactgttcaagcaagtttgctgctgttggatttcataaaactttgacagatgaactggctgccttacaaataactggagtcaaaacaacatgtctgtgtcctaatttcgtaaacactggcttcatcaaaaatccaagtacaagtttgggacccactctggaacctgaggaagtggtaaacaggctgatgcatgggattctgactgagcagaagatgatttttattccatcttctatagcttttttaacaacattggaaaggatccttcctgagcgtttcctggcagttttaaaacaaaaaatcagtgttaagtttgatgcagttattggatataaaatgaaagcgcaataagcacctagttttctgaaaactgatttaccaggtttaggttgatgtcatctaatagtgccagaattttaatgtttgaacttctgttttttctaattatccccatttcttcaatatcatttttgaggctttggcagtcttcatttactaccacttgttctttagccaaaagctgattacatatgatataaacagagaaatacctttagaggtgactttaaggaaaatgaagaaaaagaaccaaaatgactttattaaaataatttccaagattatttgtggctcacctgaaggctttgcaaaatttgtaccataaccgtttatttaacatatatttttatttttgattgcacttaaattttgtataatttgtgtttctttttctgttctacataaaatcagaaacttcaagctctctaaataaaatgaaggactatatctagtggtatttcacaatgaatatcatgaactctcaatgggtaggtttcatcctacccattgccactctgtttcctgagagatacctcacattccaatgccaaacatttctgcacagggaagctagaggtggatacacgtgttgcaagtataaaagcatcactgggatttaaggagaattgagagaatgtacccacaaatggcagcaataataaatggatcacacttaaa

SEQ ID NO: 190152 - DNA, 903 bp, Artificial Sequence
  derived and/or modified sequence
atgaagttcctgctggacatcctgctgctgctgcccctgctgattgtgtgcagcctggagagctttgtgaagctgttcatccccaagaggaggaagtctgtgactggagagatcgtgctgatcaccggggccggccacggcatcggccgcctgacagcctatgaatttgccaagctgaagagcaagctggtgctgtgggacatcaacaagcacggcctggaggagacagctgccaagtgcaagggcctgggcgccaaggtgcacacctttgtggtggactgcagcaaccgggaggacatctacagcagcgccaagaaggtgaaggccgagattggagatgtgtccatcctggtgaacaatgccggcgtggtgtacaccagtgacctgtttgccacccaggacccccagatcgagaagacctttgaggtgaatgtgctggcccacttctggaccaccaaggccttcctgcctgccatgaccaagaacaaccacggccacatcgtgacagtggccagcgctgctggccacgtgtctgtgcccttcctgctggcctactgcagcagcaagtttgctgctgtgggcttccacaagaccctgacagatgagctggccgccctgcagatcactggagtgaagaccacctgcctgtgccccaactttgtgaacacaggcttcatcaagaaccccagcaccagcctgggccccaccctggagcctgaggaggtggtgaaccggctgatgcacggcatcctgacagagcagaagatgatcttcatccccagcagcatcgccttcctgaccaccctggagcgcatcctgcctgagcgcttcctggccgtgctgaagcagaagatctctgtgaagtttgatgctgtgattggctacaagatgaaggcccagtag

SEQ ID NO: 190153 - DNA, 903 bp, Artificial Sequence
  derived and/or modified sequence
atgaagttcctgctggacatcctgctgctgctgcccctgctgatcgtttgtagtctggagagtttcgttaaattgttcattccaaagcgccgaaaatcagtcactggcgagatagtcttaatcacaggtgccggacatggaatcgggagactcaccgcctatgagtttgcgaaattgaagtcaaaacttgtgctgtgggatattaacaagcacggactcgaggagactgctgccaaatgtaaggggcttggggcgaaagtgcacacatttgttgttgactgctcgaaccgggaagacatctattcgtcggcaaaaaaggtgaaggctgagatcggcgatgttagcatcctggttaataacgccggggtggtgtatacatctgatcttttcgccacccaggaccctcagatcgagaagacatttgaggtgaacgttctggctcacttctggaccacgaaggcatttcttcccgccatgacaaaaaacaaccatgggcacattgtgactgtcgccagcgctgcaggacacgtcagcgtgccttttctcctggcctattgtagctcgaagttcgcggcagtcggattccacaagaccctgactgacgaattggctgcgctccagattacaggggttaaaacaacctgtctgtgtcccaattttgtgaatactgggttcatcaagaacccttccacatcactgggacccaccttagagcctgaggaggttgtcaacaggcttatgcacgggatattaaccgagcagaaaatgattttcataccgtcgtcgattgcattcctcactacgctcgaacggatcctccccgagcgctttctcgccgtcctgaagcaaaagattagtgtgaagtttgatgcagtgataggttacaaaatgaaggcccagtag

SEQ ID NO: 190154 - DNA, 903 bp, Artificial Sequence
  derived and/or modified sequence
atgaagttcctgttggacatcctccttctattgcctcttttaatagtgtgctctctggagtcttttgttaaactgtttatcccgaagcggcgaaaatccgtgaccggggagatcgtgctgatcacaggagctggccacggaattgggaggcttaccgcttatgagttcgctaaattgaaatctaagttagtgctctgggatataaacaaacatggccttgaggaaaccgccgcaaaatgcaaggggctaggcgctaaagtgcatacgttcgtagttgactgcagcaacagggaggatatctactcctcagctaagaaggttaaggcggagattggagacgtaagtatcctggtgaacaacgccggagttgtctatacctctgacctgttcgccacccaggacccacagatcgagaagacctttgaagtgaacgtccttgcccacttttggacgaccaaggccttcttacctgccatgacaaagaataatcatggccacatcgtgactgtagccagcgcggcaggacatgtctcagtgcccttccttctggcttactgtagcagcaagttcgctgcggtcgggttccataaaaccctgaccgacgagctcgctgcccttcagatcacaggggtaaagacgacatgtctgtgtcctaactttgtaaatacaggttttatcaaaaacccctctacctctctgggtcccactctagaacctgaggaagtggtgaaccggctcatgcatggaattttaacggagcagaagatgatcttcatccctagctcgatcgcatttctgaccactctagaaagaattctgccggagcgctttctagctgtcctcaagcagaagatcagtgtcaagttcgacgcagtcattggatacaagatgaaagctcagtag

SEQ ID NO: 190155 - DNA, 903 bp, Artificial Sequence
  derived and/or modified sequence
atgaagttcctgctggacatcctgctgctgctgcccctgctgatcgtgtgcagcctggagagcttcgtgaagctgttcatccccaagagaagaaagagcgtgaccggcgagatcgtgctgatcaccggcgccggccacggcatcggcagactgaccgcctacgagttcgccaagctgaagagcaagctggtgctgtgggacatcaacaagcacggcctggaggagaccgccgccaagtgcaagggcctgggcgccaaggtgcacaccttcgtggtggactgcagcaacagagaggacatctacagcagcgccaagaaggtgaaggccgagatcggcgacgtgagcatcctggtgaacaacgccggcgtggtgtacaccagcgacctgttcgccacccaggacccccagatcgagaagaccttcgaggtgaacgtgctggcccacttctggaccaccaaggccttcctgcccgccatgaccaagaacaaccacggccacatcgtgaccgtggccagcgccgccggccacgtgagcgtgcccttcctgctggcctactgcagcagcaagttcgccgccgtgggcttccacaagaccctgaccgacgagctggccgccctgcagatcaccggcgtgaagaccacctgcctgtgccccaacttcgtgaacaccggcttcatcaagaaccccagcaccagcctgggccccaccctggagcccgaggaggtggtgaacagactgatgcacggcatcctgaccgagcagaagatgatcttcatccccagcagcatcgccttcctgaccaccctggagagaatcctgcccgagagattcctggccgtgctgaagcagaagatcagcgtgaagttcgacgccgtgatcggctacaagatgaaggcccagtag

SEQ ID NO: 190156 - protein, 270 aa, Artificial Sequence
  derived and/or modified sequence
MATGTRYAGKVVVVTGGGRGIGAGIVRAFVNSGARVVICDKDESGGRALEQELPGAVFILCDVTQEDDVKTLVSETIRRFGRLDCVVNNAGHHPPPQRPEETSAQGFRQLLELNLLGTYTLTKLALPYLRKSQGNVINISSLVGAIGQAQAVPYVATKGAVTAMTKALALDESPYGVRVNCISPGNIWTPLWEELAALMPDPRATIREGMLAQPLGRMGQPAEVGAAAVFLASEANFCTGIELLVTGGAELGYGCKASRSTPVDAPDIPS

SEQ ID NO: 190157 - DNA, 813 bp, Artificial Sequence
  derived and/or modified sequence
atggcgacgggaacccgatatgcgggaaaggtcgtcgtggttacagggggagggaggggaatcggagctgggatcgttcgcgcatttgtcaatagcggtgcaagagtggtgatctgcgataaagatgagagcggggggcgagctctggagcaggagttaccaggagccgtgtttatcctctgcgatgttacccaggaggacgacgtcaaaaccctagtctcagaaacaatcaggagatttggacgtctcgactgtgtggttaataatgccggccaccacccgcctccccaacgcccggaggagacgagcgcccagggattccggcagctccttgaactcaatcttctcggcacgtatactctgactaaactggcgttgccctatctgagaaaatcccagggaaatgtgatcaatattagtagtctagtgggggccataggacaagcccaagcggtcccttacgtggccaccaagggcgctgtgactgctatgactaaagctctggccttagacgaaagcccgtatggtgtacgggtaaattgcatcagccccggtaatatttggacacccctgtgggaagagttggccgcacttatgccagatccaagagcaaccatccgagaaggtatgctggcgcagccgctggggaggatgggacaaccagcggaagtgggagcggctgccgtgttcctggcctccgaagcaaacttttgcacgggaatagaactccttgtcactggcggtgccgagttaggatatggatgcaaagctagccgaagcaccccagtggacgccccggacatcccttcttag

SEQ ID NO: 190158 - DNA, 1232 bp, Artificial Sequence
  derived and/or modified sequence
ggaggagggactgaggcttctggattcctgggtctgtgggaggagggactggggctcctggattcctgggtctgtgggaagagaggagtgtctgagggaggaggggctggggacaaacttccaggtctctagccttcctggcaacgccccccgaggccggacttccaggatccagcctctattgaggatttgatgcgacggcctcacggggctttggaggtgaaagaggcccagagtagagagagagagagaccgacgtacacgggatggctacgggaacgcgctatgccgggaaggtggtggtcgtgaccgggggcgggcgcggcatcggagctgggatcgtgcgcgccttcgtgaacagcggggcccgagtggttatctgcgacaaggatgagtctgggggccgggccctggagcaggagctccctggagctgtctttatcctctgtgatgtgactcaggaagatgatgtgaagaccctggtttctgagaccatccgccgatttggccgcctggattgtgttgtcaacaacgctggccaccacccacccccacagaggcctgaggagacctctgcccagggattccgccagctgctggagctgaacctactggggacgtacaccttgaccaagctcgccctcccctacctgcggaagagtcaagggaatgtcatcaacatctccagcctggtgggggcaatcggccaggcccaggcagttccctatgtggccaccaagggggcagtaacagccatgaccaaagctttggccctggatgaaagtccatatggtgtccgagtcaactgtatctccccaggaaacatctggaccccgctgtgggaggagctggcagccttaatgccagaccctagggccacaatccgagagggcatgctggcccagccactgggccgcatgggccagcccgctgaggtcggggctgcggcagtgttcctggcctccgaagccaacttctgcacgggcattgaactgctcgtgacggggggtgcagagctggggtacgggtgcaaggccagtcggagcacccccgtggacgcccccgatatcccttcctgatttctctcatttctacttggggcccccttcctaggactctcccaccccaaactccaacctgtatcagatgcagcccccaagcccttagactctaagcccagttagcaaggtgccgggtcaccctgcaggttcccataaaaacgatttgcagcc

SEQ ID NO: 190159 - DNA, 813 bp, Artificial Sequence
  derived and/or modified sequence
atggccaccggcaccaggtatgctgggaaggtggtggtggtgactggaggcggccggggcattggagctggcatcgtgcgggcctttgtgaacagcggggcccgggtggtgatctgtgacaaggatgagagcggcggccgggccctggagcaggagctgcccggggctgtgttcatcctgtgtgatgtgacccaggaggatgatgtgaagaccctggtgtctgagaccatccgccgcttcggccgcctggactgtgtggtgaacaatgccggccaccaccccccaccccagaggcctgaggagaccagcgcccagggcttccggcagctgctggagctgaacctgctgggcacctacaccctgaccaagctggccctgccctacctgaggaagagccagggcaatgtcatcaacatcagcagcctggtgggcgccatcggccaggcccaggccgtgccctacgtggccaccaagggagctgtgacagccatgaccaaggccctggccctggatgagagcccctatggagtgcgggtgaactgcatcagccctggcaacatctggacccccctgtgggaggagctggccgccctgatgccagacccccgggccaccatccgggagggcatgctggcccagcccctgggccgcatgggccagcctgctgaggtgggcgctgctgctgtgttcctggccagcgaggccaacttctgcacaggaattgagctgctggtgactggaggagctgagctgggctacggctgcaaggccagccgcagcacccctgtggatgccccagacatccccagctag

SEQ ID NO: 190160 - DNA, 813 bp, Artificial Sequence
  derived and/or modified sequence
atggccaccggcacccggtacgccggcaaggtggtggtggtgaccggcggaggtcgtggaattggagctggcatcgtacgggcgtttgtaaatagcggagcaagagtggtaatctgtgataaggatgagagcggaggacgggctctcgaacaggagcttcctggcgcggtctttatactgtgcgatgtgactcaagaggatgatgttaaaaccctggtgagcgagactatccgtcgcttcggccgcctggactgtgtggtcaacaatgcgggacaccacccgcccccgcagaggccggaagagacttctgcgcagggctttagacaactgctggagcttaacctgctcggcacttacacactcacaaagttagccctcccctatttgaggaaatcacagggaaacgttatcaacatctcgtcgctggttggagctatcgggcaagcacaggcagttccatacgtcgcaaccaaaggcgccgtcaccgcgatgactaaagcattagccctcgatgaatcaccatatggagtgagggtgaactgtatctctcccggcaatatatggacacctctgtgggaagagctggccgcgctcatgcctgatcctcgggccaccatcagggaaggtatgctcgctcagcccctaggccgcatgggccagccggccgaagttggtgccgccgccgtgtttcttgcctcagaggcaaatttttgtactgggatcgagctgttggtgaccggaggtgccgagctgggctacggctgcaaagccagcagatctacgcctgttgatgcacccgacattccctcctag

SEQ ID NO: 190161 - DNA, 813 bp, Artificial Sequence
  derived and/or modified sequence
atggctacaggaacacgctacgccggtaaggtggtagtggtgacgggcggaggacggggaatcggggctggtatcgtgcgcgctttcgtgaatagcggagctcgcgttgtcatttgtgacaaagacgagtcaggcggaagggccctcgaacaggagcttcctggtgcagtcttcatattgtgtgacgtaacacaggaggatgatgtaaaaactctcgtgagcgaaacgatccgcagattcggtcgtctcgactgcgtggtgaataacgctggccaccacccgccacctcagcggccagaagagacctccgcacaggggttccggcagttattagagctcaacctgctggggacctatacgctcaccaaactagccctgccatatctcagaaagtcacagggcaacgtgattaacatttcaagtctcgtaggggcaatcggccaagctcaggctgttccatatgtggccacaaagggtgcggtcaccgctatgacaaaagccctggccctcgatgagtccccttatggggtgcgggtgaattgtattagcccgggaaatatctggacccccctgtgggaggagctggctgccctaatgcctgacccacgtgccacaattagagagggtatgcttgcccagcccctgggtcggatgggccagcccgctgaagtgggtgcagctgctgtgttccttgcttccgaggccaatttttgcaccgggattgagctcctcgtgaccgggggtgcagaactagggtacggttgcaaagcgtcacgctctacccccgtagacgcccctgacattccttcttag

SEQ ID NO: 190162 - DNA, 813 bp, Artificial Sequence
  derived and/or modified sequence
atggccaccggcaccagatacgccggcaaggtggtggtggtgaccggcggcggcagaggcatcggcgccggcatcgtgagagccttcgtgaacagcggcgccagagtggtgatctgcgacaaggacgagagcggcggcagagccctggagcaggagctgcccggcgccgtgttcatcctgtgcgacgtgacccaggaggacgacgtgaagaccctggtgagcgagaccatcagaagattcggcagactggactgcgtggtgaacaacgccggccaccacccccccccccagagacccgaggagaccagcgcccagggcttcagacagctgctggagctgaacctgctgggcacctacaccctgaccaagctggccctgccctacctgagaaagagccagggcaacgtgatcaacatcagcagcctggtgggcgccatcggccaggcccaggccgtgccctacgtggccaccaagggcgccgtgaccgccatgaccaaggccctggccctggacgagagcccctacggcgtgagagtgaactgcatcagccccggcaacatctggacccccctgtgggaggagctggccgccctgatgcccgaccccagagccaccatcagagagggcatgctggcccagcccctgggcagaatgggccagcccgccgaggtgggcgccgccgccgtgttcctggccagcgaggccaacttctgcaccggcatcgagctgctggtgaccggcggcgccgagctgggctacggctgcaaggccagcagaagcacccccgtggacgcccccgacatccccagctag

SEQ ID NO: 190163 - protein, 1241 aa, Artificial Sequence
  derived and/or modified sequence
MIMFPLFGKISLGILIFVLIEGDFPSLTAQTYLSIEEIQEPKSAVSFLLPEESTDLSLATKKKQPLDRRETERQWLIRRRRSILFPNGVKICPDESVAEAVANHVKYFKVRVCQEAVWEAFRTFWDRLPGREEYHYWMNLCEDGVTSIFEMGTNFSESVEHRSLIMKKLTYAKETVSSSELSSPVPVGDTSTLGDTTLSVPHPEVDAYEGASESSLERPEESISNEIENVIEEATKPAGEQIAEFSIHLLGKQYREELQDSSSFHHQHLEEEFISEVENAFTGLPGYKEIRVLEFRSPKENDSGVDVYYAVTFNGEAISNTTWDLISLHSNKVENHGLVELDDKPTVVYTISNFRDYIAETLQQNFLLGNSSLNPDPDSLQLINVRGVLRHQTEDLVWNTQSSSLQATPSSILDNTFQAAWPSADESITSSIPPLDFSSGPPSATGRELWSESPLGDLVSTHKLAFPSKMGLSSSPEVLEVSSLTLHSVTPAVLQTGLPVASEERTSGSHLVEDGLANVEESEDFLSIDSLPSSSFTQPVPKETIPSMEDSDVSLTSSPYLTSSIPFGLDSLTSKVKDQLKVSPFLPDASMEKELIFDGGLGSGSGQKVDLITWPWSETSSEKSAEPLSKPWLEDDDSLLPAEIEDKKLVLVDKMDSTDQISKHSKYEHDDRSTHFPEEEPLSGPAVPIFADTAAESASLTLPKHISEVPGVDDYSVTKAPLILTSVAISASTDKSDQADAILREDMEQITESSNYEWFDSEVSMVKPDMQTLWTILPESERVWTRTSSLEKLSRDILASTPQSADRLWLSVTQSTKLPPTTISTLLEDEVIMGVQDISLELDRIGTDYYQPEQVQEQNGKVGSYVEMSTSVHSTEMVSVAWPTEGGDDLSYTQTSGALVVFFSLRVTNMMFSEDLFNKNSLEYKALEQRFLELLVPYLQSNLTGFQNLEILNFRNGSIVVNSRMKFANSVPPNVNNAVYMILEDFCTTAYNTMNLAIDKYSLDVESGDEANPCKFQACNEFSECLVNPWSGEAKCRCFPGYLSVEERPCQSLCDLQPDFCLNDGKCDIMPGHGAICRCRVGENWWYRGKHCEEFVSEPVIIGITIASVVGLLVIFSAIIYFFIRTLQAHHDRSERESPFSGSSRQPDSLSSIENAVKYNPVYESHRAGCEKYEGPYPQHPFYSSASGDVIGGLSREEIRQMYESSELSREEIQERMRVLELYANDPEFAAFVREQQVEEV

SEQ ID NO: 190164 - protein, 66 aa, Artificial Sequence
  derived and/or modified sequence
GYLSVEERPCQSLCDLQPDFCLNDGKCDIMPGHGAICSGSSRQPDSLSSIENAVKYNPVYESHRAG

SEQ ID NO: 190165 - DNA, 3726 bp, Artificial Sequence
  derived and/or modified sequence
atgataatgtttccgctgtttggaaaaatttcactggggatcctaatttttgttctgattgaaggcgacttcccaagcctcacggctcaaacctacctgtccattgaggagatccaggagccgaagtctgcggtgtccttcttgctgcccgaggagtctaccgatttgtctctggctacaaagaagaagcaacctctggatagaagggaaaccgagcgacaatggctcatccggagaagaaggtccattctttttcccaatggcgtcaaaatctgtccagatgaatctgtggcagaggctgtggctaatcacgtgaaatatttcaaagtccgagtgtgccaggaggccgtgtgggaggcttttcgaaccttctgggataggttaccaggccgagaagagtatcactactggatgaacttatgtgaggacggtgtaacgtctatttttgaaatgggaacaaacttttccgagtccgttgagcaccgctcactgattatgaaaaagctgacatacgccaaggaaacagtgagctcttccgaactcagttcacccgtcccggtcggtgacacttctactctcggagatactactctgtccgtgccacaccccgaggtggatgcgtacgaaggagcaagtgaatctagtttggaaagacctgaggagtctatcagcaacgagattgagaatgtgattgaggaagcaactaaaccagccggggagcagattgccgagttctctatccatctgctcgggaagcagtatcgcgaggaactgcaggacagttcctcgttccaccaccagcacttggaggaggagttcatcagcgaggtcgagaacgccttcacggggctgccggggtacaaagagattcgggtgctggaattccgctctccaaaggagaacgattccggtgtggatgtctactacgccgtgacattcaacggtgaggcgatcagtaacacgacctgggacctaatctcgctgcacagcaacaaggtagaaaaccacggtttggtagagctagacgacaagcccacagtggtctatactatatctaatttccgggattacatcgcagaaaccttgcagcagaatttccttctgggcaattcttcactcaaccccgaccctgactccctccaactcatcaacgtgcgtggagttctgcggcaccaaacggaggacctggtctggaatacacagagcagttccttgcaagcaacaccttcttccatcttagacaatacgttccaagctgcctggccgtcggctgacgagtccatcacaagcagtattccaccgctggacttctctagtgggccaccctctgccactggccgggaactgtggtctgagagtcccctgggagatctggtgagcacccataagcttgccttcccatccaagatggggctgagcagctctcccgaggtcctcgaagtaagcagtctgaccctacactctgttacccccgccgttctccaaacggggctgccagtggccagtgaagagcgcacgagcggatctcacctggttgaagatggactagcgaatgtggaagagtctgaggatttcctgtcgatcgactccttacccagtagttccttcactcagccagtgcctaaggaaaccatccccagtatggaggattctgacgtgagcttgacctccagtccttatctgactagcagcataccgtttgggctcgacagtttgacgagtaaagtgaaggaccagctgaaggtcagccccttcctgcccgatgccagtatggagaaggagttgatatttgacgggggtctaggcagcggcagcggtcagaaagtggacctcataacgtggccatggagcgagacctcaagtgaaaaaagcgcggaaccattgtcaaagccctggctggaagacgatgattccctgttgcctgccgaaattgaggacaagaagctggttttggtggataaaatggattccacagatcaaatttccaagcactctaaatacgagcacgatgacagaagcacccatttccccgaggaggaacctttatctggccccgccgtgccaatcttcgccgacacagctgccgaaagtgcctctctgacactacccaaacacatctccgaggtgccgggagtggatgactactccgtgacaaaggcccccctaattctgacatccgtcgccatctccgcttctaccgacaagtctgatcaggcggatgctattctgcgcgaagatatggaacagataacagagtcctccaactacgagtggttcgattctgaagtgtctatggtgaagcccgacatgcaaactctatggacgatcctgcccgagagtgagagagtgtggacaagaaccagcagtttagaaaagctctcacgagacatcttggccagtactccccaaagtgctgatcggttatggctttccgtcacccagtctacaaagctcccacctaccactatatctaccctcctggaggatgaggtgattatgggcgtgcaggatatttccctagagctagacaggattggcactgattattaccagcctgagcaggtgcaggagcagaacggtaaggtgggaagttatgtggaaatgtcaaccagcgtccacagcacagaaatggtgtcagttgcttggcccaccgaaggcggtgacgatttgtcctatacccaaaccagcggggcactagttgtgttttttagcctgagagtcaccaatatgatgttttccgaagatctttttaataaaaattctctcgaatacaaagctttggaacagcgatttcttgaactgcttgtgccctacctgcagtctaatttgaccggctttcaaaacctggagatcctcaatttcaggaacggaagtatagtggtgaattcaagaatgaagtttgccaactctgtgccccctaatgtgaataacgccgtgtacatgatcctcgaggatttttgtaccaccgcttacaacactatgaacctggcaatcgacaagtacagcctggacgtcgaatccggcgatgaggcgaacccttgcaaattccaggcatgtaacgaattctcggagtgtctcgtcaatccttggtcaggtgaggccaagtgtagatgctttcccggctatctctctgtagaggagcgcccgtgtcagagcctgtgtgatctgcagccagacttctgtctgaacgacggaaagtgcgacatcatgcctggacacggggctatctgcagatgtagagttggcgagaactggtggtataggggcaaacactgcgaagaatttgtgtcggagcccgttatcatcggaattacaatcgcgtccgtggtgggcctgcttgtgatcttctcagccataatttactttttcattcgaaccttgcaggcgcaccacgatcggagcgaacgagagtcacctttcagcggaagcagtcggcaacctgactccttgtcgagtattgaaaacgccgtcaagtacaatcctgtttacgaatcacatagggctggctgtgagaagtatgagggcccttacccgcagcatcctttctattcatctgcctctggtgacgtgataggagggctgtctcgtgaggagatccgacagatgtatgaaagcagcgagctttcccgggaggagatccaggagagaatgagggttctagaactgtacgcaaatgaccccgagtttgccgcttttgtgagagagcagcaggtcgaagaggtatag

SEQ ID NO: 190166 - DNA, 4157 bp, Artificial Sequence
  derived and/or modified sequence
gctactttgaaaggacaaccatttttctttccgctaatttataatggttttgaagtggttgttcattctcaaacatagacttttaaatgttaggtctttcctataactctttgttattggaagtttcaaggatttggacactcaattaaggattctgtcctctcctcattcctttggttttggcccaaatgattatgtttcctctttttgggaagatttctctgggtattttgatatttgtcctgatagaaggagactttccatcattaacagcacaaacctacttatctatagaggagatccaagaacccaagagtgcagtttcttttctcctgcctgaagaatcaacagacctttctctagctaccaaaaagaaacagcctctggaccgcagagaaactgaaagacagtggttaatcagaaggcggagatctattctgtttcctaatggagtgaaaatctgcccagatgaaagtgttgcagaggctgtggcaaatcatgtgaagtattttaaagtccgagtgtgtcaggaagctgtctgggaagccttcaggactttttgggatcgacttcctgggcgtgaggaatatcattactggatgaatttgtgtgaggatggagtcacaagtatatttgaaatgggcacaaattttagtgaatctgtggaacatagaagcttaatcatgaagaaactgacttatgcaaaggaaactgtaagcagctctgaactgtcttctccagttcctgttggtgatacttcaacattgggagacactactctcagtgttccacatccagaggtggacgcctatgaaggtgcctcagagagcagcttggaaaggccagaggagagtattagcaatgaaattgagaatgtgatagaagaagccacaaaaccagcaggtgaacagattgcagaattcagtatccaccttttggggaagcagtacagggaagaactacaggattcctccagctttcaccaccagcaccttgaagaagaatttatttcagaggttgaaaatgcatttactgggttaccaggctacaaggaaattcgtgtacttgaatttaggtcccccaaggaaaatgacagtggcgtagatgtttactatgcagttaccttcaatggtgaggccatcagcaataccacctgggacctcattagccttcactccaacaaggtggaaaaccatggccttgtggaactggatgataaacccactgttgtttatacaatcagtaacttcagagattatattgctgagacattgcagcagaattttttgctggggaactcttccttgaatccagatcctgattccctgcagcttatcaatgtgagaggagttttgcgtcaccaaactgaagatctagtttggaacacccaaagttcaagtcttcaggcaacgccgtcatctattctggataatacctttcaagctgcatggccctcagcagatgaatccatcaccagcagtattccaccacttgatttcagctctggtcctccctcagccactggcagggaactctggtcagaaagtcctttgggtgatttagtgtctacacacaaattagcctttccctcgaagatgggcctcagctcttccccagaggttttagaggttagcagcttgactcttcattctgtcaccccggcagtgcttcagactggcttgcctgtggcttctgaggaaaggacttctggatctcacttggtagaagatggattagccaatgttgaagagtcagaagattttctttctattgattcattgccttcaagttcattcactcaacctgtgccaaaagaaacaataccatccatggaagactctgatgtgtccttaacatcttcaccatatctgacctcttctataccttttggcttggactccttgacctccaaagtcaaagaccaattaaaagtgagccctttcctgccagatgcatccatggaaaaagagttaatatttgacggtggtttaggttcagggtctgggcaaaaggtagatctgattacttggccatggagtgagacttcatcagagaagagcgctgaaccactgtccaagccgtggcttgaagatgatgattcacttttgccagctgagattgaagacaagaaactagttttagttgacaaaatggattccacagaccaaattagtaagcactcaaaatatgaacatgatgacagatccacacactttccagaggaagagcctcttagtgggcctgctgtgcccatcttcgcagatactgcagctgaatctgcgtctctaaccctccccaagcacatatcagaagtacctggtgttgatgattactcagttaccaaagcacctcttatactgacatctgtagcaatctctgcctctactgataaatcagatcaggcagatgccatcctaagggaggatatggaacaaattactgagtcatccaactatgaatggtttgacagtgaggtttcaatggtaaagccagatatgcaaactttgtggactatattgccagaatcagagagagtttggacaagaacttcttccctagagaaattgtccagagacatattggcaagtacaccacagagtgctgacaggctctggttatctgtgacacagtctaccaaattgcctccaaccacaatctccaccctgctagaggatgaagtaattatgggtgtacaggatatttcgttagaactggaccggataggcacagattactatcagcctgagcaagtccaagagcaaaatggcaaggttggtagttatgtggaaatgtcaacaagtgttcactccacagagatggttagtgtggcttggcccacagaaggaggagatgacttgagttatacccagacttcaggagctttggtggttttcttcagcctccgagtgactaacatgatgttttcagaagatctgtttaataaaaactccttggagtataaagccctggagcaaagattcttagaattgctggttccctatctccagtcaaatctcacggggttccagaacttagaaatcctcaacttcagaaatggcagcattgtggtgaacagtcgaatgaagtttgccaattctgtccctcctaacgtcaacaatgcggtgtacatgattctggaagacttttgtaccactgcctacaataccatgaacttggctattgataaatactctcttgatgtggaatcaggtgatgaagccaacccttgcaagtttcaggcctgtaatgaattttcagagtgtctggtcaacccctggagtggagaagcaaagtgcagatgcttccctggatacctgagtgtggaagaacggccctgtcagagtctctgtgacctacagcctgacttctgcttgaatgatggaaagtgtgacattatgcctgggcacggggccatttgtaggtgccgggtgggtgagaactggtggtaccgaggcaagcactgtgaggaatttgtgtctgagcccgtgatcataggcatcactattgcctccgtggttggacttcttgtcatcttttctgctatcatctacttcttcatcaggactctccaagcacaccatgacaggagtgaaagagagagtcccttcagtggctccagcaggcagcctgacagcctctcatctattgagaatgctgtgaagtacaaccccgtgtatgaaagtcacagggctggatgtgagaagtatgagggaccctatcctcagcatcccttctacagctctgctagcggagacgtgattggtgggctgagcagagaagaaatcagacagatgtatgagagcagtgagctttccagagaggaaattcaagagagaatgagagttttggaactgtatgccaatgatcctgagtttgcagcttttgtgagagagcaacaagtggaagaggtttaaccaaaactcctgttctgaaactgattagaagcctggagaagatggagattacttgttacttatgtcatataattaacctggattttaaacactgttggaagaagagttttctatgaaaaaattaaatatagggcacactgtttttttttcagcttaagttttcagaatgtagtaagagatgttaccatttttatttctataaagactgaatgctgtgtttaaataaattgaaaactacgtaaa

SEQ ID NO: 190167 - DNA, 3726 bp, Artificial Sequence
  derived and/or modified sequence
atgatcatgttccccctgtttgggaagatcagcctgggcatcctgatctttgtgctgattgaaggagacttccccagcctgacagcccagacctacctgagcattgaggagatccaggagcccaagtctgctgtgtccttcctgctgcctgaggagagcacagacctgagcctggccaccaagaagaagcagcccctggaccggcgggagacagagcggcagtggctgatcagaagaagaagaagcatcctcttccccaatggagtgaagatctgcccagatgagagcgtggccgaggccgtggccaaccacgtgaagtacttcaaggtgcgggtgtgccaggaggccgtgtgggaggccttccgcaccttctgggaccggctgcccggccgggaggagtaccactactggatgaacctgtgtgaagatggagtgaccagcatctttgagatgggcaccaacttcagcgagagcgtggagcacaggagcctcatcatgaagaagctgacctacgccaaggagaccgtgagcagcagcgagctgagcagccctgtgcctgtgggggacaccagcaccctgggggacaccaccctgtctgtgccccaccctgaggtggatgcctatgagggcgccagcgagagcagcctggagaggcctgaggagagcatcagcaatgaaattgaaaatgtgattgaggaggccaccaagccagctggggagcagattgctgagttcagcatccacctgctgggcaagcagtaccgggaggagctgcaggacagcagcagcttccaccaccagcacctggaggaggagttcatcagcgaggtggagaatgccttcaccggcctgcccggctacaaggagatccgggtgctggagttccgcagccccaaggaaaatgattctggagtggatgtgtactatgctgtgaccttcaacggggaggccatcagcaacaccacctgggacctgatcagcctgcacagcaacaaggtggagaaccacggcctggtggagctggatgacaagcccaccgtggtgtacaccatcagcaacttccgggactacatcgccgagaccctgcagcagaacttcctgctgggcaacagcagcctgaacccagaccctgacagcctgcagctgatcaacgtgcggggcgtgctgcggcaccagacagaggacctggtgtggaacacccagagcagcagcctgcaggccacccccagcagcatcctggacaacaccttccaggccgcctggcccagcgcagatgagagcatcaccagcagcatcccccccctggacttcagcagcggccccccatctgccaccggccgggagctgtggagcgagagccccctgggggacctggtgtccacccacaagctggccttccccagcaagatgggcctgagcagcagccctgaggtgctggaggtgagcagcctgaccctgcacagcgtgaccccagctgtgctgcagacaggcctgcctgtggccagcgaggagaggaccagcggcagccacctggtggaggatggcctggccaacgtggaggagagcgaggacttcctgagcattgacagcctgcccagcagcagcttcacccagcctgtgcccaaggagaccatccccagcatggaggacagtgatgtgtccctgaccagcagcccctacctgaccagcagcatccccttcggcctggacagcctgaccagcaaggtgaaggaccagctgaaggtgagccccttcctgcctgatgcctccatggagaaggagctgatctttgatggcggcctgggcagcggcagcggccagaaggtggacctgatcacctggccctggagcgagaccagcagcgagaagtctgctgagcccctgagcaagccctggctggaggatgatgacagcctgctgcctgctgagattgaggacaagaagctggtgctggtggacaagatggacagcacagaccagatcagcaagcacagcaaatatgaacatgatgacaggagcacccacttccctgaggaggagcccctgagcggccctgctgtgcccatctttgctgacacagctgctgagagcgccagcctgaccctgcccaagcacatcagcgaggtgcctggggtggatgactacagcgtgaccaaggcccccctcatcctgacctctgtggccatcagcgccagcacagacaagagtgaccaggctgatgccatcctgcgggaggacatggagcagatcacagagagcagcaactatgagtggtttgattctgaggtgtccatggtgaagccagacatgcagaccctgtggaccatcctgcctgagagcgagcgggtgtggaccaggaccagcagcctggagaagctgagccgggacatcctggccagcaccccccagagcgctgaccggctgtggctgtctgtgacccagagcaccaagctgccccccaccaccatcagcaccctgctggaggatgaagtcatcatgggcgtgcaggacatcagcctggagctggacagaattggaacagactactaccagcctgagcaggtgcaggagcagaatggcaaggtgggcagctatgtggagatgagcacctctgtgcacagcacagagatggtgtctgtggcctggcccacagagggcggagatgacctgagctacacccagaccagcggggccctggtggtgttcttcagcctgcgggtgaccaacatgatgttttctgaggacctcttcaacaagaacagcctggagtacaaggccctggagcagcgcttcctggagctgctggtgccctacctgcagagcaacctgaccggcttccagaacctggagatcctgaacttcagaaatggcagcatcgtggtgaacagcaggatgaagtttgccaacagcgtgccccccaacgtgaacaatgctgtgtacatgatcctggaggacttctgcaccacagcctacaacaccatgaacctggccatcgacaagtacagcctggatgtggagagcggagatgaggccaacccctgcaagttccaggcctgcaatgagttcagcgagtgcctggtgaacccctggagcggggaggccaagtgccgctgcttccctggctacctgtctgtggaggagcggccctgccagagcctgtgtgacctgcagcctgacttctgcctgaatgatggaaaatgtgacatcatgcctggccatggagccatctgccgctgccgggtgggggagaactggtggtaccggggcaagcactgtgaggagtttgtgtctgagcctgtgatcatcggcatcaccatcgcctctgtggtgggcctgctggtgatcttcagcgccatcatctacttcttcatccgcaccctgcaggcccaccacgacagaagtgagcgggagagccccttcagcggcagcagccggcagcctgacagcctgagcagcattgaaaatgctgtgaagtacaaccctgtgtatgagagccaccgggccggctgtgagaagtatgagggcccctacccccagcaccccttctacagcagcgccagcggagatgtgattggaggcctgagccgggaggagatccggcagatgtatgagagcagcgagctgagccgggaggagatccaggagaggatgagggtgctggagctgtatgccaatgaccctgagtttgctgcctttgtgcgggagcagcaggtggaggaggtgtag

SEQ ID NO: 190168 - DNA, 3726 bp, Artificial Sequence
  derived and/or modified sequence
atgatcatgttccccctgttcggcaagatcagcctgggcatcctgattttcgtattgatcgagggggacttcccctcactgacagcacagacctatctttccatcgaggaaatccaggaaccaaaaagcgccgtcagctttctgctcccagaggagtcaacagatctcagcctcgccaccaaaaagaagcagccattggatagacgggaaaccgaacgacaatggctgattcgacgaaggcgatcgattctcttccctaacggagtgaaaatttgcccagacgaaagcgttgccgaagcagtcgccaaccatgtaaagtactttaaggtgagggtctgtcaggaggctgtgtgggaggcgttccggactttttgggacagactgcccggccgcgaggagtatcactactggatgaacctttgcgaagatggggtaacatcaatttttgaaatggggaccaatttttccgagtcagtcgagcatcggtcactcattatgaagaaacttacctatgctaaggaaactgtgtcttcgtcagaactgtcctccccagttcctgtgggcgacacctccactctcggtgacactacccttagcgtgccccatcccgaagtggatgcgtatgagggtgcatctgaatcatccctagagagaccggaggagtccatatccaatgagattgagaacgtcatcgaggaggctacaaagccggcaggggagcagatcgccgaatttagtattcacttgctcggaaaacagtaccgggaggaactgcaagattcttcctctttccaccatcagcacttagaggaagaattcatctctgaggtggagaacgcattcaccgggctccctggatataaggagatcagagtgttggagtttcgtagcccaaaagagaacgactcaggcgtcgacgtctattacgccgtaaccttcaacggcgaggctatatccaacactacatgggacttgatctccctccattccaataaagtcgagaatcatgggctcgtggagctggatgacaaacccactgtggtatatactatttcaaacttccgggattacattgctgaaactttgcagcagaattttctgctcggtaactcttcgctaaaccctgatccggatagcttgcaactgatcaacgtgcgaggggttttaagacatcagacagaagatctggtctggaatacccaaagtagctctctgcaggccacaccttcctcaatcctggataacacgtttcaagccgcctggccgagtgctgatgaaagtattacttcttccattccacctctggacttcagcagcggcccaccatctgctactgggcgtgagttatggtccgaatcccctttaggcgacctggtctcaacacacaagctagccttcccctccaaaatgggactctcgtcctcacctgaggtgctcgaagtgtcaagcctgacgctccatagcgtcaccccggctgtgttgcaaaccgggcttccagtagcttctgaggagaggacaagtgggagtcacctggtcgaggacgggctcgccaacgtggaggaaagcgaggattttctgagcattgactcactaccttcttcaagcttcacccagccggtgcctaaagagacaattccaagcatggaggacagtgatgttagtctgacatcatccccgtatctgacctcctctatcccatttggtctggatagccttacctccaaagtgaaggatcaactaaaagtctcaccctttctccctgacgccagcatggagaaagaactcattttcgacggtggccttgggtccgggagcggccaaaaagtcgatctcattacgtggccatggagcgaaactagcagtgaaaaatccgccgaacctttgagtaagccatggttggaggatgacgactccttgctacccgccgagatagaggataagaaactggtactggtcgataagatggactcaaccgaccagatctctaagcatagtaaatatgaacacgacgacagatctactcacttccctgaggaggagcccctgtctgggcccgctgtacccatattcgctgacactgctgccgaaagcgccagcctgacactgccgaaacacattagcgaggtacccggcgtagacgactacagcgtcactaaggcaccactcattctaacctccgtggcaattagtgccagcacagacaagagcgaccaggccgatgcaattttgagagaagacatggagcagattactgagtcaagcaattacgagtggttcgatagcgaggtgtctatggtgaaacctgatatgcagactctatggacaatcctgcccgagagcgagcgggtgtggacccgaacatcctcattggagaagctttcacgcgacatcttagcaagcactccacagtctgccgaccgcttatggttgtcggtaactcagtccaccaaactgccccccaccactatcagcaccctcttagaggacgaggtgattatgggagtccaagacatttccctggaactggacagaatcggaaccgactactatcagcctgagcaggtgcaggaacagaacggcaaggtcggctcttacgtcgagatgagcacgtctgtgcattcaactgaaatggtgtcagttgcatggcctactgaaggaggagacgatctgagctacactcagacaagcggagccctggtggtttttttctcactgagggtcacaaatatgatgttcagtgaagacctgtttaacaagaattctcttgagtacaaggctctggaacaacgattcctcgagctgcttgtcccatacctgcagtccaacctgaccggcttccagaacctcgaaattctgaacttccgcaatggatcaattgtcgttaactctcggatgaagttcgccaattctgttccacccaacgtaaacaatgccgtgtatatgatcctggaggatttctgtactaccgcttataacactatgaatctcgccatcgacaagtactcgctggatgtcgaaagcggggacgaagccaacccttgcaaatttcaggcctgcaacgaattctccgaatgcctggtcaatccctggtcaggcgaggctaagtgtagatgctttcccggttacctgagcgtggaagagaggccttgccagagcctttgcgatttgcagccagatttctgccttaatgatggtaaatgcgatatcatgcccggtcacggggctatttgcagatgtcgggtcggcgaaaactggtggtatagggggaagcattgcgaggagtttgtatctgaacccgtgatcattgggataacaatcgcatctgtggtcggcctcctggtgatcttctccgctatcatctatttcttcattagaacactgcaagctcatcacgacagatccgagcgggaatcacctttttcaggcagctctcggcagcctgatagcttatcctctattgaaaatgccgtgaagtataatcccgtatatgaaagccatcgtgcaggatgtgaaaagtatgagggtccttacccacagcatccattttactcgtcagcttcgggggatgttatcggcggcctgagcagggaggagatccgccagatgtacgaaagcagcgaactgagcagggaggagattcaagaacggatgagggtccttgagctgtatgctaatgaccctgaatttgcggctttcgtgagagaacagcaggtagaagaggtgtag

SEQ ID NO: 190169 - DNA, 3726 bp, Artificial Sequence
  derived and/or modified sequence
atgatcatgtttcccctttttgggaaaattagcttgggcatcctgattttcgtgttaattgagggtgatttcccatccctcactgcacagacctacctttctatagaagagatacaggagccaaaatccgccgtgtcattcctcttgccagaggaatccacagacctgtccctcgcaaccaagaaaaagcagcctctcgaccgtcgggaaacagagaggcagtggctcataagaagaaggaggtccattcttttcccaaatggggtgaagatatgcccggacgagagcgtggcagaggcagtggcgaatcacgtaaagtacttcaaggtgcgggtgtgccaggaggcagtttgggaggcctttagaaccttttgggacaggctgcccggacgggaggagtatcattactggatgaacctctgcgaagacggcgttacaagtatcttcgaaatgggaactaatttctcagagagtgtggagcacaggtcgttaataatgaagaaattaacttacgcgaaagaaacagtgagtagttccgagctatcatcacccgtgccggtcggtgataccagcacactgggggatacgaccttgtcggtccctcaccctgaggtggacgcttatgagggggcttccgaatcctcactggaacgccctgaggagtctataagcaatgaaatcgaaaacgttattgaggaagccactaagcccgcaggggaacagatcgccgaattcagtatacacctcctgggtaaacagtacagggaggagctgcaagactctagctcattccatcatcaacatcttgaggaggaattcatcagcgaagttgagaatgccttcaccggtctgcccggttacaaggaaatcagggtcttagagtttcgcagcccaaaggaaaacgattctggtgttgatgtttactatgccgtgacgttcaatggggaggctatctccaatacgacttgggacctgattagccttcatagcaataaggtggagaatcacggcttggtggaactggacgacaagcccactgtggtttacacaataagcaattttagagactacattgcggagaccctccaacagaactttctgctgggtaacagcagccttaatccagatccagactctctgcagctgattaacgtgagaggtgtgctgaggcaccaaactgaagatttagtctggaatacccagagtagctctctgcaggccacaccttcatccatcctggacaatacattccaggccgcatggccttcagccgacgagtctattactagctctatccctccattggatttcagctccggtcctccaagtgctacaggaagagaactgtggtctgaatccccacttggcgatctggtttcaacacacaagctggcctttccttctaaaatgggcctgtcaagctctcccgaggtgttggaggtgtcgtcattgacccttcattctgttacccctgccgtgctgcagaccgggttacctgttgcctccgaggagcgaacctccgggtcccacctggtcgaggatgggcttgcaaatgtcgaggagtctgaggactttctgtccattgattcactgccctcctcctcttttacccaaccagtgcctaaagaaactatccccagtatggaagactccgacgtgtccctgactagctcaccttatctcacaagctccattcccttcggcctggactccctgacctctaaggtgaaagatcagctgaaggtgtcccctttcctgccggacgcgtctatggaaaaggagctgatattcgacggagggttgggctcaggctctggccagaaagtagatctcattacatggccctggtcagaaacctcctctgaaaaatctgccgaacctctctcaaagccgtggcttgaggacgatgatagcctactgccagcggagatagaggataagaaactcgtactggtggacaagatggactctaccgaccagatctcaaagcatagtaagtatgagcacgacgaccgttcaacccacttccccgaagaagaaccactgagcggacccgctgtgcctatcttcgcagacacagcagctgagtctgctagcctcactctgcccaagcatatttcagaggtgcccggtgtagatgactactccgtcacaaaagcccctctcattctgacttctgttgccatatctgctagcaccgacaaatcagatcaggcagatgcaatactgagagaagacatggaacagattacagagtcctccaactatgagtggtttgattctgaggtgtccatggtcaaaccagatatgcagacattgtggaccatcctcccagaaagtgagcgcgtgtggacccggacctcgtcactggagaagctgagccgggatatcttggcctccacaccacagtctgcagacaggctctggctaagcgtcacacaaagcacaaaactgccccctacaactatcagcacactcctggaggacgaggtgatcatgggggtccaggacatatctctggaactagataggataggaactgattattatcagcccgagcaggtccaggagcaaaatgggaaggtcgggtcgtacgtggagatgtcgacgtctgttcactctaccgaaatggtgagcgtagcatggcctacagagggcggagatgaccttagttacacccagacctcaggagctctagtggtcttcttctcgctgagggttaccaacatgatgttttcagaggatctgttcaacaaaaattccttagagtacaaagctctcgaacagcggtttttagaactattggtgccctatctgcagtccaacctgaccggttttcagaatctggagatcctaaactttcgtaacggatccatcgtcgtaaactcacgcatgaagttcgccaacagtgttcccccaaacgtgaataatgccgtgtacatgattctggaggatttttgcacaaccgcttacaatactatgaatctcgctatagacaagtactccctggacgtcgagagcggcgacgaggcaaacccatgtaaattccaggcctgcaatgaattcagtgaatgtttggtgaatccatggtcgggagaagcaaaatgcaggtgtttcccaggatacctgagcgttgaagagcgaccatgtcaatccttgtgtgatcttcagccggatttctgtttaaatgacggtaaatgcgacataatgcctggacacggagcgatctgccggtgcagagtgggggagaattggtggtaccggggaaaacattgcgaagaattcgtctccgaacccgtgatcattggaataacaatcgctagtgtcgtaggcctgctggtgatattcagtgctatcatctatttcttcatacggacgttgcaggctcatcacgatagatccgagcgagagagcccctttagcggaagttccagacagcccgactcactgtcgagcatcgagaacgccgttaaatacaaccctgtgtacgagagccacagggcaggatgcgaaaagtatgaaggcccatatccgcagcaccctttttactcttcggcctcaggggatgtgataggtgggcttagcagggaagagatccgacaaatgtatgaaagttccgagctgagccgtgaggaaatacaggaacgaatgcgcgttctggaattgtacgcaaatgacccggaattcgcagccttcgttagagaacaacaggtggaagaggtgtag

SEQ ID NO: 190170 - DNA, 3726 bp, Artificial Sequence
  derived and/or modified sequence
atgatcatgttccccctgttcggcaagatcagcctgggcatcctgatcttcgtgctgatcgagggcgacttccccagcctgaccgcccagacctacctgagcatcgaggagatccaggagcccaagagcgccgtgagcttcctgctgcccgaggagagcaccgacctgagcctggccaccaagaagaagcagcccctggacagaagagagaccgagagacagtggctgatcagaagaagaagaagcatcctgttccccaacggcgtgaagatctgccccgacgagagcgtggccgaggccgtggccaaccacgtgaagtacttcaaggtgagagtgtgccaggaggccgtgtgggaggccttcagaaccttctgggacagactgcccggcagagaggagtaccactactggatgaacctgtgcgaggacggcgtgaccagcatcttcgagatgggcaccaacttcagcgagagcgtggagcacagaagcctgatcatgaagaagctgacctacgccaaggagaccgtgagcagcagcgagctgagcagccccgtgcccgtgggcgacaccagcaccctgggcgacaccaccctgagcgtgccccaccccgaggtggacgcctacgagggcgccagcgagagcagcctggagagacccgaggagagcatcagcaacgagatcgagaacgtgatcgaggaggccaccaagcccgccggcgagcagatcgccgagttcagcatccacctgctgggcaagcagtacagagaggagctgcaggacagcagcagcttccaccaccagcacctggaggaggagttcatcagcgaggtggagaacgccttcaccggcctgcccggctacaaggagatcagagtgctggagttcagaagccccaaggagaacgacagcggcgtggacgtgtactacgccgtgaccttcaacggcgaggccatcagcaacaccacctgggacctgatcagcctgcacagcaacaaggtggagaaccacggcctggtggagctggacgacaagcccaccgtggtgtacaccatcagcaacttcagagactacatcgccgagaccctgcagcagaacttcctgctgggcaacagcagcctgaaccccgaccccgacagcctgcagctgatcaacgtgagaggcgtgctgagacaccagaccgaggacctggtgtggaacacccagagcagcagcctgcaggccacccccagcagcatcctggacaacaccttccaggccgcctggcccagcgccgacgagagcatcaccagcagcatcccccccctggacttcagcagcggcccccccagcgccaccggcagagagctgtggagcgagagccccctgggcgacctggtgagcacccacaagctggccttccccagcaagatgggcctgagcagcagccccgaggtgctggaggtgagcagcctgaccctgcacagcgtgacccccgccgtgctgcagaccggcctgcccgtggccagcgaggagagaaccagcggcagccacctggtggaggacggcctggccaacgtggaggagagcgaggacttcctgagcatcgacagcctgcccagcagcagcttcacccagcccgtgcccaaggagaccatccccagcatggaggacagcgacgtgagcctgaccagcagcccctacctgaccagcagcatccccttcggcctggacagcctgaccagcaaggtgaaggaccagctgaaggtgagccccttcctgcccgacgccagcatggagaaggagctgatcttcgacggcggcctgggcagcggcagcggccagaaggtggacctgatcacctggccctggagcgagaccagcagcgagaagagcgccgagcccctgagcaagccctggctggaggacgacgacagcctgctgcccgccgagatcgaggacaagaagctggtgctggtggacaagatggacagcaccgaccagatcagcaagcacagcaagtacgagcacgacgacagaagcacccacttccccgaggaggagcccctgagcggccccgccgtgcccatcttcgccgacaccgccgccgagagcgccagcctgaccctgcccaagcacatcagcgaggtgcccggcgtggacgactacagcgtgaccaaggcccccctgatcctgaccagcgtggccatcagcgccagcaccgacaagagcgaccaggccgacgccatcctgagagaggacatggagcagatcaccgagagcagcaactacgagtggttcgacagcgaggtgagcatggtgaagcccgacatgcagaccctgtggaccatcctgcccgagagcgagagagtgtggaccagaaccagcagcctggagaagctgagcagagacatcctggccagcaccccccagagcgccgacagactgtggctgagcgtgacccagagcaccaagctgccccccaccaccatcagcaccctgctggaggacgaggtgatcatgggcgtgcaggacatcagcctggagctggacagaatcggcaccgactactaccagcccgagcaggtgcaggagcagaacggcaaggtgggcagctacgtggagatgagcaccagcgtgcacagcaccgagatggtgagcgtggcctggcccaccgagggcggcgacgacctgagctacacccagaccagcggcgccctggtggtgttcttcagcctgagagtgaccaacatgatgttcagcgaggacctgttcaacaagaacagcctggagtacaaggccctggagcagagattcctggagctgctggtgccctacctgcagagcaacctgaccggcttccagaacctggagatcctgaacttcagaaacggcagcatcgtggtgaacagcagaatgaagttcgccaacagcgtgccccccaacgtgaacaacgccgtgtacatgatcctggaggacttctgcaccaccgcctacaacaccatgaacctggccatcgacaagtacagcctggacgtggagagcggcgacgaggccaacccctgcaagttccaggcctgcaacgagttcagcgagtgcctggtgaacccctggagcggcgaggccaagtgcagatgcttccccggctacctgagcgtggaggagagaccctgccagagcctgtgcgacctgcagcccgacttctgcctgaacgacggcaagtgcgacatcatgcccggccacggcgccatctgcagatgcagagtgggcgagaactggtggtacagaggcaagcactgcgaggagttcgtgagcgagcccgtgatcatcggcatcaccatcgccagcgtggtgggcctgctggtgatcttcagcgccatcatctacttcttcatcagaaccctgcaggcccaccacgacagaagcgagagagagagccccttcagcggcagcagcagacagcccgacagcctgagcagcatcgagaacgccgtgaagtacaaccccgtgtacgagagccacagagccggctgcgagaagtacgagggcccctacccccagcaccccttctacagcagcgccagcggcgacgtgatcggcggcctgagcagagaggagatcagacagatgtacgagagcagcgagctgagcagagaggagatccaggagagaatgagagtgctggagctgtacgccaacgaccccgagttcgccgccttcgtgagagagcagcaggtggaggaggtgtag

SEQ ID NO: 190171 - protein, 373 aa, Artificial Sequence
  derived and/or modified sequence
MPPVPGVPFRNVDNDSPTSVELEDWVDAQHPTDEEEEEASSASSTLYLVFSPSSFSTSSSLILGGPEEEEVPSGVIPNLTESIPSSPPQGPPQGPSQSPLSSCCSSFSWSSFSEESSSQKGEDTGTCQGLPDSESSFTYTLDEKVAELVEFLLLKYEAEEPVTEAEMLMIVIKYKDYFPVILKRAREFMELLFGLALIEVGPDHFCVFANTVGLTDEGSDDEGMPENSLLIIILSVIFIKGNCASEEVIWEVLNAVGVYAGREHFVYGEPRELLTKVWVQGHYLEYREVPHSSPPYYEFLWGPRAHSESIKKKVLEFLAKLNNTVPSSFPSWYKDALKDVEERVQATIDTADDATVMASESLSVMSSNVSFSE

SEQ ID NO: 190172 - DNA, 1122 bp, Artificial Sequence
  derived and/or modified sequence
atgcctccagtaccgggagtcccctttcgtaacgtcgataacgactccccgacctcagtggagcttgaagattgggtggacgcccagcaccctactgatgaggaggaggaagaagccagctccgcttctagcacgctgtatctggtgttctccccatccagtttcagcacctcctcaagcttgattctcggcggcccagaggaggaggaagtgccaagtggcgtcattcccaatcttacagagagcatcccctcttctccgccacagggcccaccacagggcccctcgcaatcccctctgagctcctgctgctccagcttctcatggtcaagttttagcgaagaatcttcctcccagaaaggcgaagacactgggacttgccaagggctccccgacagcgaatcgtccttcacatacacgctcgacgagaaggtggccgaactggtggaatttcttcttctgaaatatgaagccgaagagcccgtgactgaggccgagatgctaatgatagttattaaatataaagactattttccagttattttgaagcgagctagggagttcatggaactgctattcggcctggcacttatcgaggtggggccggaccacttttgcgtgttcgccaacacagttggcctgaccgacgaaggcagcgacgacgagggaatgccagagaacagcctccttatcattatactgtctgtgatcttcatcaagggtaattgtgcaagcgaggaggtgatctgggaggtgttgaatgcggtcggcgtttacgcaggacgcgagcactttgtgtacggggagccacgtgaactcctgacaaaagtgtgggtgcaggggcactatcttgagtacagggaagtgccgcactcatcacccccctattacgagttcctgtggggaccccgggcccattccgaatcgataaaaaaaaaggtgctggaatttttagctaagctaaataacaccgtcccgtcttcgtttccatcctggtacaaagatgccctaaaagacgtcgaggaacgggtacaggctacaattgacaccgcagacgatgccactgtgatggcctccgagtccttgtctgttatgagctccaatgtgagtttctccgagtag

SEQ ID NO: 190173 - DNA, 1122 bp, Artificial Sequence
  derived and/or modified sequence
atgcctcctgtgcctggggtgcccttcagaaatgtggacaatgacagccccacctctgtggagctggaggactgggtggatgcccagcaccccacagatgaggaggaggaggaggccagcagcgccagcagcaccctgtacctggtgttcagccccagcagcttcagcaccagcagcagcctcatcctgggcggccctgaggaggaggaggtgcccagcggggtcatccccaacctgacagagagcatccccagcagccccccccagggccccccccagggccccagccagagccccctgagcagctgctgcagcagcttctcctggagcagcttcagcgaggagagcagcagccagaagggggaggacaccggcacctgccagggcctgcctgattctgagagcagcttcacctacaccctggatgagaaggtggccgagctggtggagttcctgctgctgaagtatgaggccgaggagcctgtgacagaagctgagatgctgatgatcgtcatcaagtacaaggactacttccctgtgatcctgaagagggcccgggagttcatggagctgctgtttggcctggccctgattgaggtgggccctgaccacttctgtgtgtttgccaacacagtgggcctgacagatgagggcagtgatgatgagggcatgcctgagaacagcctgctgatcatcatcctgagcgtcatcttcatcaagggcaactgtgccagcgaggaggtgatctgggaggtgctgaatgctgtgggcgtgtatgccggccgggagcactttgtgtatggagagccccgggagctgctgaccaaggtgtgggtgcagggccactacctggagtaccgggaggtgccccacagcagccccccctactatgagttcctgtggggcccccgggcccacagcgagagcatcaagaagaaggtgctggagttcctggccaagctgaacaacacagtgcccagcagcttccccagctggtacaaggatgccctgaaggatgtggaggagcgggtgcaggccaccatcgacacagcagatgatgccaccgtgatggccagcgagagcctgtctgtgatgagcagcaatgtgtccttcagcgagtag

SEQ ID NO: 190174 - DNA, 1991 bp, Artificial Sequence
  derived and/or modified sequence
gctttcccgacggccatcttgggaatctgacggatcgaaggcatttgtgaggaggcgcgaatcaagttagcggggggaagagtcttagacctggccagtcctcagggtgagggccctgaggaagaactgagggacctcccaccatagagagaagaaaccccggcctgtactgcgctgccgtgagactggtgctccaggaaccaggtggtgacgaactgggtgtgaggcacacagcctaaagtcagcacagcagaggaggcccaggcagtgccaggagtcaaggcctgttggatctcatcatccatatccctgttgatacgtttacctgctgctcctgaagaagtcgtcatgcctcccgttccaggcgttccattccgcaacgttgacaacgactccccgacctcagttgagttagaagactgggtagatgcacagcatcccacagatgaggaagaggaggaagcctcctccgcctcttccactttgtacttagtattttccccctcttctttctccacatcctcttctctgattcttggtggtcctgaggaggaggaggtgccctctggtgtgataccaaatcttaccgagagcattcccagtagtcctccacagggtcctccacagggtccttcccagagtcctctgagctcctgctgctcctctttttcatggagctcattcagtgaggagtccagcagccagaaaggggaggatacaggcacctgtcagggcctgccagacagtgagtcctctttcacatatacactagatgaaaaggtggccgagttagtggagttcctgctcctcaaatacgaagcagaggagcctgtaacagaggcagagatgctgatgattgtcatcaagtacaaagattactttcctgtgatactcaagagagcccgtgagttcatggagcttctttttggccttgccctgatagaagtgggccctgaccacttctgtgtgtttgcaaacacagtaggcctcaccgatgagggtagtgatgatgagggcatgcccgagaacagcctcctgattattattctgagtgtgatcttcataaagggcaactgtgcctctgaggaggtcatctgggaagtgctgaatgcagtaggggtatatgctgggagggagcacttcgtctatggggagcctagggagctcctcactaaagtttgggtgcagggacattacctggagtatcgggaggtgccccacagttctcctccatattatgaattcctgtggggtccgagagcccattcagaaagcatcaagaagaaagtactagagtttttagccaagctgaacaacactgttcctagttcctttccatcctggtacaaggatgctttgaaagatgtggaagagagagtccaggccacaattgataccgcagatgatgccactgtcatggccagtgaaagcctcagtgtcatgtccagcaacgtctccttttctgagtgaagtctaggatagtttcttccccttgtgtttgaacagggcagtttaggttctaggtagtggagggccaggtggggctcgaggaacgtagtgttctttgcatttctgtcccatatgggtgatgtagagatttacctgtttttcagtattttctaaatgcttttcctttgaatagcaggtagttagcttcagagtgttaatttatgaatattagtcgcacatgtattgctctttatctggtttaagagtaacagtttgatattttgttaaaaaaatggaaataccttctcccttattttgtgatctgtaacagggtagtgtggtattgtaataggcatttttttttttttttacaatgtgcaataactcagcagttaaatagtggaacaaaattgaagggtggtcagtagtttcatttccttgtcctgcttattcttttgttcttgaaaattatatatacctggctttgcttagcttgttgaagaaagtagcagaaattaaatcttaataaaagaaagccccac

SEQ ID NO: 190175 - DNA, 1122 bp, Artificial Sequence
  derived and/or modified sequence
atgccccccgtgcccggcgtgcccttccggaacgtggacaacgactctcccaccagcgtggagctggaagattgggttgacgctcagcatccgacagacgaagaagaggaggaggcttcgtccgcttctagcaccttatacttggtcttcagcccctccagcttcagcaccagttcaagcctgattctgggggggcccgaggaggaggaagtgccgtccggtgtgatcccgaatttaaccgaatccatacctagttccccccctcaaggacccccacagggtcctagccagtcccccctttcgagctgttgcagctccttctcatggtcctctttttcggaagaaagtagttctcagaagggcgaagatactggcacatgccaaggcctgccggactcagagagctctttcacgtatactcttgatgagaaagtggcagagttggtagagtttttgctcctgaagtacgaagcagaagagcctgtcacagaagcggaaatgctgatgatcgtcattaaatacaaagactattttccagtgatcttaaaacgagcgagagagttcatggaactgctcttcggactcgctctgatcgaagtcgggcctgatcacttttgcgtcttcgccaatacggtggggctcaccgatgaagggagcgacgatgaagggatgcccgagaatagcttgttaattatcatcctgtctgtcatttttattaaaggtaattgtgctagcgaagaggtcatttgggaggtccttaacgccgtgggggtctacgcgggcagggagcattttgtgtacggagaaccccgcgaactgttgactaaggtgtgggtgcagggtcactacctggaatatcgagaggtgcctcattcctcccctccctattatgaattcctatgggggccaagggcacacagtgagtcaatcaaaaagaaagtgctcgaattcctcgctaagcttaacaatacagtgcccagtagttttccttcttggtacaaagatgctctgaaggatgttgaggaaagagtgcaggctaccattgacaccgcagatgacgccactgtcatggctagtgagtccctgtcagttatgtcctctaacgttagcttctctgaatag

SEQ ID NO: 190176 - DNA, 1122 bp, Artificial Sequence
  derived and/or modified sequence
atgccccctgtccctggtgttcccttccgaaatgtggataatgactctcccaccagcgtggagctcgaggattgggtggatgcccagcaccccaccgacgaagaggaggaggaagccagctctgccagctccaccttgtaccttgtgttctcaccctctagtttctcaacaagcagctccctgatcctggggggtccagaggaggaggaagtgcctagcggggttatccctaacctcaccgagtccattcctagctctcctcctcagggcccaccgcagggaccctcccagagtcctcttagttcttgctgctctagcttctcatggtcctctttttctgaggaatcgtcctctcagaagggagaggacactggtacttgtcaggggcttcccgatagcgaatcctcctttacatataccctcgatgagaaggtggccgaactcgtggagttcctgctcctgaagtacgaagccgaggaaccagtgacagaagctgagatgcttatgattgtgatcaagtataaggattatttcccggtgatcctgaaacgggctcgagagtttatggaactcctctttggtcttgctttgatcgaggtgggccctgatcatttctgcgtgtttgccaacaccgtgggcctaacagatgagggatctgacgacgaggggatgccagaaaactccctacttatcatcatattgtctgtaatcttcatcaaaggaaactgcgcctctgaggaagtgatttgggaagtcctgaatgcggtgggggtgtatgcaggtcgcgagcactttgtgtatggtgaaccgagagagctattgacaaaagtgtgggtgcagggccactatcttgaatatagagaggtccctcactcatctccaccctattacgagtttctgtggggtcccagagctcactccgagagcatcaagaagaaagtcctcgagttcttagcgaagctcaataatactgtgccatcatccttcccaagctggtataaggacgccctgaaggatgtcgaagagagagttcaggcaaccattgacacagctgacgatgccactgtgatggccagcgagtctcttagtgttatgtcttcaaacgttagcttttccgagtag

SEQ ID NO: 190177 - DNA, 1122 bp, Artificial Sequence
  derived and/or modified sequence
atgccccccgtgcccggcgtgcccttcagaaacgtggacaacgacagccccaccagcgtggagctggaggactgggtggacgcccagcaccccaccgacgaggaggaggaggaggccagcagcgccagcagcaccctgtacctggtgttcagccccagcagcttcagcaccagcagcagcctgatcctgggcggccccgaggaggaggaggtgcccagcggcgtgatccccaacctgaccgagagcatccccagcagccccccccagggccccccccagggccccagccagagccccctgagcagctgctgcagcagcttcagctggagcagcttcagcgaggagagcagcagccagaagggcgaggacaccggcacctgccagggcctgcccgacagcgagagcagcttcacctacaccctggacgagaaggtggccgagctggtggagttcctgctgctgaagtacgaggccgaggagcccgtgaccgaggccgagatgctgatgatcgtgatcaagtacaaggactacttccccgtgatcctgaagagagccagagagttcatggagctgctgttcggcctggccctgatcgaggtgggccccgaccacttctgcgtgttcgccaacaccgtgggcctgaccgacgagggcagcgacgacgagggcatgcccgagaacagcctgctgatcatcatcctgagcgtgatcttcatcaagggcaactgcgccagcgaggaggtgatctgggaggtgctgaacgccgtgggcgtgtacgccggcagagagcacttcgtgtacggcgagcccagagagctgctgaccaaggtgtgggtgcagggccactacctggagtacagagaggtgccccacagcagccccccctactacgagttcctgtggggccccagagcccacagcgagagcatcaagaagaaggtgctggagttcctggccaagctgaacaacaccgtgcccagcagcttccccagctggtacaaggacgccctgaaggacgtggaggagagagtgcaggccaccatcgacaccgccgacgacgccaccgtgatggccagcgagagcctgagcgtgatgagcagcaacgtgagcttcagcgagtag

SEQ ID NO: 190178 - protein, 4857 aa, Artificial Sequence
  derived and/or modified sequence
MVTGGGAAPPGTVTEPLPSVIVLSAGRKMAAAAAAASGPGCSSAAGAGAAGVSEWLVLRDGCMHCDADGLHSLSYHPALNAILAVTSRGTIKVIDGTSGATLQASALSAKPGGQVKCQYISAVDKVIFVDDYAVGCRKDLNGILLLDTALQTPVSKQDDVVQLELPVTEAQQLLSACLEKVDISSTEGYDLFITQLKDGLKNTSHETAANHKVAKWATVTFHLPHHVLKSIASAIVNELKKINQNVAALPVASSVMDRLSYLLPSARPELGVGPGRSVDRSLMYSEANRRETFTSWPHVGYRWAQPDPMAQAGFYHQPASSGDDRAMCFTCSVCLVCWEPTDEPWSEHERHSPNCPFVKGEHTQNVPLSVTLATSPAQFPCTDGTDRISCFGSGSCPHFLAAATKRGKICIWDVSKLMKVHLKFEINAYDPAIVQQLILSGDPSSGVDSRRPTLAWLEDSSSCSDIPKLEGDSDDLLEDSDSEEHSRSDSVTGHTSQKEAMEVSLDITALSILQQPEKLQWEIVANVLEDTVKDLEELGANPCLTNSKSEKTKEKHQEQHNIPFPCLLAGGLLTYKSPATSPISSNSHRSLDGLSRTQGESISEQGSTDNESCTNSELNSPLVRRTLPVLLLYSIKESDEKAGKIFSQMNNIMSKSLHDDGFTVPQIIEMELDSQEQLLLQDPPVTYIQQFADAAANLTSPDSEKWNSVFPKPGTLVQCLRLPKFAEEENLCIDSITPCADGIHLLVGLRTCPVESLSAINQVEALNNLNKLNSALCNRRKGELESNLAVVNGANISVIQHESPADVQTPLIIQPEQRNVSGGYLVLYKMNYATRIVTLEEEPIKIQHIKDPQDTITSLILLPPDILDNREDDCEEPIEDMQLTSKNGFEREKTSDISTLGHLVITTQGGYVKILDLSNFEILAKVEPPKKEGTEEQDTFVSVIYCSGTDRLCACTKGGELHFLQIGGTCDDIDEADILVDGSLSKGIEPSSEGSKPLSNPSSPGISGVDLLVDQPFTLEILTSLVELTRFETLTPRFSATVPPCWVEVQQEQQQRRHPQHLHQQHHGDAAQHTRTWKLQTDSNSWDEHVFELVLPKACMVGHVDFKFVLNSNITNIPQIQVTLLKNKAPGLGKVNALNIEVEQNGKPSLVDLNEEMQHMDVEESQCLRLCPFLEDHKEDILCGPVWLASGLDLSGHAGMLTLTSPKLVKGMAGGKYRSFLIHVKAVNERGTEEICNGGMRPVVRLPSLKHQSNKGYSLASLLAKVAAGKEKSSNVKNENTSGTRKSENLRGCDLLQEVSVTIRRFKKTSISKERVQRCAMLQFSEFHEKLVNTLCRKTDDGQITEHAQSLVLDTLCWLAGVHSNGPGSSKEGNENLLSKTRKFLSDIVRVCFFEAGRSIAHKCARFLALCISNGKCDPCQPAFGPVLLKALLDNMSFLPAATTGGSVYWYFVLLNYVKDEDLAGCSTACASLLTAVSRQLQDRLTPMEALLQTRYGLYSSPFDPVLFDLEMSGSSCKNVYNSSIGVQSDEIDLSDVLSGNGKVSSCTAAEGSFTSLTGLLEVEPLHFTCVSTSDGTRIERDDAMSSFGVTPAVGGLSSGTVGEASTALSSAAQVALQSLSHAMASAEQQLQVLQEKQQQLLKLQQQKAKLEAKLHQTTAAAAAAASAVGPVHNSVPSNPVAAPGFFIHPSDVIPPTPKTTPLFMTPPLTPPNEAVSVVINAELAQLFPGSVIDPPAVNLAAHNKNSNKSRMNPLGSGLALAISHASHFLQPPPHQSIIIERMHSGARRFVTLDFGRPILLTDVLIPTCGDLASLSIDIWTLGEEVDGRRLVVATDISTHSLILHDLIPPPVCRFMKITVIGRYGSTNARAKIPLGFYYGHTYILPWESELKLMHDPLKGEGESANQPEIDQHLAMMVALQEDIQCRYNLACHRLETLLQSIDLPPLNSANNAQYFLRKPDKAVEEDSRVFSAYQDCIQLQLQLNLAHNAVQRLKVALGASRKMLSETSNPEDLIQTSSTEQLRTIIRYLLDTLLSLLHASNGHSVPAVLQSTFHAQACEELFKHLCISGTPKIRLHTGLLLVQLCGGERWWGQFLSNVLQELYNSEQLLIFPQDRVFMLLSCIGQRSLSNSGVLESLLNLLDNLLSPLQPQLPMHRRTEGVLDIPMISWVVMLVSRLLDYVATVEDEAAAAKKPLNGNQWSFINNNLHTQSLNRSSKGSSSLDRLYSRKIRKQLVHHKQQLNLLKAKQKALVEQMEKEKIQSNKGSSYKLLVEQAKLKQATSKHFKDLIRLRRTAEWSRSNLDTEVTTAKESPEIEPLPFTLAHERCISVVQKLVLFLLSMDFTCHADLLLFVCKVLARIANATRPTIHLCEIVNEPQLERLLLLLVGTDFNRGDISWGGAWAQYSLTCMLQDILAGELLAPVAAEAMEEGTVGDDVGATAGDSDDSLQQSSVQLLETIDEPLTHDITGAPPLSSLEKDKEIDLELLQDLMEVDIDPLDIDLEKDPLAAKVFKPISSTWYDYWGADYGTYNYNPYIGGLGIPVAKPPANTEKNGSQTVSVSVSQALDARLEVGLEQQAELMLKMMSTLEADSILQALTNTSPTLSQSPTGTDDSLLGGLQAANQTSQLIIQLSSVPMLNVCFNKLFSMLQVHHVQLESLLQLWLTLSLNSSSTGNKENGADIFLYNANRIPVISLNQASITSFLTVLAWYPNTLLRTWCLVLHSLTLMTNMQLNSGSSSAIGTQESTAHLLVSDPNLIHVLVKFLSGTSPHGTNQHSPQVGPTATQAMQEFLTRLQVHLSSTCPQIFSEFLLKLIHILSTERGAFQTGQGPLDAQVKLLEFTLEQNFEVVSVSTISAVIESVTFLVHHYITCSDKVMSRSGSDSSVGARACFGGLFANLIRPGDAKAVCGEMTRDQLMFDLLKLVNILVQLPLSGNREYSARVSVTTNTTDSVSDEEKVSGGKDGNGSSTSVQGSPAYVADLVLANQQIMSQILSALGLCNSSAMAMIIGASGLHLTKHENFHGGLDAISVGDGLFTILTTLSKKASTVHMMLQPILTYMACGYMGRQGSLATCQLSEPLLWFILRVLDTSDALKAFHDMGGVQLICNNMVTSTRAIVNTARSMVSTIMKFLDSGPNKAVDSTLKTRILASEPDNAEGIHNFAPLGTITSSSPTAQPAEVLLQATPPHRRARSAAWSYIFLPEEAWCDLTIHLPAAVLLKEIHIQPHLASLATCPSSVSVEVSADGVNMLPLSTPVVTSGLTYIKIQLVKAEVASAVCLRLHRPRDASTLGLSQIKLLGLTAFGTTSSATVNNPFLPSEDQVSKTSIGWLRLLHHCLTHISDLEGMMASAAAPTANLLQTCAALLMSPYCGMHSPNIEVVLVKIGLQSTRIGLKLIDILLRNCAASGSDPTDLNSPLLFGRLNGLSSDSTIDILYQLGTTQDPGTKDRIQALLKWVSDSARVAAMKRSGRMNYMCPNSSTVEYGLLMPSPSHLHCVAAILWHSYELLVEYDLPALLDQELFELLFNWSMSLPCNMVLKKAVDSLLCSMCHVHPNYFSLLMGWMGITPPPVQCHHRLSMTDDSKKQDLSSSLTDDSKNAQAPLALTESHLATLASSSQSPEAIKQLLDSGLPSLLVRSLASFCFSHISSSESIAQSIDISQDKLRRHHVPQQCNKMPITADLVAPILRFLTEVGNSHIMKDWLGGSEVNPLWTALLFLLCHSGSTSGSHNLGAQQTSARSASLSSAATTGLTTQQRTAIENATVAFFLQCISCHPNNQKLMAQVLCELFQTSPQRGNLPTSGNISGFIRRLFLQLMLEDEKVTMFLQSPCPLYKGRINATSHVIQHPMYGAGHKFRTLHLPVSTTLSDVLDRVSDTPSITAKLISEQKDDKEKKNHEEKEKVKAENGFQDNYSVVVASGLKSQSKRAVSATPPRPPSRRGRTIPDKIGSTSGAEAANKIITVPVFHLFHKLLAGQPLPAEMTLAQLLTLLYDRKLPQGYRSIDLTVKLGSRVITDPSLSKTDSYKRLHPEKDHGDLLASCPEDEALTPGDECMDGILDESLLETCPIQSPLQVFAGMGGLALIAERLPMLYPEVIQQVSAPVVTSTTQEKPKDSDQFEWVTIEQSGELVYEAPETVAAEPPPIKSAVQTMSPIPAHSLAAFGLFLRLPGYAEVLLKERKHAQCLLRLVLGVTDDGEGSHILQSPSANVLPTLPFHVLRSLFSTTPLTTDDGVLLRRMALEIGALHLILVCLSALSHHSPRVPNSSVNQTEPQVSSSHNPTSTEEQQLYWAKGTGFGTGSTASGWDVEQALTKQRLEEEHVTCLLQVLASYINPVSSAVNGEAQSSHETRGQNSNALPSVLLELLSQSCLIPAMSSYLRNDSVLDMARHVPLYRALLELLRAIASCAAMVPLLLPLSTENGEEEEEQSECQTSVGTLLAKMKTCVDTYTNRLRSKRENVKTGVKPDASDQEPEGLTLLVPDIQKTAEIVYAATTSLRQANQEKKLGEYSKKAAMKPKPLSVLKSLEEKYVAVMKKLQFDTFEMVSEDEDGKLGFKVNYHYMSQVKNANDANSAARARRLAQEAVTLSTSLPLSSSSSVFVRCDEERLDIMKVLITGPADTPYANGCFEFDVYFPQDYPSSPPLVNLETTGGHSVRFNPNLYNDGKVCLSILNTWHGRPEEKWNPQTSSFLQVLVSVQSLILVAEPYFNEPGYERSRGTPSGTQSSREYDGNIRQATVKWAMLEQIRNPSPCFKEVIHKHFYLKRVEIMAQCEEWIADIQQYSSDKRVGRTMSHHAAALKRHTAQLREELLKLPCPEGLDPDTDDAPEVCRATTGAEETLMHDQVKPSSSKELPSDFQL

SEQ ID NO: 190179 - DNA, 14574 bp, Artificial Sequence
  derived and/or modified sequence
atggtgaccggcggcggtgctgcacccccaggaacagtgacagaacccctgccctccgttatcgtcttgtccgctgggagaaagatggccgctgccgctgcagccgcatctggcccaggctgctccagtgcggccggagctggcgctgcaggcgtaagcgaatggcttgtgctccgtgacggctgcatgcattgcgacgctgatggactccactctttgagttatcatccagcactgaacgccatcctcgcagttacgtcgcgcggcacaatcaaggtaatagacgggacttcaggggccactcttcaggcatccgccctctccgcaaaaccaggaggccaggtgaagtgccagtacattagcgcagtagataaagtgattttcgtcgacgactacgctgtgggatgcagaaaggacttgaacgggatcctccttttggataccgccttgcagacacctgtgtcgaaacaggatgacgtggtgcagttagaactgcccgtcaccgaagcccaacagctgctgagcgcatgcctggagaaagtcgacatctcctcgacagaagggtatgacctgttcatcactcagctaaaagatggcctgaagaacaccagccacgaaacagcagccaatcacaaggtggctaagtgggcgacagtgaccttccacctcccccaccatgttctgaaaagcattgcgtccgcaatagtgaatgagctcaagaagatcaaccagaacgtggcagccctgcctgtggcttctagcgtgatggacaggttgtcttatctgttacccagcgccagacccgaactgggtgtggggccaggtcgttccgtcgaccgttcgctgatgtattctgaggcaaacagacgcgaaactttcacaagttggcctcacgtgggctatcgatgggcccagcctgaccccatggcccaagctggtttttaccatcagcccgcctcctctggcgatgatcgtgctatgtgctttacttgttctgtctgtctggtgtgctgggaacccacagatgaaccttggtcagagcacgaaagacattctccaaattgcccatttgtgaaaggcgaacatacccagaacgtgccactgagtgtgacactggcgactagccccgcccagttcccttgtacagacggaactgacaggatatcctgttttgggagcggaagctgcccccatttcctggctgctgccacaaagcgtggaaagatctgtatttgggatgtgtctaaattgatgaaagtccacctgaagttcgagataaacgcttacgaccccgccatcgtccagcagctcatcttgtctggcgaccccagctccggggttgattcccgtcgcccaacactggcttggttggaagattcttcaagttgttcggacatccccaagctcgaaggggactctgatgacctcctcgaagattcagatagcgaggaacacagcaggtccgattctgtgaccggacatacaagtcagaaggaagcaatggaagtgtctctggacatcactgctcttagcatactccaacagccagagaaacttcaatgggagatcgttgctaacgtgctcgaggataccgtcaaagacctggaggaactgggggccaacccttgcctcactaatagcaagagtgagaaaacaaaagagaaacaccaggagcagcacaatatcccttttccctgtctgctcgccggaggtctgttgacctataaaagtcccgccaccagccctatcagcagcaattctcaccggtcactcgacggcctctcccgcacgcagggggagtccatttccgagcagggaagcactgataacgagagctgtacaaactctgagctcaactccccactggttcggcgcactctccctgttctattgttgtactctataaaggaaagtgacgaaaaggccggaaaaatcttctcccagatgaacaacatcatgtctaaaagtctacatgacgacggatttactgtcccccagattatcgaaatggaacttgactcccaggaacagctgctgctacaggacccaccagtgacctacatccagcagttcgcagatgcggcggccaacctcacatcccctgactctgaaaagtggaattccgtgttccccaagcccggcactctggtgcagtgccttagactccctaagtttgccgaggaagaaaacctctgcatcgattcaatcacaccctgcgccgatggaattcacctgctggtaggcctcagaacctgcccagtggagtctctgtccgccattaaccaagtggaggctctgaataatctcaataagcttaatagcgccctgtgcaaccgaaggaaaggagagctcgaatccaatttggccgtcgtcaacggcgctaacatttccgtcatccagcacgaaagccccgccgatgtccaaactccactaataattcagccggagcagagaaacgtcagcggaggttatttagtattgtacaagatgaattatgcaacgagaattgtaacactggaggaggagcccataaaaatccaacatatcaaggatccacaggataccatcactagcctgatactactaccccctgacattctcgataatagagaagacgattgtgaagaacctatagaggacatgcagctcacctcaaaaaacgggttcgaacgggaaaaaacatcagacatctcaactttaggccacctcgtaatcactacacagggcggctatgtcaagatcctcgatctgtcgaacttcgagatattggcaaaagtggagccaccaaagaaggagggtaccgaagaacaggacacattcgtttccgtaatttactgcagtggcaccgatcgcctttgcgcctgcacgaagggcggggagttgcatttccttcagatcgggggcacatgcgatgatatcgacgaagccgatatcctagtggatggctcactgtcaaaaggaattgagccatcatctgaggggagcaagcctctgtccaacccgtcctcccccggaatctcaggtgtggatctcttggtggaccagcccttcaccttggagattctgacttctctcgtcgagttgaccaggttcgaaactttgacaccaagattctcggccacggtgcctccctgttgggtcgaggtccagcaggaacaacagcagcggagacacccccagcatctgcaccaacagcaccacggcgacgcagcccagcatacccgcacatggaaactgcagaccgacagtaacagttgggacgaacatgtgtttgaactcgtgctacccaaagcttgcatggttggccacgtggacttcaaattcgtgttgaatagcaacattacaaatattcctcaaatccaggtgactctgctgaaaaataaggcacctggtttgggcaaggtgaacgccctgaatatagaagtcgagcagaatggcaaaccctcactggttgatttgaacgaggagatgcagcatatggatgtcgaggaatctcaatgtctcagactgtgccccttcctggaggatcacaaagaggatattctctgcggtccggtatggttggccagcggattagatctgtcaggccacgccgggatgctgacattgacatcccccaaactggttaaggggatggctggcgggaagtaccgctcatttctaatccacgtgaaagcggtgaatgaaagaggaacagaggagatatgcaatggcggtatgcgtccagtggtgcgtcttcctagcctgaagcatcagtcaaataagggatatagcctggcatccctcctggctaaagtcgctgccggcaaggaaaaaagttcaaatgttaagaacgaaaatacctctgggacccgaaaatcagagaatctacggggatgcgatttacttcaggaggtcagcgtaactatccgacggttcaagaagactagtatttccaaagagagagtgcagcgatgtgcaatgctgcagttctcagagttccacgaaaagctggtcaacactctctgtcgaaagacagatgatggccagataaccgagcacgcccaaagcttggtcttagacaccctctgttggctcgctggtgttcattcaaacggccccgggagctctaaggaaggaaacgaaaatctgctctcaaagactaggaagttcctgtccgatatcgtgagagtatgctttttcgaggctgggagatcgatcgcgcataagtgcgctagattcttggctctgtgcatctccaacggaaagtgcgatccctgtcagcctgctttcggccctgtgctattaaaggccctcctggacaacatgtcatttctgccagcagccactacaggcggatccgtgtactggtatttcgttctgctgaattacgtgaaggacgaggacctggccggatgcagtaccgcgtgtgctagcctcttaaccgcagtttctagacagctccaggatcgtctgacgccgatggaggctctcctgcaaacaagatacggattatattccagcccttttgacccagtgctgttcgacctggagatgagcggctccagctgcaaaaatgtgtataactcttccattggagtgcagagtgatgaaattgatcttagtgatgttctctctggaaatgggaaggtttcctcttgtactgctgctgagggaagctttacctctctgactggcttattggaggttgagcccctgcactttacttgtgtgtcgacatctgacggtacacgcattgagcgggacgatgccatgtcttccttcggggtcactcccgctgtcgggggtctgagctctgggactgtgggggaggcaagtactgcgctgagctcggctgcacaggttgccctgcagtccctgtcacacgccatggcctccgctgaacagcagctccaggtgctgcaggagaagcaacagcaactcctaaaattgcagcagcagaaagcaaaactggaggccaaactccaccagacaactgctgcagccgctgccgctgcctccgcggttggtccagtgcacaacagcgtgcccagcaatcctgtggcagctccaggattcttcatacacccttctgatgttattcctcccacgccaaagaccacaccgctgttcatgacacctcctttaacccctccaaacgaggccgtttcagtggtgatcaatgccgagttagcgcagttattccccggatcagtcatcgacccacctgccgtcaacttagctgctcacaacaaaaattcaaataaatcccggatgaacccgttaggaagtggcctggcactggctatctcccatgcgtctcacttcctccagcccccacctcaccaaagcataattatagagaggatgcacagtggggcaaggcggtttgtgaccctcgattttggccggcccatcctgctcacagacgtcctgattcctacgtgtggggatctggctagtctgtcaatcgatatctggacactgggggaggaagtggatgggaggcgcctagtcgtcgccacagacatctctactcactcgctcatattgcacgatttgatacccccacccgtttgcagattcatgaagatcacagtgatcggtcggtatggaagcacaaacgccagagcgaaaatccctcttgggttctactacggccacacttacatcctaccttgggagtccgagctaaaactgatgcatgaccctctgaaaggggagggcgagtctgcgaatcagcccgaaatcgatcaacatctcgctatgatggtagcattgcaagaagatatacagtgtagatacaatcttgcttgtcacaggctggagaccctgttgcagtctattgatcttccccccctgaacagcgccaacaacgcccaatacttcctgagaaagccagataaagccgtggaggaggattcccgcgtgttttctgcctatcaagactgcatacaacttcagctccagctgaatctcgctcataacgcagttcagaggctgaaggtggccctgggagcctccaggaaaatgctgtcggagacttcaaaccctgaggatctgatacagactagctccaccgaacagttaagaaccatcattaggtatctgctagacacgctgctgtcattgctgcacgcctcgaatgggcactctgttccagctgtcctgcagtctactttccatgcacaggcttgtgaggagctgtttaagcacctttgtattagtggcacgccaaagatccggctgcacactgggctgttgctggtacaactttgcggcggagagagatggtgggggcagtttctgtccaacgttctccaggaactgtataacagcgaacagctgttgatttttccccaagacagggtttttatgttactgtcatgcattggacagcgcagcctgtcgaatagtggcgtactggagtctttacttaatcttcttgacaaccttcttagcccgctacagccacagctccctatgcacaggcggaccgaaggtgttcttgacatcccaatgatcagttgggtcgtgatgctggtcagcagattacttgactatgtcgccaccgttgaggacgaggccgcggcggctaaaaagcccttgaacggaaaccaatggtcctttattaataacaatctgcatactcagagtttaaacaggagttccaaagggtccagttccttagacaggctgtacagccggaagatacggaagcagttggtccatcacaagcagcagctgaatctccttaaggctaagcagaaggctctggtggaacaaatggagaaagaaaaaattcagagcaacaaggggagctcttacaaattgttagtggagcaggcgaagttaaagcaggcaacaagcaagcacttcaaggacctcatccggctgcgccgcacagcagagtggagccgtagtaatctggacaccgaagtgacaacggccaaggagtcccctgagatcgagcctctcccctttaccctcgcccacgagcgatgcatttcagttgtgcagaaactggtactcttccttctgtccatggatttcacgtgccatgctgacttgctgctgttcgtttgcaaagtcctcgcgcggattgccaacgccactcgaccaacgatccacttgtgtgagattgtgaacgaaccacagctggaaaggctcctgctactcttagttggaaccgatttcaacagaggggatattagctgggggggcgcgtgggcccagtattcccttacctgtatgcttcaggatattcttgctggtgagctgctcgcccctgtggccgccgaggccatggaggagggtacagtgggagatgatgtaggtgccaccgcaggcgattccgacgacagccttcagcagtcctccgttcaactgcttgagacaatcgacgagccactgactcatgatattactggcgctcctccactgtcgagcctggagaaagataaagagatcgatctggaattgttacaagatcttatggaggtggacatcgacccactggacatcgacctggaaaaggaccccttagccgctaaagtgttcaaacccatctcaagtacttggtatgattactggggcgcagattatggtacatacaattacaatccttacatcgggggtctcgggatccccgttgccaagccaccagctaataccgaaaagaacggtagccagacagtgagtgttagcgtgtcgcaggcccttgacgcgaggctagaggttgggctcgaacagcaagctgaactgatgttaaagatgatgtccacccttgaagctgacagtattctgcaggctctaactaacacgagccccacattgagccaatcacctaccgggacagatgatagcctccttggtggcctccaggctgctaaccagacatcccagttgattatccagcttagttcagtacctatgctgaacgtgtgtttcaataaactgttcagcatgttacaagttcaccacgttcagctcgaatctttactgcagctttggctgacgctgtcgctcaacagttcttccacaggcaataaagagaatggcgccgatatctttctgtataatgccaaccggattcccgtgatctctctgaatcaggcgagtattacaagctttctgactgtgctggcatggtaccctaataccctgctccgtacttggtgcctggtcctccactctctcacattaatgacaaacatgcaactcaactccggctcgtcatcagccattggcacccaagagagtaccgcacatctactggtgtccgaccctaatctcattcacgtgctagtgaagtttctgagtggcacgagcccccatgggactaatcagcactcccctcaggtaggtcctaccgccacccaagctatgcaagaattcttaacaaggttgcaggtgcacctgtccagtacttgcccccagatcttctctgaattcctcctgaagctgattcacattctcagcaccgagcggggcgccttccagaccggacaaggaccattggacgcccaggttaagctgctagaattcaccctggagcagaatttcgaggttgtatccgtctctaccatttctgccgtgatcgaatcggtaaccttcctggtgcatcattatataacctgttcagacaaagttatgtcacgatctggctccgattcttccgttggcgccagagcctgttttggcgggttatttgctaacctcatcaggccaggggacgcaaaggccgtctgtggggaaatgacgcgagaccaactgatgtttgacctactgaagctagttaacattctggtgcaactgcccctctccggcaacagagaatatagcgcccgagtgtccgttaccaccaatacgacagatagcgtgagcgatgaggagaaggtttccggcggaaaggatggtaatggttccagcactagtgtccagggctcacccgcctatgtggcagaccttgtgctggccaatcagcaaatcatgtcccaaattctgtcagcactgggtctctgcaactcctctgccatggccatgataatcggagccagtggcctccacctgacaaagcatgagaacttccatggtggcctcgatgcaatatccgtgggtgacggtttgtttactatcctaactactctctctaagaaggcaagcaccgtgcacatgatgcttcagcccatcctgacctatatggcctgtggatatatgggacgtcagggctccctggccacctgtcagttgtccgaacctctgctctggttcatcctgcgggtgttggacacctctgatgctctgaaagccttccacgatatgggcggagtgcagctgatatgcaataatatggtgacaagtaccagagcaatcgtcaacacagcgcgctcaatggttagtactatcatgaaatttttggattctggaccaaataaagccgttgactccacactgaaaacaagaatcctggccagcgaaccagataacgccgagggtattcacaattttgcgcccctgggcaccattacatcaagctctcctacagcgcagccagcggaagttctgttgcaggcgaccccccctcaccgcagggccaggagcgcggcttggagctacatttttcttcctgaggaagcctggtgcgacttgactatccacctgcccgctgcagtgctcctgaaggaaattcacattcaaccccaccttgctagtctcgctacgtgcccatcttctgtcagtgtggaagtgtctgccgatggggtcaatatgttaccactatctaccccagtagtgacttccggacttacctatataaagatacaactcgtcaaggcagaggtcgcctccgcagtctgtcttaggctgcatagaccgagggatgctagcacactgggtctgtcacagatcaaattgcttggacttaccgccttcgggaccacttcatccgccacagtgaacaatccattcctcccatccgaggatcaagtgtcaaagacatccatcggctggctgagactgttgcaccattgcctaacccacatcagcgatctcgagggcatgatggctagcgccgcagccccaaccgctaatctcctccaaacttgcgctgccctgctgatgtccccctattgcgggatgcatagccccaacattgaggtggtgctagtgaaaattggcctccagtcaacacgcatcggcctgaaacttattgacatcttactgcggaattgcgctgcatctggctcggatccaacagacttgaacagccctctcctgtttggtagattgaacggtctaagttcggatagtaccatagacatcctgtaccagttaggcaccactcaggacccaggaaccaaggaccggattcaggctttgctgaagtgggtcagtgatagcgctcgagttgctgccatgaagagatcaggtcgcatgaactatatgtgccctaatagctctactgtggagtacgggttattgatgccaagcccgtctcacctgcactgcgtggctgcaatcctgtggcattcctacgaactcctggtcgagtacgatctacccgcgctgcttgaccaagaactatttgaattactgtttaattggagcatgagtctgccctgcaatatggtgctaaagaaggccgttgactccttgctgtgcagtatgtgccatgtccacccaaattatttcagtctgctgatgggctggatgggcattacccccccgccggtccagtgccatcaccgcttgtcaatgaccgatgacagtaagaagcaagatctgtcaagcagtctaacagacgactcaaagaatgctcaggcacctctggcattgacagagtctcatctcgccaccctcgcttcaagcagccagagtcctgaagcaataaaacaactgctggactcaggtctcccaagcctgttagtgaggtcattagccagcttctgttttagccacatcagctcttctgaatcaatagctcaaagtatcgatattagccaagacaaactgcgtcgacaccatgtaccgcagcagtgtaataagatgcctatcacagctgacctggtcgcacccatcctgcggtttctgactgaggtgggtaacagccacataatgaaagattggttgggcggctcagaggttaatcccctgtggacagctttgctattcctgctctgccatagtggcagcactagcggaagtcacaacttaggtgcccaacagacctctgcacggtccgctagcctgtccagcgccgccaccacagggctgactactcaacaacgcacagccatagagaacgctacagtcgcttttttcctgcagtgcatcagttgccacccaaataatcaaaaattgatggctcaggtgctctgtgaactcttccagaccagccctcagagaggaaacctgccaacatcggggaatatcagtggatttattagaagactcttccttcagctcatgctggaggacgaaaaagtgactatgtttctccagtcgccttgtccattatacaagggccggatcaacgctacttcccatgtgatccagcatcccatgtacggcgctgggcacaaattcagaaccctacatctgccggtgtccacaacactatctgacgtactcgatagggtgagcgacacaccctcaatcactgctaagttgataagtgagcaaaaggatgacaaagaaaaaaagaatcatgaagagaaagaaaaggttaaagctgagaatggctttcaggacaactactctgtggtagtggcctctggactgaagagtcagtctaagagagccgtttccgccacccccccacgtcccccgagccgcaggggaaggactatccccgacaaaatcggcagtacgagtggagccgaagccgccaataagataatcaccgtccccgtgtttcatctgttccacaagctcttagcgggccagcctttgccagctgagatgacactggcccaactattgacgctgctgtacgacaggaagcttcctcagggctataggtccatcgacttgactgtcaaactcggaagccgggtgatcacagatccctcgctgtctaaaaccgattcatacaagcggctgcaccccgagaaagaccatggagacctcttggctagttgcccagaggacgaggcactgactccgggcgatgaatgtatggatggcattttggacgaaagtctcctggagacgtgccccatccagtcccccctgcaggtgttcgctggcatgggcggccttgccttgattgccgagcggctccccatgctttaccccgaagttattcagcaggtctccgcacccgtggtaacgagtactactcaagagaagccaaaggattccgaccagtttgagtgggttactattgagcagagtggggagctcgtgtacgaagccccagagacagtggccgcggagcctccccccattaagtctgcagtccagaccatgtccccgatacctgcccattccctggccgctttcggattgttccttcggctcccaggctacgccgaggtgctcctaaaggagcgcaaacacgctcagtgccttttaaggctagtgctcggcgtgaccgatgacggcgaagggtcccatatactgcagagtccctcagccaatgttttaccaactctgccctttcatgtgttacgctctctgttctcgacgactcctctcaccacggatgacggtgtgctgctccggagaatggcactggagattggagcactgcacctgatcctggtgtgcctcagtgctctgtctcatcacagcccaagagtcccaaacagttctgtgaaccaaactgagccacaggtatcctctagccacaatccaacctctactgaagagcaacaactgtattgggctaaaggaactggatttggcactggaagtacagcctccggttgggatgtggagcaagcactgactaaacaacggcttgaagaagagcatgtgacatgtctcttgcaagtccttgccagctacatcaaccctgtgtcctctgccgttaatggtgaggcgcagtctagccacgagacccgaggccagaattcaaacgctttgcccagtgtgctcctcgaattattgtcacagtcttgtctgattcccgctatgtcgtcttacctgcgaaacgactctgtcctcgacatggccaggcacgtgccattgtacagagctcttctagagcttctgcgagccatcgcttcttgcgccgccatggtccccctcctgttaccactaagtacagaaaatggtgaagaggaggaagaacagtcagagtgccagaccagcgtgggaaccttattggcaaaaatgaagacctgtgttgatacctatacaaatcggttacggagtaaacgggagaacgtaaagacaggagtaaagccagacgcctctgaccaagagcctgagggtcttacactgctcgtgccggatattcagaagactgccgaaatcgtgtacgccgccacaacatctctgagacaagccaaccaggagaaaaagttaggcgaatactcgaagaaggccgctatgaaacccaagccgctgagcgtactgaagtctctggaggagaagtacgtggcagtgatgaagaagctgcagtttgatacatttgaaatggtatctgaggatgaggatggcaagctggggtttaaagtgaattaccattatatgtcacaggtgaagaacgctaacgacgccaacagcgctgcccgcgcacgccgtctggcgcaagaggctgtcactttgtccacatccttgcctctgtcgtcctcttcatctgtgtttgtccgctgtgatgaggagaggttggatattatgaaagtattgattacaggtcctgccgacacaccctatgccaatgggtgcttcgaatttgatgtgtacttccctcaagactatcccagcagtccacccctggttaacctagagactacaggggggcattccgttagattcaatccgaacctttacaatgatggaaaagtgtgcctgtctatcctgaatacatggcacggtcgcccagaagagaaatggaatccccagaccagctccttccttcaggtgctcgtatctgttcagtctttgattttagtcgccgagccatatttcaatgagcccgggtacgagcgctctaggggcacaccctccggtactcagtcttcgagagagtacgatgggaatataaggcaggctacagtgaaatgggccatgctagagcaaatcagaaatccgagtccgtgtttcaaagaggtgatccataagcatttttacctgaaaagggtggagataatggcgcagtgtgaagaatggatcgcagatatccagcaatattcctccgataagagggttggaaggacaatgtcccaccacgccgccgcactgaagcgccacacggctcagttacgcgaggaactgctgaagttgccctgtcccgaagggctggaccctgacactgacgatgctcctgaagtgtgtcgcgccactaccggtgctgaggagacactgatgcatgatcaagtaaagccctcatctagcaaagagctcccctccgactttcagctgtag

SEQ ID NO: 190180 - DNA, 14574 bp, Artificial Sequence
  derived and/or modified sequence
atggtgactggaggaggagctgcccctcctggcaccgtgacagagcccctgcccagcgtgattgtgctgtctgctggcaggaagatggctgctgctgctgctgctgccagcggccctggctgcagcagcgctgctggagctggagctgctggggtgtctgagtggctggtgctgagagatggctgcatgcactgtgatgctgatggcctgcacagcctgagctaccacccagccctgaatgccatcctggccgtgaccagccggggcaccatcaaggtgattgatggcaccagcggggccaccctgcaggccagcgccctgagcgccaagccaggcggccaggtgaagtgccagtacatctctgctgtggacaaggtgatctttgtggatgattatgctgtgggctgcaggaaggacctgaatggcatcctgctgctggacacagccctgcagacccctgtgtccaagcaggatgatgtggtgcagctggagctgcctgtgacagaggcccagcagctgctgagcgcctgcctggagaaggtggacatcagcagcacagagggctatgacctcttcatcacccagctgaaggatggcctgaagaacaccagccatgaaacagctgccaaccacaaggtggccaagtgggccaccgtgaccttccacctgccccaccacgtgctgaagagcatcgccagcgccatcgtgaatgagctgaagaagatcaaccagaatgtggccgccctgcctgtggccagctctgtgatggaccggctgagctacctgctgcccagcgcccggcctgagctgggcgtgggccctggccgctctgtggacaggagcctgatgtacagcgaggccaacagaagagagaccttcacctcctggccccacgtgggctaccgctgggcccagcctgaccccatggcccaggccggcttctaccaccagcctgccagcagtggagatgaccgggccatgtgcttcacctgcagcgtgtgcctggtgtgctgggagcccacagatgagccctggagcgagcacgagcggcacagccccaactgcccctttgtgaagggggagcacacccagaatgtgcccctgtctgtgaccctggccaccagccctgcccagttcccctgcacagatggaacagaccgcatcagctgctttggaagtggcagctgcccccacttcctggccgccgccaccaagaggggcaagatctgcatctgggatgtgtccaagctgatgaaggtgcacctgaagtttgagatcaatgcctatgaccctgccatcgtgcagcagctgatcctgagcggggaccccagcagtggagtggacagccggcggcccaccctggcctggctggaggacagcagcagctgcagcgacatccccaagctggagggggacagtgatgacctgctggaggacagcgacagcgaggagcacagcagaagtgacagcgtgacaggccacaccagccagaaggaggccatggaggtgtccctggacatcacagccctgagcatcctgcagcagcctgagaagctgcagtgggagatcgtggccaacgtgctggaggacacagtgaaggacctggaggagctgggcgccaacccctgcctgaccaacagcaagtctgagaagaccaaggagaagcaccaggagcagcacaacatccccttcccctgcctgctggccggcggcctgctgacctacaagagccctgccaccagccccatcagcagcaacagccacaggagcctggatggcctgagcaggacccagggcgagagcatcagcgagcagggcagcacagacaatgaaagctgcaccaacagcgagctgaacagccccctggtgcggaggaccctgcctgtgctgctgctgtacagcatcaaggagagtgatgagaaggccggcaagatcttcagccagatgaacaacatcatgagcaagagcctgcatgatgatggcttcaccgtgccccagatcatcgagatggagctggacagccaggagcagctgctgctgcaggacccccctgtgacctacatccagcagtttgctgatgctgctgccaacctgaccagcccagattctgagaagtggaacagcgtcttccccaagccaggcaccctggtgcagtgcctgcggctgcccaagtttgctgaggaggagaacctgtgcatcgacagcatcaccccctgtgctgatggcatccacctgctggtgggcctgcggacctgccctgtggagagcctgagcgccatcaaccaggtggaggccctgaacaacctgaacaagctgaacagcgccctgtgcaacagaagaaaaggagagctggagagcaacctggccgtggtgaatggagccaacatcagcgtcatccagcacgagagccctgcagatgtgcagacccccctcatcatccagcctgagcagagaaatgtgtctgggggctacctggtgctgtacaagatgaactatgccacccgcatcgtgaccctggaggaggagcccatcaagatccagcacatcaaggacccccaggacaccatcaccagcctcatcctgctgcccccagacatcctggacaacagagaagatgactgtgaggagcccatcgaggacatgcagctgaccagcaagaatggatttgagcgggagaagaccagtgacatcagcaccctgggccacctggtgatcaccacccagggcggctacgtgaagatcctggacctgagcaactttgagatcctggccaaggtggagccccccaagaaggagggcacagaggagcaggacacctttgtgtctgtcatctactgcagcggcacagaccggctgtgtgcctgcaccaagggcggggagctgcacttcctgcagatcggcggcacctgtgatgacattgatgaggccgacatcctggtggatggcagcctgagcaagggcatcgagcccagcagcgagggcagcaagcccctgagcaaccccagcagccctggcatctctggagtggacctgctggtggaccagcccttcaccctggagatcctgaccagcctggtggagctgaccaggtttgagaccctgaccccccgcttcagcgccaccgtgcccccctgctgggtggaggtgcagcaggagcagcagcagaggaggcacccccagcacctgcaccagcagcaccacggagatgctgcccagcacaccaggacctggaagctgcagacagacagcaacagctgggatgaacatgtgtttgagctggtgctgcccaaggcctgcatggtgggccacgtggacttcaagtttgtgctgaacagcaacatcaccaacatcccccagatccaggtgaccctgctgaagaacaaggcccctggcctgggcaaggtgaatgccctgaacatcgaggtggagcagaatggcaagcccagcctggtggacctgaatgaggagatgcagcacatggatgtggaggagagccagtgcctgcggctgtgccccttcctggaggaccacaaggaggacatcctgtgtggccctgtgtggctggccagcggcctggacctgagcggccacgccggcatgctgaccctgaccagccccaagctggtgaagggcatggccggcggcaagtaccgctccttcctgattcatgtgaaggctgtgaatgaaagaggaacagaggagatctgcaatggaggcatgaggcctgtggtgcggctgcccagcctgaagcaccagagcaacaagggctacagcctggccagcctgctggccaaggtggccgccggcaaggagaagagcagcaatgtgaagaatgaaaacaccagcggcaccaggaagtctgagaacctgcggggctgtgacctgctgcaggaggtgtctgtgaccatccgccgcttcaagaagaccagcatcagcaaggagcgggtgcagagatgtgccatgctgcagttcagcgagttccacgagaagctggtgaacaccctgtgcaggaagacagatgatggccagatcacagaacatgcccagagcctggtgctggacaccctgtgctggctggccggcgtgcacagcaatggacctggcagcagcaaggagggcaatgaaaacctgctgagcaagaccaggaagttcctgagtgacatcgtgcgggtgtgcttctttgaggccggccgcagcatcgcccacaagtgtgcccgcttcctggccctgtgcatcagcaatggaaaatgtgacccctgccagcctgccttcggccctgtgctgctgaaggccctgctggacaacatgtccttcctgcctgctgccaccaccggcggctctgtgtactggtactttgtgctgctgaactacgtgaaggatgaggacctggccggctgcagcacagcctgtgccagcctgctgacagctgtgtcccggcagctgcaggaccggctgacccccatggaggccctgctgcagaccaggtatggcctgtacagcagcccctttgatcctgtgctgtttgacctggagatgagcggcagcagctgcaagaatgtgtacaacagcagcattggagtgcagagtgatgaaattgacctgagtgatgtgctgtctggaaatggcaaggtgagcagctgcacagctgctgagggcagcttcaccagcctgaccggcctgctggaggtggagcccctgcacttcacctgtgtgtccaccagtgatggcaccagaattgaaagagatgatgccatgagcagctttggagtgaccccagctgtgggcggcctgagcagcggcaccgtgggggaggccagcacagccctgagcagcgctgcccaggtggccctgcagagcctgagccacgccatggccagcgctgagcagcagctgcaggtgctgcaggagaagcagcagcagctgctgaagctgcagcagcagaaggccaagctggaggccaagctgcaccagaccacagctgctgctgctgctgctgccagcgctgtgggccctgtgcacaacagcgtgcccagcaaccctgtggccgcccctggcttcttcatccaccccagtgatgtgattcctcccacccccaagaccacccccctcttcatgaccccacccctgaccccaccaaatgaagctgtgtctgtggtgatcaatgctgagctggcccagctgtttcctggctctgtgattgatcctcctgctgtgaacctggccgcccacaacaagaacagcaacaagagcaggatgaaccccctgggcagcggcctggccctggccatcagccacgccagccacttcctgcagcccccaccccaccagagcatcatcatcgagaggatgcacagcggggccaggagatttgtgaccctggactttggccggcccatcctgctgacagatgtgctgatccccacctgtggggacctggccagcctgagcattgacatctggaccctgggggaggaggtggatggaagaaggctggtggtggccacagacatcagcacccacagcctcatcctgcatgacctgatccccccacctgtgtgccgcttcatgaagatcaccgtgattggccgctatggcagcaccaatgcccgggccaagatccccctgggcttctactacggccacacctacatcctgccctgggagagcgagctgaagctgatgcatgaccccctgaagggggagggggagagcgccaaccagcctgagattgaccagcacctggccatgatggtggccctgcaggaggacatccagtgccgctacaacctggcctgccaccggctggagaccctgctgcagagcattgacctgccccccctgaacagcgccaacaatgcccagtacttcctgaggaagccagacaaggctgtggaggaggacagcagggtcttcagcgcctaccaggactgcatccagctgcagctgcagctgaacctggcccacaatgctgtgcagaggctgaaggtggccctgggcgccagcaggaagatgctgtctgagaccagcaaccctgaggacctgatccagaccagcagcacagagcagctgcggaccatcatccgctacctgctggacaccctgctgagcctgctgcacgccagcaatggccacagcgtgcctgctgtgctgcagagcaccttccacgcccaggcctgtgaggagctgttcaagcacctgtgcatcagcggcacccccaagatccggctgcacacaggcctgctgctggtgcagctgtgtggcggggagcgctggtggggccagttcctgagcaatgtgctgcaggagctgtacaacagcgagcagctgctgatcttcccccaggacagagtcttcatgctgctgagctgcatcggccagaggagcctgagcaacagcggcgtgctggagagcctgctgaacctgctggacaacctgctgagccccctgcagccccagctgcccatgcacagaagaacagaaggagtgctggacatccccatgatctcctgggtggtgatgctggtgtcccggctgctggactatgtggccaccgtggaggatgaagctgctgctgccaagaagcccctgaatggaaaccagtggagcttcatcaacaacaacctgcacacccagagcctgaacagaagcagcaagggcagcagcagcctggaccggctgtacagcaggaagatcaggaagcagctggtgcaccacaagcagcagctgaacctgctgaaggccaagcagaaggccctggtggagcagatggagaaggagaagatccagagcaacaagggcagcagctacaagctgctggtggagcaggccaagctgaagcaggccaccagcaagcacttcaaggacctgatccggctgcggaggacagctgagtggagccgcagcaacctggacacagaggtgaccacagccaaggagagccctgagattgagcccctgcccttcaccctggcccacgagcgctgcatctctgtggtgcagaagctggtgctcttcctgctgtccatggacttcacctgccacgccgacctgctgctgtttgtgtgcaaggtgctggccagaattgccaatgccacccggcccaccatccacctgtgtgagatcgtgaatgagccccagctggagcggctgctgctgctgctggtgggcacagacttcaacagaggagacatctcctggggcggggcctgggcccagtacagcctgacctgcatgctgcaggacatcctggccggggagctgctggcccctgtggccgctgaggccatggaggagggcaccgtgggagatgatgtgggcgccacagctggggacagtgatgacagcctgcagcagagctctgtgcagctgctggagaccattgatgagcccctgacccatgacatcactggagccccacccctgagcagcctggagaaggacaaggagattgacctggagctgctgcaggacctgatggaggtggacatcgaccccctggacatcgacctggagaaggaccccctggccgccaaggtgttcaagcccatcagcagcacctggtatgactactggggcgctgactatggcacctacaactacaacccctacatcggcggcctgggcatccctgtggccaagcccccagccaacacagagaagaatggcagccagacagtgtctgtgtctgtgtcccaggccctggatgcccggctggaggtgggcctggagcagcaggccgagctgatgctgaagatgatgagcaccctggaggccgacagcatcctgcaggccctgaccaacaccagccccaccctgagccagagccccaccggcacagatgacagcctgctgggcggcctgcaggccgccaaccagaccagccagctgatcatccagctgagctctgtgcccatgctgaatgtgtgcttcaacaagctgttctccatgctgcaggtgcaccacgtgcagctggagagcctgctgcagctgtggctgaccctgagcctgaacagcagcagcacaggcaacaaggaaaatggagctgacatcttcctgtacaatgccaaccgcatccctgtgatcagcctgaaccaggccagcatcaccagcttcctgactgtgctggcctggtaccccaacaccctgctgcggacctggtgcctggtgctgcacagcctgaccctgatgaccaacatgcagctgaacagcggcagcagcagcgccatcggcacccaggagagcacagcccacctgctggtgtctgaccccaacctgatccacgtgctggtgaagttcctgagcggcaccagcccccacggcaccaaccagcacagcccccaggtgggccccacagccacccaggccatgcaggagttcctgacccggctgcaggtgcacctgagcagcacctgcccccagatcttcagcgagttcctgctgaagctgatccacatcctgagcacagagcggggggccttccagacaggccagggccccctggatgcccaggtgaagctgctggagttcaccctggagcagaactttgaggtggtgtctgtgtccaccatctctgctgtgattgagagcgtgaccttcctggtgcaccactacatcacctgcagcgacaaggtgatgagccgcagcggcagtgacagctctgtgggcgcccgggcctgctttggaggcctgtttgccaacctgatccggcctggagatgccaaggctgtgtgtggggagatgacccgggaccagctgatgtttgacctgctgaagctggtgaacatcctggtgcagctgcccctgagcggcaaccgggagtacagcgcccgggtgtctgtgaccaccaacaccacagattctgtgtctgatgaggagaaggtgtctgggggcaaggatggaaatggcagcagcacctctgtgcagggcagccctgcctacgtggccgacctggtgctggccaaccagcagatcatgagccagatcctgagcgccctgggcctgtgcaacagcagcgccatggccatgatcatcggggccagcggcctgcacctgaccaagcatgagaacttccacggcggcctggatgccatctctgtgggagatggcctcttcaccatcctgaccaccctgagcaagaaggccagcacagtgcacatgatgctgcagcccatcctgacctacatggcctgtggctacatgggccggcagggcagcctggccacctgccagctgtctgagcccctgctgtggttcatcctgcgggtgctggacaccagtgatgccctgaaggccttccatgacatgggcggcgtgcagctgatctgcaacaacatggtgaccagcacccgggccatcgtgaacacagcccgctccatggtgtccaccatcatgaagttcctggacagcggccccaacaaggctgtggacagcaccctgaagacccgcatcctggccagcgagccagacaatgctgagggcatccacaactttgcccccctgggcaccatcaccagcagcagccccacagcccagcctgctgaggtgctgctgcaggccaccccaccccaccggcgggcccggtctgctgcctggagctacatcttcctgcctgaggaggcctggtgtgacctgaccatccacctgcctgctgctgtgctgctgaaggagatccacatccagccccacctggccagcctggccacctgccccagctctgtgtctgtggaggtgtctgcagatggagtgaacatgctgcccctgagcacccctgtggtgaccagcggcctgacctacatcaagatccagctggtgaaggccgaggtggccagcgctgtgtgcctgcggctgcaccggcccagagatgccagcaccctgggcctgagccagatcaagctgctgggcctgacagccttcggcaccaccagcagcgccaccgtgaacaaccccttcctgcccagcgaggaccaggtgtccaagaccagcatcggctggctgcggctgctgcaccactgcctgacccacatcagtgacctggagggcatgatggccagcgctgctgcccccacagccaacctgctgcagacctgtgccgccctgctgatgagcccctactgcggcatgcacagccccaacatcgaggtggtgctggtgaagattggcctgcagagcacccgcatcggcctgaagctgattgacatcctgctgaggaactgtgccgccagcggcagtgaccccacagacctgaacagccccctgctgtttggccgcctgaatggcctgagcagtgacagcaccatcgacatcctgtaccagctgggcaccacccaggaccccggcaccaaggaccgcatccaggccctgctgaagtgggtgtctgacagcgcccgggtggccgccatgaagaggagcggccgcatgaactacatgtgccccaacagcagcacagtggagtatggcctgctgatgcccagccccagccacctgcactgtgtggccgccatcctgtggcacagctatgagctgctggtggagtatgacctgcctgccctgctggaccaggagctgtttgagctgctcttcaactggagcatgagcctgccctgcaacatggtgctgaagaaggctgtggacagcctgctgtgcagcatgtgccacgtgcaccccaactacttcagcctgctgatgggctggatgggcatcaccccacctcctgtgcagtgccaccaccggctgtccatgacagatgacagcaagaagcaggacctgagcagcagcctgacagatgacagcaagaatgcccaggcccccctggccctgacagagagccacctggccaccctggccagcagcagccagagccctgaggccatcaagcagctgctggacagcggcctgcccagcctgctggtgcgcagcctggccagcttctgcttcagccacatcagcagcagcgagagcatcgcccagagcattgacatcagccaggacaagctgcggcggcaccacgtgccccagcagtgcaacaagatgcccatcacagctgacctggtggcccccatcctgcgcttcctgacagaggtgggcaacagccacatcatgaaggactggctgggcggcagcgaggtgaaccccctgtggacagccctgctcttcctgctgtgccacagcggcagcaccagcggcagccacaacctgggcgcccagcagaccagcgcccggagcgccagcctgagcagcgctgccaccaccggcctgaccacccagcagaggacagccattgaaaatgccaccgtggccttcttcctgcagtgcatcagctgccaccccaacaaccagaagctgatggcccaggtgctgtgtgagctgttccagaccagcccccagaggggcaacctgcccaccagcggcaacatcagcggcttcatcagaagactcttcctgcagctgatgctggaggatgagaaggtgaccatgttcctgcagagcccctgccccctgtacaagggccgcatcaatgccaccagccacgtgatccagcaccccatgtatggagctggccacaagttccgcaccctgcacctgcctgtgtccaccaccctgagtgatgtgctggacagagtgtctgacacccccagcatcacagccaagctgatcagcgagcagaaggatgacaaggagaagaagaaccacgaggagaaggagaaggtgaaggcagaaaatggcttccaggacaactacagcgtggtggtggccagcggcctgaagagccagagcaagagagctgtgtctgccaccccacccaggcctcccagccggcggggccgcaccatcccagacaagattggcagcaccagcggggctgaggccgccaacaagatcatcaccgtgcctgtgttccacctgttccacaagctgctggccggccagcccctgcctgctgagatgaccctggcccagctgctgaccctgctgtatgacaggaagctgccccagggctaccgcagcattgacctgactgtgaagctgggcagcagggtcatcacagaccccagcctgagcaagacagacagctacaagaggctgcaccctgagaaggaccatggagacctgctggccagctgcccagaagatgaggccctgaccccaggagatgagtgcatggatggcatcctggatgagagcctgctggagacctgccccatccagagccccctgcaggtgtttgctggcatgggcggcctggccctgattgctgagcggctgcccatgctgtacccagaggtgatccagcaggtgtctgcccctgtggtgaccagcaccacccaggagaagcccaaggacagcgaccagtttgagtgggtgaccatcgagcagagcggggagctggtgtatgaggcccctgagaccgtggccgctgagcccccacccatcaagtctgctgtgcagaccatgagccccatcccagcccacagcctggccgccttcggcctcttcctgcggctgcccggctatgcagaggtgctgctgaaggagaggaagcacgcccagtgcctgctgcggctggtgctgggcgtgacagatgatggagagggcagccacatcctgcagagccccagcgccaacgtgctgcccaccctgcccttccacgtgctgcggagcctcttcagcaccacccccctgaccacagatgatggagtgctgctgcggaggatggccctggagattggagccctgcacctgatcctggtgtgcctgagcgccctgagccaccacagcccccgggtgcccaacagctctgtgaaccagacagagccccaggtgagcagcagccacaaccccaccagcacagaggagcagcagctgtactgggccaagggcactggatttggaacaggcagcacagccagcggctgggatgtggagcaggccctgaccaagcagaggctggaggaggagcacgtgacctgcctgctgcaggtgctggccagctacatcaaccctgtgagcagcgctgtgaatggagaggcccagagcagccatgagacccggggccagaacagcaatgccctgcccagcgtgctgctggagctgctgagccagagctgcctgatcccagccatgagcagctacctgagaaatgattctgtgctggacatggcccggcacgtgcccctgtaccgggccctgctggagctgctgcgggccatcgccagctgtgccgccatggtgcccctgctgctgcccctgagcacagaaaatggagaggaggaggaggagcagagcgagtgccagacctctgtgggcaccctgctggccaagatgaagacctgtgtggacacctacaccaaccggctgcggagcaagcgggagaatgtgaagacaggagtgaagccagatgccagtgaccaggagcctgagggcctgaccctgctggtgcctgacatccagaagacagctgagatcgtgtatgctgccaccaccagcctgcggcaggccaaccaggagaagaagctgggggagtacagcaagaaggccgccatgaagcccaagcccctgtctgtgctgaagagcctggaggagaagtatgtggccgtgatgaagaagctgcagtttgacacctttgagatggtgtctgaagatgaagatggcaagctgggcttcaaggtgaactaccactacatgagccaggtgaagaatgccaatgatgccaacagcgctgcccgggcccggcggctggcccaggaggccgtgaccctgagcaccagcctgcccctgagcagcagcagctctgtgtttgtgcgctgtgatgaggagcggctggacatcatgaaggtgctgatcaccggccctgctgacaccccctatgccaacggctgctttgaatttgatgtgtacttcccccaggactaccccagcagcccccccctggtgaacctggagaccaccggcggccacagcgtgcgcttcaaccccaacctgtacaatgatggcaaggtgtgcctgagcatcctgaacacctggcacggccggcctgaggagaagtggaacccccagaccagcagcttcctgcaggtgctggtgtctgtgcagagcctcatcctggtggccgagccctacttcaatgaacctggctatgaaagaagccggggcaccccatctggcacccagagcagccgggagtatgatggcaacatccggcaggccaccgtgaagtgggccatgctggagcagatccggaaccccagcccctgcttcaaggaggtgatccacaagcacttctacctgaagagggtggagatcatggcccagtgtgaggagtggattgctgacatccagcagtacagcagtgacaagagggtgggccgcaccatgagccaccacgccgccgccctgaagaggcacacagcccagctgcgggaggagctgctgaagctgccctgcccagagggcctggaccctgacacagatgatgcccctgaggtgtgccgggccaccaccggggctgaggagaccctgatgcatgaccaggtgaagcccagcagcagcaaggagctgcccagcgacttccagctgtag

SEQ ID NO: 190181 - DNA, 14574 bp, Artificial Sequence
  derived and/or modified sequence
atggtgaccggcggcggcgccgccccccccggcaccgtgaccgagcctctcccatccgtcatcgtgttgagcgccgggcgaaaaatggctgccgccgcagccgccgcctcgggtccaggatgttcctcagccgctggcgctggcgctgccggggtgtcagagtggctggtcctgcgcgatggctgcatgcactgcgacgctgacggactacattctctgtcctaccaccctgccttaaatgcgattttagcagtgactagtagaggaactatcaaagtgatcgacggcacatccggcgcaaccttgcaggcatcagctctctccgcaaagcctgggggacaggtgaagtgtcaatatatttcagccgtggacaaagtgatcttcgttgatgactacgctgtgggatgccgaaaagatctgaacggaatcctgctcctcgatactgctttgcagacgccagtgagtaaacaggatgatgtggtgcagttagagctacccgtgaccgaggcccagcagttgctttccgcctgcctggagaaagtggatatttcatccacggaaggttatgacctctttataactcaattaaaggatggcctgaagaacacatctcatgagacagcagcgaaccataaagtcgcaaaatgggctaccgtcacattccatttgccccatcacgtgctgaagagcattgcatcggcaattgtcaatgaactcaagaagattaatcaaaatgtcgccgccttaccagtagccagctccgtgatggatcgtttgagttacctgctaccaagcgcccgacccgagctcggagtgggaccaggccggagcgtcgataggtccctgatgtacagtgaagccaatcggcgtgaaactttcacatcctggccacacgtggggtacaggtgggcccagcctgaccctatggcccaggcgggtttctatcaccagcccgcatcaagcggcgatgatcgggcaatgtgcttcacctgctccgtttgcctcgtttgttgggaacctaccgatgaaccatggtcagaacatgaacgtcacagtcccaattgtccctttgtgaaaggggagcacacgcagaatgtccctctatctgttactctggcaacctcccctgcgcagtttccatgtaccgacgggactgaccggatttcatgctttggttccggcagctgcccacacttcttagctgctgcaacaaaacgaggcaaaatttgtatttgggacgtgtctaagctgatgaaggtgcacctgaaatttgagattaatgcctatgatcctgcaattgtgcaacagttgatattaagcggggacccaagctctggagttgattcgcggagaccgactctggcttggctcgaggatagcagctcctgctctgatatcccaaaacttgaaggggatagtgacgatttgttggaagacagcgatagcgaggaacactcgaggtctgattccgttaccggtcacactagccagaaggaagctatggaggtttctcttgacatcaccgctctgagcatcttgcagcagcccgaaaagctgcagtgggagattgtggctaatgtgcttgaagataccgtgaaggacctggaagaactcggggcaaatccttgtctcactaattccaagtccgagaagacaaaggagaagcaccaggaacaacataatatccctttcccctgcctcctcgctggcggactcctcacatacaaatcccctgcgacatcaccaataagttctaacagccatcggagcttagacggactgagtaggactcagggagaatccatttcagagcagggcagtaccgataacgagtcctgtaccaacagtgagctaaactctccactggtaagaagaacactccccgtgcttctcctctatagcatcaaagaatctgacgaaaaggccggcaagattttctcacagatgaataatattatgtctaagagtctccatgatgacgggtttaccgtcccccaaatcatagagatggagctggattctcaggaacagctgctgctccaagaccctcctgttacctacatccagcaatttgctgatgctgccgccaacctcacttcccccgatagcgagaaatggaatagcgtgtttcctaagcccggcacgctcgtgcagtgtttacggctacccaagttcgccgaggaagagaacttgtgtatcgacagcataaccccatgcgccgacggaatccacctgctggtgggtctccgcacttgtccagtggagagcttatcagccatcaatcaggtggaggccctaaacaacttgaataaacttaacagcgccctgtgtaatagaagaaaaggagaactcgaaagcaatctcgcagtcgtcaacggagccaacatcagcgttattcaacatgaaagtcccgctgatgttcagacacctctgatcatccagcctgaacagcgtaatgtgtctggcggctacctggtgctctacaaaatgaattacgcaacgcggattgtgacactggaagaagagcctatcaaaattcagcatatcaaagacccgcaggacactatcacaagcttaattttgctgcctcccgacattctcgataatcgcgaagacgactgcgaagagcccatcgaagacatgcaactgacatccaaaaatggcttcgaaagggagaagacatcagacataagcaccttggggcacctggtgattacaacacagggtggctatgtgaagattctcgacctgtccaactttgagatcctggctaaggtggagccacccaagaaggagggtacagaggagcaagacacatttgtatccgtgatctattgctccggcacagacagactgtgtgcctgcacgaaaggtggagagctgcattttctgcagattggcggcacctgtgacgacattgacgaggccgacatcttagtggacgggtcgttatctaagggaatcgagccctcttcagagggaagcaaaccgctgtcaaatccgtcttcacccggcatatccggtgtggacttacttgttgatcagccgttcacgttagaaattctgacaagcttggtcgagttgactaggttcgagacgcttacacctaggtttagcgctaccgttcctccttgctgggtggaggttcagcaggaacaacagcaacgacggcaccctcagcacctgcatcagcagcaccacggcgatgctgcacagcatactaggacctggaaactccagacggattccaatagttgggacgaacacgtcttcgaacttgtgctccccaaggcgtgcatggtcgggcatgttgatttcaaatttgtgttaaactcaaacattacaaacattccccagatccaagtcactctactgaagaataaggccccgggtctgggcaaggtaaatgcgttgaacattgaggtggagcagaacggtaagcccagccttgtggacttgaacgaggaaatgcaacacatggacgtagaagagagccagtgcctgcgtctatgccccttcctggaggaccacaaggaagacatcctgtgcggtcccgtatggttagcaagcggcttagacctgagcggccacgctggcatgctgacccttactagtccaaagctcgtgaaaggcatggctggtgggaagtaccggtcttttttgattcacgtgaaggcggtcaatgaaagaggcaccgaggagatatgcaatggagggatgcggccagttgtcagactgccttcactcaaacaccagtcaaataagggctactccctggccagcttgctggctaaagtggcggctggaaaggaaaagtcaagtaacgttaagaatgagaacacttctggaacccgaaagagtgagaatctgcgcggatgcgatctgctacaggaggtgtccgtgacaattcgacgatttaagaaaacgtccatctctaaggagagagtccagagatgcgctatgctccagttcagtgagtttcacgagaagctggttaataccttgtgtcgaaaaacagacgacggccagattacagagcatgcccaaagtttagtgctggataccctgtgttggctggctggagttcactctaacggccccggaagctcgaaagaggggaacgaaaacttactctccaagactaggaaattcctgtcagacattgtgagagtttgctttttcgaggccggacgatccatcgcacacaagtgcgcacgattcctggcgttatgcataagtaacgggaagtgcgatccttgccagccagccttcgggcctgtgctactgaaggctctgcttgataacatgagttttctcccagctgcgacaactggaggcagcgtgtactggtattttgttctgttgaattacgttaaagacgaggaccttgccggctgctctaccgcatgcgcctcgctgctcacagccgttagccgccaactccaagacagactgactccaatggaggctcttctccagacccgttacggactatacagttctccttttgatccagtgctattcgacctagagatgagcgggtcaagctgcaagaatgtttacaatagtagtatcggagttcagagtgatgagatcgacttgtcagacgttctgtcaggcaacgggaaggtgagttcgtgtaccgcagcagaaggctcttttaccagtctgacaggcctgctggaagtggagcctttgcacttcacctgcgtgtccacgtccgatggtacacgcattgaacgggatgatgccatgtcaagctttggagtaacccccgctgtcggcggcctgtccagtggtaccgtgggggaggcctctactgcgctcagttctgccgcacaagtggctctgcagtccctgtctcatgcaatggcctcagccgaacagcagctccaagtcctccaagaaaagcagcagcaacttctgaaattgcagcagcagaaagctaagctggaggcgaagcttcatcaaaccactgccgccgctgccgcagccgcctccgccgtcgggcccgtccacaactccgtcccctctaacccagtggcagcccccggcttcttcattcatccaagcgatgtcatccctcctacaccaaaaaccacccccctgtttatgacccctccgctcacccctccgaatgaggcagtctcagtcgtcattaatgcagagttagcccagcttttcccagggagtgtaattgacccgcctgcagtcaatttagcggctcataacaaaaatagtaacaagagtaggatgaaccctctggggtctggactggcactagctatcagccacgcctcgcattttctacagccccctccacaccaatcgatcatcattgaacgcatgcatagtggggctcgcaggtttgtgactttggacttcggcaggcctatcttgttgacagatgtgctgatacccacatgcggagatctcgcctccttaagtatcgatatttggaccctcggcgaagaggtggacggacgccggctcgtcgtggccactgacattagcacccatagtctgatcctgcatgatctcattccccctcctgtctgtcggtttatgaagatcactgtcattggccggtacgggagcacaaacgctcgagccaagataccgctcggtttctattatgggcacacatatatcctgccctgggagtctgaattgaagttgatgcacgacccacttaaaggagagggcgaatcagccaaccagcctgagattgatcagcatctggctatgatggtagcactgcaagaagacatacagtgtcggtataacttggcatgccatcgccttgagactctcttgcagtccatcgacctgccaccattaaactctgcgaacaatgctcagtatttcctccgtaagcccgacaaagcagtagaggaagatagtcgggtgtttagcgcttaccaagattgcattcagctgcagctgcagttgaatctcgcccataacgcagtccaaagacttaaggtcgccctgggtgcatctcgtaagatgctgagcgagacgagcaaccctgaggatctcattcaaacgtcctccaccgaacagctccgcacgataatacgctacttactggatactctcctctccctgctccatgcatccaacggccactcagtccctgccgtcctgcagtccacctttcacgctcaggcctgcgaggagttattcaaacacctctgtatcagcgggactccgaaaatccgcttgcatactggactgctgttggtgcagctatgcggaggcgaacgatggtggggccagttcctatcaaacgtgctacaagagctctataacagcgagcagctgttgatctttcctcaggatagagtgttcatgctactatcttgtataggccagaggagcctgtcgaatagcggtgttcttgagagtctcttgaacctcctggataatctgttgagccctctgcagcctcagttacctatgcacaggaggactgagggcgtgctggatatacccatgatttcatgggtagttatgctggtgtcgcggctcctggactacgtggccactgttgaggacgaggcagctgcagccaaaaaacctctgaacggtaatcaatggtccttcatcaacaacaatctgcacacacagagcctcaaccgcagcagtaaagggtcatctagtctggatcgtctatatagccgcaaaataaggaaacaattggtgcaccacaaacagcagctgaacctgctgaaggccaagcagaaggcacttgtggaacaaatggagaaggaaaaaatccagagcaacaaaggcagcagctataaactgctggtggagcaggctaagctcaaacaggctacctccaagcactttaaggacctcatccgtctgcggcgaactgcagagtggagccgatcaaatctggacacagaggtgacaacagccaaggaaagtcctgaaattgagccattgcccttcaccctggcccacgaaaggtgtatttcagtggtccagaaacttgtgcttttcttactgtccatggacttcacatgccacgcggacctgctgcttttcgtctgcaaagtgctggcacgaattgcgaatgccaccaggccgactatccatttatgtgaaattgtgaacgaaccccaattggaaaggctgctgttgctgctggtggggaccgatttcaaccgaggcgacatcagttggggcggcgcctgggcacagtacagcttaacatgtatgttacaggacattctggctggagagctgcttgctccagtcgcggctgaggccatggaggaagggacagtgggggacgatgtcggagctacggccggagatagcgacgactctctgcagcagagcagtgttcagctgctggaaaccatcgatgagcccttgacccacgacatcactggcgctccaccattgagcagtctggaaaaggataaagagattgacctggaactgctgcaggacctcatggaagtggatatcgacccacttgacatcgacctcgaaaaagaccccctggctgctaaagtgttcaagcccatttcatccacctggtacgactattggggcgctgattatggcacttataactacaatccgtacatcgggggcctcgggatacccgtcgcaaagccaccagcgaacacagagaaaaatggatcccaaacagtgagcgtgtccgtttcacaggcgctcgacgcccgcctggaggtgggcctcgaacagcaggcagaactgatgttgaagatgatgtcaaccctggaagccgacagcatcctgcaggcacttaccaacacaagcccgaccctgtcgcagagccctacaggcaccgacgactcgctcctcgggggactacaagccgcaaatcagacatcccagctcatcattcagcttagttcagtgcccatgctcaacgtttgttttaataagctgtttagtatgctccaggtgcatcacgtgcaattagaaagcctgctccagttgtggttgacactgtctctcaattcgtcatcaactggcaacaaagagaatggagccgatatcttcctgtataacgccaataggatccccgtgatctccctgaatcaggcctcaataacctcttttctaacagtcctcgcatggtatcccaacactctcctcaggacttggtgtctagttctgcattctctgaccctgatgactaacatgcagctgaactcggggagcagtagtgccatcgggacacaggagtccactgcgcacctgctcgtgtctgaccctaacttgatccatgtacttgtgaaattcctttcaggcacgagcccacatggaacaaatcagcacagtcctcaggttggccccactgctacacaggccatgcaggaattcttgaccagactgcaggtacacctgtcctccacatgccctcagatatttagcgagttcttgctcaagctcattcacattctcagcaccgagcgaggcgccttccaaaccggacagggtccgctagacgctcaggtgaagctgctggagtttaccttagagcagaacttcgaggtggtgagtgtgtccaccatctccgcagttatcgaatctgtgaccttcctcgtacatcactatattacctgctctgacaaagtgatgtctcgatctggctctgactcatccgtcggtgctagggcgtgtttcggcggtttgtttgccaacctgatcagacctggtgatgccaaagccgtgtgcggggagatgactcgagatcagctcatgttcgatctcttgaagctagtgaatatactcgtgcagctgcccttgtctggtaatcgagagtattcagccagggttagcgtcacaaccaatacaaccgactcagtttcagatgaggaaaaggtgtccggaggaaaggatggaaatggatccagcacgagcgtgcaggggtccccagcttacgtggccgacctggtgctagccaatcagcaaatcatgtctcaaatcctctctgctcttggactgtgtaactcaagcgccatggctatgatcatcggagcaagcggtctgcacctcacaaagcacgagaattttcacggtggtctagatgctatttctgtgggtgacgggctattcaccattcttactacactgagcaagaaggcttccaccgtccacatgatgctccaaccaatactgacttacatggcttgtgggtatatggggcgacagggcagtcttgccacctgccagctttccgaacctcttctctggttcattctaagggttttggatacatcagacgccctaaaagcattccatgatatgggtggcgtccagcttatctgcaacaacatggtcactagcactagggccatagttaacactgcccggagcatggtttccactattatgaagttcctggatagtgggcctaacaaagcagtggattcgactctcaaaactcgaatcttggcttctgaacccgataacgccgagggcattcacaacttcgctcctctaggcaccataacttcctcctccccaacggcccagccagccgaagtcctcctccaggcaacgccaccacatagacgggcccgctcagcggcgtggtcatatatcttcctgcccgaggaagcttggtgcgatctgacaatccacctgcctgctgccgtgctactgaaagagattcacattcagccccatctggcctctctcgcaacatgtccatctagcgtctcggtagaagtatcagccgacggagtaaatatgctgcccttatccactccagtagtcacctccggtctcacttatattaaaatccaacttgtcaaagcggaggttgcaagtgcagtctgtctccgattgcaccgccccagagacgctagcacactggggctgtcacaaataaagttactcgggttgacagctttcggcactacctcatcagccactgtgaacaacccctttctgcccagtgaagatcaggtgtctaaaacctccatcggctggctgcggctgttacatcactgtctgactcatatctcggacctcgaaggtatgatggctagcgccgcggccccgaccgccaacctactacagacttgcgccgccctgctgatgtctccatattgtggaatgcactcacccaacatcgaagtggtcctggtcaaaatcggattgcaaagtacccggattggccttaagctcattgatattctgctgcggaactgtgccgcgtccggttccgatccaactgaccttaattcaccacttctgtttggccgcctgaatggcctgagttccgactctacaatcgacattctgtatcagctcggcaccacccaggaccctggcactaaggacaggattcaggctctgctgaaatgggtcagcgactcagccagggtggccgctatgaaaaggtcaggcagaatgaactatatgtgtcctaattcgtccactgttgaatatggcctactgatgccgtcgccgtcccatctgcattgcgtagccgccattttatggcattcctatgaacttctcgtcgagtatgacctcccagcacttctggatcaggagctttttgagctgctgtttaactggtccatgagcctcccctgcaacatggtgctgaaaaaggcagtggactctctcctctgctccatgtgccacgtgcatcctaactacttctctctgcttatgggatggatgggaatcaccccgccccccgtgcagtgtcaccatcgcttatccatgaccgacgactctaaaaaacaggatctctcatcttccctcactgatgactctaaaaatgctcaagcgcctctggctctgactgagtcccaccttgcaacactggcttcgtcgtcacagagccccgaagcgattaaacaactgctcgatagcgggctgccatctttgcttgtgaggtccctggcttctttctgcttcagccacattagcagctccgagagcatcgctcagagcattgatatttctcaagataagctgcgccggcatcacgttccacagcagtgcaataaaatgccgatcacggccgatctggtagcgccaatactgcgtttcctcactgaggtggggaattcacacatcatgaaggattggctgggaggctcggaggttaaccctctctggacagccttgctcttcttgctgtgccactctggttcaacctcagggagtcataacttgggcgcacagcagacttctgcccgatccgctagtcttagctccgccgcaacgacaggcttgaccactcagcagcgcacagccatcgagaacgcgaccgtggcattttttctgcagtgcatctcttgccaccctaacaaccagaagctgatggcccaggtcctgtgtgaattgtttcagacctccccccagcgagggaacctcccaacctccgggaacatttctggcttcataaggagactgttcttacaacttatgctggaagacgagaaggtaactatgttcctgcagtcaccatgcccactgtataagggtaggatcaacgctacctcacacgtaatccaacaccctatgtatggtgctgggcacaaatttcgaaccctgcatctgccggtgtcaacgactctatccgacgtgctagatcgcgtgtccgacacgccaagcattactgccaagctgatttccgagcagaaggacgacaaggagaagaagaaccatgaagagaaggaaaaggtcaaggcggaaaacggatttcaggataactacagcgtggttgtcgcaagcggtctgaagagccagagcaaacgcgccgtctcagccactcctccgcggcctccgagcaggagggggcggacaattcccgacaaaatcggctccacaagtggcgcagaggcggctaataaaatcatcaccgtccccgtttttcaccttttccacaagctcctcgccggccaacctttgcccgccgagatgactctcgcccagctgctaactctcctgtacgacaggaagttacctcaaggctaccgatccatcgacctgaccgtgaaattaggcagcagggtcattacagaccctagcctgtccaaaacagatagctacaaaagactgcaccctgagaaagatcacggcgatctcttggcttcatgtcctgaggacgaggccctaacccccggtgatgaatgcatggatggcattctcgacgaatctctcctggagacttgtcctattcagtcgcccctccaggtcttcgcggggatgggtgggttggccctaatcgctgagagactgccaatgttgtaccctgaggtgatccagcaggtctccgcccctgtggtgacctccaccacccaggagaagcctaaggacagcgaccagttcgaatgggttactattgagcagtcaggagagctcgtttatgaggcccctgagaccgtcgctgctgagcccccacccattaagagcgctgttcaaacaatgagccccatccctgctcattccctagccgctttcgggttgtttctgcgcttacctggctacgcagaggtcctgctcaaggaacggaaacacgcacagtgcctgctgcgacttgttctcggcgtgactgatgacggtgagggctcacacatcctccagtcacctagcgccaacgtcctccctaccttgccgttccatgtcctgaggtctctgttctccacaactcccctcaccacagatgatggcgtccttctgaggcgcatggctctggagatcggagcgctccacctgatactggtgtgcctgtctgctctctcccaccattcgccgagggtccccaacagtagcgttaatcagacagaaccccaggttagctcttcacataaccccacttctacagaggagcagcagttatactgggccaagggtactggttttgggactggctccacagcgagtggctgggatgttgagcaggccctgacaaagcaacgccttgaagaggagcatgtcacatgcctgctgcaggtgcttgcctcttacatcaatccagtgagcagcgctgtgaatggggaggcacaaagttcacatgaaactcgcggacaaaatagcaatgccctaccaagtgtgctgctggagctcttaagtcaatcatgtctgatccccgctatgagtagttatctgagaaatgacagcgtgctcgacatggccagacacgtccccctctaccgggccttgctcgaactgctccgcgccattgcctcctgcgccgctatggttcccttactgctgcctctgtctactgagaacggagaggaggaggaagaacagagtgagtgccagactagtgtgggtacactgttggctaagatgaagacctgtgtggacacctataccaaccgcctgaggtccaagagagagaatgtcaagaccggagtcaaacctgatgcctctgaccaggagcccgagggcctgactttgttagtccctgacattcagaagaccgccgagatagtctacgccgctactacgagtctgcggcaggcaaaccaggagaagaaactcggagagtattccaaaaaggctgctatgaaaccaaagccactcagcgttctgaaatccctggaggagaagtatgtggcagtgatgaagaagctgcagtttgacacattcgagatggttagcgaggatgaagatgggaagttgggcttcaaggtcaattaccactacatgagtcaggttaaaaatgctaacgacgctaactcggccgcgagggctagacggctggctcaggaagctgtgactcttagtactagtcttcctctgtcttcgtcaagctctgtattcgtgagatgcgatgaggagcgcctggatataatgaaggtgctcatcaccgggcctgccgacaccccctatgccaatgggtgctttgaattcgacgtctatttcccacaggactacccctcttccccccctcttgtaaacctggagaccaccggcggccactctgtgcgattcaatcccaatctgtacaacgacggcaaagtgtgtctctccatcctcaatacatggcacggcagacctgaagaaaaatggaaccctcagacatcatccttcctacaggtgctcgtaagtgtgcagtccctgatactggtcgccgagccttattttaatgaacctggatatgagagatctagagggaccccctctggaacacagagctccagagaatatgacggaaacattagacaggcgactgtgaagtgggcaatgctggagcagatccggaacccttctccctgctttaaagaggtgatacataaacacttctacctcaaacgcgtggagattatggcccagtgtgaggagtggatcgccgacattcagcagtattcatccgataagcgagtagggcggacgatgtctcatcatgccgccgccttgaaacgtcatacggctcagctacgcgaagaacttctgaaactcccctgccccgaaggcctcgatccagacaccgacgacgcacccgaggtgtgccgtgccactaccggtgctgaagaaaccctgatgcacgatcaggtgaaaccctcctctagtaaggagctcccctcagattttcagctgtag

SEQ ID NO: 190182 - DNA, 14574 bp, Artificial Sequence
  derived and/or modified sequence
atggtgactggcggaggtgcggcaccccctggtacagtcactgagcccctcccctcagtcatcgtcctgagcgctgggagaaaaatggctgcggcagccgctgccgctagcggcccaggatgcagttctgcagcaggagccggtgcggctggagtaagcgagtggctggtccttcgagatgggtgtatgcattgtgacgcggacggcctccacagcctaagctaccacccagcgttaaacgccattctggctgtaacatcccgaggcactatcaaagtgatcgatggcaccagtggagcgaccctgcaggctagtgcgcttagtgctaaacctgggggtcaggttaaatgtcaatatattagtgcagtcgacaaagtcattttcgttgacgattacgctgttggttgccgcaaggatttaaacggcatcttgctgttggataccgctctccagacccctgtatccaagcaggacgacgttgtccagctagaacttcccgttacagaggcccagcagctattgtccgcttgtctagagaaggtggatatctcttcaacagaaggctatgacctgttcattacacaacttaaggatggcctgaaaaacacttcacacgaaaccgccgcaaaccataaggtggccaaatgggcgactgtcacttttcacctgccccaccacgtcctaaagtccatcgccagtgctatagttaacgaactaaaaaaaattaatcagaatgtggcagcactgcccgttgcctcttccgtcatggaccgcctaagctacttgcttccttccgctaggccggagctaggcgtggggccaggtcgttcagtcgaccgttcgctgatgtactccgaggccaatcggagagagacatttacttcttggcctcacgtcgggtacaggtgggcacagccggaccccatggcccaggcaggattttaccatcaacccgcaagctcaggcgacgatcgcgctatgtgctttacttgttctgtttgtctcgtctgctgggaacccacagatgaaccatggtccgagcatgaacggcactcccctaactgtccgttcgtgaagggcgagcacacccaaaacgtgcctctgtccgtgactcttgccactagccctgcccagttcccctgcacagatggcacagacaggatcagttgttttggcagtggctcctgtccccacttcttagctgccgctactaagcgtgggaaaatctgcatctgggacgtttctaagctgatgaaagtgcaccttaagtttgaaattaacgcttatgaccctgcaatagtgcaacagctgattttgtctggagatccctccagcggcgtcgactctcgcaggcctaccctagcttggctggaggattctagctcctgctcagacatccctaaactggagggagacagtgatgatttgctcgaggatagcgacagcgaagagcattccagaagcgattcagtgacagggcacacctcccagaaagaagccatggaggtaagtcttgatataaccgccctgtctatcctacagcagcctgaaaaactccagtgggaaatcgtggcaaacgtgctggaggacacggtgaaggacctggaagaactgggcgctaacccttgcctcacgaatagcaagagtgagaagactaaagagaagcatcaagaacagcataacatcccatttccctgtcttttggccggaggtctgctgacatacaagtcaccagcaacctcaccaatttcttcaaacagccaccgcagtctggacgggctcagccgaacacagggcgagagcatttccgaacaaggatctacagacaacgaaagttgtaccaatagcgagctgaatagcccattagtacggcgaacccttccagttctactcttatattccattaaggagtctgacgagaaagccggaaaaattttcagtcaaatgaacaacatcatgagcaaatctctgcacgacgacggattcacggtgccccagataattgaaatggagctggattctcaggaacagctgttgctgcaggatccacctgtaacatatattcaacagttcgctgacgctgccgctaaccttacctctccagattctgagaaatggaactctgtgttcccaaaaccaggcacccttgtccagtgcctccgactgcccaaattcgcagaagaggagaacttgtgcattgactccatcaccccctgcgccgatggcatccacttactcgtggggctgaggacttgtcctgtggagtccctgtcagcgatcaatcaagtggaggcactgaacaacctgaacaagctgaactccgctctttgtaaccggcgtaagggtgagctggagtctaatcttgctgtagttaatggtgcaaatatctctgtgatccagcacgagagtcccgctgatgttcagacacccctcatcatccagccagagcaaaggaatgtctccggaggctatcttgtcctgtacaagatgaactacgcaaccagaatagtcactttggaagaggagcctattaaaatccagcacatcaaagacccacaggatactattactagtctgattctccttccgccagacatcctggacaaccgcgaggacgactgtgaggagcccattgaagatatgcagcttacctccaaaaatggcttcgaacgggaaaagacaagcgacatttctactctcggtcaccttgttatcactacccagggcggatatgtcaaaattctggaccttagtaattttgagattcttgccaaggtcgagccccctaaaaaagaggggaccgaggaacaggatacgtttgtgtctgtgatctactgttccggtacagacagactgtgcgcttgcacaaagggcggagagcttcattttcttcagataggaggcacttgtgatgacatcgacgaggccgacattctagtggacggaagccttagtaaaggtatcgaaccatcctctgaaggttctaagccattaagcaaccctagtagccccggtataagcggggtggacctgctggttgaccagccctttacgttagagatcctgactagtctcgtggaacttacccggtttgagaccctgacccctagattttctgccaccgtacccccttgttgggttgaggtccagcaggaacagcagcagcgtaggcatccccagcacctgcaccaacagcaccacggagatgccgcacagcacacccggacctggaagctgcagaccgactctaactcctgggatgagcatgtgttcgagttagtcctgccaaaggcttgcatggtgggacacgtggacttcaaatttgtattgaactctaacattacgaacattccccagatacaggtgacactacttaagaacaaagcaccgggtctgggcaaggtgaatgctttaaatatagaggtagagcagaatggcaaaccatctctcgtggatctcaatgaggagatgcagcatatggacgtggaagaaagtcagtgtttgaggttatgtccctttctggaggatcataaggaggatatactttgcggccctgtctggctggcgtcaggtctcgatctgagcgggcatgcaggcatgctgactctgacgtcccctaagctggtgaaaggtatggccggtggaaaatataggtctttcctgatacacgtgaaggccgtaaatgagaggggtacagaagagatctgcaatggtggtatgcggccagtcgtcaggctgccatcactgaagcaccagagtaataagggctacagcctcgccagccttctggccaaagtagccgcaggcaaggagaagtcttccaatgtgaagaacgaaaatacctccggaacccgcaagtccgagaacctccggggatgcgatctgcttcaggaggtctcagtgaccatccgccgatttaagaaaacttcaatctctaaagagcgggttcaaagatgcgctatgctgcagttttctgagttccacgagaagcttgtcaatacactgtgtcggaaaacagacgacggccagattacggagcacgctcagtcccttgtgttagacacactgtgctggttagctggcgtgcattcgaacggaccgggtagctcaaaagagggcaacgagaacctgctgtctaagacccgaaagtttttatctgatattgttcgcgtgtgcttttttgaagcaggtcggtcaattgcccataagtgtgcacgcttcttggctctctgtatcagcaacggtaaatgtgatccttgtcagcctgcttttggcccagtgctgttaaaggccctgcttgataacatgtctttcctgcccgcagctactaccggcggatccgtgtattggtacttcgttcttcttaactatgtaaaagacgaggacctcgctggatgctctacagcatgcgcctccctgttaaccgccgtgtctaggcagctacaagaccgcttgactcctatggaggcactgttacagactcggtatgggctctactccagcccattcgatcctgtcctttttgatctggagatgagtggctcttcttgtaaaaacgtgtacaacagttctatcggcgtgcagagtgacgagattgatttgagtgatgtcctctccggtaatggaaaggtatcctcctgtactgctgcagagggctctttcacctcgctgaccggtcttctcgaagtggaaccccttcatttcacatgcgtgagcacctccgatggcacccgcattgagagagacgatgcgatgtcctcttttggggtgacaccagcagttgggggtttatcttctgggacagtcggtgaagcctcaacagctctgagttctgccgcacaggttgcattacaatcactgtctcatgcaatggccagtgccgagcagcagctccaagtgttgcaggagaaacagcagcaactcctgaaattacagcagcagaaggctaagctcgaggccaagcttcaccagacaacagccgctgcagccgcagccgcaagtgccgtaggccctgtgcataatagcgtcccatctaacccagtggcggcacccggtttcttcatccatccttccgacgtgatccctcctacaccaaagaccactcccttgttcatgactccacccctgacaccaccgaatgaggctgtctccgtcgtgatcaacgccgaattagctcagctgtttccgggttctgtcatcgatccaccagccgtgaacttagctgcacataacaagaattctaacaaatcaaggatgaacccattgggatccggcctcgccctcgccatctcccatgccagccactttttgcaaccaccccctcaccagagtatcatcatagagaggatgcattctggcgcaagaagatttgtgactctggacttcggacggccaatcctgttaaccgacgtgttgatcccgacatgtggagatctggctagtctgtcgattgatatctggacactgggagaagaagtggacggtagaaggctcgtggtagcaaccgacatatccacccactccttgatcctccacgaccttattccaccccctgtttgcagatttatgaagatcacagtgataggacggtatggctccaccaatgcccgagctaagatccctctcggattctattatggtcacacctacattctaccatgggagagtgaactgaaattaatgcacgaccccctcaaaggggagggagagagcgccaaccagcccgagatagaccagcatctggcaatgatggtggccctgcaggaggacatccaatgtaggtacaacctggcgtgccatcgccttgaaaccctgctccaaagcatcgatctcccaccccttaactccgcaaacaacgcccagtattttctgcgcaaaccagacaaggccgttgaagaggatagccgggtgttcagcgcataccaggactgtattcagctccagctgcagctgaacctggctcacaacgccgtccagcgtttgaaggtagccctcggggcaagtcgcaagatgctctctgaaacgagcaaccctgaggatctgattcagacctcttctacagaacagctgaggaccataatccggtatttactggacaccctgctgagccttcttcacgcaagcaacggccattccgtccccgcagttctgcagtctacgttccacgcacaagcctgcgaggagctgttcaagcacctgtgtatcagtggtacgcccaaaattcgacttcataccggcctgctgctcgtacagctgtgcggcggagaaagatggtgggggcagtttctgagcaacgtgttgcaggaactctataatagtgagcagctccttatatttccccaagatcgggtattcatgttactgtcctgcatcgggcagaggtccctgagcaattctggtgtgctcgagtcattgttgaatctcctggacaatttgctcagcccgttgcagccacagctccctatgcataggcgcacagagggggtccttgacatccctatgatcagctgggttgtgatgttagtaagcaggttgcttgattacgtcgctactgtggaggatgaagctgcagcagcgaagaaaccgctcaatggcaatcagtggagtttcatcaacaacaaccttcacactcagtctctgaacagatcaagcaagggttcttctagcctggaccggctgtacagccggaaaattcgcaaacagctggtgcaccacaaacaacagttgaatctgcttaaggcaaaacagaaggccttggtggagcaaatggagaaggaaaaaatacaaagcaacaagggcagcagctacaagttacttgttgagcaagccaaactgaagcaagctactagcaaacactttaaggatctgatacgtttacggagaaccgctgagtggagtagatccaaccttgacactgaagtgaccacggccaaagagagccccgagatagagccccttccctttaccctagcacatgaacgctgtatctccgtggtgcagaagcttgtactgttccttctttcaatggattttacatgtcatgcagaccttttgctcttcgtgtgtaaagtactggcccgaattgcaaatgctacccgacccactatacatctttgcgaaatcgtcaacgagccgcaattggagagattgctacttctgctggtcgggacggacttcaaccgcggagatatcagctggggaggagcctgggcacagtatagtctgacatgtatgctgcaagatatcttggccggtgagctgcttgcacctgttgccgctgaggctatggaggaagggaccgtcggcgacgatgttggtgccaccgccggagactctgatgactctcttcagcagagttcagtgcagctgctcgagaccattgacgagccacttacacacgatattactggtgcaccgcctctcagctctttggagaaagataaagagatcgatctggagctcttgcaggatctgatggaggtcgatattgatcccttggacatcgatctggagaaggacccattggctgccaaggtatttaagcccatctcttccacttggtatgattattggggggctgactatgggacgtacaactacaacccctatattggaggactcggaatccccgtcgcgaagcccccagcgaacacagaaaaaaatggaagtcagacagtgtcagtctcggtttcccaagctctcgacgctcggttggaagtggggctggagcagcaggccgaactgatgctgaaaatgatgagtacactggaggcagactcaattttacaggccctgacaaataccagtccgactctctctcagagccccacaggaaccgacgatagcctgctgggcggactccaggcagccaaccagacatcacaactcatcatccaattgagtagtgtgccgatgctgaatgtctgcttcaataaattatttagcatgctgcaagtgcaccacgttcaacttgaaagccttctgcaactgtggctgacattaagcctcaattccagcagcacagggaacaaagagaatggagcagatatattcctgtacaatgccaatcggataccagtgatctccctgaatcaggcctccatcacatcattccttacggtgctggcatggtaccctaatactcttcttaggacctggtgcctcgtactgcattccctgaccctcatgacgaacatgcagctgaactcgggcagttcatccgctattggtacccaggagtcgacggcacacctgttagtctccgatccaaatttaatacacgttctcgttaaattcctcagtggcacaagtccccacggtacaaaccagcatagcccgcaggtcggacccacagccacgcaggccatgcaggaatttctgaccagattgcaggtacatctgagctccacttgcccacaaatatttagcgagtttctgctgaagctgattcatattctcagtactgaaagaggggcattccaaacaggccaaggccctctggatgcccaagtgaagctcctggagtttacccttgagcagaattttgaggtggtgagcgtgagcacgatcagcgcagtgattgagagcgtgacctttctagtgcaccattatataacctgctctgacaaggtgatgagccgttcagggtcagattcgtcggttggggctcgcgcatgcttcggcggtctgttcgcaaacctgataagaccaggcgacgctaaagctgtatgcggcgagatgacccgcgaccagctcatgtttgatctgttaaaactggtgaatatcctggtacagctacccttgtctgggaaccgcgagtatagcgcacgagtgtcggttactaccaacactacggatagtgtgagtgacgaggagaaagtgtccggcggaaaggacggtaatggcagctccacgtcagttcagggcagcccggcatatgtggcagatcttgtcctggccaatcagcagatcatgtcccaaatcctctctgccttgggcctgtgcaatagctccgccatggccatgattattggggcttccggtctgcatctgaccaagcatgagaacttccacggtggcctggatgccattagcgtcggagatggcttgttcaccatactcacaacactgagcaagaaagccagcacagttcacatgatgctccagccgattctgacctatatggcctgtgggtacatgggacgccagggttccctggctacatgtcagctctccgaacctctcctctggtttattcttcgggtgctcgacacatcagacgctctaaaagctttccacgatatgggaggggtgcagctgatttgcaacaacatggtgacttccactagggcaattgtgaacacggcccgaagtatggtgtcaacaatcatgaagtttctggatagcgggcctaataaagcagtggactccaccctgaagacgcggattctggcttcagagccagacaatgcggagggaattcataacttcgcgcctctggggacgatcacatcgagtagcccaaccgcccagccagccgaagtattattgcaagccacccccccacatcggagagctagatctgcagcatggagttacattttcctaccagaggaggcctggtgcgacctgacaattcatctgccagcggctgtccttctcaaagagatccacatccagccacatttggccagcctggctacctgcccatcctcagtatcggtggaggtgagcgccgatggggtgaatatgttaccactttctacacctgtcgttacgtccggcctcacatatataaagattcagctcgtgaaggccgaagttgctagcgctgtttgtttgcggctgcaccggcctagagacgcaagcacactgggtttatcacagatcaaactcctcggcctgacagccttcgggacgacatcatccgcaactgtgaataacccatttctgccttccgaagatcaggtgtccaagactagtatcggctggctccgcttacttcaccattgtctcacccacattagtgatctcgaaggcatgatggctagcgcggctgcccctactgctaatttgctccagacttgtgccgctctcttgatgagtccctactgtggcatgcacagcccaaacatcgaggttgtgttggtcaagatcggtctccagtccacacggatcggactgaagcttatcgacatcttgttgcgaaattgtgctgcaagtgggagtgaccccacagatttgaacagccctctcctttttgggcgtctgaatgggctttcatccgacagtacaatcgacattctgtatcagctggggactacccaggaccccggaaccaaggataggatacaggccttactgaagtgggtcagcgatagtgcgagagttgccgcaatgaagcgctctgggaggatgaactacatgtgccctaactcgtccacggtagagtacgggttgctcatgccatcaccatctcacctgcactgtgttgccgcaatactatggcattcttacgagctgttagtagagtacgatcttcctgcgctactcgaccaggaactgttcgaactgctgttcaactggtccatgagcctgccctgtaatatggtgctcaagaaggcggtggattcactgctctgttctatgtgccacgtccaccccaactatttctctctgttaatgggctggatggggatcacccctcctccagtccagtgtcaccacaggctatcaatgacggacgattccaagaagcaggatttgtcgagctctctcactgatgacagcaagaacgctcaggctccgttagccctgacagagtcacatctcgcaactcttgcgtcttcgagccagagtcccgaggcaataaagcagctcctggactccgggctcccaagcctgctggtcagaagccttgcatcattctgtttctcccacatatctagttccgaatcaatcgctcagtcaattgacatttcccaggataagctgaggaggcaccatgtgcctcaacagtgtaataagatgcccatcacagcagacctcgtggctcccatcctccgcttcctgaccgaggtgggcaactcccatataatgaaagactggctgggcggaagcgaggtgaatccattatggaccgcactcctgttcctcctctgtcacagcggttccactagtggcagccacaatttgggcgctcaacaaactagtgctagatccgccagcctcagcagcgccgctacgaccgggctgaccacccaacagcgaaccgccatcgagaatgccactgtggcatttttcctccagtgcattagttgccaccctaataatcagaaactcatggcacaggttctgtgtgaattgtttcagacttcccctcaaaggggaaaccttcccacatcaggcaacatatctggatttattcgtcgcctgtttctgcagctgatgcttgaagatgagaaagttaccatgtttctccagagtccttgtccgctctataaaggcaggattaacgccaccagccatgtgattcagcaccctatgtatggggctgggcataagtttaggacactccatcttcctgtgtcaaccacattgagcgacgtgctcgacagggtatctgacaccccgagcattactgccaagctcatcagcgaacagaaggacgataaggagaagaagaaccacgaggagaaagagaaagtgaaggctgagaatgggtttcaggataactactctgtggtggtggcctcgggcctgaagtcccaatcaaaacgggctgtatccgctactcccccacggcctccgtcccgacgtgggcgtactatcccggataaaatcggatccacgtccggtgccgaggcggcaaacaaaattataacagtgcccgtgttccacctatttcataagctcttagccggacagcctttacccgcagaaatgaccctggctcagctgctgacattgctctacgatcgtaagctgcctcaggggtacaggtcgatcgacctgacagttaagctcggcagtagggtcattacagacccgagcttgtctaaaaccgactcttacaaaagactgcacccagagaaggaccacggcgatcttctggcatcctgcccggaagatgaggcccttacccccggtgacgagtgcatggacggaatactggatgagtcgctgctggagacttgcccaatccagagtcccctccaggtttttgctggcatgggcggtctggcattaatcgctgagcgcctgcccatgctgtatcctgaagtgattcagcaggtttctgcgcctgtggttacctctacaacacaggaaaaaccaaaagattcagaccagttcgagtgggttacaattgaacagtcaggcgagttagtgtatgaagctcccgagactgtcgccgctgagccgcctcccatcaagtcagcagtgcagactatgtcaccaattccagctcactctctggccgctttcggtctgttcctgcggttacctgggtatgcggaagtactgcttaaagaaaggaagcacgcccaatgcctgcttcgtttggtgttaggtgtgactgacgatggtgaaggttcacacattttgcagagcccctcagccaacgtgctgcctactttaccgtttcatgtactgcgcagtctgttctccacaacgccgctgactacagatgatggcgtgctcctgcgaaggatggctttggaaatcggggcattgcacctgatcctggtctgtctctccgcactgagccaccacagtcctcgagtaccaaattccagtgtgaatcagacagaaccccaagtgtcttcatctcataatccaacgtcgaccgaggaacaacagctgtactgggccaagggtaccggatttggcactggctctaccgcgagtggctgggatgttgagcaggccctcaccaagcagaggctggaggaagagcacgttacctgcttgctccaagtgttggcctcatacattaatcccgtgtcttccgcagtgaacggcgaagcccagtcaagtcatgaaacccgaggccagaacagtaatgcattacccagcgtactcttggaactgctctctcagagttgtttaatcccagccatgtcctcatacctcagaaatgacagcgttcttgacatggccaggcatgtccctctgtatcgagcactgctggaactgttacgtgcgattgcatcatgcgccgctatggttccactgttgcttccactgtccactgagaacggcgaagaggaggaagaacagagtgaatgccaaaccagcgtggggacgctgctggcaaaaatgaagacctgtgtggatacctataccaacagattgaggtccaaaagggaaaacgtgaaaaccggggttaaacctgatgcatccgaccaggagcccgaggggctgacgctactggtgcccgacatacaaaagacagcggagatcgtatacgccgctaccacatctttacggcaagccaaccaggagaaaaagctgggcgaatactccaaaaaagccgcaatgaagcctaaacccttgagtgtgctgaagtcactcgaggaaaaatatgtggctgtaatgaagaagttgcagtttgacacatttgaaatggtgtcggaggacgaggacggaaaactgggctttaaggtcaactaccactatatgagccaggtgaaaaacgcaaatgacgctaatagcgccgctcgagccaggcggctggcccaggaggcagttacactcagtacaagcctccctctctcctcatcgagttcagtgttcgtgagatgcgatgaagagaggttggatattatgaaggttctgatcactggcccagccgacacaccctacgcgaatggctgtttcgagtttgacgtctacttcccccaagactacccctcctcaccgccactggttaaccttgagactaccggcggacattcagtgcgtttcaaccccaacctgtataatgacggcaaagtgtgtctgagtatcctcaacacctggcacgggcgtccagaagaaaaatggaatccacagaccagttctttcttgcaggtactggtcagcgtgcagtcccttattcttgtcgcagagccctatttcaacgaacccggttacgagcggtcccggggaactcctagcggtacccaatcatcacgcgagtatgatggcaacataagacaggcaacggtcaaatgggcaatgcttgagcagatccgcaaccctagcccgtgcttcaaagaggtgattcacaaacacttttacctcaagcgagtggaaattatggctcagtgcgaagaatggatcgccgacatccagcagtatagttctgacaagagagtgggccgaaccatgagtcatcacgcagccgcattgaagcggcacactgcacagctgcgggaggagctattaaaactgccttgtcctgaaggactcgaccccgatacagatgatgcacctgaggtgtgtcgggcaaccaccggtgcggaggagacactgatgcacgaccaagtcaaaccgtctagcagcaaggaactgccttcagattttcagctttag

SEQ ID NO: 190183 - DNA, 15703 bp, Artificial Sequence
  derived and/or modified sequence
tccctgcttctccccctctcccgtcagcctccctccgagtttggcccctccggccgggcgatcgacgttccgcgtgcgtgcgggcgcctgacttcacttccggctaacgcgctcggcttgccccctggccccggatggtgactggtggtggtgctgcacctcccgggactgtcactgagccgcttcccagtgtgattgtgctgagcgcaggccggaagatggcggctgcggctgcggcggcctcgggccccggctgctcctcggcggcgggggcgggggcggccggggtctcagagtggctggtgctgcgggacggctgcatgcactgcgacgccgacgggctgcacagcctgtcctaccaccctgcgctcaacgccatcctggccgtcactagccgcgggaccatcaaagtcatcgacggcacctcgggggccacactgcaggcctccgcgctcagtgctaaaccaggtggacaggtgaaatgtcagtatatctctgctgtggataaagttatatttgtggatgattatgcagtagggtgtaggaaggaccttaatggaatcttgttgttagacactgctctgcaaactccagtttcaaagcaggatgatgtggttcagcttgaattacccgttacagaggcacagcagctcttatcagcatgtttagaaaaggtagatatttctagtacagagggttatgatttgttcatcacacagctcaaagatggtttaaaaaatacatctcatgagactgcagcaaaccacaaagttgctaagtgggccacagttacatttcatcttcctcatcatgtgttgaagtccattgccagtgccattgtaaatgaactcaagaaaataaatcaaaatgttgctgccttacctgtggcgtcctcagtgatggacagattgtcttacctcttacctagtgcacgtccagaactcggagtggggccaggccgttctgtagacagatcactgatgtatagtgaagctaacagacgggagacatttacctcatggcctcatgtaggctataggtgggcacaaccagatcccatggctcaagctggattttatcatcagcctgcctcatctggagatgatagagccatgtgttttacttgtagtgtatgcctcgtttgttgggaacctactgatgaaccttggtctgaacacgaaagacattccccaaactgcccatttgtgaaaggtgagcacacacagaatgtgccattgtcagtcactcttgcaacaagtcctgcacagtttccttgtacggatggaactgacagaatatcttgctttgggtcggggagctgccctcattttctagctgctgcaactaaacgaggaaagatctgcatatgggatgtttccaaacttatgaaggtgcacttaaagtttgaaattaatgcctatgatccagcaattgtacaacagcttattctatcaggagacccaagctcaggagttgattcaaggagaccaactttggcgtggctggaggactcctctagttgctcagatataccaaaattggaaggagatagtgatgatttactggaggattcagacagtgaagagcattccagatcagattctgtgacagggcatacatcacagaaggaagccatggaagtaagccttgatataacagcactcagcattctccaacagccagaaaaacttcagtgggagattgttgcaaatgtgcttgaagatactgttaaggatcttgaagaacttggggcaaatccttgtttaacaaactctaagagtgaaaagacaaaggaaaagcaccaggagcaacacaacattccttttccatgtttattagctggaggtttattaacatataaatctcctgctacctcacccattagtagtaattctcacaggtcactggatggtttaagcagaactcagggtgaaagtatatcagaacaagggtcaactgacaatgaatcctgcactaattcagaactaaattctcctctggtaaggaggactttaccggttttgcttctttatagcatcaaggaatctgatgagaaagcaggaaagatcttttcacagatgaacaatattatgagtaaaagtttgcatgatgatggttttactgttccacagattattgaaatggagctggatagtcaggagcagttgttattgcaggatcctcctgtgacttacattcagcaatttgcagatgcagcagccaaccttacctctccggattctgagaagtggaactctgtgtttcccaagcctgggactttggttcagtgcttgaggctgccaaagtttgcagaggaggagaatctttgtatagactcaataactccttgtgctgacggaattcatttgttggtaggactgcggacatgccctgttgaatccttgagtgcaataaatcaagtagaggccttgaataatttaaataaattaaactctgcactatgtaatagacggaaaggtgagctggaatcaaatcttgctgtagtgaatggtgcaaatattagtgtaatccaacatgaatcaccagcagatgtacagactcctttaataattcagcctgagcagaggaatgttagtggtggatatttagtgctttataaaatgaattatgccactcggatagtgactttagaagaggagccaataaaaatacaacatatcaaagatccccaggacacaattacctcgctcattttgcttccacccgatatattggataatcgagaggatgactgtgaggaacctattgaggacatgcagttaacctcaaagaatggttttgagagagaaaaaacgtctgacatttctactcttggacacctggtaataaccactcagggaggatatgtaaaaatactagatctttcaaactttgaaattttggccaaagtggagcctcccaaaaaggagggcactgaggaacaggacacatttgtttctgtgatttactgttctggcacagacaggctgtgtgcatgcaccaaaggtggtgagcttcattttctccaaattggaggaacctgtgatgatattgatgaagctgatatactagtggatggatctctttctaaaggaatagaaccatcttcagaaggttccaaacctttatcaaatccttcaagtcctggcatttcaggagttgatttattggtggaccagccattcacccttgaaatcttgacatccctagtggagctaacccgctttgagactttgactccaaggttttcagcgactgttcctccatgctgggtagaagttcaacaagaacagcagcaaaggaggcatcctcaacatttgcatcagcaacaccatggtgatgctgctcagcatactcgaacttggaaactacagaccgacagcaacagctgggatgaacatgtatttgaattagtactacctaaagcttgtatggttggacatgtggacttcaaattcgttttgaactcaaacatcaccaatattccacagatacaagtgacactgctgaaaaataaagctccaggattagggaaagtcaatgctcttaacattgaagtggaacaaaatgggaaaccgtccctggttgatttgaatgaagaaatgcagcacatggatgtagaggaatcacagtgtcttagattatgtccatttttggaggatcataaagaagacattctatgtgggccagtatggcttgctagtggccttgatctatcagggcatgctggaatgttgacgttaacaagccccaaacttgttaaaggtatggcaggaggaaaatatcgttcgtttttaatccatgtcaaggcagtgaatgaaagaggaacagaagagatttgtaatggtggtatgcgtcctgtagtaaggcttccatccctaaaacaccagagtaacaagggttattcacttgcttcacttttggctaaagttgcagcaggcaaggaaaaatcatctaatgttaagaatgaaaatacaagtggcacccgtaaatctgaaaacctccggggctgtgatttacttcaagaggtctcagtcaccattcgaagatttaagaaaacctcaatttctaaggaaagagtgcaacgatgtgccatgttacagttttcagaatttcatgagaagcttgttaatactctttgcagaaaaacagatgatggccagatcacagaacatgcccagagccttgtgttggatactctctgttggttagctggagttcattcaaatggacccggaagctcaaaggaaggaaatgagaacctactttcaaaaacacgaaaatttctgtcagacatcgtacgtgtttgcttctttgaggcaggacgaagtatagcccataagtgtgcccgatttctagccttgtgcattagtaatggcaaatgtgacccatgtcaaccagcatttggacctgttctgttgaaggctttacttgataatatgtcatttttacctgcagcaacaactggtggttctgtctattggtattttgtcttactgaattatgtgaaagatgaagatctggctggatgcagtacagcttgtgcatctttgcttactgcagtgtccagacagttacaggacaggctaacaccaatggaggctttacttcagacaagatatggattatatagctcaccatttgatccagtcctctttgatttggagatgagtggctcttcttgtaaaaatgtttataacagcagcattggtgtccagtcagatgaaattgatttatcagatgtcctttcaggaaatggaaaggtcagtagttgcacagctgctgagggtagtttcacatctctcactggacttttggaagttgaacctctgcactttacttgtgtgtcaactagtgatggaaccagaatagaaagggatgatgcaatgagttccttcggggttactcctgcagtaggtggactatcatctgggacagttggggaagcctcgacagccctgagttcagcagcccaggtagctttgcagtctctctctcatgcaatggcttcagccgagcaacagctacaggtgctgcaagagaaacagcagcagcttttgaagcttcagcaacagaaagcaaagctggaagccaagttacatcagacaacagctgcagcagctgcagcagcatcagcagtaggtcctgttcacaactctgtgccttccaacccagtggctgcccctggattcttcattcatccatctgatgttattccacccactccaaaaacaacacctctttttatgactccaccactcactccacccaatgaagcagtttccgttgtgattaatgccgaacttgcacagcttttcccaggctcagtcattgatcccccagcagtcaatcttgctgcacataacaaaaattccaacaagtccagaatgaatccacttggttctggtctagcccttgcaatttctcatgcttcacattttcttcaacctccgcctcaccagtccattattatagagcgaatgcattcaggagcaagaagatttgtgaccttggattttgggaggcctatattgttgactgatgtattgattcccacttgtggagacttggcctctttgtcaattgacatttggacattaggagaagaggtggatggaaggcggttggtagtggcaactgatataagcactcattcactaattcttcatgacttaataccacctcccgtgtgcagattcatgaagatcactgttattggacgttacgggagtacaaatgccagagccaaaatcccattaggattttactatggtcatacctacatcttgccttgggaaagtgaactgaagttaatgcatgatcctctaaagggagagggagaatctgcaaaccagccagaaattgaccagcatttagcaatgatggttgctttgcaggaggatatacagtgcaggtataacttggcttgtcatcgtctggaaacccttttgcaaagtattgatcttcctcctctaaacagtgctaacaatgcacagtactttttacgaaaaccagataaggcagttgaggaagacagtagggttttttctgcttatcaagattgtattcagctacagcttcaactaaatttggctcataatgcagtgcagaggctcaaagtggcgctaggtgcaagccggaagatgttgagtgaaacatcaaatccagaagatttaattcagacatcttccacagagcagttacgtactatcatcagatatttactggacactttgctcagcctgcttcatgcttctaatggacactctgttcctgcagttttgcagagcacatttcatgcccaggcctgtgaagagctctttaaacacttgtgcatcagtggaaccccaaagatacggttacatactggtcttcttcttgttcaactgtgtggtggtgaaaggtggtggggtcaatttctttctaatgtccttcaggaattgtacaattcggaacagcttctcatctttccacaggatagggtcttcatgttactttcctgcattggtcaaagatcacttagtaatagtggagtattagaaagcttacttaatctcttggataatttattgtcacctcttcagccacagttacccatgcataggaggacagaaggagtactagatattcccatgatcagttgggttgttatgctggtgtccaggttgctggattatgtggcaactgttgaagatgaagcagcagctgcaaagaaacctttgaatggtaatcagtggagttttattaacaataatctacacactcagagcttaaatagatcttctaaaggcagcagtagccttgatagattatattccagaaaaatcagaaagcagcttgttcatcataaacagcaacttaacctactaaaagcaaagcagaaggcattggtagaacagatggaaaaagaaaaaatacaaagtaacaaaggatcatcatataaactcctggtagaacaagcaaaactaaagcaggccacttcaaagcactttaaggatttaattcgtttacgtcggacagcagaatggtcccgttctaatttagacacagaagttacaacagcaaaagaaagtcctgagatagaaccacttccatttactctggcccatgagcgttgtatctcagtagtccagaaacttgttctgtttcttctctccatggactttacatgtcatgcagatctcttattgtttgtttgtaaggttcttgcacgcattgcaaatgccacgaggccaactattcatctgtgtgagattgtgaacgaaccccagctggaaagactgctgttacttttggttggaactgacttcaatagaggagatatatcttggggtggtgcttgggctcagtattccttaacttgcatgctacaagatattttagcaggagaattactggctccagtagccgcagaagccatggaggaaggaacagtgggtgatgatgtaggtgcgacagctggtgactctgatgactcccttcaacagtcctcagttcagttgctggaaactatagatgaacctttgacacatgacataacaggtgcacctcctctgtcctctttggaaaaagataaagaaattgaccttgagttacttcaggatctaatggaagttgacattgatcctttagatattgatttggaaaaggaccctcttgcagccaaggtttttaagccaataagcagtacatggtatgattattggggtgctgattatgggacctacaattacaacccttacattggaggtctgggaattcctgtagcaaagccaccagcaaacacggagaagaacggatcacagacagttagcgtttcagtctctcaggccctggatgctcgcctagaagttggacttgaacagcaagcagaactgatgttgaaaatgatgtctactctggaggcagattccattttacaggcattaacaaatacatctcctacattatcacagtctcccactggaacagatgattcacttctagggggtttacaagcagcaaaccaaaccagccagcttattatacagttatcatctgtcccaatgttaaatgtttgtttcaacaaacttttttccatgcttcaagtccatcatgttcagttggagtcacttctccaattgtggctcacactgagcctgaattctagttcaactggaaacaaagaaaatggagcagacatatttttatataatgctaataggatacctgttatttcattaaatcaagcatcaataactagctttctcacagtgttagcttggtatcccaatactttgctccggacatggtgccttgtgcttcatagcctaacactcatgacaaacatgcagcttaattctggttccagcagtgccattggaactcaggagagtactgctcatttgttggtttcagatccaaacctaattcatgtattagtgaaatttctttctggcaccagtccacatggaacaaatcaacacagtccacaggttggtcctacagctacacaagctatgcaagaatttcttactcgattacaagtgcatctttcttcaacatgtcctcagatattcagtgaatttttgctcaagctaattcatatactttcaactgaaaggggtgctttccagacaggccaaggacctctcgatgcccaagtgaagctcttagaattcactctggagcagaattttgaagtcgtttcagttagtactatttctgccgtgatagaatcggttacatttttagtgcaccactatatcacttgctcagacaaagtaatgtcaagaagtggatcagatagctccgtgggtgctcgagcatgctttgggggactctttgccaatcttattcgtccgggtgatgcaaaagcagtttgtggcgaaatgacaagagatcaactcatgtttgatttgttaaaacttgttaacattttagtgcagctgcctctttcaggcaatagggaatacagtgcaagagtgtctgtgaccacaaatacaacagatagtgtttcagatgaagaaaaagtctcaggaggcaaagatggcaatggaagcagtaccagtgttcaaggatcgcctgcatatgttgctgacttagtcttagccaaccaacaaattatgagccagattttgtctgctctgggcctgtgtaatagcagtgccatggcaatgataattggagcaagtggattacatctcactaaacatgaaaactttcatggtgggttggatgccatatcagttggggatggattatttaccatactgacaacccttagtaaaaaagcttctacagtccacatgatgctgcagccaattttaacatacatggcctgtggatatatgggcagacaaggctctcttgctacttgccagttatctgagccattattgtggttcattttgagagtattggatactagtgatgccttgaaagcatttcatgatatgggtggtgttcagctcatatgcaataatatggttactagtacaagggctattgtgaacactgcaagaagtatggtatcaactattatgaaatttcttgactctggtccaaataaagctgttgacagcacattgaaaacaagaatactagcttctgagcctgacaatgctgaagggattcataactttgcacccctcggtacaatcacatctagcagtcctactgcccaaccagctgaagtgctattgcaggccacacctcctcacagaagagctcgctctgctgcttggtcctacatctttcttccagaggaggcttggtgtgaccttaccattcaccttcctgcagcagtgctgcttaaggagatacatatccagcctcatcttgcatctcttgcaacctgcccttcctcagtgtctgttgaagtaagtgcagatggggtaaatatgctacctttgtccactcctgttgtcacaagtggcctcacctacataaaaattcagcttgtaaaagccgaagtagcttctgctgtctgccttagactacatcgtccacgggatgccagcacattaggcctttcacaaattaaattattggggctcactgcttttggtaccacctcttctgcaacagttaataatccattccttccatctgaagatcaggtatccaaaacaagtattggatggttacggttattacatcattgccttactcacataagtgatctagaaggaatgatggcaagtgcagctgcacctactgctaatctgctgcagacttgtgcggccttattgatgtcaccttactgtggaatgcattcacccaacatcgaggttgtgcttgtaaagataggactgcagtctactagaattggcctgaagctcatagacattctcctgagaaattgtgcagcatcaggcagtgatcctacagatttgaatagtcctttactttttggaagactaaatggactctcttctgactctacgatagatattctttaccagcttggaacaactcaggatcctggtacaaaagacagaattcaggccttgttaaaatgggttagtgattctgcaagagtggctgctatgaagagaagtggcaggatgaactacatgtgtcctaactcctcaacagtagagtatggtcttctgatgccatctccttctcatttgcactgtgtagcagccattctgtggcatagttatgagctgcttgtagaatatgacttaccagcactcctggaccaagagctctttgagttactttttaattggtccatgtctcttccctgcaatatggttttgaagaaagctgttgacagtctactttgctcaatgtgtcacgtacacccaaactatttttctttgctcatgggctggatgggaattacccctcctccagtgcaatgtcatcatagactgtccatgacagatgatagcaaaaagcaggatcttagttcatctttaacagatgactctaaaaatgcacaagcacctctcgcattaactgaatcacatttggctacccttgcttcctcttctcaatctcctgaagctattaaacaattactagactcaggtttgccttctcttcttgtgaggagtctggctagtttctgctttagccacatttctagctcagaaagcattgcccagtcaatagatatttcccaggacaaactcaggcgccatcatgtcccacaacaatgtaataagatgcctatcacagccgacctagttgctcctattcttaggtttttgacagaagttggcaatagccatattatgaaagattggcttggtggttctgaagtcaatccactatggacagcacttctgtttttattgtgtcactctgggtccacttctggaagccataatttaggtgcacaacagaccagtgcaagatcagcttctctttcttcagctgctacaacaggactgactactcaacagcgcacagcaattgagaatgcaactgttgcgttctttctacagtgcatttcatgccatcctaataatcaaaagctgatggcacaggttctttgtgaactatttcagacatctcctcaaagagggaaccttccaacatctgggaacatttcagggtttatacgaagattatttttacagttgatgctggaagatgagaaagtgacaatgtttcttcagtctccatgtccactgtacaaaggtagaattaatgctactagccacgtcatccagcatccaatgtatggagcaggccacaaattccgtactcttcatttgccagtctcaacaacattatcagatgttcttgacagagtgtcagatactccaagtatcacagctaaattaattagtgaacaaaaagatgacaaagaaaagaaaaaccatgaagagaaagaaaaagttaaagcggaaaatggatttcaagacaattacagtgttgttgttgcctctgggctgaagtctcaatctaaacgtgctgtgtcagctacaccacctcgcccaccatccaggagggggaggacaatacctgataaaataggaagtacttcaggagcagaggctgccaacaaaataattactgtcccagtgtttcacctgtttcacaaactcttggcaggccagccattgccagctgaaatgacacttgcccagcttttaactctcctatatgaccgaaaacttcctcagggttaccgctcaatagatctgactgttaaattgggatcaagagttataacagaccccagtctatcaaaaacagattcttataaaagactacaccctgaaaaagatcatggagacttacttgctagctgtccagaagatgaggctctcactccaggtgatgaatgcatggatgggatactggatgaatctttgcttgaaacctgtccaattcagtcaccattacaagtttttgcaggaatgggtggactggctcttattgctgaaagactacccatgctatatccagaagtaattcaacaggtgagtgctccagttgtaacatctaccactcaggaaaagccgaaggatagcgatcagtttgaatgggtgaccattgaacagtcaggggagttagtttatgaagcaccagaaactgttgcggctgaacctccacctatcaagtcagcagtacagaccatgtctcccatacctgcccattctttggctgcttttggattatttcttcgtcttccgggctatgcggaagtgctactgaaagagagaaaacatgcccagtgccttcttcgattggtattgggagtgacagatgatggagaaggaagtcatattcttcaatctccatcagccaatgtgcttccaacccttcctttccacgtccttcgtagcttgtttagcactacacctttgacaactgatgatggtgtacttctaaggcggatggcattggaaattggagccttacacctcattcttgtctgtctctctgctttgagccaccattccccacgagttccaaactctagcgtgaatcaaactgagccacaggtgtcaagctctcataaccctacatcaacagaagaacaacagttatattgggccaaagggactggctttggaacaggctctacagcttctgggtgggatgtggaacaagccttaactaagcaaaggctggaagaggaacatgttacctgccttctgcaggttcttgccagttacataaatcccgtcagtagtgcggtaaatggagaagctcagtcatctcatgagactagagggcagaacagtaatgcccttccttctgtacttctcgagcttctcagtcagtcctgcctcatcccagccatgtcatcttatctacgaaatgattcagttctggacatggcaagacatgtgccactctatcgggcactgctggaattgcttcgggccattgcttcttgtgctgccatggtgcccctattgttgcccctttctacagagaacggtgaagaggaagaagaacagtcagaatgtcaaacttctgttggtacattgttagccaaaatgaagacctgtgttgatacctataccaaccgtttaagatctaaaagggaaaatgttaaaacaggagtaaaaccagatgcgtctgatcaagaaccagaaggacttactcttttggtaccagacatccaaaagactgctgagatagtttatgcagccaccaccagtttgcggcaagcaaatcaggaaaaaaaactgggtgaatactccaagaaggcggctatgaaacccaaacctttgtcagtattaaagtcacttgaagaaaaatatgtggctgttatgaagaaattacagtttgatacgtttgaaatggtttctgaagatgaagatgggaaattgggatttaaagtaaattaccactacatgtctcaggtgaaaaatgctaatgatgcgaacagtgctgccagagctcgccgccttgcccaggaagctgtgacgctttcaacctcactgcctctgtcttcatcctctagtgtgtttgtacgctgtgatgaggagcgacttgatatcatgaaggttctaataactggtccagcggacaccccttatgcaaatggctgctttgagtttgatgtgtattttcctcaagattatcccagttcaccccctcttgtgaatctagagacaactggtggtcatagcgtgcgattcaatccaaacctttataatgatggcaaggtttgtttaagcatcttaaacacgtggcatggaagaccagaagagaagtggaatcctcagacctcaagctttttgcaagtgttggtgtctgtccagtcccttatattagtagctgagccttattttaatgaaccgggatatgaacggtctagaggcactcccagtggcacacagagttctcgagaatatgatggaaacattcgacaagcaacagttaagtgggcaatgctagaacaaatcagaaacccttcaccatgttttaaagaggtaatacacaaacatttttacttgaaaagagttgagataatggcccaatgtgaggagtggattgcggatatccagcagtacagcagtgataagcgggtaggcaggactatgtctcaccatgcagcagctctcaagcgtcacactgctcagctccgcgaagagttgctgaaacttccctgccctgaaggcttggatcctgacactgacgatgccccagaggtgtgcagagccacaacaggtgctgaggagactctaatgcatgatcaggttaaacccagcagcagcaaagaactccccagtgacttccagttatgagctgcattgatgtggacttcatagacacaaaggcttcgaagcacaagccaaatatgtcaatatttgtatgtaagaaactaattatgtaataggtaatgaaactgaaactatactatgcccttaaggagatccagtttaattcaaggtgatcttttatttacctgtacaggagtgtaaacttttttgtgcttttatttttcaattgtgagaaccactgattggtatgttcaacaaatttgtgtatacaaagaaatggataaatcactgctatataagggaaactaccttaggaaagaatgtttactgaatgtttattttattttattttttttttactatagagtgaggggttgttaacaaagaatatatattggtcattcttacaactactatttaaagtcagcaacttttcactgaatttgatagattttatgtttggccatatcttcatgctcacatttgatttctgaagacctcctacatacacttcaataaaagttaaatggacatactccctcttttttgatttactggtacatttttaaaataataaatctgccataaaatgcattatatctggagacttgcacttgtatggatgaatttattacattcaacatatttaattttatgccttctaattctaagatgcagaaaaaaataaatgaacatgattttattctatgccaacatttgggcctctgaatgtatctgttatttgaatttaagtatttgaaaaggaatggtcaatttgaaagtcattctaaactgattttttttttctaaagggctccttttttcctggactatgtggttttatgactaaagtcacatgtatgtattaaacattgaggctctgtagaggagagaggatgtacctctctggtgctgttacagtacattctgtacctgccatacaggctcattttcatgcaaattcttcctagagccaaataaataaagacttaggtgaattagtatgtcttgtttctaaa

SEQ ID NO: 190184 - DNA, 14574 bp, Artificial Sequence
  derived and/or modified sequence
atggtgaccggcggcggcgccgccccccccggcaccgtgaccgagcccctgcccagcgtgatcgtgctgagcgccggcagaaagatggccgccgccgccgccgccgccagcggccccggctgcagcagcgccgccggcgccggcgccgccggcgtgagcgagtggctggtgctgagagacggctgcatgcactgcgacgccgacggcctgcacagcctgagctaccaccccgccctgaacgccatcctggccgtgaccagcagaggcaccatcaaggtgatcgacggcaccagcggcgccaccctgcaggccagcgccctgagcgccaagcccggcggccaggtgaagtgccagtacatcagcgccgtggacaaggtgatcttcgtggacgactacgccgtgggctgcagaaaggacctgaacggcatcctgctgctggacaccgccctgcagacccccgtgagcaagcaggacgacgtggtgcagctggagctgcccgtgaccgaggcccagcagctgctgagcgcctgcctggagaaggtggacatcagcagcaccgagggctacgacctgttcatcacccagctgaaggacggcctgaagaacaccagccacgagaccgccgccaaccacaaggtggccaagtgggccaccgtgaccttccacctgccccaccacgtgctgaagagcatcgccagcgccatcgtgaacgagctgaagaagatcaaccagaacgtggccgccctgcccgtggccagcagcgtgatggacagactgagctacctgctgcccagcgccagacccgagctgggcgtgggccccggcagaagcgtggacagaagcctgatgtacagcgaggccaacagaagagagaccttcaccagctggccccacgtgggctacagatgggcccagcccgaccccatggcccaggccggcttctaccaccagcccgccagcagcggcgacgacagagccatgtgcttcacctgcagcgtgtgcctggtgtgctgggagcccaccgacgagccctggagcgagcacgagagacacagccccaactgccccttcgtgaagggcgagcacacccagaacgtgcccctgagcgtgaccctggccaccagccccgcccagttcccctgcaccgacggcaccgacagaatcagctgcttcggcagcggcagctgcccccacttcctggccgccgccaccaagagaggcaagatctgcatctgggacgtgagcaagctgatgaaggtgcacctgaagttcgagatcaacgcctacgaccccgccatcgtgcagcagctgatcctgagcggcgaccccagcagcggcgtggacagcagaagacccaccctggcctggctggaggacagcagcagctgcagcgacatccccaagctggagggcgacagcgacgacctgctggaggacagcgacagcgaggagcacagcagaagcgacagcgtgaccggccacaccagccagaaggaggccatggaggtgagcctggacatcaccgccctgagcatcctgcagcagcccgagaagctgcagtgggagatcgtggccaacgtgctggaggacaccgtgaaggacctggaggagctgggcgccaacccctgcctgaccaacagcaagagcgagaagaccaaggagaagcaccaggagcagcacaacatccccttcccctgcctgctggccggcggcctgctgacctacaagagccccgccaccagccccatcagcagcaacagccacagaagcctggacggcctgagcagaacccagggcgagagcatcagcgagcagggcagcaccgacaacgagagctgcaccaacagcgagctgaacagccccctggtgagaagaaccctgcccgtgctgctgctgtacagcatcaaggagagcgacgagaaggccggcaagatcttcagccagatgaacaacatcatgagcaagagcctgcacgacgacggcttcaccgtgccccagatcatcgagatggagctggacagccaggagcagctgctgctgcaggacccccccgtgacctacatccagcagttcgccgacgccgccgccaacctgaccagccccgacagcgagaagtggaacagcgtgttccccaagcccggcaccctggtgcagtgcctgagactgcccaagttcgccgaggaggagaacctgtgcatcgacagcatcaccccctgcgccgacggcatccacctgctggtgggcctgagaacctgccccgtggagagcctgagcgccatcaaccaggtggaggccctgaacaacctgaacaagctgaacagcgccctgtgcaacagaagaaagggcgagctggagagcaacctggccgtggtgaacggcgccaacatcagcgtgatccagcacgagagccccgccgacgtgcagacccccctgatcatccagcccgagcagagaaacgtgagcggcggctacctggtgctgtacaagatgaactacgccaccagaatcgtgaccctggaggaggagcccatcaagatccagcacatcaaggacccccaggacaccatcaccagcctgatcctgctgccccccgacatcctggacaacagagaggacgactgcgaggagcccatcgaggacatgcagctgaccagcaagaacggcttcgagagagagaagaccagcgacatcagcaccctgggccacctggtgatcaccacccagggcggctacgtgaagatcctggacctgagcaacttcgagatcctggccaaggtggagccccccaagaaggagggcaccgaggagcaggacaccttcgtgagcgtgatctactgcagcggcaccgacagactgtgcgcctgcaccaagggcggcgagctgcacttcctgcagatcggcggcacctgcgacgacatcgacgaggccgacatcctggtggacggcagcctgagcaagggcatcgagcccagcagcgagggcagcaagcccctgagcaaccccagcagccccggcatcagcggcgtggacctgctggtggaccagcccttcaccctggagatcctgaccagcctggtggagctgaccagattcgagaccctgacccccagattcagcgccaccgtgcccccctgctgggtggaggtgcagcaggagcagcagcagagaagacacccccagcacctgcaccagcagcaccacggcgacgccgcccagcacaccagaacctggaagctgcagaccgacagcaacagctgggacgagcacgtgttcgagctggtgctgcccaaggcctgcatggtgggccacgtggacttcaagttcgtgctgaacagcaacatcaccaacatcccccagatccaggtgaccctgctgaagaacaaggcccccggcctgggcaaggtgaacgccctgaacatcgaggtggagcagaacggcaagcccagcctggtggacctgaacgaggagatgcagcacatggacgtggaggagagccagtgcctgagactgtgccccttcctggaggaccacaaggaggacatcctgtgcggccccgtgtggctggccagcggcctggacctgagcggccacgccggcatgctgaccctgaccagccccaagctggtgaagggcatggccggcggcaagtacagaagcttcctgatccacgtgaaggccgtgaacgagagaggcaccgaggagatctgcaacggcggcatgagacccgtggtgagactgcccagcctgaagcaccagagcaacaagggctacagcctggccagcctgctggccaaggtggccgccggcaaggagaagagcagcaacgtgaagaacgagaacaccagcggcaccagaaagagcgagaacctgagaggctgcgacctgctgcaggaggtgagcgtgaccatcagaagattcaagaagaccagcatcagcaaggagagagtgcagagatgcgccatgctgcagttcagcgagttccacgagaagctggtgaacaccctgtgcagaaagaccgacgacggccagatcaccgagcacgcccagagcctggtgctggacaccctgtgctggctggccggcgtgcacagcaacggccccggcagcagcaaggagggcaacgagaacctgctgagcaagaccagaaagttcctgagcgacatcgtgagagtgtgcttcttcgaggccggcagaagcatcgcccacaagtgcgccagattcctggccctgtgcatcagcaacggcaagtgcgacccctgccagcccgccttcggccccgtgctgctgaaggccctgctggacaacatgagcttcctgcccgccgccaccaccggcggcagcgtgtactggtacttcgtgctgctgaactacgtgaaggacgaggacctggccggctgcagcaccgcctgcgccagcctgctgaccgccgtgagcagacagctgcaggacagactgacccccatggaggccctgctgcagaccagatacggcctgtacagcagccccttcgaccccgtgctgttcgacctggagatgagcggcagcagctgcaagaacgtgtacaacagcagcatcggcgtgcagagcgacgagatcgacctgagcgacgtgctgagcggcaacggcaaggtgagcagctgcaccgccgccgagggcagcttcaccagcctgaccggcctgctggaggtggagcccctgcacttcacctgcgtgagcaccagcgacggcaccagaatcgagagagacgacgccatgagcagcttcggcgtgacccccgccgtgggcggcctgagcagcggcaccgtgggcgaggccagcaccgccctgagcagcgccgcccaggtggccctgcagagcctgagccacgccatggccagcgccgagcagcagctgcaggtgctgcaggagaagcagcagcagctgctgaagctgcagcagcagaaggccaagctggaggccaagctgcaccagaccaccgccgccgccgccgccgccgccagcgccgtgggccccgtgcacaacagcgtgcccagcaaccccgtggccgcccccggcttcttcatccaccccagcgacgtgatcccccccacccccaagaccacccccctgttcatgaccccccccctgaccccccccaacgaggccgtgagcgtggtgatcaacgccgagctggcccagctgttccccggcagcgtgatcgacccccccgccgtgaacctggccgcccacaacaagaacagcaacaagagcagaatgaaccccctgggcagcggcctggccctggccatcagccacgccagccacttcctgcagccccccccccaccagagcatcatcatcgagagaatgcacagcggcgccagaagattcgtgaccctggacttcggcagacccatcctgctgaccgacgtgctgatccccacctgcggcgacctggccagcctgagcatcgacatctggaccctgggcgaggaggtggacggcagaagactggtggtggccaccgacatcagcacccacagcctgatcctgcacgacctgatccccccccccgtgtgcagattcatgaagatcaccgtgatcggcagatacggcagcaccaacgccagagccaagatccccctgggcttctactacggccacacctacatcctgccctgggagagcgagctgaagctgatgcacgaccccctgaagggcgagggcgagagcgccaaccagcccgagatcgaccagcacctggccatgatggtggccctgcaggaggacatccagtgcagatacaacctggcctgccacagactggagaccctgctgcagagcatcgacctgccccccctgaacagcgccaacaacgcccagtacttcctgagaaagcccgacaaggccgtggaggaggacagcagagtgttcagcgcctaccaggactgcatccagctgcagctgcagctgaacctggcccacaacgccgtgcagagactgaaggtggccctgggcgccagcagaaagatgctgagcgagaccagcaaccccgaggacctgatccagaccagcagcaccgagcagctgagaaccatcatcagatacctgctggacaccctgctgagcctgctgcacgccagcaacggccacagcgtgcccgccgtgctgcagagcaccttccacgcccaggcctgcgaggagctgttcaagcacctgtgcatcagcggcacccccaagatcagactgcacaccggcctgctgctggtgcagctgtgcggcggcgagagatggtggggccagttcctgagcaacgtgctgcaggagctgtacaacagcgagcagctgctgatcttcccccaggacagagtgttcatgctgctgagctgcatcggccagagaagcctgagcaacagcggcgtgctggagagcctgctgaacctgctggacaacctgctgagccccctgcagccccagctgcccatgcacagaagaaccgagggcgtgctggacatccccatgatcagctgggtggtgatgctggtgagcagactgctggactacgtggccaccgtggaggacgaggccgccgccgccaagaagcccctgaacggcaaccagtggagcttcatcaacaacaacctgcacacccagagcctgaacagaagcagcaagggcagcagcagcctggacagactgtacagcagaaagatcagaaagcagctggtgcaccacaagcagcagctgaacctgctgaaggccaagcagaaggccctggtggagcagatggagaaggagaagatccagagcaacaagggcagcagctacaagctgctggtggagcaggccaagctgaagcaggccaccagcaagcacttcaaggacctgatcagactgagaagaaccgccgagtggagcagaagcaacctggacaccgaggtgaccaccgccaaggagagccccgagatcgagcccctgcccttcaccctggcccacgagagatgcatcagcgtggtgcagaagctggtgctgttcctgctgagcatggacttcacctgccacgccgacctgctgctgttcgtgtgcaaggtgctggccagaatcgccaacgccaccagacccaccatccacctgtgcgagatcgtgaacgagccccagctggagagactgctgctgctgctggtgggcaccgacttcaacagaggcgacatcagctggggcggcgcctgggcccagtacagcctgacctgcatgctgcaggacatcctggccggcgagctgctggcccccgtggccgccgaggccatggaggagggcaccgtgggcgacgacgtgggcgccaccgccggcgacagcgacgacagcctgcagcagagcagcgtgcagctgctggagaccatcgacgagcccctgacccacgacatcaccggcgccccccccctgagcagcctggagaaggacaaggagatcgacctggagctgctgcaggacctgatggaggtggacatcgaccccctggacatcgacctggagaaggaccccctggccgccaaggtgttcaagcccatcagcagcacctggtacgactactggggcgccgactacggcacctacaactacaacccctacatcggcggcctgggcatccccgtggccaagccccccgccaacaccgagaagaacggcagccagaccgtgagcgtgagcgtgagccaggccctggacgccagactggaggtgggcctggagcagcaggccgagctgatgctgaagatgatgagcaccctggaggccgacagcatcctgcaggccctgaccaacaccagccccaccctgagccagagccccaccggcaccgacgacagcctgctgggcggcctgcaggccgccaaccagaccagccagctgatcatccagctgagcagcgtgcccatgctgaacgtgtgcttcaacaagctgttcagcatgctgcaggtgcaccacgtgcagctggagagcctgctgcagctgtggctgaccctgagcctgaacagcagcagcaccggcaacaaggagaacggcgccgacatcttcctgtacaacgccaacagaatccccgtgatcagcctgaaccaggccagcatcaccagcttcctgaccgtgctggcctggtaccccaacaccctgctgagaacctggtgcctggtgctgcacagcctgaccctgatgaccaacatgcagctgaacagcggcagcagcagcgccatcggcacccaggagagcaccgcccacctgctggtgagcgaccccaacctgatccacgtgctggtgaagttcctgagcggcaccagcccccacggcaccaaccagcacagcccccaggtgggccccaccgccacccaggccatgcaggagttcctgaccagactgcaggtgcacctgagcagcacctgcccccagatcttcagcgagttcctgctgaagctgatccacatcctgagcaccgagagaggcgccttccagaccggccagggccccctggacgcccaggtgaagctgctggagttcaccctggagcagaacttcgaggtggtgagcgtgagcaccatcagcgccgtgatcgagagcgtgaccttcctggtgcaccactacatcacctgcagcgacaaggtgatgagcagaagcggcagcgacagcagcgtgggcgccagagcctgcttcggcggcctgttcgccaacctgatcagacccggcgacgccaaggccgtgtgcggcgagatgaccagagaccagctgatgttcgacctgctgaagctggtgaacatcctggtgcagctgcccctgagcggcaacagagagtacagcgccagagtgagcgtgaccaccaacaccaccgacagcgtgagcgacgaggagaaggtgagcggcggcaaggacggcaacggcagcagcaccagcgtgcagggcagccccgcctacgtggccgacctggtgctggccaaccagcagatcatgagccagatcctgagcgccctgggcctgtgcaacagcagcgccatggccatgatcatcggcgccagcggcctgcacctgaccaagcacgagaacttccacggcggcctggacgccatcagcgtgggcgacggcctgttcaccatcctgaccaccctgagcaagaaggccagcaccgtgcacatgatgctgcagcccatcctgacctacatggcctgcggctacatgggcagacagggcagcctggccacctgccagctgagcgagcccctgctgtggttcatcctgagagtgctggacaccagcgacgccctgaaggccttccacgacatgggcggcgtgcagctgatctgcaacaacatggtgaccagcaccagagccatcgtgaacaccgccagaagcatggtgagcaccatcatgaagttcctggacagcggccccaacaaggccgtggacagcaccctgaagaccagaatcctggccagcgagcccgacaacgccgagggcatccacaacttcgcccccctgggcaccatcaccagcagcagccccaccgcccagcccgccgaggtgctgctgcaggccacccccccccacagaagagccagaagcgccgcctggagctacatcttcctgcccgaggaggcctggtgcgacctgaccatccacctgcccgccgccgtgctgctgaaggagatccacatccagccccacctggccagcctggccacctgccccagcagcgtgagcgtggaggtgagcgccgacggcgtgaacatgctgcccctgagcacccccgtggtgaccagcggcctgacctacatcaagatccagctggtgaaggccgaggtggccagcgccgtgtgcctgagactgcacagacccagagacgccagcaccctgggcctgagccagatcaagctgctgggcctgaccgccttcggcaccaccagcagcgccaccgtgaacaaccccttcctgcccagcgaggaccaggtgagcaagaccagcatcggctggctgagactgctgcaccactgcctgacccacatcagcgacctggagggcatgatggccagcgccgccgcccccaccgccaacctgctgcagacctgcgccgccctgctgatgagcccctactgcggcatgcacagccccaacatcgaggtggtgctggtgaagatcggcctgcagagcaccagaatcggcctgaagctgatcgacatcctgctgagaaactgcgccgccagcggcagcgaccccaccgacctgaacagccccctgctgttcggcagactgaacggcctgagcagcgacagcaccatcgacatcctgtaccagctgggcaccacccaggaccccggcaccaaggacagaatccaggccctgctgaagtgggtgagcgacagcgccagagtggccgccatgaagagaagcggcagaatgaactacatgtgccccaacagcagcaccgtggagtacggcctgctgatgcccagccccagccacctgcactgcgtggccgccatcctgtggcacagctacgagctgctggtggagtacgacctgcccgccctgctggaccaggagctgttcgagctgctgttcaactggagcatgagcctgccctgcaacatggtgctgaagaaggccgtggacagcctgctgtgcagcatgtgccacgtgcaccccaactacttcagcctgctgatgggctggatgggcatcacccccccccccgtgcagtgccaccacagactgagcatgaccgacgacagcaagaagcaggacctgagcagcagcctgaccgacgacagcaagaacgcccaggcccccctggccctgaccgagagccacctggccaccctggccagcagcagccagagccccgaggccatcaagcagctgctggacagcggcctgcccagcctgctggtgagaagcctggccagcttctgcttcagccacatcagcagcagcgagagcatcgcccagagcatcgacatcagccaggacaagctgagaagacaccacgtgccccagcagtgcaacaagatgcccatcaccgccgacctggtggcccccatcctgagattcctgaccgaggtgggcaacagccacatcatgaaggactggctgggcggcagcgaggtgaaccccctgtggaccgccctgctgttcctgctgtgccacagcggcagcaccagcggcagccacaacctgggcgcccagcagaccagcgccagaagcgccagcctgagcagcgccgccaccaccggcctgaccacccagcagagaaccgccatcgagaacgccaccgtggccttcttcctgcagtgcatcagctgccaccccaacaaccagaagctgatggcccaggtgctgtgcgagctgttccagaccagcccccagagaggcaacctgcccaccagcggcaacatcagcggcttcatcagaagactgttcctgcagctgatgctggaggacgagaaggtgaccatgttcctgcagagcccctgccccctgtacaagggcagaatcaacgccaccagccacgtgatccagcaccccatgtacggcgccggccacaagttcagaaccctgcacctgcccgtgagcaccaccctgagcgacgtgctggacagagtgagcgacacccccagcatcaccgccaagctgatcagcgagcagaaggacgacaaggagaagaagaaccacgaggagaaggagaaggtgaaggccgagaacggcttccaggacaactacagcgtggtggtggccagcggcctgaagagccagagcaagagagccgtgagcgccaccccccccagaccccccagcagaagaggcagaaccatccccgacaagatcggcagcaccagcggcgccgaggccgccaacaagatcatcaccgtgcccgtgttccacctgttccacaagctgctggccggccagcccctgcccgccgagatgaccctggcccagctgctgaccctgctgtacgacagaaagctgccccagggctacagaagcatcgacctgaccgtgaagctgggcagcagagtgatcaccgaccccagcctgagcaagaccgacagctacaagagactgcaccccgagaaggaccacggcgacctgctggccagctgccccgaggacgaggccctgacccccggcgacgagtgcatggacggcatcctggacgagagcctgctggagacctgccccatccagagccccctgcaggtgttcgccggcatgggcggcctggccctgatcgccgagagactgcccatgctgtaccccgaggtgatccagcaggtgagcgcccccgtggtgaccagcaccacccaggagaagcccaaggacagcgaccagttcgagtgggtgaccatcgagcagagcggcgagctggtgtacgaggcccccgagaccgtggccgccgagcccccccccatcaagagcgccgtgcagaccatgagccccatccccgcccacagcctggccgccttcggcctgttcctgagactgcccggctacgccgaggtgctgctgaaggagagaaagcacgcccagtgcctgctgagactggtgctgggcgtgaccgacgacggcgagggcagccacatcctgcagagccccagcgccaacgtgctgcccaccctgcccttccacgtgctgagaagcctgttcagcaccacccccctgaccaccgacgacggcgtgctgctgagaagaatggccctggagatcggcgccctgcacctgatcctggtgtgcctgagcgccctgagccaccacagccccagagtgcccaacagcagcgtgaaccagaccgagccccaggtgagcagcagccacaaccccaccagcaccgaggagcagcagctgtactgggccaagggcaccggcttcggcaccggcagcaccgccagcggctgggacgtggagcaggccctgaccaagcagagactggaggaggagcacgtgacctgcctgctgcaggtgctggccagctacatcaaccccgtgagcagcgccgtgaacggcgaggcccagagcagccacgagaccagaggccagaacagcaacgccctgcccagcgtgctgctggagctgctgagccagagctgcctgatccccgccatgagcagctacctgagaaacgacagcgtgctggacatggccagacacgtgcccctgtacagagccctgctggagctgctgagagccatcgccagctgcgccgccatggtgcccctgctgctgcccctgagcaccgagaacggcgaggaggaggaggagcagagcgagtgccagaccagcgtgggcaccctgctggccaagatgaagacctgcgtggacacctacaccaacagactgagaagcaagagagagaacgtgaagaccggcgtgaagcccgacgccagcgaccaggagcccgagggcctgaccctgctggtgcccgacatccagaagaccgccgagatcgtgtacgccgccaccaccagcctgagacaggccaaccaggagaagaagctgggcgagtacagcaagaaggccgccatgaagcccaagcccctgagcgtgctgaagagcctggaggagaagtacgtggccgtgatgaagaagctgcagttcgacaccttcgagatggtgagcgaggacgaggacggcaagctgggcttcaaggtgaactaccactacatgagccaggtgaagaacgccaacgacgccaacagcgccgccagagccagaagactggcccaggaggccgtgaccctgagcaccagcctgcccctgagcagcagcagcagcgtgttcgtgagatgcgacgaggagagactggacatcatgaaggtgctgatcaccggccccgccgacaccccctacgccaacggctgcttcgagttcgacgtgtacttcccccaggactaccccagcagcccccccctggtgaacctggagaccaccggcggccacagcgtgagattcaaccccaacctgtacaacgacggcaaggtgtgcctgagcatcctgaacacctggcacggcagacccgaggagaagtggaacccccagaccagcagcttcctgcaggtgctggtgagcgtgcagagcctgatcctggtggccgagccctacttcaacgagcccggctacgagagaagcagaggcacccccagcggcacccagagcagcagagagtacgacggcaacatcagacaggccaccgtgaagtgggccatgctggagcagatcagaaaccccagcccctgcttcaaggaggtgatccacaagcacttctacctgaagagagtggagatcatggcccagtgcgaggagtggatcgccgacatccagcagtacagcagcgacaagagagtgggcagaaccatgagccaccacgccgccgccctgaagagacacaccgcccagctgagagaggagctgctgaagctgccctgccccgagggcctggaccccgacaccgacgacgcccccgaggtgtgcagagccaccaccggcgccgaggagaccctgatgcacgaccaggtgaagcccagcagcagcaaggagctgcccagcgacttccagctgtag

SEQ ID NO: 190185 - protein, 515 aa, Artificial Sequence
  derived and/or modified sequence
MATSTGRWLLLRLALFGFLWEASGGLDSGASRDDDLLLPYPRARARLPRDCTRVRAGNREHESWPPPPATPGAGGLAVRTFVSHFRDRAVAGHLTRAVEPLRTFSVLEPGGPGGCAARRRATVEETARAADCRVAQNGGFFRMNSGECLGNVVSDERRVSSSGGLQNAQFGIRRDGTLVTGYLSEEEVLDTENPFVQLLSGVVWLIRNGSIYINESQATECDETQETGSFSKFVNVISARTAIGHDRKGQLVLFHADGQTEQRGINLWEMAEFLLKQDVVNAINLDGGGSATFVLNGTLASYPSDHCQDNMWRCPRQVSTVVCVHEPRCQPPDCHGHGTCVDGHCQCTGHFWRGPGCDELDCGPSNCSQHGLCTETGCRCDAGWTGSNCSEECPLGWHGPGCQRPCKCEHHCPCDPKTGNCSVSRVKQCLQPPEATLRAGELSFFTRTAWLALTLALAFLLLISTAANLSLLLSRAERNRRLHGDYAYHPLQEMNGEPLAAEKEQPGGAHNPFKD

SEQ ID NO: 190186 - protein, 481 aa, Artificial Sequence
  derived and/or modified sequence
MATSTGRWLLLRLALFGFLWEASGGLDSGASRDDDLLLPYPRARARLPRDCTRVRAGNREHESWPPPPATPGAGGLAVRTFVSHFRDRAVAGHLTRAVEPLRTFSVLEPGGPGGCAARRRATVEETARAADCRVAQNGGFFRMNSGECLGNVVSDERRVSSSGGLQNAQFGIRRDGTLVTGYLSEEEVLDTENPFVQLLSGVVWLIRNGSIYINESQATECDETQETGSFSKFVNVISARTAIGHDRKGQLVLFHADGQTEQRGINLWEMAEFLLKQDVVNAINLDGGGSATFVLNGTLASYPSDHCQDNMWRCPRQVSTVVCVHEPRCQPPDCHGHGTCVDGHCQCTGHFWRGPGCDELDCGPSNCSQHGLCTETGCRCDAGWTGSNCSEVKQCLQPPEATLRAGELSFFTRTAWLALTLALAFLLLISTAANLSLLLSRAERNRRLHGDYAYHPLQEMNGEPLAAEKEQPGGAHNPFKD

SEQ ID NO: 190187 - DNA, 48 bp, Artificial Sequence
  derived and/or modified sequence
atgcgcatgtcagttggcctaagcctccttctgcccctgagcggatag

SEQ ID NO: 190188 - DNA, 1548 bp, Artificial Sequence
  derived and/or modified sequence
atggccaccagcaccgggcggtggctcctgcttaggctggccctgtttgggttcttatgggaagcaagcggcggactggacagtggtgcgtcccgcgatgacgatttactgctgccatatccccgagcacgcgcaagactgccccgggattgtacgagggtgcgagcgggaaaccgagagcatgagagctggcccccgccacccgctacccccggggctggcggcctggccgttcgaacatttgttagccactttagagaccgggcagtggcgggacatctgactagagctgttgagcctctcaggaccttcagcgtgcttgagccaggtgggcctggcgggtgtgccgccaggcgccgggcaacagttgaggaaacagcccgcgccgctgattgcagagtagcccagaacggaggcttctttcggatgaactctggcgagtgcctgggtaatgttgtgtcagacgagagaagggtgtccagttccggaggactgcagaacgctcaatttggcattaggcgagatggaacgctcgtgaccggctatctttcggaggaagaggttctcgacacagaaaatccctttgtacagttattgtcgggcgtggtgtggctgatacgcaacggcagcatttatataaacgagtcgcaggcaactgagtgcgatgagacacaggaaactggatcgttttcaaaattcgtcaatgtgataagcgccaggaccgccattggtcatgacaggaaaggccagttagtgttgtttcatgccgatggacaaacagaacagcgcggcattaacctgtgggagatggccgaattccttctgaagcaagatgtggtgaacgcgataaaccttgacggcggcggctccgctacctttgttctgaacggcactctggcatcttacccttccgaccattgccaggataacatgtggcgctgtcccaggcaagtgtccacggtggtatgcgtgcatgaacctaggtgtcagcccccagattgtcacgggcacgggacctgcgtggacgggcattgtcagtgtaccggacatttttggcgcggccctggatgcgacgaactggactgtgggccaagcaactgttcgcagcatgggttgtgtacagaaacaggctgtagatgcgatgcaggctggaccgggagtaattgttccgaagagtgtcctctgggttggcatggccccgggtgccaacgcccctgcaagtgcgaacaccattgtccctgcgatccgaagacgggcaattgttcagtttcacgggtcaagcagtgtcttcagccccctgaggcgaccctccgcgccggcgagctatcattcttcacacgtactgcctggctggcactcacgctagcgctggccttcctactgctgatcagcaccgccgccaacctatcactgttgctgtccagggccgaacggaatagacgactgcatggcgattacgcgtaccatccacttcaggaaatgaatggggagcccttggccgctgagaaggagcagccgggcggagcgcacaacccattcaaagattag

SEQ ID NO: 190189 - DNA, 1446 bp, Artificial Sequence
  derived and/or modified sequence
atggccacttcaacaggccgctggttactgttgcgacttgcactgttcggtttcctgtgggaggcctccggtggccttgatagcggagcctcccgggacgacgacctactccttccatatccaagagcccgcgcacggctgccaagggactgtacacgggttcgggctggtaaccgcgaacatgagagttggccgcccccaccggctacgcctggggccggcgggctggctgtccggaccttcgtttctcatttccgagatagggcagtggccggacatttaacccgggctgtagaaccgttaagaacttttagcgtactggagcctgggggccctggcgggtgcgccgcgagacgaagggccacagtggaagagactgcgagagcagccgactgccgggtggctcagaatggagggttttttaggatgaactctggggaatgcttgggcaatgtggtcagcgacgagcgccgtgtttcctcttctggggggttgcaaaacgcacagtttggtatccgacgtgacggaacactcgtgacagggtacctgtctgaggaggaggtcctcgataccgaaaaccctttcgttcaacttctctctggcgtggtgtggttgatccggaacggaagtatttatatcaacgaatcgcaggctactgaatgtgacgaaacccaagagaccggcagtttctcaaaatttgtgaacgtgatctccgctagaaccgccataggtcatgaccgcaaggggcaacttgtgctttttcacgccgatggccagactgagcagcgtggaataaatttgtgggagatggctgagtttctgctgaagcaggatgtcgtgaatgcgatcaacttagacgggggaggaagcgccaccttcgtcctcaatggaacactagcctcttaccctagcgatcactgtcaagataacatgtggcggtgcccccggcaggtatccaccgttgtgtgtgtccacgagccccgatgccagcctcccgattgtcacggtcatgggacctgtgtcgatggacactgtcagtgcacaggccatttttggcggggccccggatgtgacgagcttgactgcgggcctagtaattgctctcagcacgggctttgcaccgagaccggttgccgctgcgatgctggctggactggctcaaattgttccgaagtgaaacaatgtctgcaaccacccgaagcaacccttagggcgggtgagcttagtttctttacccggacggcatggctggccttgacccttgctctcgctttcctgcttctgatctccaccgccgcaaatctgtccctgttgctgtccagggccgaacgtaaccgccgtctgcatggtgattacgcctaccatccactacaggaaatgaacggcgagccccttgccgccgaaaaagaacaacctgggggcgctcataacccctttaaagattag

SEQ ID NO: 190190 - DNA, 1548 bp, Artificial Sequence
  derived and/or modified sequence
atggccaccagcacaggccgctggctgctgctgcggctggccctgtttggcttcctgtgggaggccagcggcggcctggacagcggggccagcagagatgatgacctgctgctgccctacccccgggcccgggcccggctgccccgggactgcaccagggtgcgggccggcaaccgggagcacgagagctggcccccacctccagccaccccaggagctgggggcctggccgtgaggacctttgtgagccacttccgggacagagctgtggccggccacctgaccagggctgtggagcccctgcggaccttctctgtgctggagcccggcggccctgggggctgtgccgccaggagaagagccaccgtggaggagacagcccgggctgctgactgccgggtggcccagaatggaggcttcttcaggatgaacagcggagaatgtctgggcaatgtggtgtctgatgaaagaagagtgagcagcagcggcggcctgcagaatgcccagtttggcatcagaagagatggcaccctggtgacaggctacctgtctgaggaggaggtgctggacacagagaacccctttgtgcagctgctgagcggcgtggtgtggctgatcagaaatggcagcatctacatcaatgaaagccaggccacagaatgtgatgagacccaggagaccggcagcttcagcaagtttgtgaatgtcatcagcgccaggacagccatcggccatgacaggaagggccagctggtgctcttccacgcagatggccagacagagcagaggggcatcaacctgtgggagatggccgagttcctgctgaagcaggatgtggtgaatgccatcaacctggatggcggcggcagcgccacctttgtgctgaatggcaccctggccagctaccccagcgaccactgccaggacaacatgtggcgctgcccccggcaggtgtccacagtggtgtgtgtgcatgagccccgctgccagcccccagactgccacggccacggcacctgtgtggatggccactgccagtgcaccggccacttctggaggggccctggctgtgatgagctggactgtggccccagcaactgcagccagcacggcctgtgcacagagaccggctgccgctgtgatgctggctggacaggcagcaactgcagcgaggagtgccccctgggctggcacggccctggctgccagaggccctgcaagtgtgagcaccactgcccctgtgaccccaagacaggcaactgcagcgtgtcccgggtgaagcagtgcctgcagcccccagaggccaccctgcgggccggggagctgtccttcttcaccaggacagcctggctggccctgaccctggccctggccttcctgctgctgatcagcacagctgccaacctgagcctgctgctgagcagagctgagaggaacagaaggctgcatggagactatgcctaccaccccctgcaggagatgaatggagagcccctggccgctgagaaggagcagcccggcggggcccacaaccccttcaaggactag

SEQ ID NO: 190191 - DNA, 1446 bp, Artificial Sequence
  derived and/or modified sequence
atggccaccagcacaggccgctggctgctgctgcggctggccctgtttggcttcctgtgggaggccagcggcggcctggacagcggggccagcagagatgatgacctgctgctgccctacccccgggcccgggcccggctgccccgggactgcaccagggtgcgggccggcaaccgggagcacgagagctggcccccacctccagccaccccaggagctgggggcctggccgtgaggacctttgtgagccacttccgggacagagctgtggccggccacctgaccagggctgtggagcccctgcggaccttctctgtgctggagcccggcggccctgggggctgtgccgccaggagaagagccaccgtggaggagacagcccgggctgctgactgccgggtggcccagaatggaggcttcttcaggatgaacagcggagaatgtctgggcaatgtggtgtctgatgaaagaagagtgagcagcagcggcggcctgcagaatgcccagtttggcatcagaagagatggcaccctggtgacaggctacctgtctgaggaggaggtgctggacacagagaacccctttgtgcagctgctgagcggcgtggtgtggctgatcagaaatggcagcatctacatcaatgaaagccaggccacagaatgtgatgagacccaggagaccggcagcttcagcaagtttgtgaatgtcatcagcgccaggacagccatcggccatgacaggaagggccagctggtgctcttccacgcagatggccagacagagcagaggggcatcaacctgtgggagatggccgagttcctgctgaagcaggatgtggtgaatgccatcaacctggatggcggcggcagcgccacctttgtgctgaatggcaccctggccagctaccccagcgaccactgccaggacaacatgtggcgctgcccccggcaggtgtccacagtggtgtgtgtgcatgagccccgctgccagcccccagactgccacggccacggcacctgtgtggatggccactgccagtgcaccggccacttctggaggggccctggctgtgatgagctggactgtggccccagcaactgcagccagcacggcctgtgcacagagaccggctgccgctgtgatgctggctggacaggcagcaactgcagcgaggtgaagcagtgcctgcagcccccagaggccaccctgcgggccggggagctgtccttcttcaccaggacagcctggctggccctgaccctggccctggccttcctgctgctgatcagcacagctgccaacctgagcctgctgctgagcagagctgagaggaacagaaggctgcatggagactatgcctaccaccccctgcaggagatgaatggagagcccctggccgctgagaaggagcagcccggcggggcccacaaccccttcaaggactag

SEQ ID NO: 190192 - DNA, 2202 bp, Artificial Sequence
  derived and/or modified sequence
acccgaggccccggtccaatatggcgacctccacgggtcgctggcttctcctccggcttgcactattcggcttcctctgggaagcgtccggcggcctcgactcgggggcctcccgcgacgacgacttgctactgccctatccacgcgcgcgcgcgcgcctcccccgggactgcacacgggtgcgcgccggcaaccgcgagcacgagagttggcctccgcctcccgcgactcccggcgccggcggtctggccgtgcgcaccttcgtgtcgcacttcagggaccgcgcggtggccggccacctgacgcgggccgttgagcccctgcgcaccttctcggtgctggagcccggtggacccggcggctgcgcggcgagacgacgcgccaccgtggaggagacggcgcgggcggccgactgccgtgtcgcccagaacggcggcttcttccgcatgaactcgggcgagtgcctggggaacgtggtgagcgacgagcggcgggtgagcagctccggggggctgcagaacgcgcagttcgggatccgccgcgacgggaccctggtcaccgggtacctgtctgaggaggaggtgctggacactgagaacccatttgtgcagctgctgagtggggtcgtgtggctgattcgtaatggaagcatctacatcaacgagagccaagccacagagtgtgacgagacacaggagacaggttcctttagcaaatttgtgaatgtgatatcagccaggacggccattggccacgaccggaaagggcagctggtgctctttcatgcagacggccaaacggagcagcgtggcatcaacctgtgggaaatggcggagttcctgctgaaacaggacgtggtcaacgccatcaacctggatgggggtggctctgccacctttgtgctcaacgggaccttggccagttacccgtcagatcactgccaggacaacatgtggcgctgtccccgccaagtgtccaccgtggtgtgtgtgcacgaaccccgctgccagccgcctgactgccacggccacgggacctgcgtggacgggcactgccaatgcaccgggcacttctggcggggtcccggctgtgatgagctggactgtggcccctctaactgcagccagcacggactgtgcacggagaccggctgccgctgtgatgccggatggaccgggtccaactgcagtgaagagtgtccccttggctggcatgggccgggctgccagaggccttgtaagtgtgagcaccattgtccctgtgaccccaagactggcaactgcagcgtctccagagtaaagcagtgtctccagccacctgaagccaccctgagggcgggagaactctcctttttcaccaggaccgcctggctagccctcaccctggcgctggccttcctcctgctgatcagcactgcagcaaacctgtccttgctcctgtccagagcagagaggaaccggcgcctgcatggggactatgcataccacccgctgcaggagatgaacggggagcctctggccgcagagaaggagcagccagggggcgcccacaaccccttcaaggactgaagcctcaagctgcccggggtggcacgtcgcgaaagcttgtttccccacggtctggcttctgcaggggaaatttcaaggccactggcgtggaccatctgggtgtcctcagcccctgtggggcagccaagttcctgatagcacttgtgcctcagcccctcacctggccacctgccagggcacctgcaaccctagcaataccatgctcgctggagaggctcagctgcctgcttctggcctgcctgtgtctgctgccgagaagcccgtgcccccgggagggctgccgcactgccaaagagtctccctcctcctggggaaggggctgccaacgaaccagactcagtgaccacgtcatgacagaacagcacatcctggccagcacccctggctggagtgggttaaagggacgagtctgccttcctggctgtgacacgggaccccttttctacagacctcatcactggatttgccaactagaattcgatttcctgtcataggaagctccttggaagaagggatggggggatgagatcatgtttacagacctgttttgtcatcctgctgccaagaagttttttaatcacttgaataaattgatataataaaaggagccaccaggtggtgtgtggattctgaa

SEQ ID NO: 190193 - DNA, 2073 bp, Artificial Sequence
  derived and/or modified sequence
gacccgaggccccggtccaatatggcgacctccacgggtcgctggcttctcctccggcttgcactattcggcttcctctgggaagcgtccggcggcctcgactcgggggcctcccgcgacgacgacttgctactgccctatccacgcgcgcgcgcgcgcctcccccgggactgcacacgggtgcgcgccggcaaccgcgagcacgagagttggcctccgcctcccgcgactcccggcgccggcggtctggccgtgcgcaccttcgtgtcgcacttcagggaccgcgcggtggccggccacctgacgcgggccgttgagcccctgcgcaccttctcggtgctggagcccggtggacccggcggctgcgcggcgagacgacgcgccaccgtggaggagacggcgcgggcggccgactgccgtgtcgcccagaacggcggcttcttccgcatgaactcgggcgagtgcctggggaacgtggtgagcgacgagcggcgggtgagcagctccggggggctgcagaacgcgcagttcgggatccgccgcgacgggaccctggtcaccgggtacctgtctgaggaggaggtgctggacactgagaacccatttgtgcagctgctgagtggggtcgtgtggctgattcgtaatggaagcatctacatcaacgagagccaagccacagagtgtgacgagacacaggagacaggttcctttagcaaatttgtgaatgtgatatcagccaggacggccattggccacgaccggaaagggcagctggtgctctttcatgcagacggccaaacggagcagcgtggcatcaacctgtgggaaatggcggagttcctgctgaaacaggacgtggtcaacgccatcaacctggatgggggtggctctgccacctttgtgctcaacgggaccttggccagttacccgtcagatcactgccaggacaacatgtggcgctgtccccgccaagtgtccaccgtggtgtgtgtgcacgaaccccgctgccagccgcctgactgccacggccacgggacctgcgtggacgggcactgccaatgcaccgggcacttctggcggggtcccggctgtgatgagctggactgtggcccctctaactgcagccagcacggactgtgcacggagaccggctgccgctgtgatgccggatggaccgggtccaactgcagtgaagtaaagcagtgtctccagccacctgaagccaccctgagggcgggagaactctcctttttcaccaggaccgcctggctagccctcaccctggcgctggccttcctcctgctgatcagcactgcagcaaacctgtccttgctcctgtccagagcagagaggaaccggcgcctgcatggggactatgcataccacccgctgcaggagatgaacggggagcctctggccgcagagaaggagcagccagggggcgcccacaaccccttcaaggactgaagcctcaagctgcccggggtggcacgtcgcgaaagcttgtttccccacggtctggcttctgcaggggaaatttcaaggccactggcgtggaccatctgggtgtcctcagcccctgtggggcagccaagttcctgatagcacttgtgcctcagcccctcacctggccacctgccagggcacctgcaaccctagcaataccatgctcgctggagaggctcagctgcctgcttctggcctgcctgtgtctgctgccgagaagcccgtgcccccgggagggctgccgcactgccaaagagtctccctcctcctggggaaggggctgccaacgaaccagactcagtgaccacgtcatgacagaacagcacatcctggccagcacccctggctggagtgggttaaagggacgagtctgccttcctggctgtgacacgggaccccttttctacagacctcatcactggatttgccaactagaattcgatttcctgtcataggaagctccttggaagaagggatggggggatgagatcatgtttacagacctgttttgtcatcctgctgccaagaagttttttaatcacttgaataaattgatataataaaagg

SEQ ID NO: 190194 - DNA, 1548 bp, Artificial Sequence
  derived and/or modified sequence
atggccaccagcaccggccggtggctgctgctgcggctggccctgttcgggtttttgtgggaggcctcggggggcctagactccggcgcgtcaagagacgacgatctcctcttaccataccctcgggcccgtgccagattgcctcgggactgcacaagagtcagggcgggcaacagagaacacgaatcctggccgccgcctcctgctacgcctggtgccggtggcctagccgtgcgcactttcgtgtctcatttcagagatcgcgccgtggcaggacacctcacgcgcgccgtggaaccactgcgtaccttttccgttttggaacccgggggccctggaggctgcgccgcacggcgcagagctacagtagaggagacagctagagcggccgattgtcgcgtggctcaaaatggggggttttttagaatgaattccggggaatgtcttgggaacgtggttagtgacgagagacgggtctcaagtagcgggggcctacagaatgcccaattcggcatccgcagagacggaacactcgtgaccggatacctctctgaggaagaagtcctggacacagaaaatccttttgtgcaattgctaagcggagttgtttggctaatccggaatggaagtatttacattaatgagagccaggccacggagtgtgacgagacccaagagaccggaagcttctctaagtttgtcaacgtcatctcagcacgaaccgctattgggcatgatcggaagggtcaactggtactgttccatgccgatggacaaaccgaacagagggggattaatctttgggaaatggccgagttcctgctcaaacaggacgtggtcaacgccatcaacttggacggggggggcagcgccaccttcgtgcttaacgggacattagctagctatccttctgaccattgccaggataatatgtggcgatgccctcgtcaggtgtccactgtcgtgtgtgtccacgagcctcgatgtcaaccaccggattgccatggtcacggtacttgcgtagacgggcactgtcagtgcactgggcacttctggagaggacctggctgcgacgagctggactgcggcccaagtaactgttctcagcacggcctctgtacagaaaccggctgcagatgtgatgctgggtggactggttccaactgcagcgaggaatgccccctggggtggcatggtcccggctgccagcggccttgcaaatgtgagcaccactgtccctgtgatcctaagactggcaactgttctgtttcccgcgtgaagcagtgtttacagccacctgaggccaccctgcgagccggcgagctctcattctttacgcgcaccgcttggttagcactcacattagcgctggccttcctgttgctgatctccaccgccgccaacctgtctcttctcctcagccgagcagaaagaaacagaaggctccacggcgattatgcctaccacccattgcaggaaatgaatggggaacccctggcagccgagaaagagcagcccggtggggcacacaacccatttaaggactag

SEQ ID NO: 190195 - DNA, 1446 bp, Artificial Sequence
  derived and/or modified sequence
atggccaccagcaccggccggtggctgctgctgcggctggccctgttcggctttctttgggaggcctccggaggtctggattcaggggcgtccagggacgacgatctccttcttccctacccccgtgcacgagcacggttgccacgagattgcacaagagtgcgggctggtaatcgcgaacatgaaagttggccaccaccccctgccacccccggggcaggcgggttggcagtgcggacatttgtttcacacttcagagatcgggccgtggcgggacacttgactcgtgccgtggagccactgagaactttcagcgtcctggaaccgggaggtcctggaggctgtgcagcaaggaggcgcgctactgtggaagaaaccgccagagccgcggactgcagagttgcccaaaatggagggtttttccgcatgaattccggtgagtgcctgggaaatgtggtcagcgatgaacgtcgcgtgtcaagctctggggggctgcaaaatgcccaattcggcattagacgagatggcacactggttaccgggtatttgagtgaggaggaagtcttggatacagagaatccattcgttcagctcctcagcggcgttgtttggttgattagaaatggctccatctacattaacgagtcccaggcaactgagtgtgatgagacccaagaaaccggctcattcagcaaattcgttaacgtcatttctgcaaggaccgctattggccacgacagaaaaggacagttggtgctgtttcatgctgatggccagaccgaacaaaggggcattaacctatgggagatggctgagttccttctgaagcaagacgtcgtgaacgccatcaaccttgatggaggcgggtccgccacatttgtgttgaacggtacccttgcgtcctatccgtcagaccactgccaggacaacatgtggcggtgccctcgacaagtcagcaccgtcgtatgcgtgcacgagccccgctgccaaccgccagattgtcatggccacggaacttgcgttgacggacattgtcaatgcaccggccatttctggaggggacctggctgtgacgaactggattgcggacctagcaactgtagccagcatggcctctgtacagagaccggatgccggtgtgatgccggctggacagggagcaattgcagcgaggtcaagcagtgtcttcaacctcctgaggcaacactgcgagccggtgaactatcatttttcacacggacagcctggttggctttgaccctcgccctggctttcttgctgctaattagcacggcagctaaccttagtctgttgttgagtcgagccgaacgtaaccgtcgactccatggagattacgcataccaccctctgcaggaaatgaatggcgagcctttagctgcggaaaaggaacagcctgggggcgcacacaacccttttaaggattag

SEQ ID NO: 190196 - DNA, 1548 bp, Artificial Sequence
  derived and/or modified sequence
atggccactagcacaggcagatggctgctacttcggctcgccttattcgggttcctgtgggaggccagtggcggtctcgacagtggagcatcccgcgacgacgatctgctactgccatacccaagggcgagagcacgtttgcctcgtgattgtacacgggtccgtgcaggcaaccgagaacatgaatcatggccccctccacccgctacccctggcgctggtggattggctgtcagaacatttgtaagtcacttcagggaccgggcagtggccggacacctaaccagagccgtggagcctctgagaacatttagcgttctggaaccaggtgggccaggcggatgcgctgctcgcagacgggctaccgtagaagagacagctagagccgcagactgccgagtagctcagaacggaggcttctttcgtatgaactcgggagaatgtctggggaatgtcgtctccgacgagcgtcgggtttcctcaagtggcggtctccagaatgcacagttcgggattcgaagggacggcactctggtgaccgggtacctgtccgaagaagaggtgctggataccgaaaatccctttgtgcagctgttgagtggtgtcgtgtggctcatccgcaacggtagtatttatatcaatgaaagtcaagccacggagtgcgacgaaacacaagaaaccgggtctttcagtaaatttgtgaacgttatttcagccagaaccgctataggccatgaccggaagggacagcttgttctcttccacgctgatgggcagaccgaacagcgaggaatcaacctctgggagatggccgaattcctgctcaaacaggacgttgtgaatgcgataaacctggatggaggaggctcagctaccttcgttctgaatggcaccctggcctcctatccctccgatcactgccaagataacatgtggaggtgccccagacaggtgtctactgtggtgtgcgttcacgagcccagatgccagcccccagactgtcatggtcacggaacctgcgtcgacgggcactgtcagtgtactgggcacttctggagaggtcctggctgcgatgagctggattgtggtcccagcaattgcagtcagcatggcctttgcactgaaactggatgtcgatgcgacgcgggttggactggctcaaattgttccgaagagtgtcccctagggtggcacggtcccggttgccagcggccttgcaagtgtgaacatcactgcccgtgtgaccctaaaactggcaactgttcagtctcccgggtcaagcagtgcctgcagccccctgaagcaaccctgcgggcaggcgaacttagcttctttacccgaaccgcttggttagcgcttacccttgcgctcgcctttttactgcttataagcaccgcagctaatctgtctctgcttttaagtcgcgcagagcggaaccggaggctgcatggtgactacgcctaccatcctctacaggaaatgaatggtgagcccctcgccgctgagaaagagcagcctggaggggctcataaccctttcaaagactag

SEQ ID NO: 190197 - DNA, 1446 bp, Artificial Sequence
  derived and/or modified sequence
atggcaacttctactggtcgatggctcctgctccggttggccctgtttggttttctctgggaggctagcgggggactcgattcaggtgctagccgcgatgacgatctgctgttaccataccccagagcccgagctcgcctgcccagggattgcacccgggtaagggcgggtaatagggagcatgaatcctggccacccccaccagccacacccggagccggaggcctggccgttaggacgtttgtatcacactttcgggaccgagctgtagcaggacacctgacacgggctgtagaaccactacgtacttttagcgtgttggaaccgggagggccaggaggatgtgcagctagaaggagggctacggtggaggagacagcgcgagccgctgattgtcgcgtggcccagaacggaggcttttttcggatgaacagcggtgagtgcctgggcaacgtggtgtctgacgagagaagggtgtcctcatccgggggtctgcaaaatgcccagttcggaattaggcgtgatggaacattggttaccggctatttatccgaggaggaggtattagatactgagaacccgtttgtgcagctgctcagcggcgtagtctggttgatccgcaacggcagtatttacattaacgaatctcaggccaccgagtgtgatgaaacgcaggaaactggaagcttctctaagttcgtaaatgtgatatccgcaaggactgctattggccacgaccggaagggtcagctggtacttttccacgcagatggacaaaccgagcagagagggatcaacctttgggagatggctgagtttcttctcaagcaggatgtggtaaatgccattaacttggacggcggaggctctgccactttcgtcttgaacggtacactggcttcctatcccagcgaccactgccaagacaatatgtggaggtgcccgcgacaggtgtcaactgtcgtgtgcgtccacgaaccaagatgtcagcctcccgactgtcacgggcacggtacctgtgtagacggtcattgtcagtgtactgggcatttctggcggggtccaggctgtgacgaactcgattgcggtccttccaattgctcccaacacggactatgcactgagaccggatgcaggtgcgacgccggatggacaggaagtaattgttccgaggtgaagcagtgcctccaacctcccgaagcgaccctgcgtgcgggtgagctatccttcttcactcggactgcgtggctagcccttactttggctctcgcttttttgctgctgatatctactgctgctaatctgagtctcctgctgtctcgagccgaaagaaaccgccgattgcatggggattacgcataccacccactccaggagatgaacggagagcctctggccgcagagaaagagcagcccggaggcgctcataacccctttaaagactag

SEQ ID NO: 190198 - DNA, 1548 bp, Artificial Sequence
  derived and/or modified sequence
atggccaccagcaccggcagatggctgctgctgagactggccctgttcggcttcctgtgggaggccagcggcggcctggacagcggcgccagcagagacgacgacctgctgctgccctaccccagagccagagccagactgcccagagactgcaccagagtgagagccggcaacagagagcacgagagctggccccccccccccgccacccccggcgccggcggcctggccgtgagaaccttcgtgagccacttcagagacagagccgtggccggccacctgaccagagccgtggagcccctgagaaccttcagcgtgctggagcccggcggccccggcggctgcgccgccagaagaagagccaccgtggaggagaccgccagagccgccgactgcagagtggcccagaacggcggcttcttcagaatgaacagcggcgagtgcctgggcaacgtggtgagcgacgagagaagagtgagcagcagcggcggcctgcagaacgcccagttcggcatcagaagagacggcaccctggtgaccggctacctgagcgaggaggaggtgctggacaccgagaaccccttcgtgcagctgctgagcggcgtggtgtggctgatcagaaacggcagcatctacatcaacgagagccaggccaccgagtgcgacgagacccaggagaccggcagcttcagcaagttcgtgaacgtgatcagcgccagaaccgccatcggccacgacagaaagggccagctggtgctgttccacgccgacggccagaccgagcagagaggcatcaacctgtgggagatggccgagttcctgctgaagcaggacgtggtgaacgccatcaacctggacggcggcggcagcgccaccttcgtgctgaacggcaccctggccagctaccccagcgaccactgccaggacaacatgtggagatgccccagacaggtgagcaccgtggtgtgcgtgcacgagcccagatgccagccccccgactgccacggccacggcacctgcgtggacggccactgccagtgcaccggccacttctggagaggccccggctgcgacgagctggactgcggccccagcaactgcagccagcacggcctgtgcaccgagaccggctgcagatgcgacgccggctggaccggcagcaactgcagcgaggagtgccccctgggctggcacggccccggctgccagagaccctgcaagtgcgagcaccactgcccctgcgaccccaagaccggcaactgcagcgtgagcagagtgaagcagtgcctgcagccccccgaggccaccctgagagccggcgagctgagcttcttcaccagaaccgcctggctggccctgaccctggccctggccttcctgctgctgatcagcaccgccgccaacctgagcctgctgctgagcagagccgagagaaacagaagactgcacggcgactacgcctaccaccccctgcaggagatgaacggcgagcccctggccgccgagaaggagcagcccggcggcgcccacaaccccttcaaggactag

SEQ ID NO: 190199 - DNA, 1446 bp, Artificial Sequence
  derived and/or modified sequence
atggccaccagcaccggcagatggctgctgctgagactggccctgttcggcttcctgtgggaggccagcggcggcctggacagcggcgccagcagagacgacgacctgctgctgccctaccccagagccagagccagactgcccagagactgcaccagagtgagagccggcaacagagagcacgagagctggccccccccccccgccacccccggcgccggcggcctggccgtgagaaccttcgtgagccacttcagagacagagccgtggccggccacctgaccagagccgtggagcccctgagaaccttcagcgtgctggagcccggcggccccggcggctgcgccgccagaagaagagccaccgtggaggagaccgccagagccgccgactgcagagtggcccagaacggcggcttcttcagaatgaacagcggcgagtgcctgggcaacgtggtgagcgacgagagaagagtgagcagcagcggcggcctgcagaacgcccagttcggcatcagaagagacggcaccctggtgaccggctacctgagcgaggaggaggtgctggacaccgagaaccccttcgtgcagctgctgagcggcgtggtgtggctgatcagaaacggcagcatctacatcaacgagagccaggccaccgagtgcgacgagacccaggagaccggcagcttcagcaagttcgtgaacgtgatcagcgccagaaccgccatcggccacgacagaaagggccagctggtgctgttccacgccgacggccagaccgagcagagaggcatcaacctgtgggagatggccgagttcctgctgaagcaggacgtggtgaacgccatcaacctggacggcggcggcagcgccaccttcgtgctgaacggcaccctggccagctaccccagcgaccactgccaggacaacatgtggagatgccccagacaggtgagcaccgtggtgtgcgtgcacgagcccagatgccagccccccgactgccacggccacggcacctgcgtggacggccactgccagtgcaccggccacttctggagaggccccggctgcgacgagctggactgcggccccagcaactgcagccagcacggcctgtgcaccgagaccggctgcagatgcgacgccggctggaccggcagcaactgcagcgaggtgaagcagtgcctgcagccccccgaggccaccctgagagccggcgagctgagcttcttcaccagaaccgcctggctggccctgaccctggccctggccttcctgctgctgatcagcaccgccgccaacctgagcctgctgctgagcagagccgagagaaacagaagactgcacggcgactacgcctaccaccccctgcaggagatgaacggcgagcccctggccgccgagaaggagcagcccggcggcgcccacaaccccttcaaggactag

SEQ ID NO: 190200 - protein, 239 aa, Artificial Sequence
  derived and/or modified sequence
METEAIDGYITCDNELSPEREHSNMAIDLTSSTPNGQHASPSHMTSTNSVKLEMQSDEECDRKPLSREDEIRGHDEGSSLEEPLIESSEVADNRKVQELQGEGGIRLPNGKLKCDVCGMVCIGPNVLMVHKRSHTGERPFHCNQCGASFTQKGNLLRHIKLHSGEKPFKCPFCSYACRRRDALTGHLRTHSVGKPHKCNYCGRSYKQRSSLEEHKERCHNYLQNVSMEAAGQVMSHHDS

SEQ ID NO: 190201 - protein, 148 aa, Artificial Sequence
  derived and/or modified sequence
METEAIDGYITCDNELSPEREHSNMAIDLTSSTPNGQHASPSHMTSTNSVKLEMQSDEECDRKPLSREDEIRGHDEGSSLEEPLIESSEVADNRKVQELQGEGGIRLPNGKLKCDVCGMVCIGPNVLMVHKRSHTGVAVVKTTFSEFC

SEQ ID NO: 190202 - protein, 83 aa, Artificial Sequence
  derived and/or modified sequence
METEAIDGYITCDNELSPEREHSNMAIDLTSSTPNGQHASPSHMTSTNSVKLEMQSDEECDRKPLSREDEIRGHDEGSSLEEP

SEQ ID NO: 190203 - DNA, 720 bp, Artificial Sequence
  derived and/or modified sequence
atggagaccgaggccattgatggatatatcacctgcgacaacgagctgtcacctgaaagagaacatagcaatatggctatcgaccttaccagtagtacacctaacggacagcatgcctcgccaagccatatgaccagcactaattccgtgaaactcgagatgcagagcgacgaggaatgtgatcgcaaacccctgtctcgtgaagacgaaatccgcggccacgatgaggggtctagtctggaggagcccctgattgaatcttccgaggtggccgataatcgtaaggtccaggagctccagggcgaaggtggaattagacttcccaacggtaaactcaagtgcgatgtgtgcgggatggtctgtatcggtcccaacgttctgatggttcacaaacggtcacatactggcgagagaccctttcattgtaaccagtgtggggctagcttcacgcagaagggtaatcttctaaggcacatcaagctacactccggagagaagcccttcaaatgcccattttgctcatatgcctgccgcagaagagacgcgctcaccggccaccttcggacccattccgttggtaagcctcacaagtgtaactattgcggccgctcctacaagcagaggagttcattggaggaacataaagagagatgtcacaattatctacagaacgtgtccatggaggcggctggccaagtgatgtcccaccatgacagttag

SEQ ID NO: 190204 - DNA, 720 bp, Artificial Sequence
  derived and/or modified sequence
atggagaccgaagccatcgacggctatatcacttgtgataacgagctttcacccgagcgagaacacagtaacatggctatcgacctaacctccagtacacctaacggccaacacgctagtccttcacacatgacatctacaaattcagttaaacttgaaatgcaaagcgatgaggaatgtgatcgcaaaccattgtcacgagaggatgaaatcagaggccatgatgagggatcaagcctggaggaaccactcatcgagagtagcgaggtggccgacaacaggaaagtgcaggagcttcagggcgagggggggattcggttgcctaatggcaagctgaaatgcgatgtttgtggtatggtttgtattggccctaacgtgctgatggtgcacaagcgctcccataccggagagcggccttttcactgcaatcaatgcggggctagctttacccagaaaggcaatctgctgagacacatcaaacttcacagcggtgagaagcctttcaagtgccccttttgctcatacgcatgtcggcgccgcgacgcattaactgggcacttaagaacccattctgttggcaaaccacacaagtgcaattactgtggcaggtcttataaacagcgctcgagcctcgaggaacataaagagcgctgccacaactacctccagaatgtgtccatggaggcagcaggccaggtaatgtcccaccacgatagctag

SEQ ID NO: 190205 - DNA, 1581 bp, Artificial Sequence
  derived and/or modified sequence
atggagacagaggcaatcgacggttacattacctgtgacaatgagttgtcgcccgagcgggagcactcaaatatggccatcgatctgacttcatctactcctaacgggcagcatgcaagcccaagtcacatgacttcaactaatagcgttaaactggagatgcagtccgacgaagagtgcgaccggaagcccctgagcagggaggatgagattcggggacacgatgaggggagctcgctcgaagagccgctgatagagtccagcgaagtggccgataatcgcaaggtgcaagagctgcagggtgaaggtgggattcgcctgcctaatggaaagctgaaatgcgatgtatgcggcatggtgtgtataggtcccaacgtgttgatggtgcataagaggtctcatacgggtgagaggccattccactgcaatcagtgcggtgcgtccttcacccagaaaggaaacctgctgcggcacatcaagttgcacagcggagagaagccattcaagtgtcccttctgtagttacgcgtgtcgacgccgcgacgctctcacaggtcatctgagaacccattccgtaggcaaaccacacaagtgtaattattgcggccgcagctataagcaacgctcctccctggaggaacacaaggagagatgccacaactatctgcaaaacgtctccatggaagctgctggtcaggtcatgtcacaccatgtgcctcccatggaagattgtaaggaacaggagccaattatggacaacaacatcagcctggtgccctttgaacggcccgcagttatagagaaattaacagggaatatgggcaagcgcaaaagctccaccccacaaaagttcgttggcgagaagctcatgaggtttagctaccctgacatccacttcgacatgaatctgacgtacgagaaggaggctgagctgatgcagagtcatatgatggatcaggccataaataacgctataacgtatcttggtgctgaggcgctgcatcccttgatgcagcaccctccctcaaccatcgctgaggtggccccagtgatttcatctgcatacagtcaagtgtatcatccaaatagaatcgaacggccaatcagtagagagacagccgacagccatgagaataacatggatggcccgattagtcttattaggccaaaatcccgaccacaggaaagggaggccagcccttccaactcatgtcttgactctactgactccgagtcttcccacgacgaccaccagtcctaccagggacatcctgctttaaaccctaagagaaagcagagtccagcctacatgaaagaagatgttaaggccttggatacaacaaaggctccaaagggaagtttgaaggatatatataaggtgtttaacggagaaggggaacagatccgcgcgttcaagtgcgaacactgtagagtactgttcctggatcacgttatgtacactatacatatgggatgccacggctaccgtgatcccttggaatgcaacatctgcggatatcggagtcaggaccggtatgagtttagctcccatattgtaagaggagaacatacattccactag

SEQ ID NO: 190206 - DNA, 447 bp, Artificial Sequence
  derived and/or modified sequence
atggaaaccgaggcaatcgatggctacatcacgtgtgacaacgagctgtccccagagcgggagcattcaaatatggccatagatctgacgtcgtccacaccaaacgggcaacacgcatctcctagtcatatgacctctactaacagcgtgaagctggagatgcaatcggacgaagaatgtgatagaaagcctctgagtcgagaggatgaaatccgcggccatgacgaaggctcttccctggaggaacccctgattgagagctctgaagttgctgacaatagaaaggtgcaggagctacaaggggaggggggaatccgccttcctaatgggaagttgaaatgtgacgtgtgtggaatggtatgtatcggtccaaatgttctcatggtgcacaagagatctcatacaggagtggctgtggtgaagaccacgtttagcgaattttgctag

SEQ ID NO: 190207 - DNA, 1581 bp, Artificial Sequence
  derived and/or modified sequence
atggaaactgaagcaatagacggctatattacgtgtgacaatgagttatcccctgaaagggagcatagcaacatggctatcgatctgacctctagcacccccaatggccagcatgcttcgccctcacatatgacttcaacaaattcagtgaaactcgagatgcagtctgacgaagaatgtgatagaaaacccctttccagagaagacgaaattcggggccatgatgagggtagctccctggaggaacccttaattgagtcttcagaggtggccgataaccggaaagttcaagaattacaaggcgaaggggggattcggcttccaaatggtaagctgaagtgtgatgtgtgcgggatggtctgtattggaccaaatgtgctgatggtccacaaacgatcccacaccggagagaggccttttcattgtaaccagtgcggggcctctttcactcaaaaaggtaaccttctccggcatattaagctgcacagcggcgagaaaccatttaaatgccccttctgctcgtatgcatgcagacgcagagacgccctgactgggcatctgcgtactcactccgtgggtaaaccccacaaatgcaactactgcgggcggtcatacaagcagaggtcttctcttgaggagcataaggaaagatgccataactatctgcagaacgtgagcatggaagcggccgggcaggtcatgtctcaccacgtccctcctatggaggattgcaaagaacaggagccaattatggacaacaatatatccctggttcccttcgagagacccgcagtgattgagaagctgacgggaaacatgggtaaaagaaaatcaagcactcctcagaagttcgtgggggagaagctaatgcgcttcagctatccagatatccattttgacatgaacctgacctacgaaaaagaggcggagctgatgcagagccacatgatggatcaggcaataaacaacgcgattacgtatctgggcgccgaggctctacaccccctgatgcagcatcctccgtccacaatagccgaggtggcccctgtgatatcgtcggcctattcccaggtctatcatcctaaccgcattgagcgccccatttctagagagactgccgactcccacgagaataacatggacggccccatatccctcattagacctaagagtagaccacaggagcgcgaggctagtcctagcaactcttgtctcgactccacagattccgaatcaagccacgatgatcatcagtcctaccagggccaccccgccctgaacccgaagaggaaacagtcccccgcctacatgaaagaggacgtcaaggccttggacacaactaaggccccaaagggctcgctgaaagatatttacaaagtctttaatggggagggggagcagattagggcatttaaatgtgagcattgtagagtgctcttcctggatcacgtcatgtatacgattcacatggggtgccacggctacagagaccctttagagtgtaatatttgcggataccgcagccaggaccgctacgaattctccagccacattgtgcggggcgagcatacatttcactag

SEQ ID NO: 190208 - DNA, 720 bp, Artificial Sequence
  derived and/or modified sequence
atggagacagaggccattgatggctacatcacctgtgacaatgagctgagccctgagcgggagcacagcaacatggccatcgacctgaccagcagcaccccaaatggccagcacgccagccccagccacatgaccagcaccaacagcgtgaagctggagatgcagagtgatgaagaatgtgacaggaagcccctgagccgggaggatgagatccggggccatgatgagggcagcagcctggaggagcccctgattgagagcagcgaggtggccgacaacaggaaggtgcaggagctgcagggcgagggcggcatccggctgcccaacgggaagctgaagtgtgatgtgtgtggcatggtgtgcatcggccccaacgtgctgatggtgcacaagaggagccacactggagagcggcccttccactgcaaccagtgtggggccagcttcacccagaagggcaacctgctgcggcacatcaagctgcacagcggggagaagcccttcaagtgccccttctgcagctatgcctgcagaagaagagatgccctgaccggccacctgcggacccacagcgtgggcaagccccacaagtgcaactactgcggccgcagctacaagcagaggagcagcctggaggagcacaaggagcgctgccacaactacctgcagaatgtgtccatggaggccgccggccaggtgatgagccaccacgacagctag

SEQ ID NO: 190209 - DNA, 1581 bp, Artificial Sequence
  derived and/or modified sequence
atggagacagaggccattgatggctacatcacctgtgacaatgagctgagccctgagcgggagcacagcaacatggccatcgacctgaccagcagcaccccaaatggccagcacgccagccccagccacatgaccagcaccaacagcgtgaagctggagatgcagagtgatgaagaatgtgacaggaagcccctgagccgggaggatgagatccggggccatgatgagggcagcagcctggaggagcccctgattgagagcagcgaggtggccgacaacaggaaggtgcaggagctgcagggcgagggcggcatccggctgcccaacgggaagctgaagtgtgatgtgtgtggcatggtgtgcatcggccccaacgtgctgatggtgcacaagaggagccacactggagagcggcccttccactgcaaccagtgtggggccagcttcacccagaagggcaacctgctgcggcacatcaagctgcacagcggggagaagcccttcaagtgccccttctgcagctatgcctgcagaagaagagatgccctgaccggccacctgcggacccacagcgtgggcaagccccacaagtgcaactactgcggccgcagctacaagcagaggagcagcctggaggagcacaaggagcgctgccacaactacctgcagaatgtgtccatggaggccgccggccaggtgatgagccaccacgtgccccccatggaggactgcaaggagcaggagcccatcatggacaacaacatcagcctggtgccctttgagaggcctgctgtgattgagaagctgaccggcaacatgggcaagaggaagagcagcaccccccagaagtttgtgggggagaagctgatgaggttctcctacccagacatccactttgacatgaacctgacctatgagaaggaggccgagctgatgcagagccacatgatggaccaggccatcaacaatgccatcacctacctgggcgctgaggccctgcaccccctgatgcagcacccccccagcaccatcgccgaggtggcccctgtgatcagcagcgcctacagccaggtgtaccaccccaaccgcatcgagcggcccatcagccgggagacagctgacagccatgagaacaacatggatggccccatcagcctcatccggcccaagagccggccccaggagcgggaggccagccccagcaacagctgcctggacagcacagacagcgagagcagccatgatgaccaccagagctaccagggccacccagccctgaaccccaagaggaagcagagccctgcctacatgaaggaggatgtgaaggccctggacaccaccaaggcccccaagggcagcctgaaggacatctacaaggtgttcaacggggagggggagcagatccgggccttcaagtgtgagcactgccgggtgctcttcctggaccacgtgatgtacaccatccacatgggctgccacggctacagagaccccctggagtgcaacatctgtggctaccgcagccaggacagatatgagttcagcagccacatcgtgcggggggagcacaccttccactag

SEQ ID NO: 190210 - DNA, 447 bp, Artificial Sequence
  derived and/or modified sequence
atggagacagaggccattgatggctacatcacctgtgacaatgagctgagccctgagcgggagcacagcaacatggccatcgacctgaccagcagcaccccaaatggccagcacgccagccccagccacatgaccagcaccaacagcgtgaagctggagatgcagagtgatgaagaatgtgacaggaagcccctgagccgggaggatgagatccggggccatgatgagggcagcagcctggaggagcccctgattgagagcagcgaggtggccgacaacaggaaggtgcaggagctgcagggcgagggcggcatccggctgcccaacgggaagctgaagtgtgatgtgtgtggcatggtgtgcatcggccccaacgtgctgatggtgcacaagaggagccacactggagtggccgtggtgaagaccaccttcagcgagttctgctag

SEQ ID NO: 190211 - DNA, 720 bp, Artificial Sequence
  derived and/or modified sequence
atggagaccgaggccatcgacggctacatcacctgcgacaacgagttgtctcctgagcgggagcactctaatatggcaatcgatctgactagctcaaccccgaatggccagcacgcaagccccagtcatatgacctccaccaattcagtcaagttggagatgcagagtgatgaggaatgcgaccggaaacctctttcaagggaggacgaaatcagaggacacgacgaggggtcctctttggaggaacccctcattgaaagttctgaggtggccgataacaggaaggttcaggaactccaaggcgaagggggtataagattaccaaacggaaaattaaagtgcgacgtgtgcggaatggtgtgtattggacccaatgtcctgatggtacataaacgctctcatacaggcgaaaggccttttcactgtaaccagtgcggtgcttcctttacccagaagggtaacctgcttcggcacatcaagctgcacagtggcgagaaaccctttaagtgtccattctgtagctacgcctgtagacgaagggacgccctcacgggtcatctgagaacacactctgtcggcaaacctcacaaatgtaactactgtggccgctcctataaacaacgctcatcgctagaggaacataaagaacgctgccacaactacctgcagaacgtctcaatggaggcggccggtcaggtgatgagccaccacgactcatag

SEQ ID NO: 190212 - DNA, 720 bp, Artificial Sequence
  derived and/or modified sequence
atggagaccgaggccatcgacggctacatcacctgcgacaacgagttatccccggagcgcgaacacagcaacatggctattgatctgactagttcgacccccaacggacaacatgcaagtccaagtcatatgactagtacgaactcagtgaagttggagatgcagagtgacgaagaatgcgaccggaaaccgttgagccgagaagacgaaatccggggccatgatgagggcagctcgctagaagagccactcatcgagtctagcgaagtcgccgacaacaggaaagtacaggaacttcaaggcgaaggcggcataaggttgcccaatgggaaactgaaatgtgatgtgtgcgggatggtgtgcatcggaccaaatgtcctaatggttcataagcggtcgcacactggcgagcggccttttcactgcaatcagtgtggcgcgtcttttacccagaaggggaaccttctgaggcatattaaactacactccggcgagaaaccttttaaatgccccttctgttcatacgcctgtcgacgacgggatgcacttactggccacctccggacacacagcgtgggcaagccacacaaatgtaactattgtggacgttcctataagcaaaggtcttcactggaggagcacaaggaacggtgtcacaattacttgcagaacgtgagcatggaggctgccggacaggtcatgagtcaccacgattcctag

SEQ ID NO: 190213 - DNA, 1581 bp, Artificial Sequence
  derived and/or modified sequence
atggagaccgaggccatcgacggctacatcacctgcgacaacgagctctcaccagaacgtgagcactcgaatatggctattgatttgacctcctctacccctaatggacagcatgcctccccttcacacatgacctctacgaatagtgttaagctcgaaatgcagagcgacgaagagtgtgatagaaagcccttgagccgcgaagatgagatccgcggccatgacgagggctcctcactcgaggaacccctgattgagtcctcggaagtcgccgacaatcggaaagtccaggaactgcagggggagggtgggataagactgcctaatggtaaacttaaatgcgacgtatgcgggatggtctgtatcggccccaatgttttaatggtgcacaagcgctcccacactggcgaaagacctttccattgcaaccagtgtggcgcctcatttacccaaaaaggaaacctcttgcggcacatcaagctccatagcggcgagaaaccctttaagtgccctttttgttcttacgcctgccggagaagagatgctctcactggacaccttcgcacccactcagtgggcaaaccgcacaaatgcaactactgcgggcgctcatataagcaaagatctagcctggaggaacacaaggagagatgtcacaactacctgcagaatgtgtctatggaggcagctgggcaagtgatgagccaccacgtgccaccaatggaagattgtaaagagcaggaacctattatggacaataacatctccctcgtgccctttgagcgcccggccgtgattgaaaagctgaccggcaacatgggaaagcgtaaatcatctacccctcaaaagttcgtgggtgagaagttaatgcgctttagttaccccgatatccacttcgacatgaatttaacctacgaaaaagaggccgagctcatgcagagccatatgatggaccaggcaatcaacaatgccattacctatctaggggcggaggcattacatcctctgatgcagcacccaccatcaaccattgccgaggtggcaccagtgatatcgtccgcctatagccaagtgtaccatcctaaccgcatcgaaaggccaataagcagagagaccgcggattcccacgaaaacaacatggacggcccgataagcctgatcaggcccaaatcacggccacaggagcgggaagcctccccttctaattcctgtttagatagcaccgacagcgagtcgagtcacgacgaccaccagtcataccaagggcacccggctctgaatccaaagcgcaaacaaagtccggcttatatgaaggaggatgtgaaggctctcgacaccacaaaggcccctaagggctctctcaaggatatatataaagtgtttaacggagagggagagcagatccgcgcgttcaagtgtgaacactgccgcgtgctgttcctggatcacgtcatgtacacaatccatatgggatgccacggatatagagatcccctcgagtgtaacatttgcggctatagatcccaggataggtacgagtttagcagtcacatagtacgtggagaacatacttttcactag

SEQ ID NO: 190214 - DNA, 447 bp, Artificial Sequence
  derived and/or modified sequence
atggagaccgaggccatcgacggctacatcacctgcgacaacgagctgtcgccagagcgcgaacactcaaatatggccattgacttgacatcgagcacaccgaacggccagcatgcaagcccaagccatatgacctcgacgaatagtgtaaaactggagatgcagagcgacgaagaatgtgacaggaagcccctaagcagggaggacgaaatcaggggacatgacgaaggcagttcacttgaagagcccctgatcgagtccagcgaggtggcggataataggaaagttcaagaactccagggggagggcggaatacggcttccaaacggcaaactaaaatgtgatgtgtgcgggatggtgtgcatcggaccaaatgtccttatggttcacaagagatcccatacgggtgtggctgttgttaagactacgtttagtgagttctgttag

SEQ ID NO: 190215 - DNA, 1581 bp, Artificial Sequence
  derived and/or modified sequence
atggagaccgaggccatcgacggctacatcacctgcgacaacgagctcagcccagagcgcgagcactctaacatggcaatagaccttacctcatctacccctaacggccaacatgcatccccatcccacatgacgtctacaaatagtgtcaagcttgagatgcagtccgatgaggagtgcgataggaaaccgctcagccgcgaggatgagatcagagggcacgatgagggctcatctctggaagagccccttatcgagagtagtgaggtagccgacaaccgtaaggttcaggagctgcagggagaaggcgggattagactacccaatggaaagctgaaatgcgacgtgtgtggaatggtctgtataggaccaaacgtgctcatggtgcacaaaaggtctcacacaggggaacgccccttccattgcaaccagtgtggagcctctttcacacaaaaaggcaacctcctgcggcatattaaattacactctggtgagaaacctttcaagtgtcctttttgctcatacgcttgtcggcggcgcgacgccctcacagggcatttgcgcacacatagtgtagggaaaccacacaaatgtaattactgtggccgaagctataagcagcgctcctccttggaagagcacaaggagagatgccacaactatctgcaaaacgtgtctatggaagctgccggacaggttatgtcgcaccatgttccccctatggaggactgcaaggaacaggagccaataatggataataatatcagcctggtcccctttgagcgcccggccgtgatcgagaagctgacaggcaatatgggaaaaaggaaatcgtccaccccacaaaagttcgtgggggagaaattaatgcggttttcctacccggacatccacttcgacatgaatttaacttacgagaaagaagcggagcttatgcaaagccacatgatggaccaagcgatcaacaatgccattacgtatctgggtgccgaggctctgcaccccctcatgcagcaccctccatccacgattgccgaggtggcccccgttatcagctcggcttattcacaggtttatcatcctaaccggattgagaggcctatttcgagagagaccgccgactcccacgagaataacatggacgggccaatttccttgatcagacctaagtcaaggcctcaggagcgcgaagcatcccctagcaactcctgcttggattcgaccgattcagaaagttcacacgacgatcaccagagctaccagggccatcctgctcttaatcctaagaggaagcagtcgccagcatacatgaaggaggacgtgaaagccctagataccactaaggctccaaaaggcagcctgaaggacatctataaagtgttcaatggcgaaggcgagcagatccgtgcgttcaagtgcgagcactgccgggtgctttttctagatcatgtgatgtatactatccacatggggtgtcacggttaccgagaccctctggagtgtaatatctgcgggtacaggagccaggaccggtacgagtttagctctcacattgtcagaggcgagcacacctttcactag

SEQ ID NO: 190216 - DNA, 720 bp, Artificial Sequence
  derived and/or modified sequence
atggaaactgaggctattgacggctatatcacctgtgataacgaacttagtccggagagagagcatagcaatatggccatcgacttgacatcatccactcctaatggtcagcatgcgtctccctcccatatgacatcaaccaactccgtgaaactggaaatgcaatcagatgaggagtgtgaccgcaagccactgtcacgggaggacgagatacgcggacatgatgaaggatcatccctggaagagcccctaattgagtcatcagaggtagctgataatcgcaaggtgcaggagttgcagggagaagggggaattaggctgccaaatgggaagctgaagtgcgacgtttgtggcatggtgtgcatcggacccaacgtgctcatggtgcacaagaggagtcatactggagagagaccttttcactgcaatcagtgcggggcatccttcactcagaaaggaaacctcttgagacatatcaaattgcacagcggagagaagccttttaaatgcccattttgtagctacgcttgcagacgacgcgacgctctgaccggccatctgcgaacacatagtgtcgggaagccccataaatgcaattactgtggcaggagctacaagcagcgctcatccctggaggaacacaaggagcggtgccataattacttgcaaaatgtcagtatggaggctgcaggccaggttatgtcgcaccacgattcatag

SEQ ID NO: 190217 - DNA, 720 bp, Artificial Sequence
  derived and/or modified sequence
atggaaactgaggccatcgacggttatatcacctgcgacaatgagttgagccccgagcgggagcacagcaatatggccattgatctgacaagctcaaccccgaatggtcaacacgcttctcccagccatatgacatccacaaatagtgttaagttggagatgcagagcgatgaggagtgcgacaggaagccacttagcagagaagacgaaattagaggacacgacgagggctccagcctcgaggaaccgctgattgaatcaagtgaagtagccgataacaggaaggtgcaagagctacagggagagggcggtattcggctcccgaacggaaagctaaagtgtgatgtgtgtgggatggtctgcatcggtccaaacgtgctgatggtgcacaaaaggtctcacaccggcgaacggccttttcactgtaaccagtgcggggctagcttcacgcagaaggggaatcttctccggcatattaaactacactctggagaaaagccctttaaatgccccttttgcagttacgcatgtcggcgacgcgacgctctgacgggacacttacggactcattctgttggaaagcctcataaatgtaattactgcggccgaagctacaagcagcgatcgagtttagaagagcataaggaaaggtgccacaattacctgcagaacgtcagcatggaagccgcaggacaagtgatgagtcaccacgactcgtag

SEQ ID NO: 190218 - DNA, 1581 bp, Artificial Sequence
  derived and/or modified sequence
atggaaacagaagcaatcgacggatacattacctgcgacaacgagctgagtcccgagcgcgaacactcaaatatggccatagaccttacctcgagcactcctaatggccagcatgcctcacccagccatatgacaagcaccaactccgttaagctggagatgcagagcgacgaagagtgcgatagaaagcccctctctcgtgaggacgagatccgcggtcacgacgagggatcaagcctggaggagccattaatcgagagttcagaagtagcagataacaggaaggtgcaggagctgcagggagagggaggcattcgactgccaaacggcaaattaaaatgtgacgtctgtgggatggtctgcataggacccaatgtcctgatggtgcataaacggagccataccggcgaaagaccttttcactgcaatcagtgcggggctagttttacccaaaagggcaacttgctcagacatatcaagctgcatagcggcgagaagcctttcaaatgcccattctgctcatatgcgtgtcggaggcgggacgccttgacaggccatctcaggactcactctgtggggaagcctcacaaatgtaattactgcggcaggagctacaagcagaggagtagccttgaagaacataaagagcgatgtcataattatcttcagaacgtatcaatggaagccgctgggcaggtgatgagccaccatgtccccccaatggaggactgcaaagaacaagagccaattatggacaacaatatttctctggtgccattcgaaaggccagcagtgatcgaaaaacttacgggaaatatgggcaagaggaagtcctctaccccacagaaattcgtgggagagaagctcatgcggtttagttaccccgatattcatttcgacatgaacctaacttacgagaaagaagctgagctgatgcaaagccatatgatggatcaggccatcaacaatgccatcacatatctgggtgccgaggccctgcaccccctgatgcagcacccccctagtacgatcgccgaggttgctccggtgatcagctccgcttactctcaagtgtatcatcctaatcgcattgaaagaccaatttctcgggaaacagcagactcacatgagaacaacatggacggtcccatatccttgatccgaccaaagtctcggcctcaggagagggaggcttccccgagcaattcttgccttgatagcaccgatagtgagtccagccacgacgaccaccagagctaccagggtcaccccgctttaaatccgaaacgtaaacagagtcccgcttatatgaaagaagatgtgaaagccctcgatactactaaggcgcctaaaggatcacttaaagacatctataaggttttcaatggggaaggagaacaaatccgcgcttttaagtgcgaacactgtcgtgtcctgtttctggaccatgttatgtacaccatccatatgggttgtcacggataccgcgatcctctggagtgtaacatctgcggataccgctcgcaggataggtacgagttctctagccacatcgtgagaggcgaacatacttttcactag

SEQ ID NO: 190219 - DNA, 447 bp, Artificial Sequence
  derived and/or modified sequence
atggaaactgaggctatcgatggttacatcacttgcgacaacgagctttctccggagagggagcattctaacatggcgattgatctgaccagtagtacacccaatgggcagcacgccagtccatcgcacatgacttcaacaaactccgtcaagttagaaatgcagagtgatgaagagtgcgacaggaaacctctcagtagggaggacgaaattagggggcatgacgaaggatcgagcctggaggaacccctgattgagagctccgaagtcgcagataataggaaggtgcaggagctgcagggggagggtggtatccggctgcctaacggcaagcttaagtgcgacgtgtgcgggatggtctgcattggacccaacgtgcttatggtgcacaaacgaagccatacaggggttgcggttgttaagacaacgttctctgaattctgttag

SEQ ID NO: 190220 - DNA, 1581 bp, Artificial Sequence
  derived and/or modified sequence
atggagactgaagcaatcgacggatacatcacctgtgacaatgaactgtctccggaaagagaacatagcaatatggctattgacctgacctcgtctacgcctaatggccaacacgcgtccccttctcacatgacatccaccaatagcgtcaaattggaaatgcagagcgatgaagaatgcgaccgcaagcccctgagtagagaagacgagatccgcggtcatgacgagggttcatcgctggaagaacctctcatcgaaagcagcgaggtcgcagacaacagaaaagtccaggaattgcagggggaaggcggaatccggttgcctaatggcaagcttaaatgtgacgtatgcggcatggtctgtatcgggccaaacgtgttgatggtgcacaaaagaagtcataccggtgaaaggccattccactgtaaccagtgtggggcttccttcacacagaagggcaaccttttgagacacatcaagcttcactcaggcgagaagccgtttaaatgtcccttctgctcctacgcctgtcggcgtagagatgccctaactggccacctcagaacacacagtgtgggcaaaccccataagtgcaactattgcgggaggtcttacaagcagcgctcttcactcgaagaacataaagaaagatgtcacaattacctgcaaaatgtgtctatggaagccgcaggtcaggtgatgtcccaccacgtccccccaatggaggactgtaaagaacaggaaccgatcatggataataatatcagcttggtccctttcgagcgccctgcagtgattgagaagttaactggcaacatggggaagagaaaatcgtccaccccgcagaaatttgtgggcgagaagctgatgaggttttcttatcctgacattcattttgacatgaaccttacgtacgagaaggaagccgaacttatgcagtcgcatatgatggatcaagctatcaataacgccataacctatctgggcgcagaagccctgcacccgctgatgcagcatccacccagcactatcgccgaagtggctccagtgattagttccgcctacagtcaagtctatcaccctaacagaattgaaaggcccatcagccgagaaacggccgatagccacgagaacaacatggatggaccaatttccctgatccgccctaaaagccggcctcaggagagagaagcatccccgagcaattcatgcctcgactcaacagactctgaatcaagccacgacgatcaccaatcctatcaaggccaccccgctttaaacccgaagagaaagcaatctccagcctacatgaaagaggacgtgaaagccttggacacaacaaaagccccaaaaggctcgttaaaagatatttataaggttttcaacggcgagggggagcagattagagctttcaaatgcgagcactgtagggtactttttctcgatcacgtgatgtacaccatacacatgggatgccatggatatagagatccactggagtgtaacatctgtggctatcgcagtcaggaccggtatgagttctcctcccacattgtgcgcggagagcatacctttcattag

SEQ ID NO: 190221 - DNA, 720 bp, Artificial Sequence
  derived and/or modified sequence
atggagaccgaggccatcgacggctacatcacctgcgacaacgagctgagccccgagagagagcacagcaacatggccatcgacctgaccagcagcacccccaacggccagcacgccagccccagccacatgaccagcaccaacagcgtgaagctggagatgcagagcgacgaggagtgcgacagaaagcccctgagcagagaggacgagatcagaggccacgacgagggcagcagcctggaggagcccctgatcgagagcagcgaggtggccgacaacagaaaggtgcaggagctgcagggcgagggcggcatcagactgcccaacggcaagctgaagtgcgacgtgtgcggcatggtgtgcatcggccccaacgtgctgatggtgcacaagagaagccacaccggcgagagacccttccactgcaaccagtgcggcgccagcttcacccagaagggcaacctgctgagacacatcaagctgcacagcggcgagaagcccttcaagtgccccttctgcagctacgcctgcagaagaagagacgccctgaccggccacctgagaacccacagcgtgggcaagccccacaagtgcaactactgcggcagaagctacaagcagagaagcagcctggaggagcacaaggagagatgccacaactacctgcagaacgtgagcatggaggccgccggccaggtgatgagccaccacgacagctag

SEQ ID NO: 190222 - DNA, 1581 bp, Artificial Sequence
  derived and/or modified sequence
atggagaccgaggccatcgacggctacatcacctgcgacaacgagctgagccccgagagagagcacagcaacatggccatcgacctgaccagcagcacccccaacggccagcacgccagccccagccacatgaccagcaccaacagcgtgaagctggagatgcagagcgacgaggagtgcgacagaaagcccctgagcagagaggacgagatcagaggccacgacgagggcagcagcctggaggagcccctgatcgagagcagcgaggtggccgacaacagaaaggtgcaggagctgcagggcgagggcggcatcagactgcccaacggcaagctgaagtgcgacgtgtgcggcatggtgtgcatcggccccaacgtgctgatggtgcacaagagaagccacaccggcgagagacccttccactgcaaccagtgcggcgccagcttcacccagaagggcaacctgctgagacacatcaagctgcacagcggcgagaagcccttcaagtgccccttctgcagctacgcctgcagaagaagagacgccctgaccggccacctgagaacccacagcgtgggcaagccccacaagtgcaactactgcggcagaagctacaagcagagaagcagcctggaggagcacaaggagagatgccacaactacctgcagaacgtgagcatggaggccgccggccaggtgatgagccaccacgtgccccccatggaggactgcaaggagcaggagcccatcatggacaacaacatcagcctggtgcccttcgagagacccgccgtgatcgagaagctgaccggcaacatgggcaagagaaagagcagcaccccccagaagttcgtgggcgagaagctgatgagattcagctaccccgacatccacttcgacatgaacctgacctacgagaaggaggccgagctgatgcagagccacatgatggaccaggccatcaacaacgccatcacctacctgggcgccgaggccctgcaccccctgatgcagcacccccccagcaccatcgccgaggtggcccccgtgatcagcagcgcctacagccaggtgtaccaccccaacagaatcgagagacccatcagcagagagaccgccgacagccacgagaacaacatggacggccccatcagcctgatcagacccaagagcagaccccaggagagagaggccagccccagcaacagctgcctggacagcaccgacagcgagagcagccacgacgaccaccagagctaccagggccaccccgccctgaaccccaagagaaagcagagccccgcctacatgaaggaggacgtgaaggccctggacaccaccaaggcccccaagggcagcctgaaggacatctacaaggtgttcaacggcgagggcgagcagatcagagccttcaagtgcgagcactgcagagtgctgttcctggaccacgtgatgtacaccatccacatgggctgccacggctacagagaccccctggagtgcaacatctgcggctacagaagccaggacagatacgagttcagcagccacatcgtgagaggcgagcacaccttccactag

SEQ ID NO: 190223 - DNA, 447 bp, Artificial Sequence
  derived and/or modified sequence
atggagaccgaggccatcgacggctacatcacctgcgacaacgagctgagccccgagagagagcacagcaacatggccatcgacctgaccagcagcacccccaacggccagcacgccagccccagccacatgaccagcaccaacagcgtgaagctggagatgcagagcgacgaggagtgcgacagaaagcccctgagcagagaggacgagatcagaggccacgacgagggcagcagcctggaggagcccctgatcgagagcagcgaggtggccgacaacagaaaggtgcaggagctgcagggcgagggcggcatcagactgcccaacggcaagctgaagtgcgacgtgtgcggcatggtgtgcatcggccccaacgtgctgatggtgcacaagagaagccacaccggcgtggccgtggtgaagaccaccttcagcgagttctgctag

SEQ ID NO: 190224 - protein, 453 aa, Artificial Sequence
  derived and/or modified sequence
MSIVTVQLGQCGNQIGFEVFDALLSDSHSSQGLCSMRENEAYQASCKERFFSEEENGVPIARAVLVDMEPKVINQMLSKAAQSGQWKYGQHACFCQKQGSGNNWAYGYSVHGPRHEESIMNIIRKEVEKCDSFSGFFIIMSMAGGTGSGLGAFVTQNLEDQYSNSLKMNQIIWPYGTGEVIVQNYNSILTLSHLYRSSDALLLHENDAIHKICAKLMNIKQISFSDINQVLAHQLGSVFQPTYSAESSFHYRRNPLGDLMEHLVPHPEFKMLSVRNIPHMSENSLAYTTFTWAGLLKHLRQMLISNAKMEEGIDRHVWPPLSGLPPLSKMSLNKDLHFNTSIANLVILRGKDVQSADVEGFKDPALYTSWLKPVNAFNVWKTQRAFSKYEKSAVLVSNSQFLVKPLDMIVGKAWNMFASKAYIHQYTKFGIEEEDFLDSFTSLEQVVASYCNL

SEQ ID NO: 190225 - protein, 237 aa, Artificial Sequence
  derived and/or modified sequence
MNIKQISFSDINQVLAHQLGSVFQPTYSAESSFHYRRNPLGDLMEHLVPHPEFKMLSVRNIPHMSENSLAYTTFTWAGLLKHLRQMLISNAKMEEGIDRHVWPPLSGLPPLSKMSLNKDLHFNTSIANLVILRGKDVQSADVEGFKDPALYTSWLKPVNAFNVWKTQRAFSKYEKSAVLVSNSQFLVKPLDMIVGKAWNMFASKAYIHQYTKFGIEEEDFLDSFTSLEQVVASYCNL

SEQ ID NO: 190226 - DNA, 1362 bp, Artificial Sequence
  derived and/or modified sequence
atgagcatcgtgaccgtgcagctgggccagtgcggcaaccagatcggcttcgaggtgttcgacgccctgctgagcgacagccacagcagccagggcctgtgcagcatgagagagaacgaggcctaccaggccagctgcaaggagagattcttcagcgaggaggagaacggcgtgcccatcgccagagccgtgctggtggacatggagcccaaggtgatcaaccagatgctgagcaaggccgcccagagcggccagtggaagtacggccagcacgcctgcttctgccagaagcagggcagcggcaacaactgggcctacggctacagcgtgcacggccccagacacgaggagagcatcatgaacatcatcagaaaggaggtggagaagtgcgacagcttcagcggcttcttcatcatcatgagcatggccggcggcaccggcagcggcctgggcgccttcgtgacccagaacctggaggaccagtacagcaacagcctgaagatgaaccagatcatctggccctacggcaccggcgaggtgatcgtgcagaactacaacagcatcctgaccctgagccacctgtacagaagcagcgacgccctgctgctgcacgagaacgacgccatccacaagatctgcgccaagctgatgaacatcaagcagatcagcttcagcgacatcaaccaggtgctggcccaccagctgggcagcgtgttccagcccacctacagcgccgagagcagcttccactacagaagaaaccccctgggcgacctgatggagcacctggtgccccaccccgagttcaagatgctgagcgtgagaaacatcccccacatgagcgagaacagcctggcctacaccaccttcacctgggccggcctgctgaagcacctgagacagatgctgatcagcaacgccaagatggaggagggcatcgacagacacgtgtggccccccctgagcggcctgccccccctgagcaagatgagcctgaacaaggacctgcacttcaacaccagcatcgccaacctggtgatcctgagaggcaaggacgtgcagagcgccgacgtggagggcttcaaggaccccgccctgtacaccagctggctgaagcccgtgaacgccttcaacgtgtggaagacccagagagccttcagcaagtacgagaagagcgccgtgctggtgagcaacagccagttcctggtgaagcccctggacatgatcgtgggcaaggcctggaacatgttcgccagcaaggcctacatccaccagtacaccaagttcggcatcgaggaggaggacttcctggacagcttcaccagcctggagcaggtggtggccagctactgcaacctgtag

SEQ ID NO: 190227 - DNA, 1362 bp, Artificial Sequence
  derived and/or modified sequence
atgtccatcgttactgtccagttaggccaatgcggcaaccaaataggtttcgaggttttcgacgcactgctgagcgactctcactcatcacagggcctctgctctatgagagagaatgaggcttaccaggcctcttgcaaagagcgctttttttctgaagaagagaacggggtgccgatagccagggccgtgctggtggatatggaaccaaaagtcatcaatcagatgctttctaaggcagcacaatccggccagtggaagtatgggcagcacgcttgtttctgtcagaaacaggggtctgggaacaactgggcttacggctactccgtccacggtccaagacacgaggaatctatcatgaacataatccgcaaggaagttgagaagtgtgactcgttctccggattcttcatcatcatgagcatggcggggggtacggggagtggactgggagccttcgtaacccagaatctcgaagaccaatactccaactccttaaaaatgaatcaaattatctggccctatggtaccggcgaggtgattgtgcaaaattacaattctatcctgaccctcagccacttgtaccggtcatctgatgcattgctgctccatgagaatgatgcaatccataagatttgcgcaaaacttatgaatatcaaacaaatttctttttccgacatcaaccaggtacttgctcatcagctcggcagtgtttttcagccaacttactccgccgagtcgagctttcattatcggcgcaatcccttgggcgatctgatggagcatttggtcccccaccccgagttcaaaatgttaagtgttcgaaacatcccgcatatgagtgagaacagtctcgcgtacacaaccttcacttgggcagggctgttgaagcatctgaggcagatgcttatctcaaacgccaaaatggaggagggaatagacagacacgtctggcccccgctgagtggcctaccccccctgagcaagatgtctctaaataaggatcttcacttcaatactagtattgctaacctggtaatcttgagagggaaagacgttcagagtgccgacgtggaaggcttcaaggatcctgctctctacacctcatggctgaaaccggtgaacgccttcaacgtgtggaaaacacagcgcgccttctccaagtatgaaaagtccgcagtgcttgtatcaaactctcagtttctggtgaagcccctggacatgatcgtggggaaggcgtggaatatgttcgccagcaaagcatatatccaccaatacacaaagttcggcatcgaggaggaggatttcttggatagcttcacctcgctggagcaagtcgttgcgtcttactgtaatctgtag

SEQ ID NO: 190228 - DNA, 1362 bp, Artificial Sequence
  derived and/or modified sequence
atgagcatcgtgacagtgcagctgggccagtgtggcaaccagattggatttgaggtgtttgatgccctgctgagtgacagccacagcagccagggcctgtgcagcatgagagaaaatgaggcctaccaggccagctgcaaggagcgcttcttcagcgaggaggagaatggagtgcccatcgcccgggctgtgctggtggacatggagcccaaggtgatcaaccagatgctgagcaaggccgcccagagcggccagtggaagtatggccagcacgcctgcttctgccagaagcagggcagcggcaacaactgggcctacggctacagcgtgcacggccccaggcatgaggagagcatcatgaacatcatcaggaaggaggtggagaagtgtgacagcttcagcggcttcttcatcatcatgtccatggccggcggcaccggcagcggcctgggcgcctttgtgacccagaacctggaggaccagtacagcaacagcctgaagatgaaccagatcatctggccctatggaactggagaggtgattgtgcagaactacaacagcatcctgaccctgagccacctgtaccgcagcagtgatgccctgctgctgcatgaaaatgatgccatccacaagatctgtgccaagctgatgaacatcaagcagatctccttcagtgacatcaaccaggtgctggcccaccagctgggctctgtgttccagcccacctacagcgctgagagcagcttccactacagaagaaaccccctgggggacctgatggagcacctggtgccccaccctgagttcaagatgctgtctgtgaggaacatcccccacatgtctgagaacagcctggcctacaccaccttcacctgggccggcctgctgaagcacctgcggcagatgctgatcagcaatgccaagatggaggagggcatcgacagacatgtgtggccacccctgagcggcctgccccccctgagcaagatgagcctgaacaaggacctgcacttcaacaccagcatcgccaacctggtgatcctgcggggcaaggatgtgcagagcgcagatgtggagggcttcaaggaccctgccctgtacacctcctggctgaagcctgtgaatgccttcaacgtgtggaagacccagagggccttcagcaaatatgagaagtctgctgtgctggtgagcaacagccagttcctggtgaagcccctggacatgattgtgggcaaggcctggaacatgtttgccagcaaggcctacatccaccagtacaccaagtttggaattgaggaggaggacttcctggacagcttcaccagcctggagcaggtggtggccagctactgcaacctgtag

SEQ ID NO: 190229 - DNA, 1362 bp, Artificial Sequence
  derived and/or modified sequence
atgagcatcgtgaccgtgcagctgggccagtgcggcaaccagatcggattcgaagtttttgatgcccttctcagcgactcccatagtagtcagggactatgcagtatgagagagaacgaagcctatcaggctagctgtaaggaacgctttttctccgaagaggagaacggcgttccaatcgcgagagccgtactagtggacatggagccaaaggtgattaaccagatgcttagcaaagccgcccagtccggacagtggaaatacggccaacatgcttgtttttgccagaagcagggcagcggtaacaactgggcatacgggtactcagtccatgggccccgccacgaagaatctataatgaacataattcgaaaggaggtcgagaagtgcgactctttctctggtttcttcataatcatgagcatggcgggagggaccgggagtgggctgggagctttcgtgacccaaaatctagaggaccagtacagcaatagtttaaagatgaaccaaatcatctggccatacggaaccggggaagtcattgtacagaattataattcaattttgaccctgtctcatctgtaccggtcatccgatgctttgctcctgcatgaaaatgacgctatccacaagatatgcgctaagctcatgaacatcaaacagatctctttcagtgacatcaatcaggttctggcacatcagctcgggtctgtattccagccaacctattccgctgagtcttcattccattatcggcgcaatccactaggcgacctgatggagcacctggtgcctcaccctgagttcaaaatgctgagcgtcagaaatatcccacacatgtctgagaattcacttgcctacaccacctttacttgggctggtctcctgaagcacctgcgacagatgctaatctcgaacgcgaaaatggaggagggcattgacagacacgtttggcctccgttgagtggtctgcctcccctaagcaaaatgtccctgaataaagacctccacttcaacaccagcatcgccaatttggttattctgcgcgggaaagacgttcaatctgccgatgtcgaagggtttaaagatcctgctctgtacacttcctggctgaagccagtcaacgcgtttaacgtttggaagacacagagggccttctccaaatatgaaaaaagcgcggtcctagtttctaatagccagttcttggttaagcctcttgatatgatagtcggcaaggcttggaacatgtttgccagcaaggcttacattcaccagtataccaagttcggcatcgaagaggaagattttctcgattcctttacgtctctggagcaagtggtagcctcctattgcaatctttag

SEQ ID NO: 190230 - DNA, 1362 bp, Artificial Sequence
  derived and/or modified sequence
atgtctatcgttacagtgcagctgggtcagtgtggaaaccaaatcggcttcgaggtgtttgatgccctattaagcgactcacattcctcacaaggcctctgctccatgcgcgaaaatgaagcatatcaggcttcttgcaaggagcgttttttttctgaagaggagaatggagtgccgatcgcccgagccgtactggtggacatggaaccaaaggtcatcaatcaaatgcttagtaaagcagcccaaagtggacagtggaagtacgggcaacatgcttgcttctgccagaagcagggatctggtaataactgggcgtacggctacagtgtgcatgggccacggcacgaggagagcattatgaatattattcggaaggaggtggagaaatgcgacagcttcagcggattttttatcataatgagcatggcaggcggaacaggctcaggcctaggcgctttcgtaacacagaatctcgaggatcagtactcgaactctctgaaaatgaaccagattatctggccttatgggaccggtgaggtaattgtacagaactataactcaattctgaccctctctcacctgtaccggagtagcgatgcccttctgctgcatgaaaatgatgctattcacaagatctgcgctaaactgatgaacatcaaacagatttcattttccgacataaatcaggtccttgcgcaccaactgggctctgtcttccagccaacttacagtgccgaatcaagtttccattataggaggaatcccctcggcgatctaatggagcatctcgtaccccatcccgagttcaagatgctctcagtgagaaatatccctcacatgagtgagaattcacttgcttacaccacctttacctgggctgggctgctgaagcatcttcgccagatgctgatttcaaacgcgaaaatggaggaaggcatagacaggcacgtttggccgcctctgtccgggcttccacccctcagcaaaatgagccttaataaggatctgcactttaacactagcattgcaaacttggtgatacttcggggtaaagatgtgcaatctgcagacgttgagggcttcaaggacccggcactctacacatcgtggctcaagcccgtgaatgcctttaatgtatggaagacacagcgcgcttttagcaagtatgagaagtccgcggtgttggtgtctaattctcaattcctagtaaagccactcgatatgatagtcgggaaggcttggaatatgttcgcttctaaggcctatatccatcagtataccaagttcggcatcgaggaggaagacttcctggattcttttacttctctggagcaggttgtcgctagttactgcaacctgtag

SEQ ID NO: 190231 - DNA, 2472 bp, Artificial Sequence
  derived and/or modified sequence
agctggagcgttcggtggacagtgagcatgcgtaccatatctgaagttcgtaaattgaaattgaacatgcgtaattaatctttctgaataggaaaaaatatatacacaacaaaactctccgtttatggaacatgcgcatttgttctcagtaagtttttcgttttgaaagtgagcatgcgcatggtgagtaggttggtccgaagtttgaaccggacagaagcgctggtcggcgtctggcggttgtttttagaggtaatacacctagtttgtggctcagcatgtcaattgtaacagtgcaacttggtcagtgtggcaatcagattggttttgaagtttttgatgctttgcttagtgactcacacagttcccagggactctgctctatgagagagaatgaggcatatcaagcatcttgcaaagaaagattcttcagtgaggaggagaatggagttccaattgcccgggctgttcttgttgacatggaacccaaagttatcaatcaaatgctgtcaaaggctgcccagtctggccaatggaaatatggtcaacatgcatgcttctgtcaaaaacaaggttctggaaacaactgggcatatggttactctgttcatggacccaggcatgaagaatctataatgaacataatccggaaggaagtggagaaatgtgactctttcagtggttttttcatcataatgagtatggctgggggcacaggatcaggattaggagctttcgttacacagaatttagaagatcagtactcaaactcattgaaaatgaatcagattatttggccttatggaactggtgaggttattgttcaaaactacaactccattttgacactttctcacttgtaccgatcttcagacgccctccttcttcatgagaatgatgccatccataagatctgtgcaaaactgatgaatatcaagcagatctcctttagtgatatcaatcaagtcctcgcacatcagctgggaagtgtgttccagcctacttattctgcagaaagctcatttcactacagacgaaatccactaggagacttaatggagcatttagttccccatcctgaattcaagatgctgagtgttcgtaacattcctcacatgtctgagaattcattggcatacaccacatttacttgggctggcctcctcaagcatttgagacagatgctcatttctaatgcaaagatggaagaaggtattgataggcatgtatggcctcctttatcaggacttcctcctcttagtaaaatgtctctcaacaaggacctgcattttaacacttccattgctaacttggtcattcttcgtgggaaagatgtgcaaagtgcagatgtggagggatttaaagatccagctctgtatacttcctggttgaagcctgttaatgctttcaacgtgtggaaaacccagcgggcctttagcaaatatgagaagtctgcagtgttggtcagcaacagccagttcttagtaaaaccacttgatatgattgttgggaaggcatggaatatgtttgcttcaaaagcctacattcatcagtacacaaaatttggaatcgaagaagaggactttttagacagtttcacgtcattagagcaggttgttgccagttactgtaatctctgatcttgaacaatgggaaaagtataccttaaggcatttctggactaaaatattttcaatactattttctctgtaaagttttcaaagttctccatcctggctaacacggtgaaacaccgtctctaccagaaaatacaaaaaattagccaggcgcggtggcgggtgcctgtagtcccagctactcgggaggctgaggcaggagaatgacgtgaacccaggaggcggagcttgcagtgagccgagatcgcgccactgcactccagcctgggcgacagagcgagactccgtctcaaaaaaaaaaaaaaaaaaaaatgttttcaaagttccattctgttaaagtaaccacgtagaatgctgagtctattctgcatactatgcccacagaaaaggaagaaaactttttaaaatggagaatcgcatgttttcaatgaaaacattcacttggtatttcatttgtaagaaaaaaaaatggtgcttttataaagaactttggggaaacactttgctgaaatgttgggactctggaactagccaagaaaagagaatattctctttgtctacatgttcctaaatctttactccaaaacaactccaaaaacaactcacaaagcatgaaccaaactttcacagcataatttcaagctaaggaattgtaattctgtacttaatatattcatgtttgaaatgaatgctttgaaccacaggagggagatgttgtcaaatgctacagtgtgaacatgtattttgaatattctgtaacagggcaagtttccactctaagcagctatttaaaaataaatatgaggattttggtaataaatgcttatgcttaagt

SEQ ID NO: 190232 - protein, 163 aa, Artificial Sequence
  derived and/or modified sequence
MTQSVVVQVGQCGNQIGCCFWDLALREHAAVNQKGIYDEAISSFFRNVDTRVVGDGGSISKGKICSLKARAVLIDMEEGVVNEILQGPLRDVFDTKQLITDISGSGNNWAVGHKVFGSLYQDQILEKFRKSAEHCDCLQCFFIIHSMGGGKIFHSFACNSVKG

SEQ ID NO: 190233 - protein, 475 aa, Artificial Sequence
  derived and/or modified sequence
MTQSVVVQVGQCGNQIGCCFWDLALREHAAVNQKGIYDEAISSFFRNVDTRVVGDGGSISKGKICSLKARAVLIDMEEGVVNEILQGPLRDVFDTKQLITDISGSGNNWAVGHKVFGSLYQDQILEKFRKSAEHCDCLQCFFIIHSMGGGTGSGLGTFLLKVLEDEFPEVYRFVTSIYPSGEDDVITSPYNSILAMKELNEHADCVLPIDNQSLFDIISKIDLMVNSGKLGTTVKPKSLVTSSSGALKKQHKKPFDAMNNIVANLLLNLTSSARFEGSLNMDLNEISMNLVPFPQLHYLVSSLTPLYTLTDVNIPPRRLDQMFSDAFSKDHQLLRADPKHSLYLACALMVRGNVQISDLRRNIERLKPSLQFVSWNQEGWKTSLCSVPPVGHSHSLLALANNTCVKPTFMELKERFMRLYKKKAHLHHYLQVEGMEESCFTEAVSSLSALIQEYDQLDATKNMPVQDLPRLSIAM

SEQ ID NO: 190234 - DNA, 492 bp, Artificial Sequence
  derived and/or modified sequence
atgacccagagcgtggtggtgcaggtgggccagtgcggcaaccagatcggctgctgcttctgggacctggccctgagagagcacgccgccgtgaaccagaagggcatctacgacgaggccatcagcagcttcttcagaaacgtggacaccagagtggtgggcgacggcggcagcatcagcaagggcaagatctgcagcctgaaggccagagccgtgctgatcgacatggaggagggcgtggtgaacgagatcctgcagggccccctgagagacgtgttcgacaccaagcagctgatcaccgacatcagcggcagcggcaacaactgggccgtgggccacaaggtgttcggcagcctgtaccaggaccagatcctggagaagttcagaaagagcgccgagcactgcgactgcctgcagtgcttcttcatcatccacagcatgggcggcggcaagatcttccacagcttcgcctgcaacagcgtgaagggctag

SEQ ID NO: 190235 - DNA, 1428 bp, Artificial Sequence
  derived and/or modified sequence
atgacccagagcgtggtggtgcaggtgggccagtgcggcaaccagatcggctgctgcttctgggacctggccctgagagagcacgccgccgtgaaccagaagggcatctacgacgaggccatcagcagcttcttcagaaacgtggacaccagagtggtgggcgacggcggcagcatcagcaagggcaagatctgcagcctgaaggccagagccgtgctgatcgacatggaggagggcgtggtgaacgagatcctgcagggccccctgagagacgtgttcgacaccaagcagctgatcaccgacatcagcggcagcggcaacaactgggccgtgggccacaaggtgttcggcagcctgtaccaggaccagatcctggagaagttcagaaagagcgccgagcactgcgactgcctgcagtgcttcttcatcatccacagcatgggcggcggcaccggcagcggcctgggcaccttcctgctgaaggtgctggaggacgagttccccgaggtgtacagattcgtgaccagcatctaccccagcggcgaggacgacgtgatcaccagcccctacaacagcatcctggccatgaaggagctgaacgagcacgccgactgcgtgctgcccatcgacaaccagagcctgttcgacatcatcagcaagatcgacctgatggtgaacagcggcaagctgggcaccaccgtgaagcccaagagcctggtgaccagcagcagcggcgccctgaagaagcagcacaagaagcccttcgacgccatgaacaacatcgtggccaacctgctgctgaacctgaccagcagcgccagattcgagggcagcctgaacatggacctgaacgagatcagcatgaacctggtgcccttcccccagctgcactacctggtgagcagcctgacccccctgtacaccctgaccgacgtgaacatcccccccagaagactggaccagatgttcagcgacgccttcagcaaggaccaccagctgctgagagccgaccccaagcacagcctgtacctggcctgcgccctgatggtgagaggcaacgtgcagatcagcgacctgagaagaaacatcgagagactgaagcccagcctgcagttcgtgagctggaaccaggagggctggaagaccagcctgtgcagcgtgccccccgtgggccacagccacagcctgctggccctggccaacaacacctgcgtgaagcccaccttcatggagctgaaggagagattcatgagactgtacaagaagaaggcccacctgcaccactacctgcaggtggagggcatggaggagagctgcttcaccgaggccgtgagcagcctgagcgccctgatccaggagtacgaccagctggacgccaccaagaacatgcccgtgcaggacctgcccagactgagcatcgccatgtag

SEQ ID NO: 190236 - DNA, 492 bp, Artificial Sequence
  derived and/or modified sequence
atgacgcagagtgtcgtcgtccaagtgggtcagtgtgggaaccagattggctgttgcttctgggatctcgcgttacgcgaacatgctgccgttaaccagaaaggcatatacgacgaggcaatatcttcattctttcgaaacgtcgacactagggtagtcggcgatgggggcagtatcagtaaagggaagatttgctccctcaaagctagagccgttctcatcgatatggaggaaggagttgtcaacgaaatcttacagggcccgttgagagacgtgttcgataccaaacagctcattaccgacatctctgggtccggcaataattgggctgtgggccacaaggtattcgggtcgctgtatcaggatcaaatactggagaagtttcgtaaatcagccgagcactgtgactgtctgcagtgctttttcattatccactcaatgggaggaggcaaaatctttcacagcttcgcctgtaattctgtgaaggggtag

SEQ ID NO: 190237 - DNA, 1428 bp, Artificial Sequence
  derived and/or modified sequence
atgactcagagcgtcgtggttcaggttgggcaatgtggaaatcaaatcggttgttgtttctgggacctcgctctgcgcgagcatgctgccgttaatcagaaaggcatctatgacgaagctatatcttcattcttccggaacgtggatacccgcgttgtgggagatggcggttctatcagcaaaggcaaaatttgctccttaaaggctcgagctgtgctaatagacatggaagagggcgttgtaaacgagatcctgcagggcccactcagggatgtgtttgacacaaagcaactaatcactgatattagtggctctgggaataactgggcagtcggccacaaggtctttggatccctctaccaggatcagattctggagaaatttcggaagtccgccgagcactgcgactgtctccagtgctttttcataatccatagcatgggggggggtacaggatcagggttgggcacctttctcctaaaagtgctagaagacgagtttcctgaagtgtacaggtttgtgacatccatctatcctagtggtgaagatgacgtgatcacatcaccttataactcgattctggcaatgaaagagctgaacgagcacgccgattgcgtactgccgattgacaaccagagtcttttcgacatcatctccaagatcgatctcatggtgaactcagggaagttgggcactaccgtaaagccgaaatcgctcgtcacatccagcagtggggcactgaagaagcaacacaagaagccgtttgatgcgatgaataatatcgtggctaacttgttgctgaacttgacctccagtgctagatttgagggttccctaaacatggatctgaacgaaatctccatgaatctggtgcctttcccgcagttgcattaccttgtgtccagcctgacccccttgtataccctcacagatgttaatatccctcctcgccgtctggaccaaatgttttcggatgcattctcaaaggaccaccagcttttgcgggccgatccaaagcacagtttgtatctggcatgtgcgttgatggtgagaggcaacgttcagatctccgatctcaggcgaaatatagaacgacttaaaccttccctacagttcgtgtcttggaaccaggaaggctggaagacatccttatgttcggttccacctgtcggccattcgcactctctgctggcccttgccaataacacatgtgtgaagcctacctttatggaactgaaagagcgatttatgcgcctttacaaaaaaaaagcccatcttcaccactacctgcaggtggaaggaatggaagagtcttgttttaccgaagctgtgtcttctctctctgcactgatacaagagtacgaccaattagatgcgactaagaatatgcctgtgcaggatctgccccggctgagcatagctatgtag

SEQ ID NO: 190238 - DNA, 492 bp, Artificial Sequence
  derived and/or modified sequence
atgacccagagcgtggtggtgcaggtgggccagtgtggcaaccagatcggctgctgcttctgggacctggccctgcgggagcacgccgctgtgaaccagaagggcatctatgatgaggccatcagcagcttcttcagaaatgtggacaccagggtggtgggagatggcggcagcatcagcaagggcaagatctgcagcctgaaggcccgggctgtgctgattgacatggaggagggcgtggtgaatgagatcctgcagggccccctgagagatgtgtttgacaccaagcagctgatcacagacatcagcggcagcggcaacaactgggccgtgggccacaaggtgtttggcagcctgtaccaggaccagatcctggagaagttcaggaagtctgctgagcactgtgactgcctgcagtgcttcttcatcatccacagcatgggcggcggcaagatcttccacagctttgcctgcaacagcgtgaagggctag

SEQ ID NO: 190239 - DNA, 1428 bp, Artificial Sequence
  derived and/or modified sequence
atgacccagagcgtggtggtgcaggtgggccagtgtggcaaccagatcggctgctgcttctgggacctggccctgcgggagcacgccgctgtgaaccagaagggcatctatgatgaggccatcagcagcttcttcagaaatgtggacaccagggtggtgggagatggcggcagcatcagcaagggcaagatctgcagcctgaaggcccgggctgtgctgattgacatggaggagggcgtggtgaatgagatcctgcagggccccctgagagatgtgtttgacaccaagcagctgatcacagacatcagcggcagcggcaacaactgggccgtgggccacaaggtgtttggcagcctgtaccaggaccagatcctggagaagttcaggaagtctgctgagcactgtgactgcctgcagtgcttcttcatcatccacagcatgggcggcggcactggaagtggcctgggcaccttcctgctgaaggtgctggaggatgagttccctgaggtgtacagatttgtgaccagcatctaccccagcggggaggatgatgtgatcaccagcccctacaacagcatcctggccatgaaggagctgaatgagcacgccgactgtgtgctgcccatcgacaaccagagcctgtttgacatcatcagcaagattgacctgatggtgaacagcggcaagctgggcaccaccgtgaagcccaagagcctggtgaccagcagcagcggggccctgaagaagcagcacaagaagccctttgatgccatgaacaacatcgtggccaacctgctgctgaacctgaccagcagcgccaggtttgagggcagcctgaacatggacctgaatgagatctccatgaacctggtgcccttcccccagctgcactacctggtgagcagcctgacccccctgtacaccctgacagatgtgaacatccccccccggcggctggaccagatgttcagtgatgccttcagcaaggaccaccagctgctgcgggctgaccccaagcacagcctgtacctggcctgtgccctgatggtgagaggaaatgtgcagatcagtgacctgcggagaaatattgagcggctgaagcccagcctgcagtttgtgtcctggaaccaggagggctggaagaccagcctgtgcagcgtgccccctgtgggccacagccacagcctgctggccctggccaacaacacctgtgtgaagcccaccttcatggagctgaaggagcgcttcatgaggctgtacaagaagaaggcccacctgcaccactacctgcaggtggagggcatggaggagagctgcttcacagaagctgtgagcagcctgagcgccctgatccaggagtatgaccagctggatgccaccaagaacatgcctgtgcaggacctgccccggctgagcatcgccatgtag

SEQ ID NO: 190240 - DNA, 492 bp, Artificial Sequence
  derived and/or modified sequence
atgacccagagcgtggtggtgcaggtgggccagtgcggcaaccagatcggatgctgtttctgggatctggccttgagggagcacgccgctgtgaatcagaaggggatttacgacgaagcaatcagctccttttttcgcaacgttgatacacgtgtggtaggagatggcgggtccatttcaaagggaaaaatctgttccttgaaggctcgggctgttctgatcgacatggaggaaggggtagtgaacgaaattttacagggccccctgcgggacgtcttcgatactaagcaactgattacagacattagcgggtccgggaacaactgggccgtcgggcacaaggtgttcggcagcctgtaccaggatcagatactggagaaatttagaaagtcagccgagcattgcgactgcctgcaatgtttcttcattatacactcaatgggtggagggaaaatcttccattccttcgcttgcaactcagtcaagggttag

SEQ ID NO: 190241 - DNA, 1428 bp, Artificial Sequence
  derived and/or modified sequence
atgacccagagcgtggtggtgcaggtgggccagtgcggcaaccagatcggatgctgcttctgggacctggcacttagagaacacgccgccgtaaatcagaaggggatttacgacgaagcgatttctagcttctttcgtaacgttgatactagagtggtgggtgatggaggttctatcagcaaagggaagatctgttcactgaaggcacgcgctgtgctgattgatatggaggagggtgtcgtcaacgagatcctgcagggccctctccgtgacgtgtttgacaccaaacagttgatcaccgatatttcgggctcaggcaataactgggccgttgggcacaaagtgtttggctctttgtatcaggatcaaatactggaaaagttcagaaagtctgccgagcattgtgattgcctgcagtgcttctttattatccattccatggggggaggtacaggatccggcctgggtaccttcctgctgaaggtgctcgaagacgaattccctgaggtgtaccgctttgtcactagcatatatccatccggtgaagatgacgtaataaccagtccttacaattccatcctcgctatgaaagaactgaatgaacacgccgactgtgttttgcctattgataatcagtcactgttcgatattattagcaaaattgatctgatggtcaatagcggaaaactgggaaccactgtgaagcctaaaagtctggtgacttcaagttccggggcattaaagaaacagcacaagaaaccgtttgacgcaatgaacaatatcgttgctaacctgctgctgaatctgaccagctcagcgaggtttgaaggttcgctaaatatggacttaaacgagatctcaatgaatctggtgccgttccctcagctgcattacctggtatccagcctcacccctctctatacactgaccgacgtcaacatcccccctcggagactggatcagatgttttccgacgcctttagcaaggaccatcagttgctccgtgctgacccaaagcacagcctttacctggcttgtgccctgatggtcaggggaaacgtccagatcagtgatctgcggaggaatatcgaacggctgaaaccttccctgcagttcgtgagctggaaccaggaagggtggaagacatccctgtgctccgtgcccccagtcggccattctcactctcttttagctctcgctaataatacctgtgtgaagcctacttttatggagctgaaggagagatttatgaggctctacaagaaaaaagctcatctccaccattatctgcaggtggagggaatggaagaatcgtgcttcacggaagctgtgagtagtctgagtgccctgatccaagagtatgatcagctggacgctaccaaaaacatgcccgtgcaagatctgccgaggctttccattgccatgtag

SEQ ID NO: 190242 - DNA, 492 bp, Artificial Sequence
  derived and/or modified sequence
atgacccagtctgtggtcgtgcaggtcggccagtgtgggaatcagatagggtgctgtttttgggatctggcgctgcgagagcatgccgctgttaaccaaaaaggaatctatgacgaggccatctctagtttctttcgcaacgttgatacccgcgtggtgggcgacggcggaagtataagcaaaggcaagatttgttcgcttaaggcaagggcggtgctcattgacatggaggagggggtggtgaacgaaattctgcagggaccccttcgcgacgtttttgatacgaaacagctcattaccgatatcagcggctcgggcaacaattgggccgtggggcataaagtgttcggcagcctgtaccaggatcagattctcgagaaattcaggaagtctgccgaacactgtgactgccttcagtgcttcttcataattcacagcatgggaggcggaaaaatcttccacagtttcgcctgcaattctgtgaaagggtag

SEQ ID NO: 190243 - DNA, 1428 bp, Artificial Sequence
  derived and/or modified sequence
atgactcaaagcgtcgtggttcaggttggccaatgtggtaaccagatcggctgttgcttctgggacctggctctgagggaacatgctgcagtgaatcagaagggaatctacgacgaagctatctcttccttctttcgtaatgtcgacaccagggtggtgggagacgggggttccattagtaagggaaaaatttgctctctgaaggcacgcgctgtgttaatcgatatggaagaaggcgtcgtgaacgagatcctgcagggacccctgagggacgtcttcgacactaaacagttgattacagatattagcggctcaggaaataattgggctgtgggtcacaaggtttttggttccctctatcaggaccagatactggagaaatttaggaagagtgccgagcattgtgattgcctccagtgttttttcatcatccactcaatgggcggtggcaccggttcagggctgggaacttttctcctgaaagtattagaggacgagttcccagaagtctaccgatttgttacatccatctacccatccggcgaagatgatgttataacctctccttacaatagcattctagcaatgaaagaacttaacgagcatgcggattgtgtgcttccaattgacaatcaaagccttttcgatattataagcaagattgatcttatggtgaactcagggaaattgggcactacggttaaacctaaaagtttggtgacttcatcaagcggggctttgaaaaagcaacataagaagccttttgatgctatgaacaatattgttgcaaatctgctgttgaacctgacttcaagtgcccgatttgaagggtccctcaatatggacctgaatgaaatctcgatgaacctcgtgccatttccacagctgcactaccttgtctcaagcctaactccactgtacactctaacagacgtcaacatcccaccaaggcggctcgatcagatgttttcggacgccttcagcaaggatcatcaattgttgagagccgacccaaaacattccctctatctagcttgcgccttgatggtccgcggaaacgttcaaattagcgaccttaggagaaatatcgagcgacttaagcccagcctgcagtttgtgagctggaaccaggaggggtggaaaacctcattatgctccgtgccacccgtgggccactcacacagtctactggcactggcgaataacacctgcgtgaaaccaaccttcatggaattgaaggagcggtttatgagactctataaaaaaaaggcgcacttacatcactatttacaggtggaagggatggaggaatcttgcttcacagaggcagtcagctctctgagtgccctgatccaggaatatgaccagctcgatgccacgaagaacatgcccgtgcaggatctgccacgcctgtctatagccatgtag

SEQ ID NO: 190244 - DNA, 726 bp, Artificial Sequence
  derived and/or modified sequence
agcggccgcgggctagcaagctcccggagccggcggcgcaccaccatgacccagtcggtggtcgtacaggtcggccagtgcggaaaccagatcggctgctgcttctgggacctggcactaagggagcacgccgcggtcaaccagaaaggaatttatgatgaggcaataagcagcttctttagaaatgtggacaccagagtggttggtgatggtggaagtatttccaagggaaaaatatgttctttaaaagcacgagcagtcttgattgatatggaagaaggggtagtgaatgaaattctgcagggaccactgagagatgtatttgatacgaaacagctcatcactgatatttctggctcaggaaataattgggccgtgggtcacaaagttttcggcagtctttaccaagaccagattttagagaaattcagaaagtcggcagagcactgtgattgcttgcagtgtttctttataatacattccatgggaggaggtaaaatttttcactcatttgcctgtaacagtgttaaaggataagtgggaattcattttgcaaacgtaagtcttgtttttagacctgtgcttgataaagatagaactattcggagggtgtgtagtttgagtatataaacatacacctttttatcttaaaattttgtggaattatgtcactattttcttttcttttctttttttttttttttaatgtaagccctcttaagagtc

SEQ ID NO: 190245 - DNA, 2142 bp, Artificial Sequence
  derived and/or modified sequence
ctctagcagagcgccgttgctgggggaatgcagaagcggccgcgggctagcaagctcccggagccggcggcgcaccaccatgacccagtcggtggtcgtacaggtcggccagtgcggaaaccagatcggctgctgcttctgggacctggcactaagggagcacgccgcggtcaaccagaaaggaatttatgatgaggcaataagcagcttctttagaaatgtggacaccagagtggttggtgatggtggaagtatttccaagggaaaaatatgttctttaaaagcacgagcagtcttgattgatatggaagaaggggtagtgaatgaaattctgcagggaccactgagagatgtatttgatacgaaacagctcatcactgatatttctggctcaggaaataattgggccgtgggtcacaaagttttcggcagtctttaccaagaccagattttagagaaattcagaaagtcggcagagcactgtgattgcttgcagtgtttctttataatacattccatgggaggaggaacaggatctggacttggcacatttcttttaaaggtgcttgaagacgaattcccagaagtatacagatttgtgacttccatttatccttctggtgaggatgatgtcataacctcaccttataatagcatcttggcaatgaaggaacttaatgagcatgcagactgtgtattgcccattgacaatcaatctttatttgacatcattagcaaaatcgacctcatggtgaattctggaaagttgggtacaactgtgaagccaaagagtctggttacttcaagttctggggctttaaaaaagcagcataagaagccctttgatgcaatgaataacattgtggcaaatttgctcctcaacctaacgagctctgcaagatttgaagggtcccttaatatggaccttaatgaaatcagcatgaatttagttccttttcctcaacttcattatctcgtgtcaagcctaacacctctgtatacactgacagatgttaacattcctcctagaagattggatcagatgttttcagatgcctttagtaaagatcaccagctgcttcgggcagaccccaaacacagtctttacctcgcctgtgcactcatggttagaggaaatgtacaaatttcagatcttcgtagaaatattgaaagattaaaaccatctctacaatttgtctcctggaatcaagaaggctggaagaccagcctgtgttccgtacctcctgtgggccattctcattcgttattagctttagcaaataacacatgtgtgaagcccaccttcatggaactgaaagagagattcatgaggctctacaagaaaaaggctcaccttcatcactatctacaagttgaagggatggaagaaagctgtttcacagaagctgtgtcatctttatcagcactcatacaggaatatgaccaactggacgccacaaaaaacatgcctgtgcaggatttacccagactaagcatagctatgtgaaaaagaaaccctcaaaaatactttcttaatttcacattgttttttctgacctttctgtttcaacatttttgtaatttggaaactccagttttttcatattatcgggaaatatttttgtctaaaagagtgatttctgtttaatcgcaatttgttggtaataccaatgtgtgaaattagtgaaatcttagtaccttaacttcaaacatttctcttcagaaaagttcccttttctaaaattgagataacatagttcttgaatattttgctgtatttatagcctcatatttaggcatttatgcactgatgtgtcttcaataaaaatcttgtacagatatatttttataattatttataatttatattttgatattctatttaagttatcctgattctttaaaagtagttattgggagtagaagaacacaatataaatatttccgtgtaatagccaccaacttttcaggcataggttttattacaactgttaaggaggttttgcttcttctttagataacaacttgtttgcccaaaagaatcctaatttgtacacttaacatgtatttgtattaaactttttaaataattgctttcttatcaaaccaattgattttataataaatgtctatatttttcaa

SEQ ID NO: 190246 - protein, 493 aa, Artificial Sequence
  derived and/or modified sequence
MDQDYERRLLRQIVIQNENTMPRVTEMRRTLTPASSPVSSPSKHGDRFIPSRAGANWSVNFHRINENEKSPSQNRKAKDATSDNGKDGLAYSALLKNELLGAGIEKVQDPQTEDRRLQPSTPEKKGLFTYSLSTKRSSPDDGNDVSPYSLSPVSNKSQKLLRSPRKPTRKISKIPFKVLDAPELQDDFYLNLVDWSSLNVLSVGLGTCVYLWSACTSQVTRLCDLSVEGDSVTSVGWSERGNLVAVGTHKGFVQIWDAAAGKKLSMLEGHTARVGALAWNAEQLSSGSRDRMILQRDIRTPPLQSERRLQGHRQEVCGLKWSTDHQLLASGGNDNKLLVWNHSSLSPVQQYTEHLAAVKAIAWSPHQHGLLASGGGTADRCIRFWNTLTGQPLQCIDTGSQVCNLAWSKHANELVSTHGYSQNQILVWKYPSLTQVAKLTGHSYRVLYLAMSPDGEAIVTGAGDETLRFWNVFSKTRSTKESVSVLNLFTRIR

SEQ ID NO: 190247 - DNA, 1482 bp, Artificial Sequence
  derived and/or modified sequence
atggaccaggactacgagagaagactgctgagacagatcgtgatccagaacgagaacaccatgcccagagtgaccgagatgagaagaaccctgacccccgccagcagccccgtgagcagccccagcaagcacggcgacagattcatccccagcagagccggcgccaactggagcgtgaacttccacagaatcaacgagaacgagaagagccccagccagaacagaaaggccaaggacgccaccagcgacaacggcaaggacggcctggcctacagcgccctgctgaagaacgagctgctgggcgccggcatcgagaaggtgcaggacccccagaccgaggacagaagactgcagcccagcacccccgagaagaagggcctgttcacctacagcctgagcaccaagagaagcagccccgacgacggcaacgacgtgagcccctacagcctgagccccgtgagcaacaagagccagaagctgctgagaagccccagaaagcccaccagaaagatcagcaagatccccttcaaggtgctggacgcccccgagctgcaggacgacttctacctgaacctggtggactggagcagcctgaacgtgctgagcgtgggcctgggcacctgcgtgtacctgtggagcgcctgcaccagccaggtgaccagactgtgcgacctgagcgtggagggcgacagcgtgaccagcgtgggctggagcgagagaggcaacctggtggccgtgggcacccacaagggcttcgtgcagatctgggacgccgccgccggcaagaagctgagcatgctggagggccacaccgccagagtgggcgccctggcctggaacgccgagcagctgagcagcggcagcagagacagaatgatcctgcagagagacatcagaaccccccccctgcagagcgagagaagactgcagggccacagacaggaggtgtgcggcctgaagtggagcaccgaccaccagctgctggccagcggcggcaacgacaacaagctgctggtgtggaaccacagcagcctgagccccgtgcagcagtacaccgagcacctggccgccgtgaaggccatcgcctggagcccccaccagcacggcctgctggccagcggcggcggcaccgccgacagatgcatcagattctggaacaccctgaccggccagcccctgcagtgcatcgacaccggcagccaggtgtgcaacctggcctggagcaagcacgccaacgagctggtgagcacccacggctacagccagaaccagatcctggtgtggaagtaccccagcctgacccaggtggccaagctgaccggccacagctacagagtgctgtacctggccatgagccccgacggcgaggccatcgtgaccggcgccggcgacgagaccctgagattctggaacgtgttcagcaagaccagaagcaccaaggagagcgtgagcgtgctgaacctgttcaccagaatcagatag

SEQ ID NO: 190248 - DNA, 1482 bp, Artificial Sequence
  derived and/or modified sequence
atggatcaggattacgaaaggcgcctactacggcagatcgtcattcagaacgaaaacacaatgccccgagtgaccgaaatgaggcgaactctgacccccgcctcgtcccccgtgtcgtctccatcgaaacatggggacaggttcattccctctagagcaggagccaactggtctgtgaactttcacagaattaatgagaacgagaagtcccccagtcaaaatcgcaaggctaaggacgcgaccagcgataacggtaaagacggcctggcctactctgctctcctgaagaatgagctgcttggagccgggattgagaaagttcaggatcctcagactgaggacaggcgattacaacccagtacacccgagaaaaaaggcctctttacttacagtctgtccaccaagaggtcatctcccgacgatggcaatgacgtatctccttactccttgtctcccgtttcaaataagtctcagaaactcctgagatctcctcgcaagcctacaagaaagatcagcaagattcctttcaaggttctcgatgccccggaactccaggacgatttctacctgaatctggtcgattggtcaagtctcaatgtgttgtctgtcggactgggaacctgtgtttatctgtggagtgcctgtacctcccaggtgacccgtttatgcgacctatccgtggaaggcgactctgtaacctccgtaggatggagcgagagagggaacctggtggccgtgggtacacataaaggtttcgtgcagatatgggatgccgccgctggcaaaaagctgtccatgctggagggacacacagctcgcgtgggggctctggcttggaatgccgagcagttatcctctggctccagagaccggatgatcctgcaaagggatatcagaacccccccactgcagagcgagcgacggctgcagggccaccgccaggaggtgtgtggtctcaagtggtccactgatcatcagctactagcctcaggggggaacgacaacaaactccttgtctggaatcacagctcactatcgcctgtacaacagtacacagagcatctggctgccgtgaaggctatcgcatggtctccacaccaacatggcctgctcgcttctgggggaggtaccgctgacaggtgcattcgtttttggaatacactaaccggacaaccactgcagtgtatcgacaccggctcacaggtgtgtaatctcgcatggtcaaagcatgcaaatgagctggtgtccacacatggctactcccagaaccaaatattggtctggaaatatccatctctgacacaagtggctaagttgacgggtcatagctatagggtgctgtatctggctatgagccccgacggtgaggcaatcgtcacaggagcaggtgacgagactctccggttctggaatgttttcagcaaaaccaggtccaccaaggaaagcgtgtccgttctgaatttattcacaaggatccgatag

SEQ ID NO: 190249 - DNA, 1482 bp, Artificial Sequence
  derived and/or modified sequence
atggaccaggactatgaaagaaggctgctgcggcagatcgtcatccagaatgaaaacaccatgccccgggtgacagagatgaggaggaccctgaccccagccagcagccctgtgagcagccccagcaagcacggggaccgcttcatccccagcagagctggggccaactggagcgtgaacttccaccgcatcaatgaaaatgagaagagccccagccagaacaggaaggccaaggatgccaccagtgacaacgggaaggatggcctggcctacagcgccctgctgaagaatgagctgctgggcgccggcatcgagaaggtgcaggacccccagacagaagatagaaggctgcagcccagcaccccagagaagaagggcctcttcacctacagcctgagcaccaagaggagcagcccagatgatggaaatgatgtgagcccctacagcctgagccctgtgagcaacaagagccagaagctgctgcggagccccaggaagcccaccaggaagatcagcaagatccccttcaaggtgctggatgcccctgagctgcaggatgacttctacctgaacctggtggactggagcagcctgaatgtgctgtctgtgggcctgggcacctgtgtgtacctgtggagcgcctgcaccagccaggtgacccggctgtgtgacctgtctgtggagggggacagcgtgacctctgtgggctggagcgagcggggcaacctggtggccgtgggcacccacaagggctttgtgcagatctgggatgctgctgctgggaagaagctgtccatgctggagggccacacagcccgggtgggcgccctggcctggaatgctgagcagctgagcagcggcagccgggacaggatgatcctgcagagggacatccgcaccccacccctgcagagcgagcggcggctgcagggccaccggcaggaggtgtgtggcctgaagtggagcacagaccaccagctgctggccagcggcggcaatgacaacaagctgctggtgtggaaccacagcagcctgagccctgtgcagcagtacacagagcacctggccgctgtgaaggccatcgcctggagcccccaccagcacggcctgctggccagcggcggcggcacagctgaccgctgcatccgcttctggaacaccctgaccggccagcccctgcagtgcatcgacaccggcagccaggtgtgcaacctggcctggagcaagcacgccaatgagctggtgtccacccacggctacagccagaaccagatcctggtgtggaagtaccccagcctgacccaggtggccaagctgaccggccacagctacagagtgctgtacctggccatgagcccagatggagaggccatcgtgactggagctggagatgagaccctgcgcttctggaatgtgttcagcaagaccaggagcaccaaggagagcgtgtctgtgctgaacctcttcacccgcatcagatag

SEQ ID NO: 190250 - DNA, 1482 bp, Artificial Sequence
  derived and/or modified sequence
atggaccaggactacgagcggcggctgctgcggcagatcgtgatccagaacgagaacacaatgcctagagtaacagagatgcgccgaaccttgacccccgcatcttcccctgtgtcttctccctccaaacacggagataggtttatccccagtagggctggggctaactggtctgtaaatttccatagaatcaacgaaaacgaaaagtccccaagccagaataggaaagcaaaggatgctacttctgacaatggcaaggatggactggcatactcagctttactcaagaacgaattgttaggggcaggtatcgaaaaagtgcaggatccacagaccgaggatcgacgtttgcaaccttctacccccgagaaaaaaggactgtttacctatagcctgagcactaaaaggtcctcaccagacgacgggaacgatgtctccccttatagcctgtcccccgtgtcaaacaaatcacagaaattgctcagaagccccagaaagccaacccggaaaatatcaaagatcccctttaaggtgctcgatgctccagagctgcaagatgacttttacctcaacctcgtcgattggtcgtcccttaatgtcttaagtgttgggctgggtacttgtgtatacctgtggtctgcatgtacatcccaagtgactcgcctgtgcgatctaagtgtggagggggactccgtgacctctgtagggtggagcgaacgcggcaacctcgtcgcagttggaactcacaagggctttgtacagatctgggatgccgccgcgggtaaaaaactgtctatgctagaggggcataccgcccgggtaggggcgctggcttggaacgccgaacagctttctagcgggagtcgcgatcgtatgatcctgcaacgcgacataaggactcctcctctccagtctgagcgccgtctccagggccacagacaggaagtgtgtgggcttaaatggtccactgatcaccaactgcttgcttcaggaggcaacgataataaattgcttgtgtggaaccactctagcctgtctccagttcagcagtacacggagcatctggccgccgtgaaggctattgcctggagccctcaccaacatggccttctagcttctggcggcggcaccgcggatcggtgtatacgattttggaatacactaactggccagcccctacagtgtattgataccgggtctcaggtttgtaatcttgcatggtccaagcatgctaatgagctcgtgagtactcacggctattcgcagaaccagattctggtctggaagtatccaagtttgacgcaggttgccaagctcaccggtcacagttaccgcgttttgtatctcgccatgtcacctgacggtgaagccattgtaacaggcgccggcgatgaaacattgcggttctggaacgtgttctctaagactcgatcgacaaaggagagcgtgtctgtgctgaacctgttcacgcgcatccggtag

SEQ ID NO: 190251 - DNA, 1482 bp, Artificial Sequence
  derived and/or modified sequence
atggatcaagattacgaacgcaggctgttgaggcagattgtgatccagaacgaaaatacaatgcctcgcgtcaccgaaatgcgcagaaccttgactcctgcttcctcacccgtttcaagtcccagtaaacacggggataggtttatcccctcaagggctggcgcaaactggagcgttaatttccacagaataaatgagaatgagaaatcgccaagccaaaatagaaaggccaaggatgcgacatctgacaacggaaaggatggccttgcgtattcagcactgctgaagaacgaactgctgggtgctggtatcgaaaaggtgcaggatccacagacagaagaccgccgactccagccctccacaccagagaagaagggcctgttcacttactccctatctaccaaaaggagctcacctgacgacgggaacgatgtctccccttattctctgagtcctgtgagcaacaaatcccagaaactgctgaggtccccacggaagccaacacgaaaaatttctaagatcccgttcaaggtgctagatgctcccgaactccaggacgatttttacctgaacttagtagattggtcctctctgaatgtgctgagcgtcggactcggaacatgcgtgtatctctggagcgcctgcacaagtcaggtcacacggctttgcgatctgtccgtggagggagacagtgtcacgagtgtgggttggagcgaaagagggaacctagtggcagtgggcacgcacaaaggctttgtccagatctgggacgctgccgcaggaaagaaattgtctatgctggaaggtcataccgccagagttggcgctctggcctggaatgctgaacaactgagctctgggagtcgcgaccgcatgattctgcagagagatattcgcaccccacctcttcaatccgaaagaagactgcagggtcatcggcaagaggtgtgcggactcaagtggtctacagaccaccagttgttggcttccggagggaatgacaacaaactcctggtgtggaatcactctagccttagtccagtgcaacagtataccgagcacctagcagcagtcaaagctatcgcatggtcaccccatcagcacggcctcctcgcatccggagggggtacagcagatagatgtatacgattttggaataccctgaccggccagccattacaatgcatcgatacaggaagtcaggtttgtaatctcgcatggtcaaaacatgctaacgaattggtctccacccacggatacagccagaaccagatcctggtgtggaagtacccatcccttacccaagtggccaagcttactggtcattcgtaccgggtgttgtatcttgctatgtcaccagacggggaggcaattgtcacaggcgctggagacgaaaccttgcgcttctggaacgtgttcagtaagacccggtccacaaaggagtccgtgtccgttctcaatctgttcacccggatacgatag

SEQ ID NO: 190252 - DNA, 3615 bp, Artificial Sequence
  derived and/or modified sequence
gggagccgggaggcagcggaggagcgaccgccgccatattagggaccgcggagcccgggatcccgtcagcggcggccgcggccgggcctgcgggagctgcggaggccggaggcgggcgctgtgcggtgccaggagaggcggggtcggcgggagccagcgagccacgggagcgagccaggctaaccttgccgcgggccgagccctgcctcgccatggaccaggactatgagcggcgcctgcttcgccagatcgtcatccagaatgagaacacgatgccacgcgtcacagagatgcggcggaccctgacgcctgccagctccccagtgtcctcgcccagcaagcacggagaccgcttcatcccctccagagccggagccaactggagcgtgaacttccacaggattaacgagaatgagaagtctcccagtcagaaccggaaagccaaggacgccacctcagacaacggcaaagacggcctggcctactctgccctgctcaagaatgagctgctgggtgccggcatcgagaaggtgcaggacccgcagactgaggaccgcaggctgcagccctccacgcctgagaagaagggtctgttcacgtattcccttagcaccaagcgctccagccccgatgacggcaacgatgtgtctccctactccctgtctcccgtcagcaacaagagccagaagctgctccggtccccccggaaacccacccgcaagatctccaagatccccttcaaggtgctggacgcgcccgagctgcaggacgacttctacctcaatctggtggactggtcgtccctcaatgtgctcagcgtggggctaggcacctgcgtgtacctgtggagtgcctgtaccagccaggtgacgcggctctgtgacctctcagtggaaggggactcagtgacctccgtgggctggtctgagcgggggaacctggtggcggtgggcacacacaagggcttcgtgcagatctgggacgcagccgcagggaagaagctgtccatgttggagggccacacggcacgcgtcggggcgctggcctggaatgctgagcagctgtcgtccgggagccgcgaccgcatgatcctgcagagggacatccgcaccccgccactgcagtcggagcggcggctgcagggccaccggcaggaggtgtgcgggctcaagtggtccacagaccaccagctcctcgcctcggggggcaacgacaacaagctgctggtctggaatcactcgagcctgagccccgtgcagcagtacacggagcacctggcggccgtgaaggccatcgcctggtccccacatcagcacgggctgctggcctcggggggcggcacagctgaccgctgtatccgcttctggaacacgctgacaggacaaccactgcagtgtatcgacacgggctcccaagtgtgcaatctggcctggtccaagcacgccaacgagctggtgagcacgcacggctactcacagaaccagatccttgtctggaagtacccctccctgacccaggtggccaagctgaccgggcactcctaccgcgtgctgtacctggcaatgtcccctgatggggaggccatcgtcactggtgctggagacgagaccctgaggttctggaacgtctttagcaaaacccgttcgacaaaggagtctgtgtctgtgctcaacctcttcaccaggatccggtaaacctgccgggcaggaccgtgccacaccagctgtccagagtcggaggaccccagctcctcagcttgcatggactctgccttcccagcgcttgtcccccgaggaaggcggctgggcgggcggggagctgggcctggaggatcctggagtctcattaaatgcctgattgtgaaccatgtccaccagtatctggggtgggcacgtggtcggggaccctcagcagcaggggctctgtctcccttcccaaagggcgagaaccacattggacggtcccggctcagaccgtctgtactcagagcgacggatgccccctgggaccctcactgcctccgtctgttcatcacctgcccaccggagccgcatgctcttcctggaactgcccacgtctgcacagaacagaccaccagacgccagggctgattggtgggggcctgagaccccggttgcccattcatggctgcaccccaccatgtcaaacccaagaccagccccaaggccagaccaaggcatgtaggcctgggcaggtggctcggggccactggcggagccagcctgtggatccaagagacagtccccacctgggcttcacggcatccttgcagccacctctgctgtcactgctcgaagcagcagtctctctggaagcatctgtgtcatggccatcgcccggcggtcagtgggcttcagatgggcctgtgcatcctggccaagcgtcaccctcacactggaggaggatgtctgctctggacttatcaccccaggagaactgaacccggacctgctcactgccctggctggagaggagcacaacagatgccacgtcttcgtgcattcgccaacacgtgccctcacagggccagcgtcctccttccctgcgcaagacttgcgtcccccatgcctgctgggtggctgggtcctgtggaggccagcagcggtgtggcccccgcccccaggctgcctgtgtcttcacctgtcctgtccaccagcgccaacagccgtggggaagccaaggagacccaaggggtccaggaggtgggcgccctccatccttcgagaagcttcccaggctcctctgcttctctgtctcatgctcccaggctgcacagcaggcagggagggaggcaaggcaggggagtggggcctgagctgagcactgccccctcacccccccaccaccccttcccatttcatcggtggggacgtggagagggtggggcgggctggggttggagggtcccacccaccaccctgctgtgcttgggaacccccactccccactccccacatcccaacatcctggtgtctgtccccagtggggttggcgtgcatgtgtacatatgtatttgtgacttttctttggatttgttttgtgtttttgttgactagtcctggaaatgtttgaggctagacggggaggggccaggacccacccactgctcctgggggatgaggtcctggttttaaagccccgtcatttcaagcgggtcgatcttccacattcactggagagactctccccacctctgtctgggtggggcgcggacccctcactgtgcgcctgtgcagggggtgctggtgcacgtggcagtgtggatttccagtggtcacggtcttactgtttcaaggtttttaaataagaaaaccaaccctgccttcgcccatgcccgcccctgcccgcagttgccaaagagccgccttgtcgctgtgggcgtcagggcttggctggctcagtgcacaacccacagtggccttcagaggctcctcctgggactgggaaccgccgcagggccaggcggacggcgtgaggtttgtgttggggctggttctgcccatgctagggggtgggggagctcccaggacagaccagccttgtttctcatgtaatgcagtgacgctgtcattaaacacgtggattcatgtgtgg

SEQ ID NO: 190253 - protein, 615 aa, Artificial Sequence
  derived and/or modified sequence
MDSVAFEDVAVNFTHEEWALLGPSQKNLYRDVMRETIRNLNCIGMKWENQNIDDQHQNLRRNPRCDVVERFGKSKDGSQCGETLSQIRNSIVNKNTPARVDACGSSVNGEVIMGHSSLNCYIRVDTGHKHRECHEYAEKSYTHKQCGKGLSYRHSFQTCERPHTGKKPYDCKECGKTFSSPGNLRRHMVVKGGDGPYKCELCGKAFFWPSLLRMHERTHTGEKPYECKQCSKAFPVYSSYLRHEKIHTGEKPYECKQCSKAFPDYSSYLRHERTHTGEKPYKCKQCGKAFSVSGSLRVHERIHTGEKPYTCKQCGKAFCHLGSFQRHMIMHSGDGPHKCKICGKGFDFPGSARIHEGTHTLEKPYECKQCGKLLSHRSSFRRHMMAHTGDGPHKCTVCGKAFDSPSVFQRHERTHTGEKPYECKQCGKAFRTSSSLRKHETTHTGEQPYKCKCGKAFSDLFSFQSHETTHSEEEPYECKECGKAFSSFKYFCRHERTHSEEKSYECQICGKAFSRFSYLKTHERTHTAEKPYECKQCRKAFFWPSFLLRHERTHTGERPYECKHCGKAFSRSSFCREHERTHTGEKPYECKECGKAFSSLSSFNRHKRTHWKDIL

SEQ ID NO: 190254 - protein, 589 aa, Artificial Sequence
  derived and/or modified sequence
MDSVAFEDVAVNFTHEEWALLGPSQKNLYRDVMRETIRNLNCIGMKWENQNIDDQHQNLRRNPRCDVVERFGKSKDGSQCGETLSQIRNSIVNKNTPARVDACGSSVNGEVIMGHSSLNCYIRVDTGHKHRECHEYAEKSYTHKQCGKGLSYRHSFQTCERPHTGKKPYDCKECGKTFSSPGNLRRHMVVKGGDGPYKCELCGKAFFWPSLLRMHERTHTGEKPYECKQCSKAFPVYSSYLRHEKIHTGEKPYECKQCSKAFPDYSSYLRHERTHTGEKPYKCKQCGKAFSVSGSLRVHERIHTGEKPYTCKQCGKAFCHLGSFQRHMIMHSGDGPHKCKICGKGFDFPGSARIHEGTHTLEKPYECKQCGKLLSHRSSFRRHMMAHTGDGPHKCTVCGKAFDSPSVFQRHERTHTGEKPYECKQCGKAFRTSSSLRKHETTHTGEQPYKCKCGKAFSDLFSFQSHETTHSEEEPYECKECGKAFSSFKYFCRHERTHSEEKSYECQICGKAFSRFSYLKTHERTHTAEKPYECKQCRKAFFWPSFLLRHERTHTGERPYECKHCGKAFSRSSFCREHERTHTGEKPYE

SEQ ID NO: 190255 - DNA, 1848 bp, Artificial Sequence
  derived and/or modified sequence
atggacagcgtggccttcgaggacgtggccgtgaacttcacccacgaggagtgggccctgctgggccccagccagaagaacctgtacagagacgtgatgagagagaccatcagaaacctgaactgcatcggcatgaagtgggagaaccagaacatcgacgaccagcaccagaacctgagaagaaaccccagatgcgacgtggtggagagattcggcaagagcaaggacggcagccagtgcggcgagaccctgagccagatcagaaacagcatcgtgaacaagaacacccccgccagagtggacgcctgcggcagcagcgtgaacggcgaggtgatcatgggccacagcagcctgaactgctacatcagagtggacaccggccacaagcacagagagtgccacgagtacgccgagaagagctacacccacaagcagtgcggcaagggcctgagctacagacacagcttccagacctgcgagagaccccacaccggcaagaagccctacgactgcaaggagtgcggcaagaccttcagcagccccggcaacctgagaagacacatggtggtgaagggcggcgacggcccctacaagtgcgagctgtgcggcaaggccttcttctggcccagcctgctgagaatgcacgagagaacccacaccggcgagaagccctacgagtgcaagcagtgcagcaaggccttccccgtgtacagcagctacctgagacacgagaagatccacaccggcgagaagccctacgagtgcaagcagtgcagcaaggccttccccgactacagcagctacctgagacacgagagaacccacaccggcgagaagccctacaagtgcaagcagtgcggcaaggccttcagcgtgagcggcagcctgagagtgcacgagagaatccacaccggcgagaagccctacacctgcaagcagtgcggcaaggccttctgccacctgggcagcttccagagacacatgatcatgcacagcggcgacggcccccacaagtgcaagatctgcggcaagggcttcgacttccccggcagcgccagaatccacgagggcacccacaccctggagaagccctacgagtgcaagcagtgcggcaagctgctgagccacagaagcagcttcagaagacacatgatggcccacaccggcgacggcccccacaagtgcaccgtgtgcggcaaggccttcgacagccccagcgtgttccagagacacgagagaacccacaccggcgagaagccctacgagtgcaagcagtgcggcaaggccttcagaaccagcagcagcctgagaaagcacgagaccacccacaccggcgagcagccctacaagtgcaagtgcggcaaggccttcagcgacctgttcagcttccagagccacgagaccacccacagcgaggaggagccctacgagtgcaaggagtgcggcaaggccttcagcagcttcaagtacttctgcagacacgagagaacccacagcgaggagaagagctacgagtgccagatctgcggcaaggccttcagcagattcagctacctgaagacccacgagagaacccacaccgccgagaagccctacgagtgcaagcagtgcagaaaggccttcttctggcccagcttcctgctgagacacgagagaacccacaccggcgagagaccctacgagtgcaagcactgcggcaaggccttcagcagaagcagcttctgcagagagcacgagagaacccacaccggcgagaagccctacgagtgcaaggagtgcggcaaggccttcagcagcctgagcagcttcaacagacacaagagaacccactggaaggacatcctgtag

SEQ ID NO: 190256 - DNA, 1770 bp, Artificial Sequence
  derived and/or modified sequence
atggacagcgtggccttcgaggacgtggccgtgaacttcacccacgaggagtgggccctgctgggccccagccagaagaacctgtacagagacgtgatgagagagaccatcagaaacctgaactgcatcggcatgaagtgggagaaccagaacatcgacgaccagcaccagaacctgagaagaaaccccagatgcgacgtggtggagagattcggcaagagcaaggacggcagccagtgcggcgagaccctgagccagatcagaaacagcatcgtgaacaagaacacccccgccagagtggacgcctgcggcagcagcgtgaacggcgaggtgatcatgggccacagcagcctgaactgctacatcagagtggacaccggccacaagcacagagagtgccacgagtacgccgagaagagctacacccacaagcagtgcggcaagggcctgagctacagacacagcttccagacctgcgagagaccccacaccggcaagaagccctacgactgcaaggagtgcggcaagaccttcagcagccccggcaacctgagaagacacatggtggtgaagggcggcgacggcccctacaagtgcgagctgtgcggcaaggccttcttctggcccagcctgctgagaatgcacgagagaacccacaccggcgagaagccctacgagtgcaagcagtgcagcaaggccttccccgtgtacagcagctacctgagacacgagaagatccacaccggcgagaagccctacgagtgcaagcagtgcagcaaggccttccccgactacagcagctacctgagacacgagagaacccacaccggcgagaagccctacaagtgcaagcagtgcggcaaggccttcagcgtgagcggcagcctgagagtgcacgagagaatccacaccggcgagaagccctacacctgcaagcagtgcggcaaggccttctgccacctgggcagcttccagagacacatgatcatgcacagcggcgacggcccccacaagtgcaagatctgcggcaagggcttcgacttccccggcagcgccagaatccacgagggcacccacaccctggagaagccctacgagtgcaagcagtgcggcaagctgctgagccacagaagcagcttcagaagacacatgatggcccacaccggcgacggcccccacaagtgcaccgtgtgcggcaaggccttcgacagccccagcgtgttccagagacacgagagaacccacaccggcgagaagccctacgagtgcaagcagtgcggcaaggccttcagaaccagcagcagcctgagaaagcacgagaccacccacaccggcgagcagccctacaagtgcaagtgcggcaaggccttcagcgacctgttcagcttccagagccacgagaccacccacagcgaggaggagccctacgagtgcaaggagtgcggcaaggccttcagcagcttcaagtacttctgcagacacgagagaacccacagcgaggagaagagctacgagtgccagatctgcggcaaggccttcagcagattcagctacctgaagacccacgagagaacccacaccgccgagaagccctacgagtgcaagcagtgcagaaaggccttcttctggcccagcttcctgctgagacacgagagaacccacaccggcgagagaccctacgagtgcaagcactgcggcaaggccttcagcagaagcagcttctgcagagagcacgagagaacccacaccggcgagaagccctacgagtag

SEQ ID NO: 190257 - DNA, 1848 bp, Artificial Sequence
  derived and/or modified sequence
atggattcagtggcctttgaggatgtggcagtgaacttcactcacgaggagtgggccctgctggggcctagccagaagaatctgtaccgggacgtcatgagggaaaccatcagaaatctaaactgtattgggatgaagtgggaaaatcaaaacattgatgatcagcaccagaatctgcgaagaaatcctaggtgcgacgttgtggaacgcttcggtaaatctaaggatggatctcagtgcggagaaacgttgtcacagattagaaatagtatcgttaacaaaaatacacctgctagagtcgatgcctgcgggtcttcagttaacggggaggtgattatgggccactcatccctgaattgttatatcagagtcgacacagggcacaaacatagggagtgtcacgagtacgccgagaagtcctacacacacaagcaatgtgggaaaggattatcctacaggcattctttccagacttgtgaacgaccacacaccgggaagaagccctatgactgcaaggaatgcggcaaaactttctccagccccgggaacctgaggcgtcatatggtagtgaaggggggagatggcccctataaatgcgaactgtgtggaaaagcctttttttggccaagcctgctcagaatgcatgagagaacacatacaggggagaagccatatgagtgtaaacagtgcagtaaggccttccctgtctacagctcatatctgcgccacgaaaaaatccacacaggtgagaagccctacgaatgcaagcagtgtagcaaggcctttccagactattcctcatacctccgacatgagaggacacacacaggcgaaaaaccctacaagtgcaagcagtgtgggaaggctttctccgtctccgggtccctgcgagtccacgagaggatacatacaggcgaaaagccctatacgtgtaagcaatgcggcaaggcattttgtcacttgggatcatttcagcggcatatgataatgcactcaggagatggcccgcacaaatgcaaaatttgcggcaaaggcttcgatttcccaggcagtgctcggatccatgaaggcactcacacccttgagaagccctatgaatgtaagcagtgcggcaagttactctcacacaggtcctcgttcaggaggcacatgatggcccacacaggtgacggcccccacaaatgtacagtgtgcggcaaggccttcgactctccctctgtgttccagagacacgaacgcacgcacacaggggaaaaaccctacgagtgcaaacagtgcgggaaggcctttcgtacctcctccagtcttagaaaacacgagacaactcataccggagagcaaccctacaaatgtaaatgcggaaaggcctttagcgacttattctcatttcagtcacatgaaacgacccactctgaagaggagccttatgaatgcaaagagtgtggcaaggcattctcctcctttaagtacttttgccggcatgaaaggacacacagcgaggaaaagtcctacgagtgtcaaatttgcgggaaggcattttcaagatttagctaccttaagacccatgagcgtactcacaccgccgagaagccctacgaatgcaagcagtgccggaaagctttcttctggccctcgtttttattgaggcatgaacgcacccacactggagaacgcccttatgagtgtaaacactgcgggaaagccttcagcaggagctctttctgtcgcgagcacgaaagaacacacaccggggaaaagccgtatgagtgcaaagaatgtggtaaggctttctcttctctcagctcctttaatcgtcataaacggacccattggaaggacatcctttag

SEQ ID NO: 190258 - DNA, 1770 bp, Artificial Sequence
  derived and/or modified sequence
atggactctgtggcttttgaggatgtagcagtcaactttacacacgaagaatgggctctgctgggccctagccagaaaaatctctaccgggacgttatgcgcgagacaatcagaaacctaaactgcattgggatgaaatgggaaaatcaaaatattgacgaccaacaccagaacctccgccggaaccctcgatgcgacgtggtagaacgcttcggaaaaagcaaagatggatctcaatgcggagaaaccctgtcacagattcgaaatagcatcgtgaataagaacactcctgccagagtcgatgcttgcggctcttccgtgaatggagaagttataatgggacactccagtctcaactgttacatccgggtggacaccggccataagcacagagagtgtcacgagtatgccgagaagtcttacacacacaaacaatgcggaaaaggcctttcctaccggcactccttccagacttgtgagcgcccccacacaggcaaaaaaccatatgattgcaaagagtgtggtaagacgtttagttcccctggcaacctgaggaggcatatggtggtcaagggaggggacggcccatacaagtgtgaactttgcgggaaggctttcttttggccctctctgctccgcatgcatgaaaggacccatacaggggagaagccatatgaatgtaaacaatgctccaaggcctttcctgtttactcctcttaccttcgccacgagaagatccatactggggagaagccatacgagtgcaagcaatgcagcaaagcattccctgactatagtagctacctcagacatgagcgaacccataccggcgagaaaccgtataaatgcaagcagtgcggaaaagccttctctgtgtccggctctctaagggtacatgagaggatccacaccggggaaaagccctacacgtgcaagcagtgcggcaaagccttctgtcatttaggcagctttcagaggcacatgattatgcatagcggcgatggacctcataaatgtaagatttgcggaaagggctttgattttcctggcagcgcaagaatacatgaaggaacacataccttggagaaaccctatgagtgtaagcaatgcgggaaactgctgagccacagaagttcctttagacggcatatgatggcccacacaggagatggcccacacaaatgtacggtgtgtgggaaggctttcgatagcccctccgtttttcagcggcacgaacgcacccatactggagagaagccttacgagtgcaagcagtgcggcaaagcttttcggacaagcagttcccttcgtaaacacgagaccacccataccggagagcagccctataagtgtaagtgcggaaaggcattcagtgatctgttctcctttcagagtcacgagaccacccactccgaggaggaaccctacgagtgcaaagaatgtggcaaagcttttagttcctttaaatatttttgccggcacgaaaggacccatagcgaggagaagagctacgaatgccagatttgtggtaaagcgttctcccggttcagctacctgaagacacacgaacgcactcacactgcagaaaaaccttatgagtgcaagcaatgccggaaggccttcttctggcccagttttcttctccggcacgaaagaactcacactggtgaacggccctatgagtgtaagcattgtggcaaggcattcagccgatcgagtttttgtcgggagcatgaaaggacgcacacgggagaaaagccctatgagtag

SEQ ID NO: 190259 - DNA, 1848 bp, Artificial Sequence
  derived and/or modified sequence
atggactcagtggccttcgaggacgtggcggtgaatttcacgcacgaggagtgggccctcctcggtcccagccagaagaacttgtacagagatgttatgcgagaaacaatcagaaacctgaactgtatcgggatgaagtgggaaaaccaaaatattgacgatcagcatcagaatctgaggaggaacccaaggtgcgatgttgtggagcgctttggtaaaagcaaggatgggtcgcaatgcggggagacactgtcccagattaggaactctattgtcaacaaaaacacgcctgcgcgggttgatgcatgcggcagctcggttaatggcgaagtgattatggggcactcctctctgaactgctacatccgggtggacactggtcataaacatcgcgagtgtcatgaatatgccgagaaaagctacactcataagcaatgcggaaaggggctatcataccgacatagcttccaaacatgcgaaagaccacacactggaaagaaaccctacgattgtaaggagtgcggaaagacattcagttctcccggaaatctgaggcgccacatggttgtgaaagggggggatgggccttataaatgcgagttgtgcggtaaagcattcttctggcccagtttgcttaggatgcatgagcgaacacacactggtgaaaagccgtacgaatgcaagcagtgctctaaggcctttccagtgtactcctcctatctcagacatgagaaaattcataccggcgagaagccctatgagtgcaaacagtgctcaaaggcttttccagactattctagctacttgcgtcacgagaggacacataccggtgaaaaaccttacaaatgcaagcagtgcggcaaggcattttccgtttccgggagtcttcgggtgcatgaaagaatccacaccggggaaaaaccctacacctgtaaacaatgtggcaaggccttctgtcatctggggtcatttcagcgccacatgatcatgcacagcggagacggtccacataaatgtaaaatttgcgggaagggctttgattttccaggctccgcccggatccatgaaggtactcacacgctcgagaaaccatacgaatgtaaacagtgtggcaaactgttatcacatcgctcctcattccgcagacatatgatggctcatacgggggatggccctcacaaatgtacagtttgtggtaaagccttcgattcccctagtgtgttccaaagacacgagcggactcacacgggagaaaagccctatgagtgtaagcagtgcgggaaagctttccggactagctccagcttaaggaagcatgagacgacccatactggagaacaaccatataaatgtaagtgtgggaaggccttcagcgacttgttctctttccagtctcacgagacaacccactccgaggaagagccctacgagtgtaaagaatgtggcaaagcttttagctctttcaaatacttctgtcgtcatgaaaggactcattccgaagagaaaagctacgaatgtcaaatttgcggcaaggcgttttcccggttctcgtacctgaaaactcatgagcgaacacacaccgccgaaaaaccttacgagtgcaagcagtgtagaaaagcctttttctggccttcgtttttgctcaggcacgaaaggactcacacaggagaaaggccatacgagtgtaaacactgcgggaaagccttcagccggtcttctttctgccgggagcacgagcgcacccatacgggcgaaaagccctacgaatgcaaagaatgtgggaaggccttcagctcactctcgtccttcaatagacataagcgcacacactggaaggacatactgtag

SEQ ID NO: 190260 - DNA, 1848 bp, Artificial Sequence
  derived and/or modified sequence
atggattctgtggcctttgaagatgtggccgtgaacttcacccatgaggagtgggccctgctgggccccagccagaagaacctgtacagagatgtgatgagggagaccatccggaacctgaactgcatcggcatgaagtgggagaaccagaacattgatgaccagcaccagaacctgcggaggaacccccgctgtgatgtggtggagagatttgggaagagcaaggatggcagccagtgtggggagaccctgagccagatccggaacagcatcgtgaacaagaacaccccagcccgggtggatgcctgtggcagctctgtgaatggagaggtgatcatgggccacagcagcctgaactgctacatccgggtggacaccggccacaagcaccgggagtgccacgagtatgcagagaagagctacacccacaagcagtgtgggaagggcctgagctaccgccacagcttccagacctgtgagcggccccacacaggcaagaagccctatgactgcaaggaatgtgggaagaccttcagcagccctggcaacctgcggcggcacatggtggtgaagggaggagatggcccctacaagtgtgagctgtgtgggaaggccttcttctggcccagcctgctgaggatgcatgagaggacccacactggagagaagccctatgagtgcaagcagtgcagcaaggccttccctgtgtacagcagctacctgcggcatgagaagatccacactggagagaagccctatgagtgcaagcagtgcagcaaggccttcccagactacagcagctacctgcggcatgagaggacccacactggagagaagccctacaagtgcaagcagtgtgggaaggccttctctgtgtctggcagcctgcgggtgcatgagcgcatccacactggagagaagccctacacctgcaagcagtgtgggaaggccttctgccacctgggcagcttccagaggcacatgatcatgcacagcggagatggcccccacaagtgcaagatctgtgggaagggctttgacttccctggcagcgcccgcatccacgagggcacccacaccctggagaagccctatgagtgcaagcagtgtgggaagctgctgagccacaggagcagcttcagaagacacatgatggcccacactggagatggcccccacaagtgcaccgtgtgtgggaaggcctttgacagccccagcgtcttccagagacatgagaggacccacactggagagaagccctatgagtgcaagcagtgtgggaaggccttccgcaccagcagcagcctgaggaagcatgagaccacccacactggagagcagccctacaagtgcaagtgtgggaaggccttcagtgacctcttctccttccagagccatgagaccacccacagcgaggaggagccctatgagtgcaaggaatgtgggaaggccttcagcagcttcaagtacttctgcagacatgagaggacccacagcgaggagaagagctatgagtgccagatctgtgggaaggccttcagccgcttctcctacctgaagacccatgagaggacccacacagctgagaagccctatgagtgcaagcagtgcaggaaggccttcttctggcccagcttcctgctgcggcatgagaggacccacactggagagcggccctatgagtgcaagcactgcggcaaggccttcagccgcagcagcttctgccgggagcacgagaggacccacactggagagaagccctatgagtgcaaggaatgtgggaaggccttcagcagcctgagcagcttcaacagacacaagaggacccactggaaggacatcctgtag

SEQ ID NO: 190261 - DNA, 1770 bp, Artificial Sequence
  derived and/or modified sequence
atggattctgtggcctttgaagatgtggccgtgaacttcacccatgaggagtgggccctgctgggccccagccagaagaacctgtacagagatgtgatgagggagaccatccggaacctgaactgcatcggcatgaagtgggagaaccagaacattgatgaccagcaccagaacctgcggaggaacccccgctgtgatgtggtggagagatttgggaagagcaaggatggcagccagtgtggggagaccctgagccagatccggaacagcatcgtgaacaagaacaccccagcccgggtggatgcctgtggcagctctgtgaatggagaggtgatcatgggccacagcagcctgaactgctacatccgggtggacaccggccacaagcaccgggagtgccacgagtatgcagagaagagctacacccacaagcagtgtgggaagggcctgagctaccgccacagcttccagacctgtgagcggccccacacaggcaagaagccctatgactgcaaggaatgtgggaagaccttcagcagccctggcaacctgcggcggcacatggtggtgaagggaggagatggcccctacaagtgtgagctgtgtgggaaggccttcttctggcccagcctgctgaggatgcatgagaggacccacactggagagaagccctatgagtgcaagcagtgcagcaaggccttccctgtgtacagcagctacctgcggcatgagaagatccacactggagagaagccctatgagtgcaagcagtgcagcaaggccttcccagactacagcagctacctgcggcatgagaggacccacactggagagaagccctacaagtgcaagcagtgtgggaaggccttctctgtgtctggcagcctgcgggtgcatgagcgcatccacactggagagaagccctacacctgcaagcagtgtgggaaggccttctgccacctgggcagcttccagaggcacatgatcatgcacagcggagatggcccccacaagtgcaagatctgtgggaagggctttgacttccctggcagcgcccgcatccacgagggcacccacaccctggagaagccctatgagtgcaagcagtgtgggaagctgctgagccacaggagcagcttcagaagacacatgatggcccacactggagatggcccccacaagtgcaccgtgtgtgggaaggcctttgacagccccagcgtcttccagagacatgagaggacccacactggagagaagccctatgagtgcaagcagtgtgggaaggccttccgcaccagcagcagcctgaggaagcatgagaccacccacactggagagcagccctacaagtgcaagtgtgggaaggccttcagtgacctcttctccttccagagccatgagaccacccacagcgaggaggagccctatgagtgcaaggaatgtgggaaggccttcagcagcttcaagtacttctgcagacatgagaggacccacagcgaggagaagagctatgagtgccagatctgtgggaaggccttcagccgcttctcctacctgaagacccatgagaggacccacacagctgagaagccctatgagtgcaagcagtgcaggaaggccttcttctggcccagcttcctgctgcggcatgagaggacccacactggagagcggccctatgagtgcaagcactgcggcaaggccttcagccgcagcagcttctgccgggagcacgagaggacccacactggagagaagccctatgaatag

SEQ ID NO: 190262 - DNA, 1848 bp, Artificial Sequence
  derived and/or modified sequence
atggacagcgtggccttcgaggacgtggccgtgaacttcacccacgaagagtgggccttgttagggccatcacagaaaaacctctaccgcgatgtaatgcgcgaaaccattcgaaaccttaattgtatcggcatgaagtgggaaaaccaaaacattgatgaccagcaccagaatctccgacgcaatccaagatgcgacgtggtcgagcggtttggaaagtctaaggatggaagccaatgtggggagactttgtctcagatccgcaattctatagttaataaaaatacacctgccagggttgatgcttgtgggtctagcgtgaacggcgaggtaatcatggggcactcctcactcaattgctatatcagggttgacacaggtcacaaacatagagagtgtcatgagtacgccgaaaagtcctacacccataaacagtgcgggaagggactcagttatcggcactcttttcagacatgcgagaggccccacacagggaagaagccttacgattgcaaagaatgcggcaagaccttttccagtccggggaatctccggaggcatatggtggtcaaggggggcgacgggccttacaaatgcgaattatgtggcaaggcttttttttggccctcactccttcggatgcatgaacgcacacataccggtgaaaaaccatacgaatgtaaacagtgctcgaaggcatttccggtgtactcctcctatttacgccacgagaagattcacaccggggaaaaaccgtatgagtgcaaacagtgctctaaggctttcccggactacagctcctacctgcgccatgaacgcacccacacaggcgagaaaccatacaaatgtaaacagtgcggaaaagccttctcagtatctggctccctgagggtccatgaaaggatacacacaggcgagaaaccgtatacgtgtaagcagtgtggcaaagccttttgtcatctggggtccttccagaggcatatgattatgcactcaggcgatgggccccacaagtgtaaaatctgcggaaagggttttgatttcccaggatccgccaggattcacgagggcacacacaccctggagaagccttacgagtgcaagcagtgcggtaagttgctgtcccaccgctccagtttccgtcgtcatatgatggcacacaccggggatggtccccataagtgtacagtatgcgggaaagcatttgactctccaagtgtattccaaagacacgaacggacacacacaggtgagaagccttatgaatgcaagcaatgtggcaaagccttccgaacctcctcttccttgagaaagcatgaaaccacccatacgggcgagcagccctacaaatgtaaatgtggcaaagcatttagtgatttgttttcctttcagagtcacgagaccacccattcggaggaggaaccatatgagtgcaaggagtgtgggaaagctttttcgagcttcaagtacttttgcaggcacgagagaacgcatagtgaagagaaatcatacgaatgtcagatctgtgggaaagcatttagtcgattttcgtacctgaagacccacgaacggactcataccgctgagaaaccatatgaatgcaagcagtgccgtaaggcatttttctggcctagtttccttctccgtcacgaaagaactcatactggcgagcgcccctatgagtgcaagcactgcgggaaagctttcagccgatctagcttttgtcgggagcacgaacgaactcataccggggaaaaaccatatgagtgtaaagaatgcggtaaggccttctcctcactatcatcttttaaccgacacaagcgaacccactggaaagatatactttag

SEQ ID NO: 190263 - DNA, 1770 bp, Artificial Sequence
  derived and/or modified sequence
atggacagcgtggccttcgaggacgtggccgtgaacttcacccacgaagaatgggctctgctcggtccatctcagaagaacctgtatagagacgttatgcgggaaacaatccgtaacctgaactgcattgggatgaaatgggaaaatcagaacatcgacgatcagcaccaaaaccttaggcgcaacccccgatgcgatgtcgtggagcgtttcgggaagagcaaagatggaagccagtgtggagaaacgctatcacagatacgcaattccatcgtgaataagaacacacccgcccgcgtcgacgcctgtggaagcagtgtcaacggcgaggtgattatgggccactcgagtttgaattgttacatccgagttgacacgggtcataagcatcgagagtgccacgaatacgctgaaaaaagttatactcacaaacagtgcggcaagggcttaagctatagacactcgtttcagacatgtgaaagacctcacacaggcaagaagccatacgattgtaaagagtgcggtaagaccttcagtagccctggtaacttgcgacgtcacatggttgtcaagggtggtgatggcccctataaatgtgagctgtgcgggaaggccttcttctggcctagcttactcagaatgcacgagagaacccacacgggtgaaaaaccatatgaatgtaaacaatgctccaaagcctttcccgtgtacagctcctacctccgacatgagaaaatccatacaggtgagaagccttatgaatgcaagcagtgcagcaaagctttccccgattattcaagctatctcagacatgagcgtacgcacaccggtgagaagccctacaaatgcaagcagtgcggaaaagctttctccgttagcggttctctgcgggttcatgaacgtattcatactggcgagaagccttatacctgcaaacagtgcgggaaggcgttctgccacctggggtcctttcaacgccacatgattatgcattccggcgacggccctcataaatgtaagatatgtgggaagggctttgacttcccggggagtgcacggatccacgaaggtacacataccctggagaaaccctacgaatgtaagcaatgtggaaaactgctgtctcatagatcatctttcaggcgccatatgatggcacacactggcgacggtcctcacaaatgcactgtgtgcgggaaggcgtttgattcaccaagtgtgtttcaacgacacgaacgcacacatacaggggagaaaccctatgagtgtaagcagtgtggaaaggcattcaggacaagcagctctctccggaagcacgagaccacacataccggggagcagccctataaatgtaaatgcgggaaagccttttccgaccttttttcttttcagagccacgaaactacccatagcgaggaggagccatacgaatgcaaagagtgtggaaaagcattcagctctttcaaatatttttgtagacatgagcgaacccacagtgaggaaaagtcctacgagtgccaaatttgtggaaaagccttctcccggtttagttacctcaaaacacacgagcgaacacacaccgctgagaagccctatgagtgcaaacagtgcagaaaggccttcttctggccaagtttccttctacgccacgagaggacccacacaggtgagcgtccttatgagtgtaagcattgcggtaaagcttttagccgctcgagtttctgtagggaacacgaaaggacccacaccggtgagaaaccctatgaatag

SEQ ID NO: 190264 - DNA, 1848 bp, Artificial Sequence
  derived and/or modified sequence
atggacagcgtggccttcgaggacgtggccgtgaacttcacccacgaggagtgggccctgcttgggcctagccagaaaaatctgtatagggacgttatgagggaaacaattcggaatctgaactgcatcgggatgaaatgggagaatcagaatattgacgaccagcaccagaatctccgccgcaatcctaggtgcgatgtagtcgaacggttcggaaagtctaaggatggatcacagtgtggggaaactctctcccagattagaaattctattgtcaacaaaaatactcccgctagagtggatgcttgtgggagctctgtgaacggtgaggtgattatgggtcactcgtccctaaattgttacatcagggtggataccggtcacaaacatagagaatgccacgagtatgcagaaaagtcctatacacataagcaatgcggaaagggcctctcgtataggcactcttttcagacatgcgaacgacctcacacaggaaaaaagccttacgattgtaaagagtgcggcaagaccttctcctcaccaggcaacctgcgtcgccacatggtggtcaagggcggtgacggaccctacaagtgtgaattatgcggaaaagccttcttttggcctagtttgctccgaatgcatgagcggacgcatacaggtgaaaaaccatatgaatgtaagcagtgttctaaggcatttcctgtgtatagctcgtatctccgccacgagaaaatccacaccggcgagaaaccgtacgagtgtaaacaatgctctaaagcgttcccagattactcttcatatctaaggcacgaacgaacccacacgggggagaagccttataagtgtaaacagtgtggtaaggcgtttagcgtgagcgggagtttacgggtgcacgagcggattcacactggcgagaagccttacacttgtaaacagtgcggcaaggccttctgtcacctcgggagtttccaaagacacatgatcatgcacagcggcgatgggcctcacaaatgcaaaatctgcggtaaggggtttgacttcccagggtctgcacggattcacgaaggcacgcacacactcgagaagccgtatgaatgtaagcaatgtggtaagctgctgagtcaccgctcaagctttagacggcacatgatggcacatacaggcgacggaccccataagtgtacagtatgtggcaaggcgttcgatagcccttctgtgtttcagagacatgagaggactcacaccggcgagaagccgtacgagtgcaagcagtgtggaaaggcctttcgcaccagtagttccctgaggaagcatgagactacccacacaggagaacagccctacaagtgcaagtgcggcaaggcgttttccgacctgttctccttccaatcacacgagaccactcatagcgaggaagagccctacgaatgtaaggagtgcgggaaggccttctccagtttcaagtacttctgtcggcacgagcggacccactctgaagagaaatcttatgagtgccaaatctgcggcaaggccttttcgagattcagctatctgaaaactcacgaacgcacgcatactgctgagaagccctatgaatgtaaacagtgtcgtaaagccttcttctggccaagcttcctgctgcggcatgagagaacgcacacgggggaacgaccgtacgaatgcaagcattgcggtaaagctttttcaaggagttccttctgccgagagcatgagagaactcacacgggtgagaagccatacgagtgtaaggagtgcggaaaagccttttccagcctcagctcattcaacaggcacaaacgaactcactggaaagacatactgtag

SEQ ID NO: 190265 - DNA, 1848 bp, Artificial Sequence
  derived and/or modified sequence
atggacagcgtggcattcgaagacgtggctgtgaatttcactcatgaggaatgggccttgcttgggccttcacagaagaatctttatcgcgatgtcatgcgtgagaccatcagaaacctgaactgtattggaatgaagtgggaaaaccagaatatcgatgatcagcatcagaatcttcgaaggaaccctaggtgcgatgtggttgaaaggtttgggaagtcaaaagatggcagccaatgcggggagacactgagtcagattcggaattcaatcgtaaacaaaaacacaccagctcgggtggatgcgtgtggcagctccgttaacggggaggtgataatggggcactcttccctgaactgctatatccgtgttgataccggacataagcatagagagtgccacgaatacgctgagaagtcctatacacataaacaatgcgggaagggcctgtcatacaggcattctttccagacttgcgaaagacctcacactggcaagaagccttatgactgcaaagagtgcggaaagacattctcctctcctggcaacctccgccgacatatggtcgtcaaggggggagacggtccatacaagtgcgagctgtgcggcaaagcgttcttttggcctagcttgttgagaatgcacgaacggactcatacgggggaaaagccttacgagtgcaaacagtgcagtaaagccttcccagtctacagctcttatttgcgccatgagaagattcataccggagagaaaccctatgaatgtaagcagtgctccaaggccttcccggactactcttcctacttgagacatgaacggactcatactggcgagaaaccgtacaagtgtaaacagtgtggaaaagcctttagtgtgagcggatctctgagagtccacgagaggattcacacaggggaaaagccatacacttgcaagcagtgtggcaaggcattctgccacctcggatctttccagcgccacatgattatgcactcaggcgacgggcctcataaatgcaaaatttgtggcaagggcttcgatttcccagggagcgctaggatccatgaaggtacccacacactcgagaaaccgtacgagtgcaaacagtgcggtaagctgttaagtcatagatcgagctttcggcgacatatgatggctcatactggagatggcccacacaagtgcacagtgtgcggcaaagccttcgacagccctagtgtgttccagcgccacgagaggacacacacaggggagaagccctacgaatgcaagcaatgtggaaaagctttcagaactagcagctcactccgtaaacatgagacaacccacacaggagaacagccttacaaatgtaaatgtggcaaggccttctctgatctgttctctttccagagtcacgagacgacccactcggaggaggagccatatgagtgcaaagagtgcgggaaggctttctcatccttcaaatatttctgtagacacgagcgcactcattccgaggagaagagttacgaatgccagatttgtggcaaagcgttctcccgctttagctatctgaaaacccacgagagaacacatactgcggagaagccctacgagtgtaagcaatgccggaaggccttcttctggccttccttcctgctacggcatgagcgaacgcatacaggcgaaaggccctacgagtgcaaacactgtgggaaggccttctctaggtcgtcattttgtagagaacacgagcgcacacatacaggggaaaagccttacgagtgtaaagagtgcgggaaggcattctcctcgctgagctctttcaataggcataagcggacacactggaaagatattctgtag

SEQ ID NO: 190266 - DNA, 1770 bp, Artificial Sequence
  derived and/or modified sequence
atggatagcgttgcatttgaagatgtggccgtcaacttcacccacgaggagtgggcactattgggaccttcccagaaaaatctgtaccgggacgtgatgagagaaacgattcgcaatttgaattgcatcggcatgaaatgggaaaatcaaaatattgacgaccaacaccaaaatctgcgaagaaatccacgctgcgatgtcgtggagaggttcggtaagagcaaagatggcagtcagtgtggcgagaccctatcgcagattagaaacagcattgtaaacaagaatacaccagcacgagtcgacgcttgtggctccagtgttaacggggaagtgatcatgggtcatagctcgcttaactgttatatccgggtcgacacggggcataagcaccgggagtgccacgagtatgctgagaaaagttacacacataagcagtgcggaaaggggctgtcatacagacattcctttcagacttgcgaacggccacacactggcaagaaaccctacgattgtaaggagtgcgggaaaactttcagcagcccgggaaatctacgcagacacatggtggtgaagggtggggatggtccttacaaatgcgaactgtgcggtaaggccttcttttggccctccctgttacgaatgcacgaacgtacgcacaccggtgaaaaaccctatgaatgtaaacagtgttctaaggctttccctgtctatagtagctatctgagacacgagaaaatacacacaggcgagaaaccatacgagtgtaagcagtgcagcaaagccttccccgactattcttcatacttacgccatgaacggacacacacaggggagaagccatacaaatgcaagcagtgtggtaaagcattttcagtgtctggcagcctcagagtccatgagcgcatccataccggggaaaaaccatacacttgcaagcaatgcggaaaagctttttgccatcttgggtcctttcagcggcacatgatcatgcacagcggcgacggcccacataaatgtaagatctgcggcaaaggcttcgatttccccggatccgctcggattcatgagggtacacatactctggagaagccttatgaatgtaagcagtgcggtaagcttcttagtcaccggagctcttttagacgacacatgatggcgcacactggcgatggaccccataaatgtacagtctgtggtaaggcgtttgacagtccgtccgtgttccagcggcacgagagaacacataccggcgaaaagccttacgaatgtaagcagtgtggaaaagcctttcggaccagctcttctctgcggaaacacgagaccacacacaccggggaacagccgtataagtgtaagtgcggcaaagcatttagtgatttatttagttttcagagtcatgaaaccactcatagcgaagaggaaccatacgagtgtaaggagtgtggaaaggccttctccagcttcaagtacttctgcagacatgaacgcacgcacagcgaggaaaaaagctacgagtgtcagatatgtgggaaggccttttcccgcttcagctacctcaagacccacgaacgcactcatacagccgagaaaccgtacgaatgtaagcagtgtcgaaaagccttcttttggcctagttttctgctcaggcacgaacggacccatactggcgagcgcccttacgagtgtaagcactgtggcaaggctttctcccggtcttccttctgtagagaacatgagagaactcacacaggcgagaagccctacgaatag

SEQ ID NO: 190267 - DNA, 1848 bp, Artificial Sequence
  derived and/or modified sequence
atggacagtgtggcttttgaagatgtagcggtaaacttcacccatgaagaatgggccctgcttgggccaagccaaaagaacctgtatagagacgtcatgcgggagaccatcagaaatttgaattgtatagggatgaaatgggagaatcaaaacattgacgaccaacatcagaatttgcggagaaatccgagatgtgacgtggtggaaaggttcggaaaatccaaagatggcagtcagtgcggcgagactctgtcacagatcagaaactcaatagttaataaaaatacacccgctagagtcgacgcatgcggatcgagcgttaatggggaagtaatcatgggacactctagtctgaactgctatatccgggtcgatactggtcataagcatcgggaatgccacgagtacgccgaaaaatcctacactcacaaacaatgcggcaagggactgtcttacaggcattcttttcagacatgtgaaagaccccacacgggcaagaaaccctacgactgtaaagaatgcggcaagactttttccagccccggtaatctgcggagacatatggttgttaaaggcggtgatggcccatataagtgtgaactgtgtggtaaggctttcttttggcccagcctcctacgaatgcatgagagaacacacaccggcgaaaagccctatgagtgcaagcagtgttccaaggcgtttccagtctattctagctacttacgtcatgaaaaaatccacacaggcgaaaagccttacgagtgcaagcagtgcagtaaggcattccctgactatagtagctatctcaggcatgagagaacccacacgggcgaaaaaccctacaagtgcaagcaatgtggtaaggccttcagcgtgagcggttccctacgggtgcacgagagaatccataccggcgagaaaccatatacctgcaaacagtgtggaaaggccttttgccacctgggaagtttccagcggcatatgatcatgcattctggtgatggaccccacaagtgcaaaatctgtggcaaggggttcgattttccaggctctgcgcgtatccatgaaggtacccatactttggagaagccctacgagtgcaaacagtgtggaaaactgcttagtcatcggagttccttccggagacatatgatggcacacactggagatggccctcacaagtgcacggtgtgcggcaaggcctttgactctcccagtgtgtttcagcgtcatgaacgtacccacacgggcgagaaaccatatgagtgcaagcagtgcggcaaggcatttaggacatcttcctctctccgcaaacatgaaaccacgcacaccggggagcaaccctacaaatgcaaatgcggcaaagccttttctgatctgttcagtttccaaagtcatgaaacgacccactctgaggaggagccctatgagtgcaaagaatgcgggaaagcattttcctcatttaagtatttctgtagacacgaacggacgcattcagaagaaaaaagctatgagtgccaaatctgtggtaaggcattcagcaggttttcctatttgaaaacgcatgagcgcacacatacagccgaaaagccttacgaatgcaaacaatgtagaaaggcatttttttggcctagctttctcctgaggcatgagaggacacatacaggggagcggccttacgagtgtaaacattgcgggaaggcattttcaaggagcagtttttgccgtgagcacgaacggacacataccggagaaaaaccttatgagtgtaaggaatgcgggaaagctttctcttccctgagcagcttcaatcgccacaagcggactcactggaaggacatcctttag

SEQ ID NO: 190268 - DNA, 2443 bp, Artificial Sequence
  derived and/or modified sequence
atggactcagtggcctttgaggatgtggctgtgaacttcacccatgaggagtgggctttgctgggtccatcacagaagaatctctacagagatgtgatgcgagaaaccattaggaacctgaactgtataggaatgaaatgggaaaaccagaacattgatgatcagcaccaaaatctcaggagaaatccaaggtgtgatgtggtagagagatttggtaaaagtaaagatggtagtcagtgtggagaaaccttaagccagattcgaaatagtattgtaaacaagaacactcccgccagagtagatgcatgtggaagcagtgtgaatggagaagtcataatgggtcattcatccctgaattgctacatcagagttgatactggacacaaacaccgggagtgtcatgaatatgcagagaagtcatatacacataagcagtgtgggaaaggcttaagttatcgccactcctttcaaacatgtgaaaggcctcacactggaaagaaaccctatgattgtaaggaatgtggaaaaaccttcagttctcctggaaaccttcgaagacatatggtagtaaaaggtggagatggaccttataaatgtgaattgtgtgggaaagcctttttttggcccagtttattacgtatgcatgaaagaactcacactggagagaaaccatatgaatgtaagcagtgttctaaagccttccctgtttacagttcctatctaagacatgaaaaaatacacactggggagaaaccgtatgaatgtaagcagtgttctaaagccttccctgattacagttcatatctaagacatgaaagaactcacactggagagaaaccctacaaatgtaaacaatgtgggaaagccttcagtgtttccggttcccttcgagtacatgaaagaattcacactggagagaaaccctatacatgtaaacagtgtgggaaagcgttttgtcatcttggaagctttcaaagacacatgataatgcacagtggagatggacctcataaatgtaagatatgtgggaaaggctttgattttcctggttcagcacgaattcatgaaggaactcacactctagagaaaccctatgaatgtaagcaatgtgggaaattgttatctcatcgctcaagctttcgaagacacatgatggcacacactggagatggccctcataaatgcacagtatgtgggaaagcctttgattctcctagtgtatttcaaagacatgaaaggactcacactggagagaaaccctatgaatgcaagcaatgtgggaaagccttccgtacttccagttcccttcgaaaacatgaaacaacacacactggagagcaaccctataaatgtaaatgtggaaaagcttttagtgatttattttcctttcaaagtcatgaaacaacacacagtgaagaggagccttatgaatgtaaggagtgtgggaaagcatttagttcttttaaatacttttgtcgccatgaaaggactcacagtgaagaaaaatcttatgagtgtcaaatttgtggcaaagccttcagtcgtttcagttacttaaaaactcatgaaaggactcacacggcagagaagccatatgaatgtaagcaatgcaggaaagcattcttttggccctctttccttctaagacatgaaaggactcacactggagaaagaccctatgaatgtaaacactgtggtaaagccttcagtcgttccagtttctgtcgagaacatgaaagaactcacactggagagaagccctatgaatgtaaggaatgtgggaaagccttcagttctctcagttcctttaatagacataaaaggacacactggaaggatattctataagtgtatggaatgtgggaaagcattcattggttttatcacattcagatacttgaaagaaataaatcctgtgaatgtaaacgtggtaaagccttaagaagtttccaggctgggcgcagcggctcacacctgtaatcccagcactttgagaggccgaggagggcagatcacgaggccaggagatcgagaccagcctggctaacatgggaaaccctgtctctactaaaaatacggaaaaaaaaaaaaatagccaggcatagttgctcacacctgtagtcctagctactcaggaggctgaggcaggagaatcccttgaacccgggaggtggaggttgcagtgagccgagattgcactactgcactccagcttgggtgctagagcgagactccatctcaaaaaaaaaaaaaaaagtttccatttctttcaaatagagttgctgcctgctatatgcaagaagattggttccagtacaccctgagtatacctaaatccacagatgccagctcttttataaaatggaatattcgcatgtacctacccacattctcctgtatactctataaatgtctagattaattaaaatatctcatgcattgt

SEQ ID NO: 190269 - protein, 258 aa, Artificial Sequence
  derived and/or modified sequence
MEEMKKTAIRLPKGKQKPIKTEWNSRCVLFTYFQGDISSVVDEHFSRALSNIKSPQELTPSSQSEGVMLKNDDSMSPNQWRYSSPWTKPQPEVPVTNRAANCNLHVPGPMAVNQFSPSLARRASVRPGELWHFSSLAGTSSLEPGYSHPFPARHLVPEPQPDGKREPLLSLLQQDRCLARPQESAARENGNPGQIAGSTGLLFNLPPGSVHYKKLYVSRGSASTSLPNETLSELETPGKYSLTPPNHWGHPHRYLQHL

SEQ ID NO: 190270 - protein, 115 aa, Artificial Sequence
  derived and/or modified sequence
MKKTAIRLPKGKQKPIKTEWNSRCVLFTYFQGDISSVVDEHFSRALSNIKSPQELTPSSQSEGVMLKNDKKLYVSRGSASTSLPNETLSELETPGKYSLTPPNHWGHPHRYLQHL

SEQ ID NO: 190271 - protein, 163 aa, Artificial Sequence
  derived and/or modified sequence
  misc_feature (1)..(1): Xaa can be any naturally occurring amino acid
XISSVVDEHFSRALSNIKSPQELTPSSQSEGVMLKNDDSMSPNQWRYSSPWTKPQPEVPVTNRAANCNLHVPGPMAVNQFSPSLARRASVRPGELWHFSSLAGTSSLEPGYSHPFPARHLVPEPQPDGKHKKLYVSRGSASTSLPNETLSELETPGKYSLTPP

SEQ ID NO: 190272 - protein, 60 aa, Artificial Sequence
  derived and/or modified sequence
TPSSQSEGVMLKNDKKLYVSRGSASTSLPNETLSELETPGKYSLTPPNHWGHPHRYLQHL

SEQ ID NO: 190273 - DNA, 777 bp, Artificial Sequence
  derived and/or modified sequence
atggaggagatgaagaagaccgccatcagactgcccaagggcaagcagaagcccatcaagaccgagtggaacagcagatgcgtgctgttcacctacttccagggcgacatcagcagcgtggtggacgagcacttcagcagagccctgagcaacatcaagagcccccaggagctgacccccagcagccagagcgagggcgtgatgctgaagaacgacgacagcatgagccccaaccagtggagatacagcagcccctggaccaagccccagcccgaggtgcccgtgaccaacagagccgccaactgcaacctgcacgtgcccggccccatggccgtgaaccagttcagccccagcctggccagaagagccagcgtgagacccggcgagctgtggcacttcagcagcctggccggcaccagcagcctggagcccggctacagccaccccttccccgccagacacctggtgcccgagccccagcccgacggcaagagagagcccctgctgagcctgctgcagcaggacagatgcctggccagaccccaggagagcgccgccagagagaacggcaaccccggccagatcgccggcagcaccggcctgctgttcaacctgccccccggcagcgtgcactacaagaagctgtacgtgagcagaggcagcgccagcaccagcctgcccaacgagaccctgagcgagctggagacccccggcaagtacagcctgaccccccccaaccactggggccacccccacagatacctgcagcacctgtag

SEQ ID NO: 190274 - DNA, 348 bp, Artificial Sequence
  derived and/or modified sequence
atgaagaagaccgccatcagactgcccaagggcaagcagaagcccatcaagaccgagtggaacagcagatgcgtgctgttcacctacttccagggcgacatcagcagcgtggtggacgagcacttcagcagagccctgagcaacatcaagagcccccaggagctgacccccagcagccagagcgagggcgtgatgctgaagaacgacaagaagctgtacgtgagcagaggcagcgccagcaccagcctgcccaacgagaccctgagcgagctggagacccccggcaagtacagcctgaccccccccaaccactggggccacccccacagatacctgcagcacctgtag

SEQ ID NO: 190275 - DNA, 492 bp, Artificial Sequence
  derived and/or modified sequence
tgaatcagcagcgtggtggacgagcacttcagcagagccctgagcaacatcaagagcccccaggagctgacccccagcagccagagcgagggcgtgatgctgaagaacgacgacagcatgagccccaaccagtggagatacagcagcccctggaccaagccccagcccgaggtgcccgtgaccaacagagccgccaactgcaacctgcacgtgcccggccccatggccgtgaaccagttcagccccagcctggccagaagagccagcgtgagacccggcgagctgtggcacttcagcagcctggccggcaccagcagcctggagcccggctacagccaccccttccccgccagacacctggtgcccgagccccagcccgacggcaagcacaagaagctgtacgtgagcagaggcagcgccagcaccagcctgcccaacgagaccctgagcgagctggagacccccggcaagtacagcctgacccccccctag

SEQ ID NO: 190276 - DNA, 183 bp, Artificial Sequence
  derived and/or modified sequence
acccccagcagccagagcgagggcgtgatgctgaagaacgacaagaagctgtacgtgagcagaggcagcgccagcaccagcctgcccaacgagaccctgagcgagctggagacccccggcaagtacagcctgaccccccccaaccactggggccacccccacagatacctgcagcacctgtag

SEQ ID NO: 190277 - DNA, 777 bp, Artificial Sequence
  derived and/or modified sequence
atggaagagatgaagaagaccgctattaggctgccaaagggaaagcagaagcccattaaaaccgagtggaactcacgatgtgtcttattcacctattttcagggcgacatcagcagcgtcgtggatgagcacttttctcgcgccctgagtaacataaagtccccacaggaactgaccccatcctcccagtccgaaggcgtcatgttgaagaacgatgattctatgtcacctaatcagtggcgttattcatctccatggaccaaacctcagcccgaagtgcctgtgactaatcgggcggctaattgcaacctgcacgtgccggggcctatggccgtgaatcagttcagcccctccctggcccgacgcgcctcagtgcgccccggcgaactttggcactttagttccttggccggtaccagctcacttgagccaggctattcacatccgttccccgcaaggcacctcgttcccgaacctcagcccgatggcaagagagagcctctcctttctttgctgcagcaggatcggtgcttggctaggccacaggagagtgccgctagggagaacggtaaccccggccagatagccggatcaaccggtttactgtttaacctcccacctgggtcagtgcattacaagaagctctatgtgtcccgcggctctgccagtacctccctgccaaatgaaaccctgagtgagttggaaacccccggcaagtacagccttactccgccaaatcattggggccatccacacaggtatcttcagcatttgtag

SEQ ID NO: 190278 - DNA, 348 bp, Artificial Sequence
  derived and/or modified sequence
atgaagaagaccgctataagactgccaaaaggcaagcagaaacctatcaaaacagaatggaacagccggtgtgtgctgttcacctattttcagggcgatataagcagcgtcgtcgacgagcatttttcacgggcattaagtaatataaagtccccccaggaactcacgccttcctcacagtccgaaggagtgatgctgaagaatgataagaaactgtatgtctctcgaggaagcgcaagtacctctctacccaatgagaccctgagcgagctggagacaccaggaaaatactcactgacacctcccaaccattggggccatcctcatcgctatcttcagcacctctag

SEQ ID NO: 190279 - DNA, 492 bp, Artificial Sequence
  derived and/or modified sequence
tgaatcagcagtgtcgtggacgagcatttctctcgggcattgtccaatatcaaaagccctcaagaactgacgcccagttcccagagtgaaggtgtaatgctaaagaatgacgactccatgagccccaaccagtggcgatacagctctccatggactaagccccagcctgaagtgcctgtcactaatcgggcagctaactgtaaccttcacgtgcccgggcctatggcggtcaaccagttctctccctccttggcgcgccgtgcaagcgtacggcccggggagctttggcattttagcagcttagccggtactagcagcctcgaacccgggtactcacacccattccccgcccgccacctggtgcctgagccacagcctgacggcaaacacaaaaaattatacgtttctcgtggatctgcctccacatctctgccgaatgaaaccctgagtgaactggagactcctggcaagtactcactaactccgccgtag

SEQ ID NO: 190280 - DNA, 183 bp, Artificial Sequence
  derived and/or modified sequence
acaccgtcctcacagtccgagggcgtgatgctgaaaaatgacaaaaaactctatgtatcaaggggatcagcctctacttcccttcctaacgaaaccctcagcgagctggagacacctggaaaatactccctcacacctccaaatcattggggtcacccccatcgatacctgcagcatctgtag

SEQ ID NO: 190281 - DNA, 777 bp, Artificial Sequence
  derived and/or modified sequence
atggaggagatgaagaagacagccatccggctgcccaagggcaagcagaagcccatcaagacagagtggaacagccgctgtgtgctcttcacctacttccagggcgacatcagctctgtggtggatgagcacttcagccgggccctgagcaacatcaagagcccccaggagctgacccccagcagccagagcgagggcgtgatgctgaagaatgatgacagcatgagccccaaccagtggagatacagcagcccctggaccaagccccagcctgaggtgcctgtgaccaacagagctgccaactgcaacctgcacgtgcccggccccatggctgtgaaccagttcagccccagcctggcccggcgggcctctgtgcggcctggagagctgtggcacttcagcagcctggccggcaccagcagcctggagcccggctacagccaccccttccctgcccggcacctggtgcctgagccccagccagatggcaagcgggagcccctgctgagcctgctgcagcaggaccgctgcctggcccggccccaggagagcgctgcccgggagaatggaaatcctggccagattgctggcagcacaggcctgctcttcaacctgcccccaggctctgtgcactacaagaagctgtatgtgtcccggggcagcgccagcaccagcctgcccaatgagaccctgtctgagctggagaccccaggcaagtacagcctgaccccacccaaccactggggccacccccaccgctacctgcagcacctgtag

SEQ ID NO: 190282 - DNA, 348 bp, Artificial Sequence
  derived and/or modified sequence
atgaagaagacagccatccggctgcccaagggcaagcagaagcccatcaagacagagtggaacagccgctgtgtgctcttcacctacttccagggcgacatcagctctgtggtggatgagcacttcagccgggccctgagcaacatcaagagcccccaggagctgacccccagcagccagagcgagggcgtgatgctgaagaatgacaagaagctgtatgtgtcccggggcagcgccagcaccagcctgcccaatgagaccctgtctgagctggagacccctgggaagtacagcctgaccccacccaaccactggggccacccccaccgctacctgcagcacctgtag

SEQ ID NO: 190283 - DNA, 492 bp, Artificial Sequence
  derived and/or modified sequence
tgaatcagctctgtggtggatgagcacttcagccgggccctgagcaacatcaagagcccccaggagctgacccccagcagccagagcgagggcgtgatgctgaagaatgatgacagcatgagccccaaccagtggagatacagcagcccctggaccaagccccagcctgaggtgcctgtgaccaacagagctgccaactgcaacctgcacgtgcccggccccatggctgtgaaccagttcagccccagcctggcccggcgggcctctgtgcggcctggagagctgtggcacttcagcagcctggccggcaccagcagcctggagcccggctacagccaccccttccctgcccggcacctggtgcctgagccccagccagatggcaagcacaagaagctgtatgtgtcccggggcagcgccagcaccagcctgcccaatgagaccctgtctgagctggagaccccaggcaagtacagcctgaccccaccctag

SEQ ID NO: 190284 - DNA, 183 bp, Artificial Sequence
  derived and/or modified sequence
acccccagcagccagagcgagggcgtgatgctgaagaatgacaagaagctgtatgtgtcccggggcagcgccagcaccagcctgcccaatgagaccctgtctgagctggagaccccaggcaagtacagcctgaccccacccaaccactggggccacccccaccgctacctgcagcacctgtag

SEQ ID NO: 190285 - DNA, 777 bp, Artificial Sequence
  derived and/or modified sequence
atggaggagatgaagaagaccgccatccggctgcccaagggcaagcagaagcctatcaagaccgaatggaattctcggtgtgtgctatttacctattttcagggagacatcagttctgtggtcgacgagcactttagccgtgcgctctctaacattaagtctccacaggaactcactccatcttcccaatctgagggcgtgatgctgaaaaatgacgatagtatgagtcccaaccagtggcgttactcctcgccatggaccaaacctcagccagaagtgcctgttaccaatagggctgccaattgtaatctgcatgttcctggtcccatggcagttaatcagttctcaccatctcttgctagacgagcctcagtgcggccaggcgaactgtggcatttttctagtctcgctgggacctcaagtctggagccaggatacagtcatccattccctgctcggcacctggtgcctgagccacagcccgacggaaagagggaacccttgctgagccttctgcagcaggaccggtgcctggcgcggccacaggaaagcgcggctcgcgaaaacggaaatcctggacagatagctggatccaccggtttactctttaatctacccccaggctctgttcattacaagaaactgtacgtaagcagagggtctgcttccacaagtctgccgaacgagaccctctcagagctcgaaactcccggcaaatacagcctgactcctccaaatcactggggacatcctcatagatatctccagcatctgtag

SEQ ID NO: 190286 - DNA, 348 bp, Artificial Sequence
  derived and/or modified sequence
atgaagaagaccgccatccggctgcccaagggcaagcagaagcccatcaaaactgagtggaatagccgttgcgtcttgtttacctacttccaaggagacatctcctcggtggtcgacgagcatttttccagagcactttctaacattaagtctccacaggagctaacaccatcaagccagagcgagggcgtaatgctgaagaacgacaaaaagctgtacgtctcaagaggatctgcctcaacatctttgcccaatgagacattgagtgagttggaaacccccggaaagtacagtttaactccccctaatcactgggggcacccacacagatacttgcagcatctgtag

SEQ ID NO: 190287 - DNA, 492 bp, Artificial Sequence
  derived and/or modified sequence
tgaatcagcagcgtggtggacgagcacttcagccgggccctgagcaatattaagtccccgcaggagctcaccccgtcttctcagagcgaaggcgtcatgctcaaaaatgatgattctatgtcccccaaccaatggcggtactccagtccctggacaaaaccccagccagaagtaccagtcacgaacagggcagccaattgcaacctgcatgtcccagggcctatggcagtgaatcaattctccccctcgctcgcacgtagagcttccgtccgtcctggggagctgtggcacttctcctcgctcgctggaaccagctctttggagcctggctatagccacccttttccggctagacatctggtccctgagcctcagcccgatggaaagcataaaaagctctatgtgtctcgggggagtgctagtacttccctgcctaacgagaccctgtccgagcttgagaccccagggaagtatagccttactcctccctag

SEQ ID NO: 190288 - DNA, 183 bp, Artificial Sequence
  derived and/or modified sequence
acccccagcagccagagcgagggcgtgatgctgaagaacgacaagaagctctacgtgtctagaggctctgcctcaacctccttgcccaacgaaaccctgtctgaactggaaacccccgggaaatatagtctgacgccccctaatcattgggggcaccctcaccggtacctgcagcacctgtag

SEQ ID NO: 190289 - DNA, 777 bp, Artificial Sequence
  derived and/or modified sequence
atggaagagatgaaaaagacagccattagactgccaaagggtaagcagaagcctattaagacagagtggaactcccgttgcgtgctctttacctactttcagggtgatatttccagcgttgttgacgaacatttctctcgtgcactctcaaatatcaagtccccccaggaacttaccccttcgagccagagcgaaggcgtgatgctgaaaaacgatgactccatgtccccgaaccagtggcggtacagctccccctggacaaaaccccagcctgaggtgcctgtgactaatagagcagctaattgcaacctgcatgtgcctggcccaatggctgttaatcagttctcaccttccttagctaggcgtgcctccgtgcgtcccggagaactctggcatttctcatcccttgcgggaaccagctctctggaacccggttactcacacccattcccagccagacatctggtgccggagccacagcctgatggcaagcgtgagccgttattgagtctcctccaacaagaccgttgcttggcacgccctcaggaatccgcggctcgtgagaacgggaacccaggtcaaatcgccggatccactggactacttttcaatctgccacctggttcagtgcattacaagaagctctacgtgtctagggggtccgcgtcaacctctctgcccaacgagaccctttccgagcttgagacccctggtaaatattccctcaccccacctaatcattgggggcacccccataggtacctgcaacacctgtag

SEQ ID NO: 190290 - DNA, 348 bp, Artificial Sequence
  derived and/or modified sequence
atgaagaaaacggccatccgcctgccgaagggaaagcagaaacctatcaagacagaatggaactctagatgtgttttatttacctacttccagggggatatctcttcagtggtcgacgagcactttagcagagctctttcaaatatcaaatcaccacaggagttgaccccatccagtcaatctgagggagttatgctgaaaaatgacaaaaaactgtacgtgtctcgtggctcggcatccacttcgttgcctaatgaaaccttgtccgagttggagacaccaggcaaatattcgctgacccctcctaatcactggggccacccccaccgttaccttcagcatttgtag

SEQ ID NO: 190291 - DNA, 492 bp, Artificial Sequence
  derived and/or modified sequence
tgaataagctccgtggttgacgaacactttagcagggctctgagcaatattaagtccccccaggagctaacgccatcctcccagagcgagggcgtgatgctgaagaatgatgacagcatgtcaccaaatcagtggcggtatagttccccgtggaccaagccccagccagaggtacctgtgacaaaccgtgccgctaattgcaacctgcacgtccctggacccatggcggtcaatcagtttagtccatccctggcacgccgagcctctgtgaggccaggagaactgtggcacttttcttccctcgctggaacttccagcttagaaccaggctatagtcatccgttccctgcaaggcatctggtgcctgagccacagcctgatggcaaacataagaaactgtacgtcagtcgaggctctgcaagcacatccctacctaacgaaacactgagtgagctcgaaacaccaggtaaatattccctgactcctccgtag

SEQ ID NO: 190292 - DNA, 183 bp, Artificial Sequence
  derived and/or modified sequence
actccctcctcccagtctgagggtgtgatgttgaagaacgataaaaagctttacgtatcacgcggtagcgccagcaccagcctccccaatgaaacactgagtgaattagagacgccagggaaatactcccttactcccccaaatcactggggccacccacataggtatttacagcacctgtag

SEQ ID NO: 190293 - DNA, 1215 bp, Artificial Sequence
  derived and/or modified sequence
ctagaggggcggaaagtaacaaggaggtgggggtacaaatcctcagctcctgcttccgcaagcactaacctgctctgaagtgagccaggcagctctggccatcttttcccagccacagaatcaggtgatggtccagaattaagagctgtcacctgtgtcattcactcacaatggaagaaatgaagaagactgccatccggctgcccaaaggcaaacagaagcctataaagacggaatggaattcccggtgtgtccttttcacctacttccaaggggacatcagcagcgtagtggatgaacacttctccagagctctgagcaatatcaagagcccccaggaattgaccccctcgagtcagagtgaaggtgtgatgctgaaaaacgatgatagcatgtctccaaatcagtggcgttactcgtctccatggacaaagccacaaccagaagtacctgtcacaaaccgtgccgccaactgcaacttgcatgtgcctggtcccatggctgtgaatcagttctcaccgtccctggctaggagggcctctgttcggcctggggagctgtggcatttctcctccctggcgggcaccagctccttagagcctggctactctcatcccttccccgctcggcacctggttccagagccccagcctgatgggaaacgtgagcctctcctaagtctcctccagcaagacagatgcctagcccgtcctcaggaatctgccgccagggagaatggcaaccctggccagatagctggaagcacagggttgctcttcaacctgcctcccggctcagttcactataagaaactatatgtatctcgtggatctgccagtaccagccttccaaatgaaactctttcagagttagagacacctgggaaatactcacttacaccaccaaaccactggggccacccacatcgatacctgcagcatctttagtcaagttggaggagaaagacaacacttggtctaagacacggcagcaagacatccctgcatattgttccagataaaaatgaaagctgctcacacccacttgcctccccaatctgttaaacagcttcgtgtctagtatgagctcagtacttgccctgtgaaaatcccagaagcccccgctgtcaatgttccccatccacaccctgcttgctcctgtgtaacagctcagatgatgaataataataaaactgtacttttttggatggtgcta

SEQ ID NO: 190294 - DNA, 794 bp, Artificial Sequence
  derived and/or modified sequence
ctagaggggcggaaagtaacaaggaggtgggggtacaaatcctcagctcctgcttccgcaagcactaacctgctctgaagtgagccaggcagctctggccatcttttcccagccacagaatcaggtgatggtccagaattaagagctgtcacctgtgtcattcactcacaatggaagaaatgaagaagactgccatccggctgcccaaaggcaaacagaagcctataaagacggaatggaattcccggtgtgtccttttcacctacttccaaggggacatcagcagcgtagtggatgaacacttctccagagctctgagcaatatcaagagcccccaggaattgaccccctcgagtcagagtgaaggtgtgatgctgaaaaacgataagaaactatatgtatctcgtggatctgccagtaccagccttccaaatgaaactctttcagagttagagacacctgggaaatactcacttacaccaccaaaccactggggccacccacatcgatacctgcagcatctttagtcaagttggaggagaaagacaacacttggtctaagacacggcagcaagacatccctgcatattgttccagataaaaatgaaagctgctcacacccacttgcctccccaatctgttaaacagcttcgtgtctagtatgagctcagtacttgccctgtgaaaatcccagaagcccccgctgtcaatgttccccatccacaccctgcttgctcctgtgtaacagctcagatgatgaataataataaaactgtacttttttggatggtgct

SEQ ID NO: 190295 - DNA, 486 bp, Artificial Sequence
  derived and/or modified sequence
catcagcagcgtagtggatgaacacttctccagagctctgagcaatatcaagagcccccaggaattgaccccctcgagtcagagtgaaggtgtgatgctgaaaaacgatgatagcatgtctccaaatcagtggcgttactcgtctccatggacaaagccacaaccagaagtacctgtcacaaaccgtgccgccaactgcaacttgcatgtgcctggtcccatggctgtgaatcagttctcaccgtccctggctaggagggcctctgttcggcctggggagctgtggcatttctcctccctggcgggcaccagctccttagagcctggctactctcatcccttccccgctcggcacctggttccagagccccagcctgatgggaaacataagaaactatatgtatctcgtggatctgccagtaccagccttccaaatgaaactctttcagagttagagacacctgggaaatactcacttacaccacc

SEQ ID NO: 190296 - DNA, 451 bp, Artificial Sequence
  derived and/or modified sequence
accccctcgagtcagagtgaaggtgtgatgctgaaaaacgataagaaactatatgtatctcgtggatctgccagtaccagccttccaaatgaaactctttcagagttagagacacctgggaaatactcacttacaccaccaaaccactggggccacccacatcgatacctgcagcatctttagtcaagttggaggagaaagacaacacttggtctaagacacggcagcaagacatccctgcatattgttccagataaaaatgaaagctgctcacacccacttgcctccccaatctgttaaacagcttcgtgtctagtatgagctcagtacttgccctgtgaaaatcccagaagcccccgctgtcaatgttccccatccacaccctgcttgctcctgtgtaacagctcagatgatgaataataataaaactgtacttttttggatggtgcta

SEQ ID NO: 190297 - protein, 399 aa, Artificial Sequence
  derived and/or modified sequence
MPQLSGGGGGGGGDPELCATDEMIPFKDEGDPQKEKIFAEISHPEEEGDLADIKSSLVNESEIIPASNGHEVARQAQTSQEPYHDKAREHPDDGKHPDGGLYNKGPSYSSYSGYIMMPNMNNDPYMSNGSLSPPIPRTSNKVPVVQPSHAVHPLTPLITYSDEHFSPGSHPSHIPSDVNSKQGMSRHPPAPDIPTFYPLSPGGVGQITPPLGWQGQPVYPITGGFRQPYPSSLSVDTSMSRFSHHMIPGPPGPHTTGIPHPAIVTPQVKQEHPHTDSDLMHVKPQHEQRKEQEPKRPHIKKPLNAFMLYMKEMRANVVAECTLKESAAINQILGRRWHALSREEQAKYYELARKERQLHMQLYPGWSARDNYGKKKKRKREKLQESASGTGPRMTAAYI

SEQ ID NO: 190298 - DNA, 3620 bp, Artificial Sequence
  derived and/or modified sequence
agcgccggcgaggcgcgggaggaggagaagcagtggggaggcgcagccgctcacctgcggggcagggcgcggaggagggacccgggctgcgcgctctcgggccgaggaaccaggacgcgcccggagcctcgcacgcggccaagctcggggcgtcccctcccctcggccgggcgaactcaaggggcgcagctctttgctttgacagagctggccggcggaggcgtgcagagcggcgagccggcgagccaggctgagaaactcgagccgggaacaaagaggggtcggactgagtgtgtgtgtcggctcgagctccgggcagaggcatttgggcccgaggcccccgctgtgactccccgagactccgcagtgccctccactgcggagtccccgcgcttgccggcaaaaactttattcttggcaaacttctctttctcttcccctcctcctcggcccccatcttctgctcctcctccttctctagcagattaaatgagcctcgagaagaaaaaccgaagcgaaagggaagaaaataagaagatctaaaacggacatctccagcgtgggtggctcctttttctttttctttttttcccacccttcaggaagtggacgtttcgttatcttctgatccttgcaccttcttttggggcaaacggggcccttctgcccagatcccctctcttttctcggaaaacaaactactaagtcggcatccggggtaactacagtggagagggtttccgcggagacgcgccgccggaccctcctctgcactttggggaggcgtgctccctccagaaccggcgttctccgcgcgcaaatcccggcgacgcggggtcgcggggtggccgccggggcagcctcgtctagcgcgcgccgcgcagacgcccccggagtcgccagctaccgcagccctcgccgcccagtgcccttcggcctcgggggcgggcgcctgcgtcggtctccgcgaagcgggaaagcgcggcggccgccgggattcgggcgccgcggcagctgctccggctgccggccggcggccccgcgctcgcccgccccgcttccgcccgctgtcctgctgcacgaacccttccaactctcctttcctcccccacccttgagttacccctctgtctttcctgctgttgcgcgggtgctcccacagcggagcggagattacagagccgccgggatgccccaactctccggaggaggtggcggcggcgggggggacccggaactctgcgccacggacgagatgatccccttcaaggacgagggcgatcctcagaaggaaaagatcttcgccgagatcagtcatcccgaagaggaaggcgatttagctgacatcaagtcttccttggtgaacgagtctgaaatcatcccggccagcaacggacacgaggtggccagacaagcacaaacctctcaggagccctaccacgacaaggccagagaacaccccgatgacggaaagcatccagatggaggcctctacaacaagggaccctcctactcgagttattccgggtacataatgatgccaaatatgaataacgacccatacatgtcaaatggatctctttctccacccatcccgagaacatcaaataaagtgcccgtggtgcagccatcccatgcggtccatcctctcacccccctcatcacttacagtgacgagcacttttctccaggatcacacccgtcacacatcccatcagatgtcaactccaaacaaggcatgtccagacatcctccagctcctgatatccctactttttatcccttgtctccgggtggtgttggacagatcaccccacctcttggctggcaaggtcagcctgtatatcccatcacgggtggattcaggcaaccctacccatcctcactgtcagtcgacacttccatgtccaggttttcccatcatatgattcccggtcctcctggtccccacacaactggcatccctcatccagctattgtaacacctcaggtcaaacaggaacatccccacactgacagtgacctaatgcacgtgaagcctcagcatgaacagagaaaggagcaggagccaaaaagacctcacattaagaagcctctgaatgcttttatgttatacatgaaagaaatgagagcgaatgtcgttgctgagtgtactctaaaagaaagtgcagctatcaaccagattcttggcagaaggtggcatgccctctcccgtgaagagcaggctaaatattatgaattagcacggaaagaaagacagctacatatgcagctttatccaggctggtctgcaagagacaattatggtaagaaaaagaagaggaagagagagaaactacaggaatctgcatcaggtacaggtccaagaatgacagctgcctacatctgaaacatggtggaaaacgaagctcattcccaacgtgcaaagccaaggcagcgaccccaggacctcttctggagatggaagcttgttgaaaacccagactgtctccacggcctgcccagtcgaccccaaaggaacactgacatcaattttaccctgaggtcactgctagagacgctgatccataaagacaatcactgccaacccctctttcgtctactgcaagagccaagttccaaaataaagcataaaaaggttttttaaaaggaaatgtaaaagcacatgagaatgctagcaggctgtggggcagctgagcagcttttctcccctcatatctgcgtgcacttcccagagcatcttgcatccaaacctgtaacctttcggcaaggacggtaacttggctgcatttgcctgtcatgcgcaactggagccagcaaccagcacatccatcagcaccccagtggaggagttcatggaagagttccctctttgtttctgcttcatttttctttcttttcttttctcctaaagcttttatttaacagtgcaaaaggatcgtttttttttgcttttttaaacttgaatttttttaatttacactttttagttttaattttcttgtatattttgctagctatgagcttttaaataaaattgaaagttctggaaaagtttgaaataatgacataaaaagaagccttctttttctgagacagcttgtctggtaagtggcttctctgtgaattgcctgtaacacatagtggcttctccgcccttgtaaggtgttcagtagagctaaataaatgtaatagccaaacccactctgttggtagcaattggcagccctatttcagtttattttttcttctgttttcttcttttctttttttaaacagtaaaccttaacagatgcgttcagcagactggtttgcagtgaattttcatttctttccttatcacccccttgttgtaaaaagcccagcacttgaattgttattactttaaatgttctgtatttgtatctgtttttattagccaattagtgggattttatgccagttgttaaaatgagcattgatgtacccattttttaaaaaagcaaggcacagcctttgcccaaaactgtcatcctaacgtttgtcattccagtttgagttaatgtgctgagcatttttttaaaagaagctttgtaataaaacatttttaaaaattgtcatttaaaaaaaaaaaaaaaaaa

SEQ ID NO: 190299 - DNA, 1200 bp, Artificial Sequence
  derived and/or modified sequence
atgccccagctgagcggcggcggcggcggcggcggcggcgaccccgagctgtgcgccaccgacgagatgatccccttcaaggacgagggcgacccccagaaggagaagatcttcgccgagatcagccaccccgaggaggagggcgacctggccgacatcaagagcagcctggtgaacgagagcgagatcatccccgccagcaacggccacgaggtggccagacaggcccagaccagccaggagccctaccacgacaaggccagagagcaccccgacgacggcaagcaccccgacggcggcctgtacaacaagggccccagctacagcagctacagcggctacatcatgatgcccaacatgaacaacgacccctacatgagcaacggcagcctgagcccccccatccccagaaccagcaacaaggtgcccgtggtgcagcccagccacgccgtgcaccccctgacccccctgatcacctacagcgacgagcacttcagccccggcagccaccccagccacatccccagcgacgtgaacagcaagcagggcatgagcagacacccccccgcccccgacatccccaccttctaccccctgagccccggcggcgtgggccagatcaccccccccctgggctggcagggccagcccgtgtaccccatcaccggcggcttcagacagccctaccccagcagcctgagcgtggacaccagcatgagcagattcagccaccacatgatccccggcccccccggcccccacaccaccggcatcccccaccccgccatcgtgaccccccaggtgaagcaggagcacccccacaccgacagcgacctgatgcacgtgaagccccagcacgagcagagaaaggagcaggagcccaagagaccccacatcaagaagcccctgaacgccttcatgctgtacatgaaggagatgagagccaacgtggtggccgagtgcaccctgaaggagagcgccgccatcaaccagatcctgggcagaagatggcacgccctgagcagagaggagcaggccaagtactacgagctggccagaaaggagagacagctgcacatgcagctgtaccccggctggagcgccagagacaactacggcaagaagaagaagagaaagagagagaagctgcaggagagcgccagcggcaccggccccagaatgaccgccgcctacatctag

SEQ ID NO: 190300 - DNA, 1200 bp, Artificial Sequence
  derived and/or modified sequence
atgcctcagctgtctggaggcgggggaggagggggcggcgaccccgaattgtgtgcaacggatgaaatgatcccgttcaaagacgaaggggatccacagaaggagaaaatcttcgcagaaatctcacacccagaagaagaaggcgacttagcagacatcaaaagctccctggtaaacgaatcagaaataatcccagccagtaacggacacgaggtggccaggcaagcccagacatctcaggagccataccacgataaagccagggaacatcctgacgatggcaaacatcccgacgggggtctgtacaacaaaggaccttcctacagctcctactctggctacatcatgatgccgaatatgaataatgacccttacatgtccaatggctctctgtccccccccatcccaaggacaagcaacaaagtgcccgttgttcagccttcacatgccgtgcatcctcttacacctctcataacatacagtgatgagcatttcagtccgggcagtcatccatcccacataccttcagacgtgaacagcaaacagggaatgtcgcgccacccacctgctcctgacatccccacattctatcctctgtctcctggcggtgtgggacaaatcactcctcccttgggttggcaaggccaaccggtttatcccatcacggggggatttaggcagccataccctagctccctgtccgtggataccagtatgagtaggtttagtcaccacatgattccaggtcctcccgggcctcataccacgggtattccccatccagccattgttaccccgcaggtgaagcaggaacatccccataccgatagcgacctgatgcatgtaaagcctcagcacgaacagcggaaggaacaggaaccgaaaaggccccatattaaaaaaccactgaacgcctttatgttatatatgaaagagatgagggccaacgttgtggctgagtgcacccttaaggaaagtgccgccatcaaccagatcctggggcgccggtggcacgcattgagtcgcgaggagcaggccaagtattacgagcttgctaggaaggaaagacaactgcacatgcagttataccctgggtggtcagctagggacaactacgggaagaaaaagaagcggaagagagaaaagttgcaagagagcgcttctggaacaggcccacggatgacagctgcatacatttag

SEQ ID NO: 190301 - DNA, 1200 bp, Artificial Sequence
  derived and/or modified sequence
atgccccagctgagcggcggcggcggcggcggcggcggggaccctgagctgtgtgccacagatgagatgatccccttcaaggatgaaggagacccccagaaggagaagatctttgctgagatcagccaccctgaggaggagggggacctggccgacatcaagagcagcctggtgaatgaaagtgagatcatcccagccagcaatggccacgaggtggcccggcaggcccagaccagccaggagccctaccatgacaaggcccgggagcacccagatgatggcaagcacccagatggcggcctgtacaacaagggccccagctacagcagctacagcggctacatcatgatgcccaacatgaacaatgacccctacatgagcaatggcagcctgagcccccccatccccaggaccagcaacaaggtgcctgtggtgcagcccagccatgctgtgcaccccctgacccccctcatcacctacagtgatgagcacttcagccctggcagccaccccagccacatccccagtgatgtgaacagcaagcagggcatgagccgccaccccccagccccagacatccccaccttctaccccctgagccctggaggagtgggccagatcaccccacccctgggctggcagggccagcctgtgtaccccatcaccggcggcttccggcagccctaccccagcagcctgtctgtggacacctccatgagccgcttcagccaccacatgatccctggccccccaggcccccacaccaccggcatcccccacccagccatcgtgaccccccaggtgaagcaggagcacccccacacagacagcgacctgatgcacgtgaagccccagcacgagcagaggaaggagcaggagcccaagaggccccacatcaagaagcccctgaatgccttcatgctgtacatgaaggagatgagggccaacgtggtggccgagtgcaccctgaaggagagcgctgccatcaaccagatcctgggccgccgctggcacgccctgagccgggaggagcaggccaagtactatgagctggccaggaaggagcggcagctgcacatgcagctgtacccaggctggagcgcccgggacaactacggcaagaagaagaagaggaagcgggagaagctgcaggagagcgccagcggcaccggccccaggatgacagctgcctacatctag

SEQ ID NO: 190302 - DNA, 3068 bp, Artificial Sequence
  derived and/or modified sequence
aagatctaaaacggacatctccagcgtgggtggctcctttttctttttctttttttcccacccttcaggaagtggacgtttcgttatcttctgatccttgcaccttcttttggggcaaacggggcccttctgcccagatcccctctcttttctcggaaaacaaactactaagtcggcatccggggtaactacagtggagagggtttccgcggagacgcgccgccggaccctcctctgcactttggggaggcgtgctccctccagaaccggcgttctccgcgcgcaaatcccggcgacgcggggtcgcggggtggccgccggggcagcctcgtctagcgcgcgccgcgcagacgcccccggagtcgccagctaccgcagccctcgccgcccagtgcccttcggcctcgggggcgggcgcctgcgtcggtctccgcgaagcgggaaagcgcggcggccgccgggattcgggcgccgcggcagctgctccggctgccggccggcggccccgcgctcgcccgccccgcttccgcccgctgtcctgctgcacgaacccttccaactctcctttcctcccccacccttgagttacccctctgtctttcctgctgttgcgcgggtgctcccacagcggagcggagattacagagccgccgggatgccccaactctccggaggaggtggcggcggcgggggggacccggaactctgcgccacggacgagatgatccccttcaaggacgagggcgatcctcagaaggaaaagatcttcgccgagatcagtcatcccgaagaggaaggcgatttagctgacatcaagtcttccttggtgaacgagtctgaaatcatcccggccagcaacggacacgaggtggccagacaagcacaaacctctcaggagccctaccacgacaaggccagagaacaccccgatgacggaaagcatccagatggaggcctctacaacaagggaccctcctactcgagttattccgggtacataatgatgccaaatatgaataacgacccatacatgtcaaatggatctctttctccacccatcccgagaacatcaaataaagtgcccgtggtgcagccatcccatgcggtccatcctctcacccccctcatcacttacagtgacgagcacttttctccaggatcacacccgtcacacatcccatcagatgtcaactccaaacaaggcatgtccagacatcctccagctcctgatatccctactttttatcccttgtctccgggtggtgttggacagatcaccccacctcttggctggcaaggtcagcctgtatatcccatcacgggtggattcaggcaaccctacccatcctcactgtcagtcgacacttccatgtccaggttttcccatcatatgattcccggtcctcctggtccccacacaactggcatccctcatccagctattgtaacacctcaggtcaaacaggaacatccccacactgacagtgacctaatgcacgtgaagcctcagcatgaacagagaaaggagcaggagccaaaaagacctcacattaagaagcctctgaatgcttttatgttatacatgaaagaaatgagagcgaatgtcgttgctgagtgtactctaaaagaaagtgcagctatcaaccagattcttggcagaaggtggcatgccctctcccgtgaagagcaggctaaatattatgaattagcacggaaagaaagacagctacatatgcagctttatccaggctggtctgcaagagacaattatggtaagaaaaagaagaggaagagagagaaactacaggaatctgcatcaggtacaggtccaagaatgacagctgcctacatctgaaacatggtggaaaacgaagctcattcccaacgtgcaaagccaaggcagcgaccccaggacctcttctggagatggaagcttgttgaaaacccagactgtctccacggcctgcccagtcgaccccaaaggaacactgacatcaattttaccctgaggtcactgctagagacgctgatccataaagacaatcactgccaacccctctttcgtctactgcaagagccaagttccaaaataaagcataaaaaggttttttaaaaggaaatgtaaaagcacatgagaatgctagcaggctgtggggcagctgagcagcttttctcccctcatatctgcgtgcacttcccagagcatcttgcatccaaacctgtaacctttcggcaaggacggtaacttggctgcatttgcctgtcatgcgcaactggagccagcaaccagcacatccatcagcaccccagtggaggagttcatggaagagttccctctttgtttctgcttcatttttctttcttttcttttctcctaaagcttttatttaacagtgcaaaaggatcgtttttttttgcttttttaaacttgaatttttttaatttacactttttagttttaattttcttgtatattttgctagctatgagcttttaaataaaattgaaagttctggaaaagtttgaaataatgacataaaaagaagccttctttttctgagacagcttgtctggtaagtggcttctctgtgaattgcctgtaacacatagtggcttctccgcccttgtaaggtgttcagtagagctaaataaatgtaatagccaaacccactctgttggtagcaattggcagccctatttcagtttattttttcttctgttttcttcttttctttttttaaacagtaaaccttaacagatgcgttcagcagactggtttgcagtgaattttcatttctttccttatcacccccttgttgtaaaaagcccagcacttgaattgttattactttaaatgttctgtatttgtatctgtttttattagccaattagtgggattttatgccagttgttaaaatgagcattgatgtacccattttttaaaaaagcaaggcacagcctttgcccaaaactgtcatcctaacgtttgtcattccagtttgagttaatgtgctgagcatttttttaaaagaagctttgtaataaaacatttttaaaaattgtcattt

SEQ ID NO: 190303 - DNA, 1200 bp, Artificial Sequence
  derived and/or modified sequence
atgccccagctgagcggcggcggcggcggcggcggcggcgaccccgagttatgcgctacagacgagatgattcctttcaaggatgagggggaccctcagaaggagaagatcttcgcagagatatcacatcctgaggaggagggagacctggccgacatcaaatccagcctggtgaacgaaagcgaaattatccctgcaagcaacgggcacgaagtggcaaggcaagcgcagacctctcaggaaccttatcacgacaaagcacgcgagcacccggatgacggaaagcaccccgatggcggcttgtataataagggtccgagctatagtagttactctggatacataatgatgcctaatatgaataatgatccgtatatgtctaatggatctttatcccctccaattccaaggaccagcaataaggtccctgttgtgcaaccttcccatgctgtccacccgcttactcccctgataacctactcagatgaacatttctcccctggatcacaccctagccacatcccgtccgacgtcaattctaagcagggcatgagcagacatcctccagcgccagatattcctacattctaccctctgtcacccgggggcgtgggtcagattacaccacctctgggttggcaagggcaacctgtctacccaataactggaggcttcaggcagccctatccatccagcttatcagtcgataccagcatgagccggttctctcatcatatgatacctggccctcctgggccacacaccactgggattcctcatcctgccatcgtgaccccccaggtgaagcaggagcacccccacacagactcagatttgatgcacgttaagccacagcacgagcagcggaaagagcaggagcccaagcggccccatataaagaaacctttaaatgcctttatgctttacatgaaggaaatgcgggccaatgttgtcgctgagtgtactcttaaggaaagcgcagccatcaaccagattttgggtcggagatggcatgccctgtcacgggaagagcaggccaaatactatgagttggcacggaaagagaggcagttgcacatgcagttataccctggctggtcagcacgggataactacggtaagaagaagaaaagaaagagggagaagctgcaggagagcgctagcggaacaggcccccgcatgacggccgcatacatttag

SEQ ID NO: 190304 - DNA, 1200 bp, Artificial Sequence
  derived and/or modified sequence
atgccccaactcagcggagggggtgggggtggtggtggagaccctgagctttgtgctaccgacgaaatgataccctttaaggatgagggtgatccccagaaagaaaaaatcttcgccgaaatctcacatcccgaggaagaaggtgatcttgcggatatcaagagctcactcgtgaacgaaagcgaaattattcctgcatctaacggccatgaagtcgctcgccaagctcagacctcccaggaaccctatcatgacaaggcaagggaacatcctgatgacggtaaacatcccgacgggggactgtacaacaaaggtccgtcatattcaagttattcggggtacattatgatgcctaatatgaataatgatccatacatgtctaacgggagtctatctcccccaatcccacggacaagtaataaagtccccgttgtgcagccaagtcatgccgtccatcccctcaccccccttataacctacagcgatgagcacttcagtcctggttcacatccctcccacatcccgtcagacgtgaactcaaagcagggtatgagcagacacccgcctgcacctgatatacccactttctaccccctcagccccggtggggtcggtcagataacccctccactcgggtggcagggccagcctgtctaccctatcaccggagggttcagacagccgtatccatcttcactatctgtggatacatcaatgtcgagattttcccatcacatgattcccggaccacctggccctcatacgaccggtatacctcacccggctattgtgacacctcaggtgaagcaggagcatcctcacactgatagcgatctaatgcacgtgaagcctcagcatgaacagcgaaaggagcaggagcccaaacggccacacattaagaagccactgaatgccttcatgctatatatgaaagagatgcgagctaatgtcgtggccgagtgtactctgaaggagtcagcagcaattaatcaaatccttggaaggaggtggcacgcgctgtcgcgtgaggaacaagctaagtattatgagctcgccagaaaagaaaggcagttacatatgcaactctatcccggttggtcagctcgggataattatggcaagaagaagaaacggaagagagagaagctgcaggagtcagcttccgggaccggccctcggatgacagccgcttacatctag

SEQ ID NO: 190305 - protein, 355 aa, Artificial Sequence
  derived and/or modified sequence
MALSEPILPSFSTFASPCRERGLQERWPRAEPESGGTDDDLNSVLDFILSMGLDGLGAEAAPEPPPPPPPPAFYYPEPGAPPPYSAPAGGLVSELLRPELDAPLGPALHGRFLLAPPGRLVKAEPPEADGGGGYGCAPGLTRGPRGLKREGAPGPAASCMRGPGGRPPPPPDTPPLSPDGPARLPAPGPRASFPPPFGGPGFGAPGPGLHYAPPAPPAFGLFDDAAAAAAALGLAPPAARGLLTPPASPLELLEAKPKRGRRSWPRKRTATHTCSYAGCGKTYTKSSHLKAHLRTHTGEKPYHCNWDGCGWKFARSDELTRHYRKHTGHRPFQCHLCDRAFSRSDHLALHMKRHM

SEQ ID NO: 190306 - DNA, 1655 bp, Artificial Sequence
  derived and/or modified sequence
gcccgcccgcgccccgaccagcccggcctcgggcagccactcaccggtgtccccgtccgcgtccttcctccccgggtcccggccatggcgctgagtgaacccatcctgccgtccttctccactttcgccagcccgtgccgcgagcgcggcctgcaggagcgctggccgcgcgccgaacccgagtccggcggcaccgacgacgacctcaacagcgtgctggacttcatcctgtccatggggctggatggcctgggcgccgaggccgccccggagccgccgccgccgcccccgccgcctgcgttctattaccccgaacccggcgcgcccccgccctacagcgcccccgcgggtggcctggtgtctgagctgctgcgacccgagctggatgcgccgctggggcccgcactgcacggccgctttctgctggcgccgcccggccgcctggtcaaggccgagccccctgaagcggacggcggcggcggctacggctgcgcccccgggctgacccgtggaccgcgcggcctcaagcgcgagggcgccccgggcccggcggcttcgtgcatgcgaggtcccgggggccgccccccgccgccgcccgacacaccgccgctcagccccgacggccccgcgcgcctgcccgcgcccggtccgcgcgcctccttcccgccgcctttcggtggccctggtttcggcgcgcccgggcccggcctgcattacgcgccgcctgcgcccccagccttcggtctcttcgacgacgcggccgccgccgcggcagccctgggcctggcgccccccgccgcccgcggtctcctcacgccgcctgcgtccccgctggagctgctggaggccaagccaaagcgcggccgccgctcttggccccgcaaacgcaccgccactcacacctgcagctacgcgggctgcggcaagacctacaccaagagttcgcatctgaaggcgcatctgcgcacgcacacaggtgagaagccctaccactgcaactgggacggctgcggctggaagtttgcgcgctcagacgagctcacgcgccactaccgaaagcacacgggccaccggccattccagtgccatctgtgcgatcgtgccttctcgcgctccgatcacctggcgctgcacatgaaacggcacatgtagccgggacgcccccgcccacctgcgcgcggccgtggcgggtcccacgcgccgggcgcggccccctcccaaactgtgactggtatttattggacccagagaaccgggccgggcacagcgtggctacagagggtctccctcgatgacgacgacgacgacgccaccaccccagcccccgtctgtgactgaaggcccggtgggaaaagaccacgatcctccttgacgagttttgtttttcaaaatggtgcaataatttaagtggcatcttctctcccaccgggtctacactagaggatcgaggcttgtgatgccttgtgagaaataagggccttaatttgtactgtctgcggcattttttataatattgtatatagtgactgacaaatattgtattactgtacatagagagacaggtgggcatttttgggctacctggttcgtttttataagattttgctgggttggttttttttttaattaaaaagttttgcatcttttaaaaaaaa

SEQ ID NO: 190307 - DNA, 1068 bp, Artificial Sequence
  derived and/or modified sequence
atggcactgagcgagccaatcctgccttcttttagtacatttgcttcaccgtgtcgtgagagaggattacaagaaagatggccacgcgcagaacccgagtccggcgggaccgacgatgatcttaatagcgtgctggactttatcctgtctatgggtctggacggcttaggcgccgaagccgcaccggaacctcctcctccacccccacctccagcattttactacccagaacccggcgcacctcctccatactctgcaccggcaggtggtctggtttctgaactcctacggcctgaactggatgctccgctgggacctgcattgcacggtcgatttttactggccccacccgggaggcttgtaaaagcagagcccccagaggcagatggaggtggggggtatggttgtgcgccggggctgacccgcggaccacgtggacttaaacgagagggggctcctggccccgcagcgtcttgcatgcggggccccggcgggcgtccgcctccaccacctgacacccctcccctgagccccgacggccccgccagactccccgcacctgggcccagagcctcttttccacccccatttgggggccccggcttcggcgccccgggcccgggattgcattacgcccctccggcacccccagcttttggtctgttcgacgatgccgctgccgctgccgcggctctaggattggctcctccagccgcacgcggactgctcacccctccagcatcacccctggaactactcgaggcgaaacctaagagaggaaggcgcagctggccgcggaagcgcactgcaacccatacttgctcttacgcgggctgcggaaagacctacaccaagtctagccatctgaaggcgcatctcaggacccatacaggggagaagccataccactgtaactgggacggctgtggatggaagttcgcccgctctgatgaattgacacgccactacaggaaacacaccgggcacaggccattccagtgccatctgtgcgaccgagcttttagtcgtagtgatcacctggccctccatatgaagagacatatgtag

SEQ ID NO: 190308 - DNA, 1647 bp, Artificial Sequence
  derived and/or modified sequence
gcccgcccgcgccccgaccagcccggcctcgggcagccactcaccggtgtccccgtccgcgtcctttctccccgggtcccggccatggcgctgagtgaacccatcctgccgtccttctccactttcgccagcccgtgccgcgagcgcggcctgcaggagcgctggccgcgcgccgaacccgagtccggcggcaccgacgacgacctcaacagcgtgctggacttcatcctgtccatggggctggatggcctgggcgccgaggccgccccggagccgccgccgccgcccccgccgcctgcgttctattaccccgaacccggcgcgcccccgccctacagcgcccccgcgggtggcctggtgtctgagctgctgcgacccgagctggatgcgccgctggggcccgcactgcacggccgctttctgctggcgccgcccggccgcctggtcaaggccgagccccctgaagcggacggcggcggcggctacggctgcgcccccgggctgacccgtggaccgcgcggcctcaagcgcgagggcgccccgggcccggcggcttcgtgcatgcgaggtcccgggggccgccccccgccgccgcccgacacaccgccgctcagccccgacggccccgcgcgcctgcccgcgcccggtccgcgcgcctccttcccgccgcctttcggtggccctggtttcggcgcgcccgggcccggcctgcattacgcgccgcctgcgcccccagccttcggtctcttcgacgacgcggccgccgccgcggcagccctgggcctggcgccccccgccgcccgcggtctcctcacgccgcctgcgtccccgctggagctgctggaggccaagccaaagcgcggccgccgctcttggccccgcaaacgcaccgccactcacacctgcagctacgcgggctgcggcaagacctacaccaagagttcgcatctgaaggcgcatctgcgcacgcacacaggtgagaagccctaccactgcaactgggacggctgcggctggaagtttgcgcgctcagacgagctcacgcgccactaccgaaagcacacgggccaccggccattccagtgccatctgtgcgatcgtgccttctcgcgctccgatcacctggcgctgcacatgaaacggcacatgtagccgggacgcccccgcccacctgcgcgcggccgtggcgggtcccacgcgccgggcgcggccccctcccaaactgtgactggtatttattggacccagagaaccgggccgggcacagcgtggctacagagggtctccctcgatgacgacgacgacgacgccaccaccccagcccccgtctgtgactgaaggcccggtgggaaaagaccacgatcctccttgacgagttttgtttttcaaaatggtgcaataatttaagtggcatcttctctcccaccgggtctacactagaggatcgaggcttgtgatgccttgtgagaaataagggccttaatttgtactgtctgcggcattttttataatattgtatatagtgactgacaaatattgtattactgtacatagagagacaggtgggcatttttgggctacctggttcgtttttataagattttgctgggttggttttttttttaattaaaaagttttgcatctttt

SEQ ID NO: 190309 - DNA, 1068 bp, Artificial Sequence
  derived and/or modified sequence
atggccctgtctgagcccatcctgcccagcttcagcacctttgccagcccctgccgggagcggggcctgcaggagcgctggcccagggctgagcctgagagcggcggcacagatgatgacctgaacagcgtgctggacttcatcctgtccatgggcctggatggcctgggcgctgaggccgcccctgagcccccacctcctcctcctcctccagccttctactacccagagcccggggcccccccaccctacagcgccccagctgggggcctggtgtctgagctgctgcggcctgagctggatgcccccctgggccctgccctgcacggccgcttcctgctggcccctcctggccgcctggtgaaggccgagcccccagaggctgatggcggcggcggctacggctgtgcccctggcctgacccggggcccccggggcctgaagcgggagggcgcccctggccctgctgccagctgcatgaggggccctgggggccggcccccacctcctccagacaccccacccctgagcccagatggccctgcccggctgcctgcccctggcccccgggccagcttccccccaccatttggaggccctggctttggagcccctggccctggcctgcactacgcccccccagcccccccagccttcggcctgtttgatgatgctgctgctgctgctgctgccctgggcctggcccccccagctgcccggggcctgctgaccccaccagccagccccctggagctgctggaggccaagcccaagagaggaagaagatcctggcccaggaagaggacagccacccacacctgcagctatgccggctgcggcaagacctacaccaagagcagccacctgaaggcccacctgcggacccacactggagagaagccctaccactgcaactgggatggctgcggctggaagtttgcccggagtgatgagctgaccaggcactacaggaagcacacaggccaccggcccttccagtgccacctgtgtgaccgggccttcagcagaagtgaccacctggccctgcacatgaagaggcacatgtag

SEQ ID NO: 190310 - DNA, 1068 bp, Artificial Sequence
  derived and/or modified sequence
atggccctgagcgagcccatcctgcccagcttcagcaccttcgcctctccgtgcagggagagagggctgcaggagaggtggccacgagcagaacctgaatccggaggcaccgatgatgaccttaactctgtactggatttcatactgtccatgggattagacgggcttggcgcggaggccgcccctgagccacctccccccccaccaccccctgccttttactacccagaacccggggctccacctccgtactcagccccagctggcggcctggtgagtgagcttctaagacccgagctggacgccccccttggtcccgcactccatggaagattcttgctggccccccccggacgccttgtcaaagccgagccccccgaggcagatggtggggggggctatggctgcgcccccggcctgactcgcggtccgcgggggctgaagagggaaggagcccctgggcccgcggccagctgcatgcgcggtcccggaggtaggccaccacctcctcccgacacgcctccactttccccagacggtcccgccaggctgccagctccaggaccgcgggctagtttccctccccctttcggcggaccgggattcggcgcacctggtcctggacttcattacgctcctcccgccccccccgcttttgggctgtttgatgatgccgcggctgcagcagccgccctgggactggctccaccagctgccagaggccttcttaccccacctgcctctccactggagctgctggaggccaagcctaaacggggacggcggtcctggccccggaagcgaacagcaacccatacatgcagctacgccggatgtggaaagacctacacaaagagcagccatctcaaggcacatctgcggacacatacaggagagaagccttatcactgtaactgggacgggtgcggttggaagttcgcccgcagcgacgagttaacacggcactataggaaacataccggccaccgccccttccagtgtcatctttgtgatcgggcattctcgagatccgatcatctcgcgctgcacatgaagcgccatatgtag

SEQ ID NO: 190311 - DNA, 1068 bp, Artificial Sequence
  derived and/or modified sequence
atggcgctctcagaacctattctgccttctttctctaccttcgcgtcaccttgtagggaacgtggtctccaagaaagatggcctagggcagagcctgagtcaggtgggactgatgacgaccttaactctgttttggacttcatcctctctatgggtctcgacggtctgggagccgaagctgccccagaaccccctcctcctcccccacctccagccttctattatcctgaaccaggagctccaccaccctactccgcccctgccggtggactcgtatccgagctgctgcgaccagaactggatgcaccactgggacccgcactacacggtagattcctcttagccccaccaggtcgccttgtgaaagctgagccaccagaagctgacggtgggggtggttacggttgtgcacctggtctcacccggggtccccgtggactcaaaagggagggtgcgccaggtccagcagcgagttgtatgcgcggaccaggtgggcgtccgccacctccacctgatactcctcctctgtcccccgacggtcccgcaagactccccgctcccggaccacgagcttctttcccccctccttttgggggaccaggctttggcgcacctggccctggtcttcactacgcaccccctgctcccccagccttcggacttttcgacgatgctgcggctgccgctgctgccctaggactcgccccaccggcagccagaggcttgcttactccccctgcctctccactagaattactagaggccaaaccaaagcggggacggaggtcctggcccaggaagcgtaccgccacccacacttgttcttatgctggatgcggtaaaacgtatactaagagtagccacctgaaagctcatctgaggacacacaccggagaaaagccttatcattgcaactgggatgggtgcggctggaaatttgccagatccgacgaattaaccagacactatcgtaaacataccggtcatagaccctttcagtgccacctttgcgaccgggctttttctaggtcagaccatcttgcccttcacatgaaacgccacatgtag

SEQ ID NO: 190312 - DNA, 1068 bp, Artificial Sequence
  derived and/or modified sequence
atggccctgagcgagcccatcctgcccagcttcagcaccttcgccagcccctgcagagagagaggcctgcaggagagatggcccagagccgagcccgagagcggcggcaccgacgacgacctgaacagcgtgctggacttcatcctgagcatgggcctggacggcctgggcgccgaggccgcccccgagccccccccccccccccccccccccgccttctactaccccgagcccggcgccccccccccctacagcgcccccgccggcggcctggtgagcgagctgctgagacccgagctggacgcccccctgggccccgccctgcacggcagattcctgctggccccccccggcagactggtgaaggccgagccccccgaggccgacggcggcggcggctacggctgcgcccccggcctgaccagaggccccagaggcctgaagagagagggcgcccccggccccgccgccagctgcatgagaggccccggcggcagacccccccccccccccgacaccccccccctgagccccgacggccccgccagactgcccgcccccggccccagagccagcttccccccccccttcggcggccccggcttcggcgcccccggccccggcctgcactacgccccccccgccccccccgccttcggcctgttcgacgacgccgccgccgccgccgccgccctgggcctggccccccccgccgccagaggcctgctgaccccccccgccagccccctggagctgctggaggccaagcccaagagaggcagaagaagctggcccagaaagagaaccgccacccacacctgcagctacgccggctgcggcaagacctacaccaagagcagccacctgaaggcccacctgagaacccacaccggcgagaagccctaccactgcaactgggacggctgcggctggaagttcgccagaagcgacgagctgaccagacactacagaaagcacaccggccacagacccttccagtgccacctgtgcgacagagccttcagcagaagcgaccacctggccctgcacatgaagagacacatgtag

SEQ ID NO: 190313 - protein, 245 aa, Artificial Sequence
  derived and/or modified sequence
MAEDLSAATSYTEDDFYCPVCQEVLKTPVRTTACQHVFCRKCFLTAMRESGAHCPLCRGNVTRRERACPERALDLENIMRKFSGSCRCCAKQIKFYRMRHHYKSCKKYQDEYGVSSIIPNFQISQDSVGNSNRSETSTSDNTETYQENTSSSGHPTFKCPLCQESNFTRQRLLDHCNSNHLFQIVPVTCPICVSLPWGDPSQITRNFVSHLNQRHQFDYGEFVNLQLDEETQYQTAVEESFQVNI

SEQ ID NO: 190314 - DNA, 738 bp, Artificial Sequence
  derived and/or modified sequence
atggccgaggacctgagcgccgccaccagctacaccgaggacgacttctactgccccgtgtgccaggaggtgctgaagacccccgtgagaaccaccgcctgccagcacgtgttctgcagaaagtgcttcctgaccgccatgagagagagcggcgcccactgccccctgtgcagaggcaacgtgaccagaagagagagagcctgccccgagagagccctggacctggagaacatcatgagaaagttcagcggcagctgcagatgctgcgccaagcagatcaagttctacagaatgagacaccactacaagagctgcaagaagtaccaggacgagtacggcgtgagcagcatcatccccaacttccagatcagccaggacagcgtgggcaacagcaacagaagcgagaccagcaccagcgacaacaccgagacctaccaggagaacaccagcagcagcggccaccccaccttcaagtgccccctgtgccaggagagcaacttcaccagacagagactgctggaccactgcaacagcaaccacctgttccagatcgtgcccgtgacctgccccatctgcgtgagcctgccctggggcgaccccagccagatcaccagaaacttcgtgagccacctgaaccagagacaccagttcgactacggcgagttcgtgaacctgcagctggacgaggagacccagtaccagaccgccgtggaggagagcttccaggtgaacatctag

SEQ ID NO: 190315 - DNA, 738 bp, Artificial Sequence
  derived and/or modified sequence
atggctgaagatcttagtgccgcaacgtcttacacagaggacgatttctactgtcctgtttgccaggaagtgctgaagactcccgtgcgcacgaccgcctgccagcacgttttctgtaggaagtgtttcctcacagccatgagggagagcggagcccactgtcccctatgtcgtggcaacgtcactaggcgtgagagagcctgcccggaacgggcactcgatctcgagaacatcatgcgtaaatttagtggcagctgtaggtgttgtgccaagcagatcaaattctacagaatgcgccaccattacaaaagctgtaagaagtaccaggacgagtacggcgttagttctatcatcccaaactttcagatttcccaggattccgttggcaattcaaacagatctgaaaccagtacgagcgataatacggaaacgtatcaggagaataccagtagcagcggtcacccgacttttaaatgccccctgtgtcaggagtccaacttcacacgtcagcgacttcttgaccactgcaactctaaccatctattccagatcgttcctgttacttgtccaatctgtgtgagtttaccttggggcgatcccagccaaataacacgcaatttcgtttcgcaccttaatcagaggcaccagtttgattatggcgagttcgtcaatttacagttagatgaggagacccaatatcagaccgccgtggaggagagttttcaggttaacatatag

SEQ ID NO: 190316 - DNA, 738 bp, Artificial Sequence
  derived and/or modified sequence
atggccgaggacctgtctgctgccaccagctacacagaagatgacttctactgccctgtgtgccaggaggtgctgaagacccctgtgaggaccacagcctgccagcacgtgttctgcaggaagtgcttcctgacagccatgagggagagcggggcccactgccccctgtgcagaggaaatgtgacccggcgggagcgggcctgcccagagcgggccctggacctggagaacatcatgaggaagttcagcggcagctgccgctgctgtgccaagcagatcaagttctacaggatgaggcaccactacaagagctgcaagaagtaccaggatgaatatggagtgagcagcatcatccccaacttccagatcagccaggacagcgtgggcaacagcaacagaagtgagaccagcaccagtgacaacacagagacctaccaggagaacaccagcagcagcggccaccccaccttcaagtgccccctgtgccaggagagcaacttcacccggcagaggctgctggaccactgcaacagcaaccacctgttccagatcgtgcctgtgacctgccccatctgtgtgtccctgccctggggagaccccagccagatcaccaggaactttgtgagccacctgaaccagaggcaccagtttgattatggagaatttgtgaacctgcagctggatgaggagacccagtaccagacagctgtggaggagagcttccaggtgaacatctag

SEQ ID NO: 190317 - DNA, 738 bp, Artificial Sequence
  derived and/or modified sequence
atggccgaggacctgagcgccgccaccagctacaccgaggacgacttttattgccctgtgtgtcaagaagtgctcaagacccccgtgagaacgactgcgtgtcagcacgtcttttgcaggaaatgctttcttacggctatgcgggaatcaggcgctcactgtcccctgtgtcggggaaatgttaccagaagagagcgagcttgtcccgagcgggcactagatttggagaatatcatgcgcaaatttagtggtagctgccgatgttgcgcaaagcagattaagttctacaggatgaggcaccactataagtcttgcaaaaagtaccaggatgaatatggcgtgagcagtataatccctaattttcagatctcgcaggatagtgtgggcaactctaacaggtccgagaccagcacatcagacaacacagagacttaccaagagaacactagttcgagtgggcatcctacattcaagtgccccttgtgccaggaatctaattttacaaggcagcgcctgctcgaccattgtaactccaatcatctgtttcagatagtgccagtgacctgtccaatctgcgtatccctcccgtggggagacccctcccagataaccagaaattttgttagtcacctgaaccagaggcatcaattcgactacggggagtttgtcaacttacagctagacgaggaaacacagtatcagactgcggtggaagaaagcttccaggtcaacatatag

SEQ ID NO: 190318 - DNA, 738 bp, Artificial Sequence
  derived and/or modified sequence
atggctgaagatttgtctgccgctacttcttacaccgaggatgacttctattgccccgtgtgtcaggaggtgttgaagaccccagtgcgcacaacggcctgccaacatgtcttttgccgtaagtgtttcctgactgccatgcgggaatctggagctcactgccctctgtgccgcggtaatgtgacccgtagagagcgagcttgccccgagagagcgctggatctcgaaaatataatgagaaagttcagtggctcatgtcgctgctgcgccaaacaaattaagttctatcggatgcgtcatcactataagagctgtaaaaaataccaggacgagtatggggtcagctccattatccctaactttcagatcagtcaggattccgtgggtaattccaatcggtcggaaactagtacttctgataacactgaaacctatcaggagaatacctcctccagtggccaccccacattcaagtgtcccctgtgccaagaaagcaattttaccagacagcgtctgctggatcattgcaactctaaccacctttttcaaatcgtgccagtgacatgcccaatatgcgtgagcctgccatggggcgatccctcacaaattactagaaacttcgtgtcacatctcaaccagcgtcaccagttcgactatggggagtttgtgaatctccagcttgatgaagaaactcagtatcaaactgcagttgaagagagcttccaagtaaacatttag

SEQ ID NO: 190319 - DNA, 3560 bp, Artificial Sequence
  derived and/or modified sequence
gcggaaggcgccgtgcgccggttgctatacaggccgcacttcacaccccgtgcctccccgcctctcctggctcctccgcccagatccccggcgctcccgcgttcggtgacggccgggtaggctgtaggcagcgcaatgccaagacagagctgctggcggcggcgggcgaatctccctgcaccatgagcctcggctccggccccgttaggggccgataagcacagcgcacgccgccctccatttgccccggggcctcggctgcgaagatagcggcggccggacaggaagctcgaggaaagcgctgggccgggtctctacgaacacgtgaaggaaaagcagctccgtccacaacgccgcttcggggctcctagggagtcgggccccgggccgccaccgtcacctcggccgctgccgctgtcgccatcgccttgtttccccatcccccgccatggccgaggacctctctgcggccacgtcctacaccgaagatgatttctactgccccgtctgtcaggaggtgctcaaaacgcccgtgcggaccacggcctgtcagcacgttttctgtagaaaatgtttcctgactgcaatgagggaaagcggagcacattgtcccctatgtcgtggaaatgtgactagaagagagagagcatgtcctgaacgggccttagaccttgaaaatataatgaggaagttttctggtagctgcagatgctgtgcaaaacagattaaattctatcgcatgagacatcattacaaatcttgtaagaagtatcaggatgaatatggtgtttcttctatcattccaaactttcagatctctcaagattcagtagggaacagcaataggagtgaaacatccacatctgataacacagaaacttaccaagagaatacaagttcttctggtcatcctacttttaagtgtcccctgtgtcaagaatcaaattttaccagacagcgtttactggatcactgtaacagtaatcacctatttcagatagttcctgtgacatgtcctatttgtgtgtctcttccttggggagatcctagccagattaccagaaatttcgttagtcatctaaatcagagacatcaatttgattatggagaatttgtgaatcttcagctagatgaagaaacccaataccaaactgctgttgaagaatcttttcaagtaaacatctgaaggctgtagacatctctgcatctttgtacctgcaagtgccatctttaagggggaaactacatgaagtcaccgttacagtaacttgatgtgtatattaataaaagtaattcagtcattttagtttttgattgaaaataaaggtagggcttctaaaaacttcatcatcttgataagttaaaaaatgaaagttatgacattagctttaaaggtgtaaaaaagatgtttcactaatgtaacggtgaaagagaatccctgttgtactttatctttttgtaatattatttttgaatttttcattattatgttgcttttgaaatttgatgcattcctcccatttactttattattgtacacatttaacacacagtagcaaattttgaacgatgtgattgatataacctaacaaatctgagccagttattattagagttgcagaatagaaacttgaagtgctaaatggaataatccaaaggaaattttttaaatgcaggttctagctgaaaaattcaactataagaaaattgtatttatataacatttactatttttgaagactagtgagatttctgtaataattttaattctttaaaaagtgaaagcttgttgtaaagatattttctttttgttattagaaggaaatacaaagagaaaaatttctttctttcatgggcatttgataatttcagtctttgactgatttgtaagcctagaatatactaagctgaataacagctctttggcctcagaattttcagtagccagtatttctgattaactaagttgaaactcttattagaaactttcagttggtgatattgtattctagaagatataaatgagaggtttggcttcatctcagtttagaaatttattcaaagctaaagatgtatatatacatatacttttgtgtgtatatatacacatatgtgtgtatgcagtttgtcaggttatatatagaatttctattaaggattttttaaatggacaagcaatagggggttgaagtgtttatctgatttgtttaaaattttgtatatcaccaaatttttaaaaagtgatagtcacagtgctaagttatctagttggctactattacaccttaaaaattgagtttacacacacacaattacctgtttatatggtgctcatttgttattctcaaatataatgtgtgaccgtgatatagtgagaaagattctaccaaccactgtttcactactttttagttaaaattgggtatgttcttaatattcattagtgagaatcacaaagtattttgtagaaggcccaaatcacagaataaaggactaagagtggatttgctgacattccatactaatatacattgtttatgctttctttaaaataactagaagaacataaaagaaagagaatctcagaagtagtttgctgctaatatatacatatattgtataaaaaggtatattttggttttgttaaaacccttgttgacttttctacactgaacattttttttaacttgatttaataaaaatgttaattttggaagtgcagttttgtaaaaacctttttcagtcaaacagtaaagactttatttatggattgtaataacaaccacaagaaaagccatacatcttaatgaacatacgcctttgttctgtcattttaaagagtggtgtttactatgtgtgtgcttgagcattttctttcagttacatgggtgtaatttaaaaaacagctcctttttaagacttttgaccatagtgttttccagtttaaagcaataactttcatagtttctttcaaagtttaatacatccaatatgtcaagttaaaccattctgggatttgcaaagtttaatacatccaatatgtcaagttaaaccattctgggatttgcaaagtttaatacatccaatatgtcaagttaaaccattctgggatttgggaacttctttaaaggaaaattgtagtagaggtcatcttgatggaattgtgttttaaagttttgtgaatgagttaaatatcattgatagtcttgtgtgtctcacatatcagctttttcataaggaaaatactttatttgcttttatctgagaatttctcagtatgaaaatgattgtttaaaatttcccctctttttgtcagtgcattgggaatagggatagactttacagatttatggaaattaaatttatggggaaaagtttatttttaatattacttatagctgagtcagaattaaaggagggaattgtattgatactccaatacctaaatttcacaataccacttaggaaagctatttcaacaaattacagttttattgttaaaacagagtcttatttgagatgtattgctttatttttcaattaaaagtggttttctccta

SEQ ID NO: 190320 - protein, 344 aa, Artificial Sequence
  derived and/or modified sequence
MQLEIKVALNFIISYLYNKLPRRRADLFGEELERLLKKKYEGHWYPEKPLKGSGFRCVHIGEMVDPVVELAAKRSGLAVEDVRANVPEELSVWIDPFEVSYQIGEKGAVKVLYLDDSEGCGAPELDKEIKSSFNPDAQVFVPIGSQDSSLSNSPSPSFGQSPSPTFIPRSAQPITFTTASFAATKFGSTKMKKGGGAASGGGVASSGAGGQQPPQQPRMARSPTNSLLKHKSLSLSMHSLNFITANPAPQSQLSPNAKEFVYNGGGSPSLFFDAADGQGSGTPGPFGGSGAGTCNSSSFDMAQVFGGGANSLFLEKTPFVEGLSYNLNTMQYPSQQFQPVVLAN

SEQ ID NO: 190321 - protein, 101 aa, Artificial Sequence
  derived and/or modified sequence
MQLEIKVALNFIISYLYNKLPRRRADLFGEELERLLKKKYEGHWYPEKPLKGSGFRCVHIGEMVDPVVELAAKRSGLAVEDVRANVPEELSVWIDPFEVSY

SEQ ID NO: 190322 - DNA, 1035 bp, Artificial Sequence
  derived and/or modified sequence
atgcagctggagatcaaggtggccctgaacttcatcatcagctacctgtacaacaagctgcccagaagaagagccgacctgttcggcgaggagctggagagactgctgaagaagaagtacgagggccactggtaccccgagaagcccctgaagggcagcggcttcagatgcgtgcacatcggcgagatggtggaccccgtggtggagctggccgccaagagaagcggcctggccgtggaggacgtgagagccaacgtgcccgaggagctgagcgtgtggatcgaccccttcgaggtgagctaccagatcggcgagaagggcgccgtgaaggtgctgtacctggacgacagcgagggctgcggcgcccccgagctggacaaggagatcaagagcagcttcaaccccgacgcccaggtgttcgtgcccatcggcagccaggacagcagcctgagcaacagccccagccccagcttcggccagagccccagccccaccttcatccccagaagcgcccagcccatcaccttcaccaccgccagcttcgccgccaccaagttcggcagcaccaagatgaagaagggcggcggcgccgccagcggcggcggcgtggccagcagcggcgccggcggccagcagcccccccagcagcccagaatggccagaagccccaccaacagcctgctgaagcacaagagcctgagcctgagcatgcacagcctgaacttcatcaccgccaaccccgccccccagagccagctgagccccaacgccaaggagttcgtgtacaacggcggcggcagccccagcctgttcttcgacgccgccgacggccagggcagcggcacccccggccccttcggcggcagcggcgccggcacctgcaacagcagcagcttcgacatggcccaggtgttcggcggcggcgccaacagcctgttcctggagaagacccccttcgtggagggcctgagctacaacctgaacaccatgcagtaccccagccagcagttccagcccgtggtgctggccaactag

SEQ ID NO: 190323 - DNA, 306 bp, Artificial Sequence
  derived and/or modified sequence
atgcagctggagatcaaggtggccctgaacttcatcatcagctacctgtacaacaagctgcccagaagaagagccgacctgttcggcgaggagctggagagactgctgaagaagaagtacgagggccactggtaccccgagaagcccctgaagggcagcggcttcagatgcgtgcacatcggcgagatggtggaccccgtggtggagctggccgccaagagaagcggcctggccgtggaggacgtgagagccaacgtgcccgaggagctgagcgtgtggatcgaccccttcgaggtgagctactag

SEQ ID NO: 190324 - DNA, 1035 bp, Artificial Sequence
  derived and/or modified sequence
atgcagctggagatcaaggttgctctgaactttatcatctcttatctgtataacaagctgcctcgcaggcgggccgacttattcggtgaggagctggaaagacttctgaaaaaaaaatacgaaggtcactggtaccccgaaaaacctctgaagggctctggctttcggtgtgtgcacatcggagaaatggtggatcccgtcgtcgagttggccgccaagagatccggcctggcagtggaagacgtgcgagccaatgtcccggaagagctctcggtgtggatcgaccctttcgaggttagctatcagatcggagagaaaggcgccgtgaaagtgctgtatctggatgatagtgaggggtgtggggcccccgagctcgataaggaaattaagtcgtcctttaacccggacgcacaagtgttcgtgcccattgggtcacaggactctagtctttcgaactctccctcaccttctttcggccagagccccagccccacctttatccccaggtcagcacagccaatcacctttactactgcttcatttgcggcaacaaaatttggatcaacaaaaatgaagaaaggcggtggcgccgcatccgggggcggagtggcctcctcaggcgccggcggacagcaaccccctcagcagccgaggatggcacggagtcccaccaacagcttattgaagcacaagtccctcagcctctcaatgcacagtctcaacttcatcaccgcaaatcccgcaccacagtcccagctaagccccaatgctaaagagtttgtgtataatgggggtggcagcccttctctgttcttcgatgctgctgacgggcagggctccgggaccccgggcccttttggcgggagcggagcggggacctgcaactcatcatccttcgacatggcacaggtctttgggggaggagcgaactctcttttcttggagaagactcccttcgtggaaggtctctcttataacctgaacacaatgcagtatccctcccaacagtttcagcctgtggtcttggccaattag

SEQ ID NO: 190325 - DNA, 306 bp, Artificial Sequence
  derived and/or modified sequence
atgcagctggagataaaagtggctttgaactttatcataagctacctgtataataaactgccgagacggcgcgccgatttgttcggggaagaattggagaggctgctgaaaaaaaaatatgagggacattggtaccctgagaagcctttgaagggctcaggttttcgatgcgtgcacattggcgaaatggtggaccccgtcgtggagctggccgccaaacgcagcggcttggcggtagaagatgtacgggctaatgtccccgaagagctgagcgtttggattgacccctttgaggtctcatactag

SEQ ID NO: 190326 - DNA, 1035 bp, Artificial Sequence
  derived and/or modified sequence
atgcagctggagatcaaggtggccctgaacttcatcatctcctacctgtacaacaagctgcccaggagaagagctgacctgtttggagaggagctggagcggctgctgaagaagaagtatgagggccactggtacccagagaagcccctgaagggcagcggcttccgctgtgtgcacatcggggagatggtggaccctgtggtggagctggccgccaagaggagcggcctggccgtggaggatgtgcgggccaacgtgcctgaggagctgtctgtgtggattgacccctttgaggtgtcctaccagattggagagaagggagctgtgaaggtgctgtacctggatgattctgagggctgtggggcccctgagctggacaaggagatcaagagcagcttcaacccagatgcccaggtgtttgtgcccatcggcagccaggacagcagcctgagcaacagccccagccccagctttggccagagccccagccccaccttcatccccaggtctgcccagcccatcaccttcaccacagccagctttgctgccaccaagtttggcagcaccaagatgaagaagggcggcggggccgccagcggcggcggcgtggccagcagcggggccggcggccagcagcccccccagcagcccaggatggcccggagccccaccaacagcctgctgaagcacaagagcctgagcctgtccatgcacagcctgaacttcatcacagccaacccagccccccagagccagctgagccccaatgccaaggagtttgtgtacaatggaggcggcagccccagcctcttctttgatgctgctgatggccagggcagcggcaccccaggcccctttggaggcagcggggccggcacctgcaacagcagcagctttgacatggcccaggtgtttggaggaggagccaacagcctcttcctggagaagaccccatttgtggagggcctgagctacaacctgaacaccatgcagtaccccagccagcagttccagcctgtggtgctggccaactag

SEQ ID NO: 190327 - DNA, 306 bp, Artificial Sequence
  derived and/or modified sequence
atgcagctggagatcaaggtggccctgaacttcatcatctcctacctgtacaacaagctgcccaggagaagagctgacctgtttggagaggagctggagcggctgctgaagaagaagtatgagggccactggtacccagagaagcccctgaagggcagcggcttccgctgtgtgcacatcggggagatggtggaccctgtggtggagctggccgccaagaggagcggcctggccgtggaggatgtgcgggccaacgtgcctgaggagctgtctgtgtggattgacccctttgaggtgtcctactag

SEQ ID NO: 190328 - DNA, 1035 bp, Artificial Sequence
  derived and/or modified sequence
atgcagctggagatcaaggtggccctgaacttcatcatcagctacctgtacaataaactcccgagacgcagggctgacttatttggcgaagagctagagcgcttgctgaaaaagaagtacgagggacactggtatccagagaagccactgaagggaagcggctttcgctgtgttcacatcggtgagatggttgatcccgtagtcgagctggccgctaaacgctccggtctcgccgttgaggatgtgcgcgctaatgtccctgaggaactgagtgtctggattgatccgttcgaagttagctaccaaataggggagaaaggagccgtgaaggttctgtacctggacgattccgaaggctgcggtgctcctgagctcgacaaggaaataaagagttcattcaacccggatgcccaggtatttgtgccaatcggctctcaggatagcagcctgagtaacagcccttctcccagcttcggccagagcccatcccccactttcatcccacgctctgcacagcccattactttcactacagcctcctttgctgccaccaaattcgggagcactaagatgaaaaaaggaggcggggcagcctcgggggggggtgtggcctcctcaggggctggcggccagcagccaccacagcagccgagaatggctcggagtcccacaaactcactgcttaagcacaaatcactgagtctttccatgcactccctcaactttatcaccgccaaccccgcacctcagagtcagctgagccctaatgccaaagaattcgtatacaatggcggaggctcacccagcttgtttttcgacgcagcagatggccagggaagtgggacaccaggtccattcggtggttcaggagccggtacatgcaacagctcaagctttgacatggctcaggtcttcggagggggggcaaatagcctgtttctggagaagacacccttcgtagagggcctctcctacaacttgaacacaatgcaatatccttcgcaacagttccagccagtggtattagctaactag

SEQ ID NO: 190329 - DNA, 306 bp, Artificial Sequence
  derived and/or modified sequence
atgcagctggagatcaaggtggccctgaacttcatcatcagctacctgtacaataagctgcctagaaggagggcggatctgtttggtgaggaattggaaaggctgctgaagaagaaatatgagggacattggtacccagaaaagcccttaaaaggttctggctttagatgcgtccatatcggggagatggtggatccagtggttgagctcgccgcaaagcgatcaggactggccgtggaagacgtgagggctaatgtgcccgaagagctctctgtctggatcgatccctttgaggtgagttattag

SEQ ID NO: 190330 - DNA, 1035 bp, Artificial Sequence
  derived and/or modified sequence
atgcagcttgagattaaggtcgctctgaattttattatatcatacctctacaacaagctgccaaggcgtcgtgccgacctgttcggcgaggagcttgaacggctgctgaaaaaaaaatatgaaggacactggtatccggaaaaacctctcaaaggctccggctttcgctgtgtgcatatcggtgaaatggtcgaccccgttgtggaattagctgcaaagcgatcgggcctggctgtcgaggatgtgcgggcaaatgtccctgaggagctgagtgtgtggatcgacccattcgaggtgtcatatcagatcggtgagaagggtgcagtgaaagtcctgtacctggacgacagcgaaggatgcggggctcctgaacttgataaggaaataaaaagcagtttcaatccagacgcccaggtgtttgtccccatcggttcccaggacagtagcttatcgaattcccccagcccatcattcggtcagagcccaagccctaccttcattccaaggagcgcacagccgatcacttttactaccgcatccttcgcagccaccaaattcggctcaactaagatgaagaagggtggcggtgcagcatctggaggtggagtcgcatctagtggcgctggagggcagcagcctccacagcaaccaaggatggcaaggagtccaaccaacagcctgctcaaacacaaatccctctcgctgtctatgcatagcctaaacttcatcaccgcaaatccagctccacagtctcagctgtccccaaatgccaaagagtttgtttataatggtggtgggtcacccagcctcttcttcgacgccgcagatggccaaggctccgggacccctggtccgttcgggggatcgggcgctggaacatgtaactcctcctcttttgacatggctcaggtgttcggaggcggtgcaaactcgctgttcctggaaaagactccatttgtagaagggctaagttataacctgaacacaatgcagtatcccagccagcaatttcagcctgtggttctggctaattag

SEQ ID NO: 190331 - DNA, 306 bp, Artificial Sequence
  derived and/or modified sequence
atgcagttagaaattaaggtggcactcaatttcattatcagctatctttacaataagttgcccaggcggagggcagacctgttcggcgaggagctggaacgcttgctgaaaaagaaatacgaaggacattggtaccccgagaagccacttaaaggatccggatttcgctgcgtacacattggtgaaatggttgaccctgtcgtggaactggctgcaaagcggtctggcttggccgtagaagatgtgcgggcaaacgtgcctgaggaactttcggtgtggattgaccccttcgaagtctcgtattag

SEQ ID NO: 190332 - DNA, 4561 bp, Artificial Sequence
  derived and/or modified sequence
cagggaggggaagacggggagccggacgcacgaccggcgagcacagaagggcacaggagctgctccgcgagataccagcgagctgaggcgcggggctggctgggaagtagtcccggccgggccctggccccgcccctgcagggcggagggacgcatcacgcaggggtggggaagccggatccgtgcgcagggttgctaagggtgaaacttttcattgactttgctcacttcgggccggggcgcgggaaggtgcgggttgttggctgaggcaagccgtggctcgggcgacgcggggccaggagggcaggaccgtctgccggcgacagcccataccgtctgccgttgcgcgacacgaaccaccctccgatccgccatccccgcgtcgtcgccgctagtccgcccgcccgccctcgggccccccgctgccgagcccgacctcctaagagctgaaagaaattattgagagtcatagtccatagccccctgcttcgtcccccaaccctcaacgacgaaaaggacttcggtcccctggcccggcgacgcccgggaaggaaaggagagcgacctccgccccgcgctcaggccaccctggagggagaagccgccccgcggccggtagagcgccccgccgccgcggagacccgaagccgcctggagcccaaggctgtacacgtgccctgtgctgattctctgcctaggaaaggaccatgcagctagagatcaaagtggccctgaacttcatcatctcctacttgtacaacaagctgccccggcgccgggcagacctgtttggggaggagctagagcggcttttgaaaaagaaatatgaaggccactggtaccctgagaagccactgaaaggctctggcttccgctgtgttcacattggggagatggtggaccccgtggtggagctggccgccaagcggagtggcctggcggtggaagatgtgcgggccaatgtgcctgaggagctgagtgtctggattgatccctttgaggtgtcctaccagattggtgagaagggagctgtgaaagtgctgtacctggatgacagtgagggttgcggtgccccagagctggacaaggagatcaagagcagcttcaaccctgacgcccaggtgttcgtgcccattggcagccaggacagctccctgtccaactccccatcgccatcctttggccagtcacccagccctaccttcattccccgctccgctcagcccatcaccttcaccaccgcctccttcgctgccaccaaatttggctccactaagatgaagaaggggggcggggcagcaagtggtgggggtgtagccagcagtggggcgggtggccagcagccaccacagcagcctcgcatggcccgctcacccaccaacagcctgctgaagcacaagagcctctctctgtctatgcattcactgaacttcatcacggccaacccggcccctcagtcccagctctcacccaatgccaaggagttcgtgtacaacggtggtggctcacccagcctcttctttgatgcggccgatggccagggcagcggcaccccaggcccgtttggaggcagtggggctggcacctgcaacagcagcagctttgacatggcccaggtatttggaggtggtgccaacagcctcttcctggagaagacaccctttgtggaaggcctcagctacaacctgaacaccatgcagtatcccagccagcagttccagcccgtggtgctggccaactgaccatctacctgcccgtggggccaggagcacccaagaccacagaaaagagaaaggaaaggccaaaaaaaagaggaaaagaaaaatgtacaaaaagattttcgatcttctcactcttacttctagaaaaaagatccagcccaggcacggaatgggagggccctgcaaagcacccaagtgtgtttcactcaccccttaccgctcgcccaccggcctgtgatttatttggttggtttgggttttatatttctttttcttttttttttttcttacatgtagttttctatataacatctttaatgagtggcttcctgtgctaagaatggtccagatgtgaactgctgctccctgctcctcccttcctccttcacactcctagtttaggattgatgtgtccaagctcatagggaagaaagagctgcagctggagcctgaccctccctggaacagggagaggctggcccgtgtcactgcctctgtcacccagctatcctcgcactcaaagccatccaacctcagcaggccttctcgggccctgccacctgaataggtctgaccccagtccccactccctttcaggctgggccacagggagttgctggctggccacttgacaccctccccctggagctgatgtctgtgactacagggagattagcacttcgtctagtgaaactcctttcatctctgtcctatggccccaccccaccattccctctaggcccagaccatcatcatggccctggccattgatgtgtatgggctttctttccctcatgcagccccttcttccccaggctggatgttgtgggtagggaggggtgtgtgtgtgtgtatttggtttgctgtccttttttaaaggattccaagccatgtgaaacttcccttctggatgtgattctgggtcgcaagtccttatttatatgtgaggctggggaatgggctgggggtattggcagtccttttgcagggcagtgtgtgtggtggggtgacaccgctgtggcttagcccaagacactcccagaggaaaacactgcagaaggaactggtttgcagactgtggaaggatctgcagttttgtttttgaccaaaaaaataataataagttagctctgaagggcagagggaatacccaagcccctgatgcctatgagaagtccctggacttcaaccctcctgttgtttggccttagcccagagggagctgctcacctgagcacccttgggggtgggcagagaggcagggtgggattttagagttagtgtctgtgcgggggcagccctgagcctggagttgagactttggggtctcttagtttggaggtgttgagtgcatttgtgcccctgcctggttgagagcttcttggtacctcttgccaccccttctcactgccctgacccaaccccactggaccttgatgctgcgaggagtggtgtcctgacggactcagcactcccgcctgatgtattggatcataggagagcacttgctctcctgcctctgccaggagagggcttgttcctccaactctaggaggccaggcaagcatggacaggagccaagggagcagggtcattaactttttcttctttgcaaagtgggcacttggcatcagggtcccaatcaccagaaagcaccaaagcccctggcaccccacccactccatcctacccagggaccccaagtaggcaactgttatggcagtgggtccagcccaggccagcactgccagcctcctctccctgcagtaggcaccagctctacctcccccggcaggcaatgtcctggcttctcagcccagcaccatctgttcccctagacttctcaggggccagcccagtctgggccaccctttgtttccctcatcctcggctcccacacaggtgacagacccagcagatagcttctctctgggaaaggttggatgctgccttacatccccttctagccctcctcccatccacacacacaggcacccacccacaccaggtcggcttgtttctcacatgtagggagagaggggagaccaacccctttgtgtcttttgaaatacgaagaaaaatgtgtgttcaggagcatgactccagtgctgcgctcttgggcccagttcagtctgtcttgtctcaaatctaggcatttttgcttcaattttattttttttaagaatacaaaaacagaaatctgcactaatttacctggtttcgtaggaaaacttttttttattttttacattttttggtgtccgtttgtattgaataatttgctacatttgtaaaatgtaagaggtatataatatatgtatatttctaacgtaaaaaacataatttttttcttttcaagattttttcttaaaaagatgagagaaacatattttttcaggaaaaacaaactttaaaaaaaaaagaggagaaataaaaccttttctcccctttccccatcctctatctatccctctttcccaggaacaaatcaaaaggtggattatcttctgaagaatggaaactgttagtccagaatgatgtgtttttctcaatgcagtgagttatagattctctagttttctccctagggatgggaagggggcattgaggcaagcctggagaggagcccggggagcagggtcatgaacttttttctttagtgaaggaggaatacaatcaagggttttgtattcagaatgttgtgcaatattttggaatgggacattggtgtgtttagagattttagtttaaaaacaaaacaaaaagattgatcaaatctgtacagtttctattgttccagatttttttaagtttgtattaaaagcatgatacataatagc

SEQ ID NO: 190333 - DNA, 777 bp, Artificial Sequence
  derived and/or modified sequence
ggcgcgggaaggtgcgggttgttggctgaggcaagccgtggctcgggcgacgcggggccaggagggcaggaccgtctgccggcgacagcccataccgtctgccgttgcgcgacacgaaccaccctccgatccgccatccccgcgtcgtcgccgctagtccgcccgcccgccctcgggccccccgctgccgagcccgacctcctaagagctgaaagaaattattgagagtcatagtccatagccccctgcttcgtcccccaaccctcaacgacgaaaaggacttcggtcccctggcccggcgacgcccgggaaggaaaggagagcgacctccgccccgcgctcaggccaccctggagggagaagccgccccgcggccggtagagcgccccgccgccgcggagacccgagtgaagccgcctggagcccaaggctgtacacgtgccctgtgctgattctctgcctaggaaaggaccatgcagctagagatcaaagtggccctgaacttcatcatctcctacttgtacaacaagctgccccggcgccgggcagacctgtttggggaggagctagagcggcttttgaaaaagaaatatgaaggccactggtaccctgagaagccactgaaaggctctggcttccgctgtgttcacattggggagatggtggaccccgtggtggagctggccgccaagcggagtggcctggcggtggaagatgtgcgggccaatgtgcctgaggagctgagtgtctggattgatccctttgaggtgtcctacc

SEQ ID NO: 190334 - protein, 195 aa, Artificial Sequence
  derived and/or modified sequence
MRLLLLLLVAASAMVRSEASANLGGVPSKRLKMQYATGPLLKFQICVSCGYRRVFEEYMRVISQRYPDIRIEGENYLPQPIYRHIASFLSVFKLVLIGLIIVGKDPFAFFGMQAPSIWQWGQENKVYACMMVFFLSNMIENQCMSTGAFEITLNDVPVWSKLESGHLPSMQQLVQILDNEMKLNVHMDSIPHHRS

SEQ ID NO: 190335 - DNA, 588 bp, Artificial Sequence
  derived and/or modified sequence
atgagactgctgctgctgctgctggtggccgccagcgccatggtgagaagcgaggccagcgccaacctgggcggcgtgcccagcaagagactgaagatgcagtacgccaccggccccctgctgaagttccagatctgcgtgagctgaggctacagaagagtgttcgaggagtacatgagagtgatcagccagagataccccgacatcagaatcgagggcgagaactacctgccccagcccatctacagacacatcgccagcttcctgagcgtgttcaagctggtgctgatcggcctgatcatcgtgggcaaggaccccttcgccttcttcggcatgcaggcccccagcatctggcagtggggccaggagaacaaggtgtacgcctgcatgatggtgttcttcctgagcaacatgatcgagaaccagtgcatgagcaccggcgccttcgagatcaccctgaacgacgtgcccgtgtggagcaagctggagagcggccacctgcccagcatgcagcagctggtgcagatcctggacaacgagatgaagctgaacgtgcacatggacagcatcccccaccacagaagctag

SEQ ID NO: 190336 - DNA, 588 bp, Artificial Sequence
  derived and/or modified sequence
atgcgactgcttctattgcttctcgtggccgccagtgcaatggttcgcagcgaagcctcagccaatctgggaggcgtgcccagcaagagactaaagatgcagtacgcgaccgggcccctgttgaaatttcagatttgtgtcagctgagggtatagacgggtgtttgaggaatatatgcgcgtgatctcccagaggtacccggacattcgtatcgagggggaaaactatctgccacaacctatctaccggcatatcgcaagtttcctgtctgttttcaagctggtgcttatcggactcattatcgtgggcaaggatccttttgcattctttggaatgcaggctccttccatctggcagtggggacaagagaataaggtctacgcgtgcatgatggtctttttcctctcgaatatgatcgaaaatcagtgcatgtcgacaggtgctttcgagatcacgcttaacgacgtgccagtttggtctaaactggaatctggtcacctgccatctatgcaacagctggtacagatcctggataatgaaatgaaactgaacgtgcacatggatagtattccacaccatagaagctag

SEQ ID NO: 190337 - DNA, 582 bp, Artificial Sequence
  derived and/or modified sequence
atgaggctgctgctgctgctgctggtggccgccagcgccatggtgcgctctgaggccagcgccaacctgggcggcgtgcccagcaagaggctgaagatgcagtatgccaccggccccctgctgaagttccagatctgtgtgtcctaccgccgggtgtttgaggagtacatgagggtcatcagccagcgctacccagacatcagaattgaaggagagaactacctgccccagcccatctaccgccacatcgccagcttcctgagcgtcttcaagctggtgctgattggcctcatcatcgtgggcaaggacccctttgccttcttcggcatgcaggcccccagcatctggcagtggggccaggagaacaaggtgtatgcctgcatgatggtgttcttcctgagcaacatgattgagaaccagtgcatgagcactggagcctttgagatcaccctgaatgatgtgcctgtgtggagcaagctggagagcggccacctgcccagcatgcagcagctggtgcagatcctggacaatgagatgaagctgaatgtgcacatggacagcatcccccaccacaggagctag

SEQ ID NO: 190338 - DNA, 588 bp, Artificial Sequence
  derived and/or modified sequence
atgcggctgctgctgctgctgctggtggccgccagcgccatggtgcgctccgaagcctccgccaatttgggcggagtccctagtaaaagacttaaaatgcaatacgccaccgggcctctcttaaagttccagatctgcgtgtcctgaggttatagaagggtgttcgaagaatacatgcgggtgatctctcagagatatcctgacatacggattgagggtgaaaactatcttccccaaccgatctacagacacatcgcctcctttttaagcgtcttcaagctcgtgctgatcggcctgattatcgtgggaaaagatcctttcgcgttttttggaatgcaggcccctagcatatggcaatggggtcaggaaaataaggtatatgcctgcatgatggtgttttttctttccaatatgattgagaatcaatgtatgtcgaccggagcctttgagatcaccctcaatgatgtgccagtttggtctaaactggaaagcggtcatctgccctcaatgcagcagctcgtccagatcttggataatgagatgaaacttaatgttcacatggattctattccgcatcatagatcctag

SEQ ID NO: 190339 - DNA, 588 bp, Artificial Sequence
  derived and/or modified sequence
atgagacttctgctgctgctgttggttgcagcttccgctatggtcagatccgaggccagtgctaacctgggtggagtgccctctaaacgcctaaagatgcagtatgccaccggacccctgctgaagttccagatatgcgttagttgagggtatcgcagggtgtttgaggagtacatgagggtgatatctcagaggtaccccgacattagaattgagggcgaaaattacctgccccagcctatttacaggcatatcgcaagtttcttaagcgtatttaaactggtcttgattggccttatcatcgtgggcaaggatccattcgccttcttcgggatgcaggcacctagtatctggcagtggggacaagagaacaaggtatatgcttgtatgatggtgttcttcctgtccaatatgatcgaaaaccaatgcatgtcaactggagcatttgagatcaccctgaacgatgtaccagtgtggagtaagctggaatccgggcaccttccttctatgcaacagctcgtgcagatcctagacaatgagatgaaactcaacgtccacatggactccatcccacaccatagaagctag

SEQ ID NO: 190340 - DNA, 3469 bp, Artificial Sequence
  derived and/or modified sequence
gggagcagctcgctcctgggctttgggctggctgcagtctgtctgagggcggccgaagtggctggctcatttaagatgaggcttctgctgcttctcctagtggcggcgtctgcgatggtccggagcgaggcctcggccaatctgggcggcgtgcccagcaagagattaaagatgcagtacgccacggggccgctgctcaagttccagatttgtgtttcctgaggttataggcgggtgtttgaggagtacatgcgggttattagccagcggtacccagacatccgcattgaaggagagaattacctccctcaaccaatatatagacacatagcatctttcctgtcagtcttcaaactagtattaataggcttaataattgttggcaaggatccttttgctttctttggcatgcaagctcctagcatctggcagtggggccaagaaaataaggtttatgcatgtatgatggttttcttcttgagcaacatgattgagaaccagtgtatgtcaacaggtgcatttgagataactttaaatgatgtacctgtgtggtctaagctggaatctggtcaccttccatccatgcaacaacttgttcaaattcttgacaatgaaatgaagctcaatgtgcatatggattcaatcccacaccatcgatcatagcaccacctatcagcactgaaaactcttttgcattaagggatcattgcaagagcagcgtgactgacattatgaaggcctgtactgaagacagcaagctgttagtacagaccagatgctttcttggcaggctcgttgtacctcttggaaaacctcaatgcaagatagtgtttcagtgctggcatattttggaattctgcacattcatggagtgcaataatactgtatagctttccccacctcccacaaaatcacccagttaatgtgtgtgtgtgttttttttttaaggtaaacattactacttgtaactttttttcttagtcatatttgaaaaagtagaaaattgagttacaatttgattttttttccaaagatgtctgttaaatctgttgtgcttttatatgaatatttgttttttatagtttaaaattgatcctttgggaatccagttgaagttcccaaatactttataagagtttatcagacatctctaatttggccatgtccagtttatacagtttacaaaatatagcagatgcaagattatgggggaaatcctatattcagagtactctataaatttttgtgtatgtgtgtatgtgcgtgtgattaccagagaactactaaaaaaaccaactgctttttaaatcctattgtgtagttaaagtgtcatgccttgaccaatctaatgaattgattaattaactgggcctttatacttaactaaataaaaaactaagcagatatgagttaaatttaaaagtttcaatttattgctcagtgtacctgttaacattatatttaacaattgcttaaatttttgtttttgatttatggataatttcttaagagtacacactttagatacacaaataatcgttcatttaccatctttaggatcattgaaactcatctcactaaagaaagttcacttgaacctctttatagcattgatactaggtgaacagaaattacctgactaataatttgtctaacatcatatatcagaattttattgtatatgatgaacaaaacttaaaattttttaaatttaatttttaaatactgtttcagagttctaaaaaggcagttttttaaaaaacttaagttgataaaaactgtaagaataatttagcagaaatagaaccagaatgtagaagagtagtcatgtaacagcagtaataacatacttcagcttccatataggaatagaagtggtagagccaaaagtgatttaggaaaagttataaggtacaggttgagtatcccttttccaaaaatgcttgggacaagaagtatttcagatttcataatttttttcaaagtttggaatatttgcattatacttaccagttgggcatcccaaatctgaaatctgaaatgttccatgagcatttcctttgagtgtcatgttggcactcaaaaaggttcaacattgagtccacttaacacttaggtgttagaagacctaactttctgtaacaattaaccttatactttgtttgtcatcgaatatttgttgaatgcatgtcaggtaatggtcttgattgtgatagcttcaaggtggaacatactgtaatctccagatgctaggaagttagtctaataattcactgcagaaaattgattaagtggctgtccttttaattaagagtgtggagtcataaacttaagttcttcatatagtgacaagagtccttagagattgttattcaagttccttagaaattgttatttaggtataatatcatcttgtctttgactagagcttgaaaccttgttatctgattgtgtaccactccaaattccctgccttctgcaagttgaatgtcttgctgaatgtgtctaggggttcatcttcagtaatcgacattccactagtgccatagttaacttcatgacatgtagacattcaaaacttgagccttggatgttcctgtggacctgacagttaaaaatataaagaacctaggattcaattccaactttctctgtttgccttgggttgaataacttatcttttggagaatagctttaagtggcttagacactgataaaattcagctgtgttgttgacgctcatctcttttgtcttacgcttagccatatttaaatcttgaatttaatagagtctagtgaaaaaaatgagtgggaagaatgaatataaaagtaataatataaggaaaaagggaaagtaaactatttagaatgtagttttgttatattcccagcatttcaatatttattagttacttgtaaattactgtggctgtgtagtttataaatgtctgtgcactatattaattagaagaccatagaacatgccagcaggttggctaatgctatgggggtttttaccacagttgccattgtggaagaaattatttggtacattaataaaaaaagttggtaaaacatggttttatacctcagtgtataagatgtgcaagacaaatatgcttatttccttttctagaatataagtgatattatttgcttatgacactaacactattaatgacaggagtcaatcagcctttacagctatcaaaatataatgagatcccaatgatgattcttttttactttgaatgttaattagtttgggactttgattggctggcaaacattttatcattgtcagaatttaatttagatttcaaaaatagcttacaggattttaaacatggtgtggtattctaaagccttttttttaaaaaaagagatctttttgagagaaacaaatgaggattgtaaagtttggggacttacctctgtagcattgtgaaaataaactttgattaagctg

SEQ ID NO: 190341 - protein, 427 aa, Artificial Sequence
  derived and/or modified sequence
MQGLLTSGRKPSGGGRCTGRGGWRGQWCLKPWMGGADPPTPTLSCLLLPVPPELPDHCYRMNSSPAGTPSPQPSRANGNINLGPSANPNAQPTDFDFLKVIGKGNYGKVLLAKRKSDGAFYAVKVLQKKSILKKKEQSHIMAERSVLLKNVRHPFLVGLRYSFQTPEKLYFVLDYVNGGELFFHLQRERRFLEPRARFYAAEVASAIGYLHSLNIIYRDLKPENILLDCQGHVVLTDFGLCKEGVEPEDTTSTFCGTPEYLAPEVLRKEPYDRAVDWWCLGAVLYEMLHGLPPFYSQDVSQMYENILHQPLQIPGGRTVAACDLLQSLLHKDQRQRLGSKADFLEIKNHVFFSPINWDDLYHKRLTPPFNPNVTGPADLKHFDPEFTQEAVSKSIGCTPDTVASSSGASSAFLGFSYAPEDDDILDC

SEQ ID NO: 190342 - protein, 393 aa, Artificial Sequence
  derived and/or modified sequence
MQGLLTSGRKPSGGGRCTELPDHCYRMNSSPAGTPSPQPSRANGNINLGPSANPNAQPTDFDFLKVIGKGNYGKVLLAKRKSDGAFYAVKVLQKKSILKKKEQSHIMAERSVLLKNVRHPFLVGLRYSFQTPEKLYFVLDYVNGGELFFHLQRERRFLEPRARFYAAEVASAIGYLHSLNIIYRDLKPENILLDCQGHVVLTDFGLCKEGVEPEDTTSTFCGTPEYLAPEVLRKEPYDRAVDWWCLGAVLYEMLHGLPPFYSQDVSQMYENILHQPLQIPGGRTVAACDLLQSLLHKDQRQRLGSKADFLEIKNHVFFSPINWDDLYHKRLTPPFNPNVTGPADLKHFDPEFTQEAVSKSIGCTPDTVASSSGASSAFLGFSYAPEDDDILDC

SEQ ID NO: 190343 - DNA, 1284 bp, Artificial Sequence
  derived and/or modified sequence
atgcaaggcctacttacctccgggcgcaagccctcagggggagggagatgcacagggcgaggcggctggcgcggacagtggtgtctcaagccctggatgggaggcgcagacccacccaccccaaccctcagctgcctgctgctgcctgtcccccctgagcttccagaccactgttaccgcatgaacagtagccccgccggcactccctctccacagccatctagggccaacgggaacattaacttggggccaagtgccaaccccaatgctcagccaaccgatttcgatttcttgaaagtcattggaaagggcaattatggcaaagttctgctggcgaagcgaaagagcgatggggccttctatgcggtgaaagtcctgcagaaaaagagcatactgaagaaaaaagagcagtctcatatcatggccgagcggagtgtgctgctaaaaaacgtgagacacccttttctcgttggactcagatactcatttcaaacccccgagaagctgtattttgtgctggattacgtcaatgggggagagttgttctttcacttacagcgagagcgtcggttcttagaaccacgcgctcgattttacgcggcagaagttgcatcagcgattggctacttgcactccctgaatattatctatagggacctgaaacctgagaacatcctgctggattgccagggtcacgtggtcttaaccgacttcggcctctgtaaagagggcgttgaacctgaggatacaacctctacgttttgtggaactccggagtatcttgcgccagaggttttgaggaaagagccttacgaccgcgccgtggattggtggtgcctgggcgcagtgctgtatgagatgctgcatggtctaccaccgttctacagccaagacgtgagtcaaatgtacgaaaatatcctccatcagcccttacaaatccctggggggcgaactgtggccgcgtgcgatttgcttcagtctttactgcacaaagaccagcgccagcggctcgggtccaaagctgacttcctggaaatcaagaatcatgttttctttagccccattaactgggatgatctgtatcataagagattgacaccacccttcaaccccaatgtcacaggccctgccgatctgaaacacttcgaccctgagttcacacaggaagccgtctccaaatctataggttgcactcccgacaccgtcgcatcttctagcggagcctcctccgcttttcttgggttcagctatgcaccagaggacgatgatatactggactgctag

SEQ ID NO: 190344 - DNA, 1182 bp, Artificial Sequence
  derived and/or modified sequence
atgcaggggcttctaacttccggcaggaaaccctccgggggtgggaggtgtacagagctccccgatcattgctatcgcatgaatagctcaccagctggaactccttccccacagccgtccagagcaaatggcaatattaatttgggcccaagtgccaacccaaatgcacaaccaaccgacttcgattttctaaaggtgataggcaagggaaactatggcaaagtactcctcgctaagagaaaaagcgatggcgctttctatgcagtgaaggtgttgcagaagaagtctatcttgaaaaaaaaggagcagagccatatcatggcagaacgcagcgtcctgttgaaaaacgtgcgtcacccctttttggtgggacttcggtattctttccagacacctgagaaactgtatttcgttctcgactacgtgaacggcggggagctgtttttccacttgcagagggagagaagatttctggagccccgtgccagattctatgctgctgaggttgccagcgcaataggataccttcattcactcaacatcatttacagagacttgaaaccagagaatatactgctggattgtcaggggcacgtcgtgctgaccgactttggactgtgtaaggagggcgtggagcctgaggatactacaagcacattttgcggtacgcccgaatatctggcccctgaagtactgcggaaagaaccatacgaccgggcagtagattggtggtgtctaggagccgttctctacgagatgctgcatgggctgccacctttttactcccaggacgttagccagatgtacgagaacatcctgcatcaaccccttcaaatccccggaggacgtaccgtggccgcctgcgacttgctgcagagtctgctacataaggaccagaggcagcggctcggtagcaaagccgacttccttgagatcaaaaatcacgtgtttttctccccaatcaattgggacgacctttaccataagcgattgacccccccattcaatccaaacgtgacagggcccgcggatttaaaacacttcgaccctgagttcacccaggaggcagtcagcaagagtattggttgcactcccgatacggtggcttcgtcaagtggagcatcatcggctttcctgggattttcttatgcgcctgaggatgacgatatccttgattgctag

SEQ ID NO: 190345 - DNA, 1284 bp, Artificial Sequence
  derived and/or modified sequence
atgcagggcctgctgaccagcggcaggaagcccagcggcggcggccgctgcaccggccggggcggctggaggggccagtggtgcctgaagccctggatgggcggcgctgacccccccacccccaccctgagctgcctgctgctgcctgtgcccccagagctgcctgaccactgctacaggatgaacagcagccctgctggcacccccagcccccagcccagccgggccaatggaaacatcaacctgggccccagcgccaaccccaatgcccagcccacagactttgacttcctgaaggtgattggaaaaggaaactacggcaaggtgctgctggccaagaggaagagtgatggagccttctatgctgtgaaggtgctgcagaagaagagcatcctgaagaagaaggagcagagccacatcatggccgagaggtctgtgctgctgaagaatgtgcgccaccccttcctggtgggcctgcgctacagcttccagaccccagagaagctgtactttgtgctggactatgtgaatggaggagagctgttcttccacctgcagcgggagcggcgcttcctggagccccgggcccgcttctacgccgctgaggtggccagcgccatcggctacctgcacagcctgaacatcatctacagagacctgaagccagagaacatcctgctggactgccagggccacgtggtgctgacagactttggcctgtgcaaggagggcgtggagcctgaggacaccaccagcaccttctgtggcaccccagagtacctggcccctgaggtgctgaggaaggagccctatgacagagctgtggactggtggtgcctgggcgctgtgctgtatgagatgctgcacggcctgccccccttctacagccaggatgtgtcccagatgtatgagaacatcctgcaccagcccctgcagatccctgggggccgcacagtggccgcctgtgacctgctgcagagcctgctgcacaaggaccagaggcagaggctgggcagcaaggctgacttcctggagatcaagaaccacgtgttcttcagccccatcaactgggatgacctgtaccacaagaggctgaccccacccttcaaccccaacgtgacaggccctgctgacctgaagcactttgatcctgagttcacccaggaggccgtgtccaagagcatcggctgcaccccagacacagtggccagcagcagcggggccagcagcgccttcctgggcttctcctatgccccagaagatgatgacatcctggactgctag

SEQ ID NO: 190346 - DNA, 1182 bp, Artificial Sequence
  derived and/or modified sequence
atgcagggcctgctgaccagcggcaggaagcccagcggcggcggccgctgcacagagctgcctgaccactgctacaggatgaacagcagccctgctggcacccccagcccccagcccagccgggccaatggaaacatcaacctgggccccagcgccaaccccaatgcccagcccacagactttgacttcctgaaggtgattggaaaaggaaactacggcaaggtgctgctggccaagaggaagagtgatggagccttctatgctgtgaaggtgctgcagaagaagagcatcctgaagaagaaggagcagagccacatcatggccgagaggtctgtgctgctgaagaatgtgcgccaccccttcctggtgggcctgcgctacagcttccagaccccagagaagctgtactttgtgctggactatgtgaatggaggagagctgttcttccacctgcagcgggagcggcgcttcctggagccccgggcccgcttctacgccgctgaggtggccagcgccatcggctacctgcacagcctgaacatcatctacagagacctgaagccagagaacatcctgctggactgccagggccacgtggtgctgacagactttggcctgtgcaaggagggcgtggagcctgaggacaccaccagcaccttctgtggcaccccagagtacctggcccctgaggtgctgaggaaggagccctatgacagagctgtggactggtggtgcctgggcgctgtgctgtatgagatgctgcacggcctgccccccttctacagccaggatgtgtcccagatgtatgagaacatcctgcaccagcccctgcagatccctgggggccgcacagtggccgcctgtgacctgctgcagagcctgctgcacaaggaccagaggcagaggctgggcagcaaggctgacttcctggagatcaagaaccacgtgttcttcagccccatcaactgggatgacctgtaccacaagaggctgaccccacccttcaaccccaacgtgacaggccctgctgacctgaagcactttgatcctgagttcacccaggaggccgtgtccaagagcatcggctgcaccccagacacagtggccagcagcagcggggccagcagcgccttcctgggcttctcctatgccccagaagatgatgacatcctggactgctag

SEQ ID NO: 190347 - DNA, 1284 bp, Artificial Sequence
  derived and/or modified sequence
atgcagggcctgctgaccagcggccggaagcccagcggcggcggcagatgtacaggccgcggtgggtggcggggccaatggtgcctgaagccatggatgggcggtgccgacccccccacccctacgctgtcctgcctgctcctgcccgtgccgccggagttgcccgaccattgttacagaatgaattcatctcctgctggcaccccctcacctcaaccttccagagcaaacgggaacataaacctgggaccgtccgctaaccctaatgcccagccaactgacttcgacttccttaaagtaataggcaagggtaattacggaaaggtcctcctggccaagaggaaatccgatggcgctttctacgctgtgaaagtgcttcagaaaaaaagcatactgaagaagaaagagcaatcccacatcatggcagaacggtccgttctcctcaagaacgtcaggcaccctttcctcgttgggctaaggtacagtttccagacaccagagaaactgtactttgtgctggattacgttaacggcggagagctgttcttccacctgcagagagaaagacggtttctcgagcctagggcacgcttttacgccgccgaagtggcatctgcgatcggttacttgcatagtctgaacatcatataccgggatttgaagccagagaatatcctgttagactgccagggccatgtagtgctgaccgacttcgggctttgtaaggaaggcgtggaaccagaagacactaccagcactttctgtggtactccagaatacctcgcccccgaggttctgcgcaaagagccctacgacagggctgtagactggtggtgtctgggagccgtgctgtacgaaatgctccacggcttaccgcccttctacagccaggatgtgtcccagatgtacgaaaacatcctgcaccagcctttacagattccggggggacggactgtggccgcctgcgacctgctgcagtctctgcttcataaggaccagaggcagcgtttgggaagcaaggctgatttcctggagatcaagaatcacgtttttttctcacccatcaattgggacgacctgtatcacaaaaggctaaccccccctttcaaccccaacgttactgggccagcggacctgaaacacttcgatcccgagtttacccaggaagccgtgtcaaagtccatcggttgcacgccagatacagttgcgagctcctcgggtgcatcctctgccttcttagggtttagctatgctccagaggatgacgacatcttggactgttag

SEQ ID NO: 190348 - DNA, 1182 bp, Artificial Sequence
  derived and/or modified sequence
atgcagggcctgctgaccagcggccggaagcccagcggcggcggccgctgtaccgaactacctgatcattgctatagaatgaacagctcccctgccggaaccccctcaccccagccttctcgagcaaatggcaatatcaacctaggaccgagtgccaatccgaacgcccaacccactgattttgacttcctgaaagtgattggcaagggaaactatggtaaagtgctgcttgctaagagaaagagcgacggcgccttttacgctgtcaaggtcctgcagaagaaatccatcctgaagaaaaaagagcagagtcacataatggcagagaggagcgtgctgttaaagaacgtgcgtcacccttttctggttggactccgctactcgttccaaactccagagaagctctatttcgtgctggattatgttaacgggggcgagctgttctttcacttacagagggaaagacgcttcctggagcctcgcgcgcgtttctacgctgccgaggtggcatctgccatcggctatctccacagtctcaacatcatctacagggacttgaagcccgagaacatactgctggactgtcagggacatgttgttctgaccgatttcggcctttgtaaagagggggtggagcccgaagacaccacttctacgttttgtggtaccccagagtatttagcaccagaagtgctaagaaaagaaccatatgatcgagctgtcgactggtggtgcctgggcgctgtgctttatgagatgcttcacggtcttccacctttttattctcaagacgtctctcagatgtacgagaacatcctgcatcagccccttcagattccagggggtaggactgtagcagcatgcgatttgcttcagagcttgctgcacaaggatcagcgccaacggctcgggtccaaggcagactttttggagattaagaatcatgtgttcttctcccctatcaattgggacgatctgtaccacaaacgcctcacccctcccttcaacccaaacgtgactggcccagcagacctgaaacacttcgatcccgaattcacccaggaggccgtgagtaagagcatcgggtgcaccccagacacagtggcttcctcctcaggcgcctctagtgctttcttgggtttcagctatgccccggaggacgacgacattttggactgctag

SEQ ID NO: 190349 - DNA, 1284 bp, Artificial Sequence
  derived and/or modified sequence
atgcagggcctgctcacgtcaggaaggaagcccagcggtggaggacgctgtactggcagaggcggatggcgcggacaatggtgtctcaaaccctggatggggggagccgatcccccaactccaaccctgtcctgcctgttgcttcccgttccacctgagctccctgatcactgctataggatgaattcatctcccgctgggacgcctagtccgcagccatctcgtgctaacggcaatattaaccttggcccaagtgcgaaccctaacgcacagcccaccgattttgattttcttaaagtgatcggaaagggcaactacggcaaagtgctgctggccaagagaaagtccgacggggcattctatgccgtcaaagtcctccaaaagaagagtatcctcaaaaaaaaggaacagtcccacattatggcagagagatctgtcctcctgaagaatgtgcggcatcccttcctagtcggccttcgctatagcttccaaactccagaaaagttatactttgttcttgactatgtgaacggcggtgagctattctttcatcttcagagagaaaggcgcttcttggagcctagggcccgtttctatgcagctgaggtagcttccgcaatagggtacctgcacagtctcaacattatttacagagaccttaaaccagagaacattctgcttgactgtcaggggcacgtcgtgcttacggatttcggactgtgtaaggaaggcgtggaaccagaagacacgacatcgactttttgcggtaccccagaatatcttgcccctgaagttcttcggaaagaaccgtacgatagggctgtggattggtggtgtctgggtgctgttctgtacgagatgcttcatggactgccaccattttacagccaggacgtctctcagatgtatgaaaatatccttcatcagccactgcaaatccctgggggacgcaccgttgccgcttgtgacctgctccaatcactgttgcacaaggatcagcgacagcggcttggcagtaaggctgattttctcgagattaaaaaccacgtgtttttctcgcccattaattgggatgacctgtaccacaagcgtcttacacccccttttaaccccaatgtgactgggcctgccgatctgaaacacttcgatcccgaatttactcaggaagccgtgtctaagagcattggttgtacacccgataccgtggcctcaagctccggggcatcgtccgcctttctaggattttcatacgcccctgaggatgatgatatcctggactgttag

SEQ ID NO: 190350 - DNA, 1182 bp, Artificial Sequence
  derived and/or modified sequence
atgcagggcctcctgacatcaggaagaaagccctcgggtgggggtcgctgtactgagctcccggaccattgttatcgcatgaacagctctcctgcaggaacccctagccctcaaccttcccgggcaaacggcaatattaacctgggaccatccgccaatcctaacgcccagccgaccgacttcgacttcctgaaggtgatcggaaagggaaactacggaaaggtcctgttagccaaacggaagtctgatggcgcattttacgctgtaaaagtactgcagaagaagtctattctcaaaaagaaggaacagtcccatatcatggctgaacgctctgtcctgcttaagaatgtgagacacccctttctggtcggcttgagatactcatttcagaccccagaaaaattatatttcgttttggactacgtgaacgggggtgagttgtttttccatctgcaacgcgagaggcgtttcctcgagcccagagctagattctacgccgctgaggtcgccagtgccatcggatatctccattcccttaatataatatatagagacctgaagcccgagaacattctcctggactgccagggccacgtcgtcctaactgattttggcctttgcaaagagggagtggagccagaggatacaacctcgactttttgtggaacccctgaatacctcgcacctgaagtgctcaggaaggaaccgtacgacagagcagttgattggtggtgcctgggtgccgtcctttacgaaatgctccacggtttgccaccgttctacagccaggatgtcagtcagatgtatgagaatatccttcatcagccccttcaaatcccgggaggtcgaaccgtcgcggcttgcgacctgttgcagagcttacttcacaaagatcaaaggcagcgcctcggttcaaaagctgattttctcgaaatcaaaaatcacgtgttcttttcacctatcaattgggacgatctgtatcacaaacgcctcacgcccccattcaaccccaatgtcaccgggccagcagacctgaaacacttcgaccccgaatttacccaggaggccgtgtctaagtctatcggctgcactccagatacagtggcctcctcctcaggagcttcatccgcattcctcggctttagctacgcgccagaggacgatgatatattggactgttag

SEQ ID NO: 190351 - DNA, 2164 bp, Artificial Sequence
  derived and/or modified sequence
atgggttcagactttatgccctgaaaagatccttccagccctggccatcttggacttctggagctaccctggctcacaggggtcttgttgccctgggtgtccccagttcttgaaaagaatcagcctgggaggggccacaccctgaccatccccctttatcccttctgagatgtttgttaggaagtctgggtccaggggatatcatttcttgttccatccatgcaggggttgcttacctcgggtaggaaaccctcaggcggtggcaggtgcacaggtaggggaggatggagagggcagtggtgcctgaagccctggatgggcggagctgaccccccaacaccaactctctcatgcctgctcctccctgtccccccagagctgcctgatcattgctacagaatgaactctagcccagctgggaccccaagtccacagccctccagggccaatgggaacatcaacctggggccttcagccaacccaaatgcccagcccacggacttcgacttcctcaaagtcatcggcaaagggaactacgggaaggtcctactggccaagcgcaagtctgatggggcgttctatgcagtgaaggtactacagaaaaagtccatcttaaagaagaaagagcagagccacatcatggcagagcgcagtgtgcttctgaagaacgtgcggcaccccttcctcgtgggcctgcgctactccttccagacacctgagaagctctacttcgtgctcgactatgtcaacgggggagagctcttcttccacctgcagcgggagcgccggttcctggagccccgggccaggttctacgctgctgaggtggccagcgccattggctacctgcactccctcaacatcatttacagggatctgaaaccagagaacattctcttggactgccagggacacgtggtgctgacggattttggcctctgcaaggaaggtgtagagcctgaagacaccacatccacattctgtggtacccctgagtacttggcacctgaagtgcttcggaaagagccttatgatcgagcagtggactggtggtgcttgggggcagtcctctacgagatgctccatggcctgccgcccttctacagccaagatgtatcccagatgtatgagaacattctgcaccagccgctacagatccccggaggccggacagtggccgcctgtgacctcctgcaaagccttctccacaaggaccagaggcagcggctgggctccaaagcagactttcttgagattaagaaccatgtattcttcagccccataaactgggatgacctgtaccacaagaggctaactccacccttcaacccaaatgtgacaggacctgctgacttgaagcattttgacccagagttcacccaggaagctgtgtccaagtccattggctgtacccctgacactgtggccagcagctctggggcctcaagtgcattcctgggattttcttatgcgccagaggatgatgacatcttggattgctagaagagaaggacctgtgaaactactgaggccagctggtattagtaaggaattaccttcagctgctaggaagagcgactcaaactaacaatggcttcaacgagaagcaggtttattttttccagcacataaaagaaaaataatgtttcggagtccaggactggcaggacaggtcatcagatactcagaggctgtatctctgccctgccaaccttgacaaatggcttccaatgttaggtttgctacaagatggttactggagctctagctgcctattttgtgtttagggaagggaaaatggaggaaaggggagaagagcaaagggcgcttttaaagagctttcccaaaagctccacccaatgacttctgcttccatctcactaaccacccacccctacctggaatggaggctgggagatgtggcttatttgctgggtacgtgactatccctaataacaaaggggttctgacactaagacattaggggagaatgttgggtaggcagccagcactcttttaccagagggcctcctggtgtttggattttgatctcaatgtgtaaaatgacagagatgtaacaagctcatagggtatcaatatctcttattgttctatgttgatgatatttgtctttgttgtgggtaatactggacatttgttattg

SEQ ID NO: 190352 - DNA, 1891 bp, Artificial Sequence
  derived and/or modified sequence
agtcaggattgtgcctccagtcagaaggaccatgaagagagagaagagggcagagccgtgcatggggctgctccccaggacctgagcaggaacctggagttttcagagctgcctgatcattgctacagaatgaactctagcccagctgggaccccaagtccacagccctccagggccaatgggaacatcaacctggggccttcagccaacccaaatgcccagcccacggacttcgacttcctcaaagtcatcggcaaagggaactacgggaaggtcctactggccaagcgcaagtctgatggggcgttctatgcagtgaaggtactacagaaaaagtccatcttaaagaagaaagagagccacatcatggcagagcgcagtgtgcttctgaagaacgtgcggcaccccttcctcgtgggcctgcgctactccttccagacacctgagaagctctacttcgtgctcgactatgtcaacgggggagagctcttcttccacctgcagcgggagcgccggttcctggagccccgggccaggttctacgctgctgaggtggccagcgccattggctacctgcactccctcaacatcatttacagggatctgaaaccagagaacattctcttggactgccagggacacgtggtgctgacggattttggcctctgcaaggaaggtgtagagcctgaagacaccacatccacattctgtggtacccctgagtacttggcacctgaagtgcttcggaaagagccttatgatcgagcagtggactggtggtgcttgggggcagtcctctacgagatgctccatggcctgccgcccttctacagccaagatgtatcccagatgtatgagaacattctgcaccagccgctacagatccccggaggccggacagtggccgcctgtgacctcctgcaaagccttctccacaaggaccagaggcagcggctgggctccaaagcagactttcttgagattaagaaccatgtattcttcagccccataaactgggatgacctgtaccacaagaggctaactccacccttcaacccaaatgtgacaggacctgctgacttgaagcattttgacccagagttcacccaggaagctgtgtccaagtccattggctgtacccctgacactgtggccagcagctctggggcctcaagtgcattcctgggattttcttatgcgccagaggatgatgacatcttggattgctagaagagaaggacctgtgaaactactgaggccagctggtattagtaaggaattaccttcagctgctaggaagagcgactcaaactaacaatggcttcaacgagaagcaggtttattttttccagcacataaaagaaaaataatgtttcggagtccaggactggcaggacaggtcatcagatactcagaggctgtatctctgccctgccaaccttgacaaatggcttccaatgttaggtttgctacaagatggttactggagctctagctgcctattttgtgtttagggaagggaaaatggaggaaaggggagaagagcaaagggcgcttttaaagagctttcccaaaagctccacccaatgacttctgcttccatctcactaaccacccacccctacctggaatggaggctgggagatgtggcttatttgctgggtacgtgactatccctaataacaaaggggttctgacactaagacattaggggagaatgttgggtaggcagccagcactcttttaccagagggcctcctggtgtttggattttgatctcaatgtgtaaaatgacagagatgtaacaagctcatagggtatcaatatctcttattgttctatgttgatgatatttgtctttgttgtgggtaatactggacatttgttattg

SEQ ID NO: 190353 - DNA, 1906 bp, Artificial Sequence
  derived and/or modified sequence
ggttgcttgacaagtcaggattgtgcctccagtcagaaggaccatgaagagagagaagagggcagagccgtgcatggggctgctccccaggacctgagcaggaacctggagttttcagagctgcctgatcattgctacagaatgaactctagcccagctgggaccccaagtccacagccctccagggccaatgggaacatcaacctggggccttcagccaacccaaatgcccagcccacggacttcgacttcctcaaagtcatcggcaaagggaactacgggaaggtcctactggccaagcgcaagtctgatggggcgttctatgcagtgaaggtactacagaaaaagtccatcttaaagaagaaagagcagagccacatcatggcagagcgcagtgtgcttctgaagaacgtgcggcaccccttcctcgtgggcctgcgctactccttccagacacctgagaagctctacttcgtgctcgactatgtcaacgggggagagctcttcttccacctgcagcgggagcgccggttcctggagccccgggccaggttctacgctgctgaggtggccagcgccattggctacctgcactccctcaacatcatttacagggatctgaaaccagagaacattctcttggactgccagggacacgtggtgctgacggattttggcctctgcaaggaaggtgtagagcctgaagacaccacatccacattctgtggtacccctgagtacttggcacctgaagtgcttcggaaagagccttatgatcgagcagtggactggtggtgcttgggggcagtcctctacgagatgctccatggcctgccgcccttctacagccaagatgtatcccagatgtatgagaacattctgcaccagccgctacagatccccggaggccggacagtggccgcctgtgacctcctgcaaagccttctccacaaggaccagaggcagcggctgggctccaaagcagactttcttgagattaagaaccatgtattcttcagccccataaactgggatgacctgtaccacaagaggctaactccacccttcaacccaaatgtgacaggacctgctgacttgaagcattttgacccagagttcacccaggaagctgtgtccaagtccattggctgtacccctgacactgtggccagcagctctggggcctcaagtgcattcctgggattttcttatgcgccagaggatgatgacatcttggattgctagaagagaaggacctgtgaaactactgaggccagctggtattagtaaggaattaccttcagctgctaggaagagcgactcaaactaacaatggcttcaacgagaagcaggtttattttttccagcacataaaagaaaaataatgtttcggagtccaggactggcaggacaggtcatcagatactcagaggctgtatctctgccctgccaaccttgacaaatggcttccaatgttaggtttgctacaagatggttactggagctctagctgcctattttgtgtttagggaagggaaaatggaggaaaggggagaagagcaaagggcgcttttaaagagctttcccaaaagctccacccaatgacttctgcttccatctcactaaccacccacccctacctggaatggaggctgggagatgtggcttatttgctgggtacgtgactatccctaataacaaaggggttctgacactaagacattaggggagaatgttgggtaggcagccagcactcttttaccagagggcctcctggtgtttggattttgatctcaatgtgtaaaatgacagagatgtaacaagctcatagggtatcaatatctcttattgttctatgttgatgatatttgtctttgttgtgggtaatactggacatttgttattg

SEQ ID NO: 190354 - DNA, 2225 bp, Artificial Sequence
  derived and/or modified sequence
agggctgggaggttgaacttgagccggtttgggagccaggagcgagtgggtgacaggtcattcctgactgggaaggttgcttgacaagtcaggattgtgcctccagtcagaaggaccatgaagagagagaagagggcagagccgtgcatggggctgctccccaggacctgagcaggaacctggagttttcagggtgagatggtgttccccagggaacagaagtctccagtcccatcttaagctctgccggatcccgcgtgacatcagctagccccctcgcggctgccgggagctgtgagctctgtgctggggccaggccggcaccaggcacagacacttaggcccttgttgggagaacagagagaggctctcttgtccactgcctgtcttcggttccaactgctggttctcctagaggcctctcctcagactcgcagagctgcctgatcattgctacagaatgaactctagcccagctgggaccccaagtccacagccctccagggccaatgggaacatcaacctggggccttcagccaacccaaatgcccagcccacggacttcgacttcctcaaagtcatcggcaaagggaactacgggaaggtcctactggccaagcgcaagtctgatggggcgttctatgcagtgaaggtactacagaaaaagtccatcttaaagaagaaagagcagagccacatcatggcagagcgcagtgtgcttctgaagaacgtgcggcaccccttcctcgtgggcctgcgctactccttccagacacctgagaagctctacttcgtgctcgactatgtcaacgggggagagctcttcttccacctgcagcgggagcgccggttcctggagccccgggccaggttctacgctgctgaggtggccagcgccattggctacctgcactccctcaacatcatttacagggatctgaaaccagagaacattctcttggactgccagggacacgtggtgctgacggattttggcctctgcaaggaaggtgtagagcctgaagacaccacatccacattctgtggtacccctgagtacttggcacctgaagtgcttcggaaagagccttatgatcgagcagtggactggtggtgcttgggggcagtcctctacgagatgctccatggcctgccgcccttctacagccaagatgtatcccagatgtatgagaacattctgcaccagccgctacagatccccggaggccggacagtggccgcctgtgacctcctgcaaagccttctccacaaggaccagaggcagcggctgggctccaaagcagactttcttgagattaagaaccatgtattcttcagccccataaactgggatgacctgtaccacaagaggctaactccacccttcaacccaaatgtgacaggacctgctgacttgaagcattttgacccagagttcacccaggaagctgtgtccaagtccattggctgtacccctgacactgtggccagcagctctggggcctcaagtgcattcctgggattttcttatgcgccagaggatgatgacatcttggattgctagaagagaaggacctgtgaaactactgaggccagctggtattagtaaggaattaccttcagctgctaggaagagcgactcaaactaacaatggcttcaacgagaagcaggtttattttttccagcacataaaagaaaaataatgtttcggagtccaggactggcaggacaggtcatcagatactcagaggctgtatctctgccctgccaaccttgacaaatggcttccaatgttaggtttgctacaagatggttactggagctctagctgcctattttgtgtttagggaagggaaaatggaggaaaggggagaagagcaaagggcgcttttaaagagctttcccaaaagctccacccaatgacttctgcttccatctcactaaccacccacccctacctggaatggaggctgggagatgtggcttatttgctgggtacgtgactatccctaataacaaaggggttctgacactaagacattaggggagaatgttgggtaggcagccagcactcttttaccagagggcctcctggtgtttggattttgatctcaatgtgtaaaatgacagagatgtaacaagctcatagggtatcaatatctcttattgttctatgttgatgatatttgtctttgttgtgggtaatactggacatttgttattg

SEQ ID NO: 190355 - DNA, 676 bp, Artificial Sequence
  derived and/or modified sequence
actgcctgtcttcggttccaactgctggttctcctagaggcctctcctcagactcgcagagctgcctgatcattgctacagaatgaactctagcccagctgggaccccaagtccacagccctccagggccaatgggaacatcaacctggggccttcagccaacccaaatgcccagcccacggacttcgacttcctcaaagtcatcggcaaagggaactacgggaaggtcctactggccaagcgcaagtctgatggggcgttctatgcagtgaaggtactacagaaaaagtccatcttaaagaagaaagagagccacatcatggcagagcgcagtgtgcttctgaagaacgtgcggcaccccttcctcgtgggcctgcgctactccttccagacacctgagaagctctacttcgtgctcgactatgtcaacgggggagagctcttcttccacctgcagcgggagcgccggttcctggagccccgggccaggttctacgctgctgaggtggccagcgccattggctacctgcactccctcaacatcatttacagggatctgaaaccagagaacattctcttggactgccagggacacgtggtgctgacggattttggcctctgcaaggaaggtgtagagcctgaagacaccacatccacattctgtggtacccctgag

SEQ ID NO: 190356 - DNA, 1759 bp, Artificial Sequence
  derived and/or modified sequence
gtcttcggttccaactgctggttctcctagaggcctctcctcagactcgcagagctgcctgatcattgctacagaatgaactctagcccagctgggaccccaagtccacagccctccagggccaatgggaacatcaacctggggccttcagccaacccaaatgcccagcccacggacttcgacttcctcaaagtcatcggcaaagggaactacgggaaggtcctactggccaagcgcaagtctgatggggcgttctatgcagtgaaggtactacagaaaaagtccatcttaaagaagaaagagcagagccacatcatggcagagcgcagtgtgcttctgaagaacgtgcggcaccccttcctcgtgggcctgcgctactccttccagacacctgagaagctctacttcgtgctcgactatgtcaacgggggagagctcttcttccacctgcagcgggagcgccggttcctggagccccgggccaggttctacgctgctgaggtggccagcgccattggctacctgcactccctcaacatcatttacagggatctgaaaccagagaacattctcttggactgccagggacacgtggtgctgacggattttggcctctgcaaggaaggtgtagagcctgaagacaccacatccacattctgtggtacccctgagtacttggcacctgaagtgcttcggaaagagccttatgatcgagcagtggactggtggtgcttgggggcagtcctctacgagatgctccatggcctgccgcccttctacagccaagatgtatcccagatgtatgagaacattctgcaccagccgctacagatccccggaggccggacagtggccgcctgtgacctcctgcaaagccttctccacaaggaccagaggcagcggctgggctccaaagcagactttcttgagattaagaaccatgtattcttcagccccataaactgggatgacctgtaccacaagaggctaactccacccttcaacccaaatgtgacaggacctgctgacttgaagcattttgacccagagttcacccaggaagctgtgtccaagtccattggctgtacccctgacactgtggccagcagctctggggcctcaagtgcattcctgggattttcttatgcgccagaggatgatgacatcttggattgctagaagagaaggacctgtgaaactactgaggccagctggtattagtaaggaattaccttcagctgctaggaagagcgactcaaactaacaatggcttcaacgagaagcaggtttattttttccagcacataaaagaaaaataatgtttcggagtccaggactggcaggacaggtcatcagatactcagaggctgtatctctgccctgccaaccttgacaaatggcttccaatgttaggtttgctacaagatggttactggagctctagctgcctattttgtgtttagggaagggaaaatggaggaaaggggagaagagcaaagggcgcttttaaagagctttcccaaaagctccacccaatgacttctgcttccatctcactaaccacccacccctacctggaatggaggctgggagatgtggcttatttgctgggtacgtgactatccctaataacaaaggggttctgacactaagacattaggggagaatgttgggtaggcagccagcactcttttaccagagggcctcctggtgtttggattttgatctcaatgtgtaaaatgacagagatgtaacaagc

SEQ ID NO: 190357 - DNA, 1798 bp, Artificial Sequence
  derived and/or modified sequence
atgcaggggttgcttacctcgggtaggaaaccctcaggcggtggcaggtgcacagagctgcctgatcattgctacagaatgaactctagcccagctgggaccccaagtccacagccctccagggccaatgggaacatcaacctggggccttcagccaacccaaatgcccagcccacggacttcgacttcctcaaagtcatcggcaaagggaactacgggaaggtcctactggccaagcgcaagtctgatggggcgttctatgcagtgaaggtactacagaaaaagtccatcttaaagaagaaagagcagagccacatcatggcagagcgcagtgtgcttctgaagaacgtgcggcaccccttcctcgtgggcctgcgctactccttccagacacctgagaagctctacttcgtgctcgactatgtcaacgggggagagctcttcttccacctgcagcgggagcgccggttcctggagccccgggccaggttctacgctgctgaggtggccagcgccattggctacctgcactccctcaacatcatttacagggatctgaaaccagagaacattctcttggactgccagggacacgtggtgctgacggattttggcctctgcaaggaaggtgtagagcctgaagacaccacatccacattctgtggtacccctgagtacttggcacctgaagtgcttcggaaagagccttatgatcgagcagtggactggtggtgcttgggggcagtcctctacgagatgctccatggcctgccgcccttctacagccaagatgtatcccagatgtatgagaacattctgcaccagccgctacagatccccggaggccggacagtggccgcctgtgacctcctgcaaagccttctccacaaggaccagaggcagcggctgggctccaaagcagactttcttgagattaagaaccatgtattcttcagccccataaactgggatgacctgtaccacaagaggctaactccacccttcaacccaaatgtgacaggacctgctgacttgaagcattttgacccagagttcacccaggaagctgtgtccaagtccattggctgtacccctgacactgtggccagcagctctggggcctcaagtgcattcctgggattttcttatgcgccagaggatgatgacatcttggattgctagaagagaaggacctgtgaaactactgaggccagctggtattagtaaggaattaccttcagctgctaggaagagcgactcaaactaacaatggcttcaacgagaagcaggtttattttttccagcacataaaagaaaaataatgtttcggagtccaggactggcaggacaggtcatcagatactcagaggctgtatctctgccctgccaaccttgacaaatggcttccaatgttaggtttgctacaagatggttactggagctctagctgcctattttgtgtttagggaagggaaaatggaggaaaggggagaagagcaaagggcgcttttaaagagctttcccaaaagctccacccaatgacttctgcttccatctcactaaccacccacccctacctggaatggaggctgggagatgtggcttatttgctgggtacgtgactatccctaataacaaaggggttctgacactaagacattaggggagaatgttgggtaggcagccagcactcttttaccagagggcctcctggtgtttggattttgatctcaatgtgtaaaatgacagagatgtaacaagctcatagggtatcaatatctcttattgttctatgttg

SEQ ID NO: 190358 - DNA, 1284 bp, Artificial Sequence
  derived and/or modified sequence
atgcagggcctgctgaccagcggcagaaagcccagcggcggcggcagatgcaccggcagaggcggctggagaggccagtggtgcctgaagccctggatgggcggcgccgacccccccacccccaccctgagctgcctgctgctgcccgtgccccccgagctgcccgaccactgctacagaatgaacagcagccccgccggcacccccagcccccagcccagcagagccaacggcaacatcaacctgggccccagcgccaaccccaacgcccagcccaccgacttcgacttcctgaaggtgatcggcaagggcaactacggcaaggtgctgctggccaagagaaagagcgacggcgccttctacgccgtgaaggtgctgcagaagaagagcatcctgaagaagaaggagcagagccacatcatggccgagagaagcgtgctgctgaagaacgtgagacaccccttcctggtgggcctgagatacagcttccagacccccgagaagctgtacttcgtgctggactacgtgaacggcggcgagctgttcttccacctgcagagagagagaagattcctggagcccagagccagattctacgccgccgaggtggccagcgccatcggctacctgcacagcctgaacatcatctacagagacctgaagcccgagaacatcctgctggactgccagggccacgtggtgctgaccgacttcggcctgtgcaaggagggcgtggagcccgaggacaccaccagcaccttctgcggcacccccgagtacctggcccccgaggtgctgagaaaggagccctacgacagagccgtggactggtggtgcctgggcgccgtgctgtacgagatgctgcacggcctgccccccttctacagccaggacgtgagccagatgtacgagaacatcctgcaccagcccctgcagatccccggcggcagaaccgtggccgcctgcgacctgctgcagagcctgctgcacaaggaccagagacagagactgggcagcaaggccgacttcctggagatcaagaaccacgtgttcttcagccccatcaactgggacgacctgtaccacaagagactgaccccccccttcaaccccaacgtgaccggccccgccgacctgaagcacttcgaccccgagttcacccaggaggccgtgagcaagagcatcggctgcacccccgacaccgtggccagcagcagcggcgccagcagcgccttcctgggcttcagctacgcccccgaggacgacgacatcctggactgctag

SEQ ID NO: 190359 - DNA, 1182 bp, Artificial Sequence
  derived and/or modified sequence
atgcagggcctgctgaccagcggcagaaagcccagcggcggcggcagatgcaccgagctgcccgaccactgctacagaatgaacagcagccccgccggcacccccagcccccagcccagcagagccaacggcaacatcaacctgggccccagcgccaaccccaacgcccagcccaccgacttcgacttcctgaaggtgatcggcaagggcaactacggcaaggtgctgctggccaagagaaagagcgacggcgccttctacgccgtgaaggtgctgcagaagaagagcatcctgaagaagaaggagcagagccacatcatggccgagagaagcgtgctgctgaagaacgtgagacaccccttcctggtgggcctgagatacagcttccagacccccgagaagctgtacttcgtgctggactacgtgaacggcggcgagctgttcttccacctgcagagagagagaagattcctggagcccagagccagattctacgccgccgaggtggccagcgccatcggctacctgcacagcctgaacatcatctacagagacctgaagcccgagaacatcctgctggactgccagggccacgtggtgctgaccgacttcggcctgtgcaaggagggcgtggagcccgaggacaccaccagcaccttctgcggcacccccgagtacctggcccccgaggtgctgagaaaggagccctacgacagagccgtggactggtggtgcctgggcgccgtgctgtacgagatgctgcacggcctgccccccttctacagccaggacgtgagccagatgtacgagaacatcctgcaccagcccctgcagatccccggcggcagaaccgtggccgcctgcgacctgctgcagagcctgctgcacaaggaccagagacagagactgggcagcaaggccgacttcctggagatcaagaaccacgtgttcttcagccccatcaactgggacgacctgtaccacaagagactgaccccccccttcaaccccaacgtgaccggccccgccgacctgaagcacttcgaccccgagttcacccaggaggccgtgagcaagagcatcggctgcacccccgacaccgtggccagcagcagcggcgccagcagcgccttcctgggcttcagctacgcccccgaggacgacgacatcctggactgctag

SEQ ID NO: 190360 - protein, 307 aa, Artificial Sequence
  derived and/or modified sequence
MHDDESTINSSSSVVHKKDHVFIRDEAGHGDPRPEPRPTQSVQSQALHYRNRERFATIKSASLVTRQIHEHEQENELREQMSGYKRMRRQHQKQLIALENKLKAEMDEHRLKLQKEVETHANNSSIELEKLAKKQVAIIEKEAKVAAADEKKFQQQILAQQKKDLTTFLESQKKQYKICKEKIKEEMNEDHSTPKKEKQERISKHKENLQHTQAEEEAHLLTQQRLYYDKNCRFFKRKIMIKRHEVEQQNIREELNKKRTEGDGACHANPDESTRELEYRQLHTLQKLHGSDPFTAPDGTGKPAGVQ

SEQ ID NO: 190361 - protein, 898 aa, Artificial Sequence
  derived and/or modified sequence
MRKGVLKDPEIADLFYKDDPEELFIGLHEIGHGSFGAVYFATNAHTSEVVAIKKMSYSGKQTHEKWQDILKEVKFLRQLKHPNTIEYKGCYLKEHTAWLVMEYCLGSASDLLEVHKKPLQEVEIAAITHGALHGLAYLHSHALIHRDIKAGNILLTEPGQVKLADFGSASMASPANSFVGTPYWMAPEVILAMDEGQYDGKVDIWSLGITCIELAERKPPLFNMNAMSALYHIAQNDSPTLQSNEWTDSFRRFVDYCLQKIPQERPTSAELLRHDFVRRDRPLRVLIDLIQRTKDAVRELDNLQYRKMKKILFQETRNGPLNESQEDEEDSEHGTSLNREMDSLGSNHSIPSMSVSTGSQSSSVNSMQEVMDESSSELVMMHDDESTINSSSSVVHKKDHVFIRDEAGHGDPRPEPRPTQSVQSQALHYRNRERFATIKSASLVTRQIHEHEQENELREQMSGYKRMRRQHQKQLIALENKLKAEMDEHRLKLQKEVETHANNSSIELEKLAKKQVAIIEKEAKVAAADEKKFQQQILAQQKKDLTTFLESQKKQYKICKEKIKEEMNEDHSTPKKEKQERISKHKENLQHTQAEEEAHLLTQQRLYYDKNCRFFKRKIMIKRHEVEQQNIREELNKKRTQKEMEHAMLIRHDESTRELEYRQLHTLQKLRMDLIRLQHQTELENQLEYNKRRERELHRKHVMELRQQPKNLKAMEMQIKKQFQDTCKVQTKQYKALKNHQLEVTPKNEHKTILKTLKDEQTRKLAILAEQYEQSINEMMASQALRLDEAQEAECQALRLQLQQEMELLNAYQSKIKMQTEAQHERELQKLEQRVSLRRAHLEQKIEEELAALQKERSERIKNLLERQEREIETFDMESLRMGFGNLVTLDFPKEDYR

SEQ ID NO: 190362 - protein, 136 aa, Artificial Sequence
  derived and/or modified sequence
MRKGVLKDPEIADLFYKDDPEELFIGLHEIGHGSFGAVYFATNAHTSEVVAIKKMSYSGKQTHEKWQDILKEVKFLRQLKHPNTIEYKGCYLKEHTAWLVMEYCLGSASDLLEVHKKPLQEVEIAAITHGALHGLA

SEQ ID NO: 190363 - protein, 93 aa, Artificial Sequence
  derived and/or modified sequence
MRKGVLKDPEIADLFYKDDPEELFIGLHEIGHGSFGAVYFATNAHTSEVVAIKKMSYSGKQTHEKWQDILKEVKFLRQLKHPNTIEYKGCYLK

SEQ ID NO: 190364 - DNA, 924 bp, Artificial Sequence
  derived and/or modified sequence
atgcacgacgacgagagcaccatcaacagcagcagcagcgtggtgcacaagaaggaccacgtgttcatcagagacgaggccggccacggcgaccccagacccgagcccagacccacccagagcgtgcagagccaggccctgcactacagaaacagagagagattcgccaccatcaagagcgccagcctggtgaccagacagatccacgagcacgagcaggagaacgagctgagagagcagatgagcggctacaagagaatgagaagacagcaccagaagcagctgatcgccctggagaacaagctgaaggccgagatggacgagcacagactgaagctgcagaaggaggtggagacccacgccaacaacagcagcatcgagctggagaagctggccaagaagcaggtggccatcatcgagaaggaggccaaggtggccgccgccgacgagaagaagttccagcagcagatcctggcccagcagaagaaggacctgaccaccttcctggagagccagaagaagcagtacaagatctgcaaggagaagatcaaggaggagatgaacgaggaccacagcacccccaagaaggagaagcaggagagaatcagcaagcacaaggagaacctgcagcacacccaggccgaggaggaggcccacctgctgacccagcagagactgtactacgacaagaactgcagattcttcaagagaaagatcatgatcaagagacacgaggtggagcagcagaacatcagagaggagctgaacaagaagagaaccgagggcgacggcgcctgccacgccaaccccgacgagagcaccagagagctggagtacagacagctgcacaccctgcagaagctgcacggcagcgaccccttcaccgcccccgacggcaccggcaagcccgccggcgtgcagtag

SEQ ID NO: 190365 - DNA, 2697 bp, Artificial Sequence
  derived and/or modified sequence
atgagaaagggcgtgctgaaggaccccgagatcgccgacctgttctacaaggacgaccccgaggagctgttcatcggcctgcacgagatcggccacggcagcttcggcgccgtgtacttcgccaccaacgcccacaccagcgaggtggtggccatcaagaagatgagctacagcggcaagcagacccacgagaagtggcaggacatcctgaaggaggtgaagttcctgagacagctgaagcaccccaacaccatcgagtacaagggctgctacctgaaggagcacaccgcctggctggtgatggagtactgcctgggcagcgccagcgacctgctggaggtgcacaagaagcccctgcaggaggtggagatcgccgccatcacccacggcgccctgcacggcctggcctacctgcacagccacgccctgatccacagagacatcaaggccggcaacatcctgctgaccgagcccggccaggtgaagctggccgacttcggcagcgccagcatggccagccccgccaacagcttcgtgggcaccccctactggatggcccccgaggtgatcctggccatggacgagggccagtacgacggcaaggtggacatctggagcctgggcatcacctgcatcgagctggccgagagaaagccccccctgttcaacatgaacgccatgagcgccctgtaccacatcgcccagaacgacagccccaccctgcagagcaacgagtggaccgacagcttcagaagattcgtggactactgcctgcagaagatcccccaggagagacccaccagcgccgagctgctgagacacgacttcgtgagaagagacagacccctgagagtgctgatcgacctgatccagagaaccaaggacgccgtgagagagctggacaacctgcagtacagaaagatgaagaagatcctgttccaggagaccagaaacggccccctgaacgagagccaggaggacgaggaggacagcgagcacggcaccagcctgaacagagagatggacagcctgggcagcaaccacagcatccccagcatgagcgtgagcaccggcagccagagcagcagcgtgaacagcatgcaggaggtgatggacgagagcagcagcgagctggtgatgatgcacgacgacgagagcaccatcaacagcagcagcagcgtggtgcacaagaaggaccacgtgttcatcagagacgaggccggccacggcgaccccagacccgagcccagacccacccagagcgtgcagagccaggccctgcactacagaaacagagagagattcgccaccatcaagagcgccagcctggtgaccagacagatccacgagcacgagcaggagaacgagctgagagagcagatgagcggctacaagagaatgagaagacagcaccagaagcagctgatcgccctggagaacaagctgaaggccgagatggacgagcacagactgaagctgcagaaggaggtggagacccacgccaacaacagcagcatcgagctggagaagctggccaagaagcaggtggccatcatcgagaaggaggccaaggtggccgccgccgacgagaagaagttccagcagcagatcctggcccagcagaagaaggacctgaccaccttcctggagagccagaagaagcagtacaagatctgcaaggagaagatcaaggaggagatgaacgaggaccacagcacccccaagaaggagaagcaggagagaatcagcaagcacaaggagaacctgcagcacacccaggccgaggaggaggcccacctgctgacccagcagagactgtactacgacaagaactgcagattcttcaagagaaagatcatgatcaagagacacgaggtggagcagcagaacatcagagaggagctgaacaagaagagaacccagaaggagatggagcacgccatgctgatcagacacgacgagagcaccagagagctggagtacagacagctgcacaccctgcagaagctgagaatggacctgatcagactgcagcaccagaccgagctggagaaccagctggagtacaacaagagaagagagagagagctgcacagaaagcacgtgatggagctgagacagcagcccaagaacctgaaggccatggagatgcagatcaagaagcagttccaggacacctgcaaggtgcagaccaagcagtacaaggccctgaagaaccaccagctggaggtgacccccaagaacgagcacaagaccatcctgaagaccctgaaggacgagcagaccagaaagctggccatcctggccgagcagtacgagcagagcatcaacgagatgatggccagccaggccctgagactggacgaggcccaggaggccgagtgccaggccctgagactgcagctgcagcaggagatggagctgctgaacgcctaccagagcaagatcaagatgcagaccgaggcccagcacgagagagagctgcagaagctggagcagagagtgagcctgagaagagcccacctggagcagaagatcgaggaggagctggccgccctgcagaaggagagaagcgagagaatcaagaacctgctggagagacaggagagagagatcgagaccttcgacatggagagcctgagaatgggcttcggcaacctggtgaccctggacttccccaaggaggactacagatag

SEQ ID NO: 190366 - DNA, 924 bp, Artificial Sequence
  derived and/or modified sequence
atgcacgatgacgagtccacaatcaattcctcttcctcagttgtccataagaaggaccacgtgttcattagagacgaggcgggacacggagatccacgacccgagccaagacccactcaatccgtgcagtcccaggcactgcattacagaaaccgagaaaggttcgccaccatcaaaagcgccagcctcgtgactagacagattcatgaacacgagcaggaaaacgaacttcgcgaacagatgagtggctataaaaggatgagacgacagcaccagaaacaactaatagccttggagaacaagctaaaggcagaaatggatgaacatagattgaaacttcagaaggaagtcgaaactcacgctaataattccagcatcgagctggaaaaactggcaaaaaaacaggtcgccataatcgaaaaggaggcaaaggtggctgccgcagatgagaagaagttccaacaacagatactggcccaacagaaaaaggatctgacaacctttcttgaaagtcagaagaagcagtataagatctgcaaggaaaaaattaaggaggaaatgaatgaggatcacagcacccccaagaaagagaaacaggagcgtatctccaagcacaaagagaatctccaacacacccaggcggaagaggaagcccatttactgacccagcaacgcctgtactacgacaaaaattgcagattcttcaaacgaaagatcatgattaagcgacatgaagtcgaacagcagaacatccgcgaggagctcaataagaaaaggaccgagggggacggcgcctgtcacgccaatccagacgaaagcacccgggagcttgagtaccggcagctccacacccttcagaaactccacgggtccgatcctttcactgcgccagacgggaccggaaagcctgccggtgttcaatag

SEQ ID NO: 190367 - DNA, 2697 bp, Artificial Sequence
  derived and/or modified sequence
atgagaaagggcgttctgaaagaccccgaaatcgcggacctcttttacaaagacgatccagaggaactttttatcggcttgcacgagatcgggcacggctctttcggggcggtctattttgcaacgaacgcccacacatcagaggtggtagctattaaaaagatgagttactctggaaagcagacacacgagaagtggcaggacatactcaaggaggtcaagttcctgcggcaactcaaacaccccaacaccatcgagtacaaagggtgttatctcaaggaacataccgcatggttagtcatggaatattgcctcggcagcgccagtgacctccttgaggtccacaagaagcccctgcaggaggtcgagattgccgctatcacccacggcgcgctgcacggcctggcttacttgcattcacatgctctcatccatcgcgacatcaaagctggaaatatcctcctcaccgagccagggcaggtgaagctggctgactttggctccgcgagtatggcctcacccgctaactcatttgtaggaaccccctactggatggctccagaggtgatattggccatggatgagggccagtacgatggtaaagtggatatttggtcactaggaatcacatgcatagaacttgcagaacggaagccccccctcttcaacatgaacgccatgtctgcattgtaccacattgctcaaaatgactccccaactctccagtctaatgagtggaccgattcttttcgtcgatttgtcgactactgcctacagaaaatccctcaggaacgtcctacatctgctgaattactgaggcacgatttcgtaagacgggatagaccacttcgtgtgttgatcgacctgattcagaggacaaaggacgcagtgagggagctggataatttgcagtatcgcaagatgaagaaaatcctgttccaggaaactaggaacgggccgctgaatgaaagccaggaggatgaggaggatagcgagcatggcacatcgctcaatagagagatggatagcctcggcagcaatcatagtattcctagtatgtctgtctcgaccggcagccagtcttcctccgttaatagcatgcaagaagtaatggatgagtcttcctcagaactggtcatgatgcatgacgacgaatctaccatcaattcttcgtctagtgtcgtgcacaaaaaggatcacgtcttcatccgggatgaagcgggacacggagaccctaggcctgaaccacggccaacccagtctgtgcaaagtcaggcgctccactaccgaaacagggaaagattcgcgacgatcaagtctgcctccctggtcactcgtcagattcatgaacacgaacaggaaaatgagctgagagagcagatgtctggctataagcgcatgaggagacagcaccagaaacaattgattgcattggagaacaagctcaaagctgagatggatgagcaccggctgaaactgcagaaagaggttgagacacacgccaataactcctcgatcgaactagagaaactcgccaagaagcaggtcgccatcatcgaaaaagaggcgaaggtggccgcagccgacgagaaaaagttccagcagcaaatcttagcccagcagaaaaaagatttaacaacatttctcgagagccagaaaaaacaatataaaatctgcaaagaaaaaattaaagaggaaatgaatgaggatcactccacccccaaaaaagagaaacaggagagaatctcaaaacacaaggaaaatcttcagcacactcaggccgaggaagaggcgcacctactgactcaacaacgcctgtattatgataagaactgtagatttttcaaacggaaaattatgattaaacggcatgaagtggagcagcagaatattcgcgaggaactgaacaagaagcggactcagaaggaaatggaacatgccatgctcattcgccacgatgaatcaactcgcgagttagaatatcggcagctgcacaccctgcagaagctccggatggatcttattcggctgcagcaccagaccgaattggagaatcagctggagtataataagaggagggagcgcgagttacatcgtaagcacgtaatggagttgcgtcaacaacccaagaacctcaaggcaatggaaatgcagataaagaaacagtttcaggacacatgcaaggtgcagacaaagcagtataaagctctcaaaaatcaccagttggaagtgacccccaaaaatgaacataagacaatcttgaagacactcaaagacgaacagacaaggaaattggctattctggctgagcaatacgagcaatcgattaacgaaatgatggcaagccaggccctgaggttggatgaagcccaagaggcggagtgccaggcccttcgactccagttgcaacaggagatggaactgctcaatgcatatcagagtaaaatcaagatgcagaccgaggctcagcacgagcgagaattacaaaaactcgagcaacgggtgagtctgaggcgagcccacctagaacagaaaattgaggaagaattggctgcactacagaaggagcgctctgagaggattaagaatctgctggagcggcaggaacgagagatagagacctttgacatggaatcactgcggatgggatttggtaacctcgtaaccctagatttcccgaaggaagactaccggtag

SEQ ID NO: 190368 - DNA, 2697 bp, Artificial Sequence
  derived and/or modified sequence
atgaggaagggagtactgaaggaccctgaaatagcggacctgttttacaaggatgatcctgaggagctcttcatcggactgcatgaaattggacacgggtccttcggggccgtgtattttgccacaaacgcccacactagcgaagttgtcgccattaagaagatgtcctactcaggcaagcagactcacgagaagtggcaagacatccttaaggaagtcaagtttctccgccagctcaaacatcctaataccattgaatataagggatgctatctgaaagagcacaccgcttggctggtgatggagtactgtctcggctcagcttctgaccttctggaggtgcacaagaaaccacttcaggaggtcgagattgccgctattacacacggtgcattgcatggtctggcgtacctgcactcccacgcattgatacatcgtgacatcaaggctggcaatatactgctgacggagcctggccaggtgaagttggccgacttcggctcagcatctatggcatctcccgccaattcctttgtcggaaccccgtactggatggcaccggaggtgatcttagctatggacgagggacagtacgatggaaaggtggacatttggtcgctcgggatcacttgtatcgagttggcagagcgcaaaccccccctgttcaatatgaacgccatgagtgccctctaccacatcgcacagaacgattctcctaccttacaaagcaatgagtggaccgactcgttccggaggtttgtggactattgtctacaaaaaattccccaggagcgccccaccagcgcagagctacttaggcatgatttcgtgcgaagggatagaccactgcgggtcctgattgatctgatccaacgtacaaaggatgctgtccgggagcttgacaacctgcagtaccgaaagatgaagaaaatccttttccaggagactcggaatgggccactcaatgaaagtcaggaggacgaagaggatagtgaacacgggaccagcctgaacagggaaatggattctctcggaagtaaccactcaattcctagcatgagcgttagtacagggtcacagtcttcttctgtcaacagcatgcaagaagtgatggatgagtctagctccgagctggtaatgatgcacgacgatgaatccaccataaattcaagtagctctgttgtccacaagaaggaccatgtgttcatccgggatgaagccggacatggtgacccaaggcctgagccacgccccacccagtctgtgcagtcccaggctcttcattaccgcaaccgcgaaagatttgctacgatcaaatccgctagtctggtaacgaggcagatccatgaacacgagcaggagaacgaactgcgagagcagatgtccggctataagaggatgcgaaggcagcaccagaagcagctcattgccctagagaacaagttgaaagctgagatggacgagcacagattaaaattgcagaaggaggtagaaactcatgccaacaacagctcaattgaactggagaaactagcaaaaaagcaggtcgcaataattgagaaggaggcaaaggttgctgcagctgacgaaaaaaaatttcaacaacagatcctggctcagcagaagaaggacctgacgacttttctagagtcacagaagaaacagtataaaatttgtaaggagaaaattaaggaggagatgaacgaggatcacagcactccaaaaaaagagaaacaagaaaggatcagcaagcataaagagaacctccagcatacgcaggccgaggaagaagcccacctgctcacccagcagaggctatattacgacaaaaactgccgcttcttcaagaggaagattatgatcaaacgccatgaagtggagcagcagaacatcagggaagagttaaacaaaaaacgtacgcagaaggaaatggagcatgccatgctcatccgtcatgacgaatcaacacgcgagcttgagtaccgacaactgcatacgcttcaaaaattgcggatggatcttatccggctgcagcatcagacagaactggagaatcagctggagtacaataaacgtcgggaaagagaactgcacagaaaacacgtcatggagctgaggcaacagcctaagaatcttaaggctatggagatgcagataaagaagcagtttcaggatacgtgcaaggtgcaaactaaacagtataaggccctcaagaaccatcaactggaagtcacccctaaaaatgagcacaagacgatccttaagacattgaaagacgaacagactagaaaacttgccattcttgccgagcaatacgaacagtcaattaacgagatgatggctagccaggcccttcgcctcgacgaggcccaggaggcagagtgccaggccttgagactgcagctccagcaggagatggaactgttgaacgcttatcaatctaagataaaaatgcaaactgaggcacagcacgagcgggagctacagaagttggagcagcgtgtctcattacgtcgagcacatctagagcagaaaattgaagaggaactggcagccctccaaaaagagcgctcagagcggatcaagaacctgctggagcgccaggaaagagagatcgagacttttgatatggaaagcttgcgaatgggattcggaaacctagtaaccctggattttcccaaagaggattatcggtag

SEQ ID NO: 190369 - DNA, 924 bp, Artificial Sequence
  derived and/or modified sequence
atgcatgatgatgagagcaccatcaacagcagcagctctgtggtgcacaagaaggaccacgtgttcatcagagatgaagctggccatggagaccccaggcctgagccccggcccacccagagcgtgcagagccaggccctgcactacagaaaccgggagagatttgccaccatcaagagcgccagcctggtgacccggcagatccatgaacatgagcaggagaatgagctgcgggagcagatgagcggctacaagaggatgaggcggcagcaccagaagcagctgattgccctggagaacaagctgaaggccgagatggatgagcaccggctgaagctgcagaaggaggtggagacccacgccaacaacagcagcattgagctggagaagctggccaagaagcaggtggccatcatcgagaaggaggccaaggtggccgctgctgatgagaagaagttccagcagcagatcctggcccagcagaagaaggacctgaccaccttcctggagagccagaagaagcagtacaagatctgcaaggagaagatcaaggaggagatgaatgaagaccacagcacccccaagaaggagaagcaggagcgcatcagcaagcacaaggagaacctgcagcacacccaggccgaggaggaggcccacctgctgacccagcagaggctgtactatgacaagaactgccgcttcttcaagaggaagatcatgatcaagagacatgaggtggagcagcagaacatccgggaggagctgaacaagaagaggacagaaggagatggagcctgccacgccaacccagatgagagcacccgggagctggagtaccggcagctgcacaccctgcagaagctgcacggcagtgaccccttcaccgccccagatggcaccgggaagccagctggggtgcagtag

SEQ ID NO: 190370 - DNA, 2697 bp, Artificial Sequence
  derived and/or modified sequence
atgaggaaaggagtgctgaaggaccctgagattgctgacctcttctacaaggatgatcctgaggagctgttcatcggcctgcacgagatcggccacggcagctttggagctgtgtactttgccaccaatgcccacaccagcgaggtggtggccatcaagaagatgagctacagcggcaagcagacccatgagaagtggcaggacatcctgaaggaggtgaagttcctgcggcagctgaagcaccccaacaccatcgagtacaagggctgctacctgaaggagcacacagcctggctggtgatggagtactgcctgggcagcgccagtgacctgctggaggtgcacaagaagcccctgcaggaggtggagattgctgccatcacccatggagccctgcacggcctggcctacctgcacagccacgccctgatccaccgggacatcaaggccggcaacatcctgctgacagagcccggccaggtgaagctggccgactttggcagcgcctccatggccagccctgccaacagctttgtgggcaccccctactggatggcccctgaggtgatcctggccatggatgagggccagtatgatggcaaggtggacatctggagcctgggcatcacctgcatcgagctggccgagaggaagcccccactcttcaacatgaatgccatgtctgccctgtaccacatcgcccagaatgacagccccaccctgcagagcaatgagtggacagacagcttcagaagatttgtggactactgcctgcagaagatcccccaggagcggcccaccagcgctgagctgctgcggcatgactttgtgcggcgggaccggcccctgcgggtgctgattgacctgatccagaggaccaaggatgctgtgcgggagctggacaacctgcagtacaggaagatgaagaagatcctcttccaggagaccagaaatggccccctgaatgaaagccaggaggatgaagaagattctgaacatggcaccagcctgaaccgggagatggacagcctgggcagcaaccacagcatccccagcatgtctgtgtccacaggcagccagagcagctctgtgaacagcatgcaggaggtgatggatgagagcagcagcgagctggtgatgatgcatgatgatgagagcaccatcaacagcagcagctctgtggtgcacaagaaggaccacgtgttcatcagagatgaagctggccatggagaccccaggcctgagccccggcccacccagagcgtgcagagccaggccctgcactacagaaaccgggagagatttgccaccatcaagagcgccagcctggtgacccggcagatccatgaacatgagcaggagaatgagctgcgggagcagatgagcggctacaagaggatgaggcggcagcaccagaagcagctgattgccctggagaacaagctgaaggccgagatggatgagcaccggctgaagctgcagaaggaggtggagacccacgccaacaacagcagcattgagctggagaagctggccaagaagcaggtggccatcatcgagaaggaggccaaggtggccgctgctgatgagaagaagttccagcagcagatcctggcccagcagaagaaggacctgaccaccttcctggagagccagaagaagcagtacaagatctgcaaggagaagatcaaggaggagatgaatgaagaccacagcacccccaagaaggagaagcaggagcgcatcagcaagcacaaggagaacctgcagcacacccaggccgaggaggaggcccacctgctgacccagcagaggctgtactatgacaagaactgccgcttcttcaagaggaagatcatgatcaagagacatgaggtggagcagcagaacatccgggaggagctgaacaagaagaggacccagaaggagatggagcacgccatgctgatcagacatgatgagagcacccgggagctggagtaccggcagctgcacaccctgcagaagctgaggatggacctgatccggctgcagcaccagacagagctggagaaccagctggagtacaacaagaggcgggagcgggagctgcacaggaagcacgtgatggagctgcggcagcagcccaagaacctgaaggccatggagatgcagatcaagaagcagttccaggacacctgcaaggtgcagaccaagcagtacaaggccctgaagaaccaccagctggaggtgacccccaagaatgagcacaagaccatcctgaagaccctgaaggatgagcagaccaggaagctggccatcctggccgagcagtatgagcagagcatcaatgagatgatggccagccaggccctgcggctggatgaggcccaggaggccgagtgccaggccctgcggctgcagctgcagcaggagatggagctgctgaatgcctaccagagcaagatcaagatgcagacagaggcccagcacgagcgggagctgcagaagctggagcagagggtgtccctgcggcgggcccacctggagcagaagattgaggaggagctggccgccctgcagaaggagaggtctgagcgcatcaagaacctgctggagcggcaggagcgggagattgagacctttgacatggagagcctgaggatgggcttcggcaacctggtgaccctggacttccccaaggaggactacagatag

SEQ ID NO: 190371 - DNA, 924 bp, Artificial Sequence
  derived and/or modified sequence
atgcacgacgacgagagcaccatcaacagcagcagcagcgtggtgcataaaaaggatcatgttttcatcagagacgaggcagggcatggagatcccaggcccgagcctcgcccaacccagtcagttcagagccaggcccttcattaccggaaccgagagcgattcgccaccataaagagcgctagtcttgttactaggcagatccacgagcacgagcaggagaatgagctgcgggagcagatgagcgggtataagaggatgagacgacagcaccaaaaacaacttattgcactcgagaacaaactgaaagctgagatggacgaacacaggctaaaactgcagaaagaggtagaaactcatgccaacaactcctcaatcgaacttgagaaacttgcaaaaaagcaggttgccatcatagagaaagaagccaaggtggccgccgccgatgagaaaaaatttcagcaacagatcctggctcaacagaaaaaagacctgacaacctttctcgagtcgcagaagaagcagtataaaatttgtaaggaaaagattaaagaagagatgaatgaggaccatagcacacccaagaaggagaagcaggagcgcatctccaaacataaggagaacctgcaacacacccaagcagaggaggaggcacacctactgacccagcagcgactatactatgataagaattgtcgattttttaagcgtaaaattatgatcaaaagacacgaggtggaacagcaaaacattcgcgaagagcttaataaaaagcgcaccgagggcgacggggcttgccacgctaatccggacgagtccactagagagcttgaataccgccaactgcatactctccagaagctacacggaagtgatcccttcactgcaccagacggtacaggcaaacctgctggtgtacagtag

SEQ ID NO: 190372 - DNA, 2697 bp, Artificial Sequence
  derived and/or modified sequence
atgcggaagggcgtgctgaaggaccccgagatcgccgacctgttctataaagacgaccctgaagaattgttcattggactccacgagattggacacggttcattcggcgctgtctacttcgccacgaacgcccacacctccgaggttgtggccataaaaaagatgtcatattctgggaagcaaacacacgagaaatggcaggatatactgaaggaggtaaagttccttagacagcttaaacatccaaacaccattgagtataagggctgctatcttaaggagcataccgcttggctcgtgatggagtactgcctcggaagtgccagtgatttactggaggtccacaaaaaaccgctgcaggaggtcgagatcgccgccatcactcatggcgctttacacggcctagcgtatttacattctcatgccctcatccatagagatatcaaggccgggaacatcctcctgacagagcctggccaagtgaagctggccgatttcggctccgccagcatggcatccccagccaactctttcgtgggtacgccttattggatggctccagaggtcatccttgccatggatgaaggtcaatacgacggaaaagttgatatttggtctctgggaataacgtgcattgagctggctgagcgaaagcctccactcttcaatatgaacgccatgagtgcgctgtaccacattgcacagaatgactcacctactctccagagtaatgagtggacagactcctttcgaagattcgtagactattgcctgcagaaaattcctcaggagcgtcctacctcagccgagctgctgcggcacgatttcgtgcggcgggatcggccgcttcgagtgctgatcgaccttatccagcgcactaaggacgccgtccgggaacttgacaacctccagtaccggaaaatgaaaaaaatcctgtttcaggaaacgcgaaacggtcccttgaacgaatcccaggaggacgaggaagattccgaacatggcacctcactgaatagagagatggatagcctaggcagcaaccactccattcccagcatgtctgtttccacagggagccagagcagcagcgttaattcaatgcaggaagttatggacgaaagcagctctgaactggtcatgatgcatgacgacgaatcaaccatcaactcaagcagctccgtcgtgcacaagaaagaccacgtgttcatcagggacgaagcgggacacggggaccctcgtcccgaacccaggccgactcaaagtgttcagagccaggccttacactaccgcaacagggaaagatttgccaccatcaaaagcgccagcctggtcactcggcagattcatgagcacgagcaggaaaatgagctcagagaacagatgtcaggatataaacggatgaggcggcagcaccagaaacagttgatcgccctggagaataagcttaaagctgagatggacgaacatcggctgaaattacagaaagaagtggagactcacgcaaacaacagttcaatcgagctggaaaagttggcgaaaaagcaggtagcaattattgaaaaggaggcaaaagtggccgctgctgacgaaaagaagttccagcagcaaatcctggcccagcagaaaaaagatcttacaaccttccttgaaagccagaaaaagcagtataaaatctgcaaggagaagatcaaggaagagatgaatgaggatcacagtaccccgaaaaaggaaaagcaagaaagaatttcgaagcataaggaaaacctgcaacacactcaggctgaagaagaagcccacctccttacgcagcagcgtttgtactacgataagaactgccgcttctttaagcgtaaaatcatgataaagaggcacgaggtcgagcaacagaatatccgtgaggaattaaataaaaaacggacccagaaagaaatggaacacgcaatgctgatccgccacgacgagagcacccgtgagctggagtatagacagctccacacactccagaaactccggatggacctgattcgattgcagcatcaaaccgaactggagaaccagctggaatacaacaaacgcagggaaagggaactgcatcgcaagcacgttatggaactcagacagcaaccaaagaatctgaaagcgatggagatgcaaattaagaagcaatttcaggatacctgtaaggtgcagactaagcagtataaggcgctcaagaaccaccagcttgaggtgacccctaagaacgagcataaaacaattttaaagaccctgaaggatgaacagactcgcaaattggccattcttgcagaacagtacgagcaatcgattaatgagatgatggcatctcaggccttacgtttggacgaggcacaggaggctgagtgccaagctttacggctgcagctgcagcaggaaatggagctgctgaatgcttatcagtcaaaaattaagatgcaaaccgaagcccagcatgaaagggaactccagaaactcgaacagcgtgtttctctgcggcgcgctcacctggagcagaaaatagaggaggagttggctgccttacagaaggaacgtagcgagcggattaagaatcttcttgaaaggcaggaaagagagatcgagacttttgatatggaatccttaaggatgggttttggcaacctggttacactcgacttccccaaagaggactacagatag

SEQ ID NO: 190373 - DNA, 2697 bp, Artificial Sequence
  derived and/or modified sequence
atgcggaagggcgtgctgaaggaccccgagatcgccgacctgttctacaaggacgacccagaagagcttttcattgggctacatgagatcggccacgggagtttcggggctgtctactttgcaactaatgcgcacacgtcggaggttgttgccataaaaaagatgtcttactcgggaaagcagactcatgagaaatggcaagacatccttaaggaagtgaaattcctcaggcaactcaagcaccctaataccattgagtataagggatgctacttaaaagaacatacggcctggttagtgatggaatactgtttggggagtgcttctgatcttttggaagtgcacaaaaaacccctgcaagaggtcgagatcgcggccattacgcacggcgccttgcacggcctcgcatacctccactcccacgctctgatacaccgtgatataaaagctgggaacatcctactcaccgagcccgggcaggtgaagctggccgatttcggttcagccagtatggcaagtcctgctaatagcttcgtgggtacgccctactggatggccccagaagtgatcttggcaatggatgaggggcagtacgatggcaaagtggatatttggtctctggggattacctgtatcgaactggctgaacggaagcccccgctcttcaatatgaatgcgatgagcgccctgtaccatattgcacagaacgactccccaacattacagtctaatgagtggacggatagcttccgtagatttgttgattactgccttcagaagatccctcaggagagaccaacatctgcagagcttcttcggcatgattttgtgaggagagataggcctttgcgcgtgcttatagatttgatccaaagaacgaaagatgccgtcagagagttagataacttgcaatatagaaaaatgaagaagatccttttccaggaaacgcggaatggcccgctgaacgagtcacaggaggacgaagaggatagtgaacacgggaccagcttaaatagagagatggactcactgggaagcaatcattccattccatctatgtccgtttcaactgggagtcagtctagcagcgtcaatagcatgcaggaagtaatggatgagagtagctctgagctggtcatgatgcatgatgatgaaagcactataaactcgtcgtcatctgtcgtgcataaaaaggaccacgtgttcatccgagacgaggctggccacggggacccacggcccgaaccccgcccaactcagtctgtgcagtcccaagccctgcattatcgcaatcgggaacgattcgctacaataaagtccgcgagcctggtgaccagacagatccatgaacatgagcaggagaacgagctgcgggaacaaatgtccgggtataaacgcatgcgaagacagcaccagaagcaacttatagccctcgagaacaaactaaaggccgagatggatgaacaccggttgaaactgcaaaaagaagttgaaactcacgccaacaacagctcgatagagctcgagaagctggcaaagaagcaggtggccataatcgagaaggaggctaaggtcgctgccgctgatgagaagaagtttcaacagcagatcctggctcagcagaaaaaagatctgacaacattcctcgagagccagaaaaagcaatacaaaatatgcaaagagaagattaaggaagaaatgaacgaggatcacagcacccccaagaaagaaaagcaggagcggatcagcaagcacaaagaaaacctgcaacatacccaggccgaagaagaagctcatcttctgactcaacagaggctgtattacgataaaaactgccgcttttttaaaaggaaaattatgattaaacgacatgaagttgagcagcaaaacatacgcgaagagctcaacaaaaagaggacccagaaagaaatggaacacgctatgctcatccggcacgatgaatccaccagggaactagagtaccgacaacttcacactctccagaagctcagaatggatcttatacgtctacagcatcagacagagcttgaaaatcagctcgaatataataagcgtagggaacgcgagctacatagaaaacatgtgatggaactgagacagcagcctaaaaatctgaaagcaatggagatgcagatcaaaaagcagtttcaagatacttgtaaggtgcagacgaagcagtacaaggcacttaagaaccaccagctcgaggtcactcccaaaaatgagcacaaaacaatattgaagacgcttaaagacgagcagactagaaaactggcgatcctcgctgagcagtacgaacaaagcattaacgagatgatggcttcccaggccctgcggctggacgaggcacaggaggccgaatgccaggccctccgtctgcagctgcagcaggagatggaactgctcaatgcatatcaatccaaaatcaaaatgcaaacagaggctcagcacgagagggaacttcagaagctggaacaacgggtgtctctgcgccgcgcccatctggagcaaaagattgaggaagagttggctgctctgcagaaagagagatccgaacgtatcaagaacctcctggagagacaggagcgcgagattgaaacttttgacatggagtcattgagaatgggcttcggaaatctggtcaccttagatttcccaaaggaggactatcggtag

SEQ ID NO: 190374 - DNA, 924 bp, Artificial Sequence
  derived and/or modified sequence
atgcacgacgacgagtcaaccatcaacagtagcagctctgtggtccataaaaaagaccacgtattcatacgtgatgaagctgggcatggtgacccacgccctgagccaagacccacacagtcggttcaaagccaggccctccactataggaatcgtgaaagatttgcgacaataaaaagcgccagccttgtgaccaggcagattcatgagcatgaacaggagaacgaactcagggagcaaatgagtgggtacaaacggatgaggaggcagcaccaaaaacagctcattgccctggaaaataaattaaaggctgagatggatgagcaccgccttaaattgcagaaagaagtcgagacacatgctaacaacagctcaattgaacttgaaaagcttgcgaaaaagcaggtggccattattgagaaggaggccaaagtcgctgcggcagatgaaaagaagttccagcaacaaattctggcccagcaaaagaaagatcttactactttcctggagtctcaaaagaaacagtacaagatatgcaaggagaaaataaaggaagagatgaatgaagatcattccacacccaagaaggaaaagcaggagagaatctccaagcataaggagaatcttcagcatactcaagctgaggaagaggctcatctacttacacaacagcgtctctattatgacaagaactgcaggttcttcaaaaggaaaattatgatcaaaaggcacgaagtggaacagcagaatattcgtgaggaacttaataaaaagcgcaccgaaggggacggagcatgccatgccaatccagatgagtctacacgtgaactggagtatagacagttacataccctacagaaattgcatgggtccgaccccttcacagccccagacggcaccggaaagcctgccggtgtgcagtag

SEQ ID NO: 190375 - DNA, 2697 bp, Artificial Sequence
  derived and/or modified sequence
atgaggaaaggagtgctcaaagatccagagattgccgatctcttctataaggacgatccagaagaattgttcataggcttgcatgagatcggtcacgggtcctttggcgctgtgtacttcgcgacgaatgcacacaccagcgaggtggtggccataaagaagatgtcttactccgggaaacagacgcacgaaaagtggcaagacatccttaaggaggtcaaattcttaagacagctgaaacatccgaatacaatcgagtacaaaggatgttatctcaaagagcacaccgcttggctcgttatggagtactgtctgggttccgcctcggatctgcttgaagtccacaagaagcccctgcaggaggtggaaatcgctgctattacccacggcgcactgcacgggctcgcctatctacattctcatgcactcattcaccgcgatattaaggctgggaacatcttgttgacagaacccggtcaggttaaacttgcagattttggcagcgcctcaatggctagtccggctaatagtttcgtaggtacaccgtactggatggcccctgaggtgattttggcaatggacgaaggtcaatacgacggaaaagttgacatctggtcactaggaattacctgcattgagctggctgaacggaaacccccattatttaacatgaacgccatgagcgctctgtatcacattgcccagaatgattctcctactctgcagtccaatgagtggactgacagtttcagacgattcgtggactactgcctgcagaagattccccaggagaggcccacaagcgcagaactccttaggcacgatttcgtgaggagagaccgccctttgcgcgttctcattgacttaatccagaggaccaaagacgcagtcagggaattggacaatcttcagtaccggaagatgaaaaaaatcttgttccaggagaccaggaatgggccattaaatgagagccaagaagacgaagaagattctgagcacgggacttcactgaaccgcgaaatggattccctgggctccaaccatagcattcccagtatgtcagtttcgacaggaagccagtcaagttccgtgaactccatgcaggaagtcatggacgaatcatcttcagaacttgtgatgatgcacgatgatgaatcaactataaatagctcgtcatccgttgtgcacaaaaaagatcacgtgttcatacgggatgaggctggtcacggggatcctaggccagaacctagaccaactcagtcggttcagagccaggccctgcactacaggaaccgagagcggttcgccaccattaagtcggcatctctagtcaccagacaaatacatgaacatgagcaggaaaacgaattgcgcgaacagatgtctggttacaaaaggatgcgcagacagcaccagaaacagctcatcgcccttgagaacaaactaaaggctgagatggatgaacaccggctgaaacttcagaaggaggtggagacacatgctaataactcgtcgatcgagctcgagaaactggccaagaaacaagtggcaattatcgaaaaggaagcaaaagtcgccgctgccgacgaaaagaagtttcagcagcagattttggcacagcaaaagaaggatctgactactttcctggaaagccaaaaaaagcagtacaagatctgcaaggaaaaaatcaaggaggagatgaacgaagatcattcgacgccgaaaaaagagaagcaggagcggatcagtaagcacaaggagaatttgcagcatacccaggctgaggaagaggcccacctgctaacccagcagcggttgtactatgacaaaaactgcaggttttttaagaggaaaattatgataaagcgacatgaggtcgagcagcagaacatccgggaagaattgaacaagaaacggacgcagaaggagatggaacatgctatgctcattaggcacgacgagagcaccagggagctggagtatcggcagctgcataccctgcagaaacttcgtatggatctaattcgactccagcatcagaccgagctggaaaaccaactggaatataataagaggagagaacgggaattacatagaaagcacgttatggagcttaggcagcagcctaaaaacctcaaggcaatggagatgcagatcaaaaagcagttccaagacacctgcaaggtgcagacaaagcagtacaaggcactgaagaatcaccaactagaggtgactcctaagaatgaacataaaactattctgaagacacttaaagacgagcagacacgcaaactggctattctcgccgagcagtatgagcagtcaattaacgagatgatggccagccaggcgctgagactggacgaggctcaggaagcagagtgccaagccttacgcctgcagctgcaacaggaaatggaactcctaaatgcatatcagagcaaaatcaagatgcagactgaagcccaacatgagcgcgagctgcagaaactggagcagcgcgtgagtcttcggagagctcatctcgagcagaagatcgaggaagaactagccgcactgcagaaggagcggtcagaaaggattaaaaatctccttgaaaggcaggagagagagatcgagacctttgacatggagtctctgcgtatgggattcggcaatctggtgacgctggacttcccaaaggaagactatcgctag

SEQ ID NO: 190376 - DNA, 2697 bp, Artificial Sequence
  derived and/or modified sequence
atgcggaaaggtgtcctaaaggacccagagatagctgacctcttctataaggatgaccccgaggagctgttcatcgggctgcacgaaatcgggcatggttctttcggggcagtgtatttcgccacaaatgcccacaccagcgaagtggtggcaattaaaaaaatgagctattccggaaagcagacgcacgagaagtggcaggatatcctgaaggaggtcaaattccttagacaactcaaacatcctaacaccatcgagtacaagggctgttaccttaaggaacacactgcctggctcgttatggaatactgcctggggagtgcttcagatctgctcgaggttcacaagaagcctctacaggaagtggaaatcgctgctattacgcatggtgcgctgcacggcctggcttaccttcattcacacgctctgatacacagagacatcaaggccggaaacattttactgaccgagcccggacaagttaagttagcggattttggttccgccagcatggccagcccagctaattcctttgtgggaactccctattggatggcgcctgaagttatacttgcaatggatgagggacagtacgacggaaaggtggatatctggagcctagggattacatgcattgaactggcagaacgtaaacccccactatttaatatgaacgctatgagtgcactgtaccatattgctcagaatgatagccccaccttacagtcaaacgaatggaccgactctttccgccgttttgtagattactgtctccagaagataccccaggagcgcccaacttcggccgaattgctgcggcacgacttcgtgaggcgcgaccgccctcttcgggtacttatcgacctgatccagaggacgaaagacgccgtacgcgaacttgacaatctccaatatcggaagatgaaaaagatcttgtttcaggagaccagaaatggcccactaaatgagagccaggaggacgaagaggatagcgaacacggaacatcactgaatcgagagatggacagtctgggctccaaccatagcattccttcaatgagcgtttcgacagggtcacagtcctcctccgtgaactccatgcaagaagtcatggacgagtctagctccgagttggttatgatgcatgatgacgagagcacaatcaactccagctcttccgtcgttcataaaaaagaccacgtttttattagggacgaggccggtcacggcgacccaagaccagaacctcgccctacccagtcagtgcagtcacaggcccttcactacaggaaccgggagagattcgccacaataaaatctgcttccctggtgaccagacagattcatgagcacgagcaggagaatgaacttagggagcaaatgagcgggtacaagagaatgcggaggcagcatcaaaaacagttaatcgcactggagaacaaacttaaggctgagatggacgaacaccgactgaaactccagaaagaggtggagactcacgcaaataactcttcaatcgagctcgaaaaactggccaagaagcaggtggcgatcatagagaaggaggcaaaagtggctgcagctgacgagaaaaaatttcagcaacagattctcgcacagcagaaaaaggaccttaccacctttctagaaagtcaaaagaaacagtacaaaatctgcaaagagaagataaaggaagagatgaacgaagaccacagtaccccaaaaaaggagaagcaggaacgaatttccaagcacaaggaaaacctgcagcacacgcaggctgaggaggaagctcacttactgacccagcaacggctctactacgacaaaaactgtcgcttctttaagcgcaagattatgattaaaaggcacgaggtggagcagcagaatatccgcgaggagttgaacaaaaaaagaactcagaaggagatggagcacgcgatgctcattcgtcatgatgaatcgacaagagaattggaataccggcagcttcatactctgcagaagctccgcatggatctaatacgtctgcagcaccagaccgaactcgagaaccagttggagtacaataagcgcagagagagagagctacacagaaagcatgttatggaattgaggcaacagcctaaaaacctgaaagcaatggagatgcaaatcaaaaagcaatttcaggacacctgcaaagtgcagacaaaacagtacaaagcgctgaagaatcatcaacttgaagttacacccaaaaacgaacacaagactatattgaaaactcttaaggatgagcagacaaggaagcttgctatcctggccgagcagtacgagcagagtattaacgagatgatggcatctcaggcgctacgactggatgaagcccaggaagccgagtgtcaagcacttcgacttcagcttcaacaagagatggaactgttaaatgcatatcagtcgaaaatcaagatgcagacagaagcacaacacgagagggagttgcagaaactggaacagcgggtgtccctgcgaagggcgcatctggagcagaagatagaggaagagctcgcagctttgcagaaagagaggtccgagcgtattaagaatcttctcgagcggcaggagagggaaatcgagactttcgacatggagtcccttaggatgggattcggaaatcttgtgaccctggatttccctaaggaggactacagatag

SEQ ID NO: 190377 - DNA, 2555 bp, Artificial Sequence
  derived and/or modified sequence
gtgctcggcgcagtccggtgcgattggccacccctggcaggagccgcacctcggacagcagcagcggcggcggccgcgggagggtccttgtggcgccgggcggcggggtcctgcgtggagagtgggacgcaacgccgagaccgcgagcagaggctgcgcacagccggatccggcactcagcgaccggacccaaggatccgccggggaacaagccacaggagagcgactcaggaacaagtgtgggagaggaagcggcggcggcggcgccgggcccgggggtggtgacagcaggtctgaggttgcatcataaatacaaaggactgaagttataaaagagaaaagagaagtttgctgctaaaatgaatctgagcaatatggaatattttgtgccacacacaaaaaggtactgaagatttaccccccaaaaaaaattgtcaatgagaaataaagctaactgatatcaaaaagcagagcctgctctactggccatcatgcgtaaaggggtgctgaaggacccagagattgccgatctattctacaaagatgatcctgaggaactttttattggtttgcatgaaattggacatggaagttttggagcagtttattttgctacaaatgctcacaccagtgaggtggtggcaattaagaagatgtcctatagtgggaagcagacccatgagaaatggcaagatattcttaaggaagttaaatttttacgacaattgaagcatcctaatactattgagtacaaaggctgttacttgaaagaacacactgcttggttggtgatggaatattgcttaggctcagcctctgatttattagaagttcataaaaaaccacttcaggaagtggagatcgctgccattactcatggagccttgcatggactagcctacctacattctcatgcattgattcatagggatattaaagcaggaaatattcttctaacagagccaggtcaggtaaaactagctgattttggatctgcttcaatggcttctcctgccaactccttcgtgggcacaccttactggatggctccagaggtgatcttagctatggatgaaggacagtatgatgggaaagttgatatttggtcacttggcatcacttgtattgaattggcggaacggaagccgccccttttcaacatgaatgcaatgagtgccttatatcacattgcccagaatgactccccaacgttacagtctaatgaatggacagactcctttaggagatttgttgattactgcttgcagaaaatacctcaggaaaggccaacatcagcagaactattaaggcatgactttgttcgacgagaccggccactacgtgtcctcattgacctcatacagaggacaaaagatgcagttcgtgagctagataacctacagtaccgaaaaatgaaaaaaatacttttccaagagacacggaatggacccttgaatgagtcacaggaggatgaggaagacagtgaacatggaaccagcctgaacagggaaatggacagcctgggcagcaaccattccattccaagcatgtccgtgagcacaggcagccagagcagcagtgtgaacagcatgcaggaagtcatggacgagagcagttccgaacttgtcatgatgcacgatgacgaaagcacaatcaattccagctcctccgtcgtgcataagaaagatcatgtattcataagggatgaggcgggccacggcgatcccaggcctgagccgcggcctacccagtcagttcagagccaggccctccactaccggaacagagagcgctttgccacgatcaaatcagcatctttggttacacgacagatccatgagcatgagcaggagaacgagttgcgggaacagatgtcaggttataagcggatgcggcgccagcaccagaagcagctgatcgccctggagaacaagctgaaggctgagatggacgagcaccgcctcaagctacagaaggaggtggagacgcatgccaacaactcgtccatcgagctggagaagctggccaagaagcaagtggctatcatagaaaaggaggcaaaggtagctgcagcagatgagaagaagttccagcaacagatcttggcccagcagaagaaagatttgacaactttcttagaaagtcagaagaagcagtataagatttgtaaggaaaaaataaaagaggaaatgaatgaggaccatagcacacccaagaaagagaagcaagagcggatctccaaacataaagagaacttgcagcacacacaggctgaagaggaagcccaccttctcactcaacagagactgtactacgacaaaaattgtcgtttcttcaagcggaaaataatgatcaagcggcacgaggtggagcagcagaacattcgggaggaactaaataaaaagaggaccgaaggagatggagcatgccatgctaatccggacgagtccacccgagagctagagtacaggcagctgcacacgttacagaagctacatggatctgatccgtttacagcaccagacggaactggaaaaccagctggagtacaataa

SEQ ID NO: 190378 - DNA, 4384 bp, Artificial Sequence
  derived and/or modified sequence
gtgctcggcgcagtccggtgcgattggccacccctggcaggagccgcacctcggacagcagcagcggcggcggccgcgggagggtccttgtggcgccgggcggcggggtcctgcgtggagagtgggacgcaacgccgagaccgcgagcagaggctgcgcacagccggatccggcactcagcgaccggacccaaggatccgccggggaacaagccacaggagagcgactcaggaacaagtgtgggagaggaagcggcggcggcggcgccgggcccgggggtggtgacagcaggtctgaggttgcatcataaatacaaaggactgaagttataaaagagaaaagagaagtttgctgctaaaatgaatctgagcaatatggaatattttgtgccacacacaaaaaggtactgaagatttaccccccaaaaaaaattgtcaatgagaaataaagctaactgatatcaaaaagcagagcctgctctactggccatcatgcgtaaaggggtgctgaaggacccagagattgccgatctattctacaaagatgatcctgaggaactttttattggtttgcatgaaattggacatggaagttttggagcagtttattttgctacaaatgctcacaccagtgaggtggtggcaattaagaagatgtcctatagtgggaagcagacccatgagaaatggcaagatattcttaaggaagttaaatttttacgacaattgaagcatcctaatactattgagtacaaaggctgttacttgaaagaacacactgcttggttggtgatggaatattgcttaggctcagcctctgatttattagaagttcataaaaaaccacttcaggaagtggagatcgctgccattactcatggagccttgcatggactagcctacctacattctcatgcattgattcatagggatattaaagcaggaaatattcttctaacagagccaggtcaggtaaaactagctgattttggatctgcttcaatggcttctcctgccaactccttcgtgggcacaccttactggatggctccagaggtgatcttagctatggatgaaggacagtatgatgggaaagttgatatttggtcacttggcatcacttgtattgaattggcggaacggaagccgccccttttcaacatgaatgcaatgagtgccttatatcacattgcccagaatgactccccaacgttacagtctaatgaatggacagactcctttaggagatttgttgattactgcttgcagaaaatacctcaggaaaggccaacatcagcagaactattaaggcatgactttgttcgacgagaccggccactacgtgtcctcattgacctcatacagaggacaaaagatgcagttcgtgagctagataacctacagtaccgaaaaatgaaaaaaatacttttccaagagacacggaatggacccttgaatgagtcacaggaggatgaggaagacagtgaacatggaaccagcctgaacagggaaatggacagcctgggcagcaaccattccattccaagcatgtccgtgagcacaggcagccagagcagcagtgtgaacagcatgcaggaagtcatggacgagagcagttccgaacttgtcatgatgcacgatgacgaaagcacaatcaattccagctcctccgtcgtgcataagaaagatcatgtattcataagggatgaggcgggccacggcgatcccaggcctgagccgcggcctacccagtcagttcagagccaggccctccactaccggaacagagagcgctttgccacgatcaaatcagcatctttggttacacgacagatccatgagcatgagcaggagaacgagttgcgggaacagatgtcaggttataagcggatgcggcgccagcaccagaagcagctgatcgccctggagaacaagctgaaggctgagatggacgagcaccgcctcaagctacagaaggaggtggagacgcatgccaacaactcgtccatcgagctggagaagctggccaagaagcaagtggctatcatagaaaaggaggcaaaggtagctgcagcagatgagaagaagttccagcaacagatcttggcccagcagaagaaagatttgacaactttcttagaaagtcagaagaagcagtataagatttgtaaggaaaaaataaaagaggaaatgaatgaggaccatagcacacccaagaaagagaagcaagagcggatctccaaacataaagagaacttgcagcacacacaggctgaagaggaagcccaccttctcactcaacagagactgtactacgacaaaaattgtcgtttcttcaagcggaaaataatgatcaagcggcacgaggtggagcagcagaacattcgggaggaactaaataaaaagaggacccagaaggagatggagcatgccatgctaatccggcacgacgagtccacccgagagctagagtacaggcagctgcacacgttacagaagctacgcatggatctgatccgtttacagcaccagacggaactggaaaaccagctggagtacaataagaggcgagaaagagaactgcacagaaagcatgtcatggaacttcggcaacagccaaaaaacttaaaggccatggaaatgcaaattaaaaaacagtttcaggacacttgcaaagtacagaccaaacagtataaagcactcaagaatcaccagttggaagttactccaaagaatgagcacaaaacaatcttaaagacactgaaagatgagcagacaagaaaacttgccattttggcagagcagtatgaacagagtataaatgaaatgatggcctctcaagcgttacggctagatgaggctcaagaagcagaatgccaggccttgaggctacagctccagcaggaaatggagctgctcaacgcctaccagagcaaaatcaagatgcaaacagaggcacaacatgaacgtgagctccagaagctagagcagagagtgtctctgcgcagagcacaccttgagcagaagattgaagaggagctggctgcccttcagaaggaacgcagcgagagaataaagaacctattggaaaggcaagagcgagagattgaaacttttgacatggagagcctcagaatgggatttgggaatttggttacattagattttcctaaggaggactacagatgagattaaattttttgccatttacaaaaaaaaaaaaaaaaaagaaaacagaaaaaaattcagaccctgcaaaaccacattccccattttaacgggcgttgctctcactctctctctctcttactcttactgacatcgtgtcggactagtgcctgtttattcttactccatcaggggcccccttcctccccccgtgtcaactttcagtgctggccaaaacctggccgtctcttctattcacagtacacgtcacagtattgatgtgattcaaaatgtttcagtgaaaactttggagacagttttaacaaaaccaataaaccaacaacaaaaaaagtggatgtatattgctttaagcaatcactcattaccaccaatctgtgaaagtaaagcaaaaaataataataataaatgccaagggggagagagacacaatatccgcagccttacaccttaactagctgctgcattattttattttattttatttttttggtatttattcatcaggaataaaaaaaacaaagttttattaaagattgaaaatttgatacattttacagaaactaattgtgatgtacatatcagtggtgacatattattacttttttggggacggggggtgggtggggtgaagagatcttgtgatttttaagaacctgctggcaagagtttaacttgtcttcagcatattctgattgtatcataatcattttctgctgttgcagaggatgtgaatacacttaaggagctcacagaatcccagtagcacaaattgggctttggcaaatcgtgtattttgtgtatagaaggaatttaaggagaggtattacttattttcatattgtattttaactgtttctctgatcaaatttttttacttcctcctcctgttcctccccacctccctccttttccagttcagtatttggagttcaacactgtctctcaatcagatcatcttgatctttttctttatctcccttccccttcctaagtcccatttcttggtcataaatattgcattattcacactttcaaactgtgtattttcttacaataaaaaatgatgaaaaaaaaaaaggctttacttcttttgcatgcactttaaaaacaaaacaaaacatttttcaggttccaaggaagagcatgataactgtcagagcttttaattatatttgtaaataaaagtgttcatcaca

SEQ ID NO: 190379 - DNA, 4301 bp, Artificial Sequence
  derived and/or modified sequence
gttgtaacaggaaatacttcagcttgcaatactgatagtaatgtgtggcacccagatcacgctgtttttatctgcagttcctttttagtattgtacaaagtttcttgaagatttttaaatacataagtttaaaagagaattaactttcaatttgcaaattaaaatgagaatggttgccttttcttcattatcaagagatggtgagttgtcctcctgttgcatcataaatacaaaggactgaagttataaaagagaaaagagaagtttgctgctaaaatgaatctgagcaatatggaatattttgtgccacacacaaaaaggtactgaagatttaccccccaaaaaaaattgtcaatgagaaataaagctaactgatatcaaaaagcagagcctgctctactggccatcatgcgtaaaggggtgctgaaggacccagagattgccgatctattctacaaagatgatcctgaggaactttttattggtttgcatgaaattggacatggaagttttggagcagtttattttgctacaaatgctcacaccagtgaggtggtggcaattaagaagatgtcctatagtgggaagcagacccatgagaaatggcaagatattcttaaggaagttaaatttttacgacaattgaagcatcctaatactattgagtacaaaggctgttacttgaaagaacacactgcttggttggtgatggaatattgcttaggctcagcctctgatttattagaagttcataaaaaaccacttcaggaagtggagatcgctgccattactcatggagccttgcatggactagcctacctacattctcatgcattgattcatagggatattaaagcaggaaatattcttctaacagagccaggtcaggtaaaactagctgattttggatctgcttcaatggcttctcctgccaactccttcgtgggcacaccttactggatggctccagaggtgatcttagctatggatgaaggacagtatgatgggaaagttgatatttggtcacttggcatcacttgtattgaattggcggaacggaagccgccccttttcaacatgaatgcaatgagtgccttatatcacattgcccagaatgactccccaacgttacagtctaatgaatggacagactcctttaggagatttgttgattactgcttgcagaaaatacctcaggaaaggccaacatcagcagaactattaaggcatgactttgttcgacgagaccggccactacgtgtcctcattgacctcatacagaggacaaaagatgcagttcgtgagctagataacctacagtaccgaaaaatgaaaaaaatacttttccaagagacacggaatggacccttgaatgagtcacaggaggatgaggaagacagtgaacatggaaccagcctgaacagggaaatggacagcctgggcagcaaccattccattccaagcatgtccgtgagcacaggcagccagagcagcagtgtgaacagcatgcaggaagtcatggacgagagcagttccgaacttgtcatgatgcacgatgacgaaagcacaatcaattccagctcctccgtcgtgcataagaaagatcatgtattcataagggatgaggcgggccacggcgatcccaggcctgagccgcggcctacccagtcagttcagagccaggccctccactaccggaacagagagcgctttgccacgatcaaatcagcatctttggttacacgacagatccatgagcatgagcaggagaacgagttgcgggaacagatgtcaggttataagcggatgcggcgccagcaccagaagcagctgatcgccctggagaacaagctgaaggctgagatggacgagcaccgcctcaagctacagaaggaggtggagacgcatgccaacaactcgtccatcgagctggagaagctggccaagaagcaagtggctatcatagaaaaggaggcaaaggtagctgcagcagatgagaagaagttccagcaacagatcttggcccagcagaagaaagatttgacaactttcttagaaagtcagaagaagcagtataagatttgtaaggaaaaaataaaagaggaaatgaatgaggaccatagcacacccaagaaagagaagcaagagcggatctccaaacataaagagaacttgcagcacacacaggctgaagaggaagcccaccttctcactcaacagagactgtactacgacaaaaattgtcgtttcttcaagcggaaaataatgatcaagcggcacgaggtggagcagcagaacattcgggaggaactaaataaaaagaggacccagaaggagatggagcatgccatgctaatccggcacgacgagtccacccgagagctagagtacaggcagctgcacacgttacagaagctacgcatggatctgatccgtttacagcaccagacggaactggaaaaccagctggagtacaataagaggcgagaaagagaactgcacagaaagcatgtcatggaacttcggcaacagccaaaaaacttaaaggccatggaaatgcaaattaaaaaacagtttcaggacacttgcaaagtacagaccaaacagtataaagcactcaagaatcaccagttggaagttactccaaagaatgagcacaaaacaatcttaaagacactgaaagatgagcagacaagaaaacttgccattttggcagagcagtatgaacagagtataaatgaaatgatggcctctcaagcgttacggctagatgaggctcaagaagcagaatgccaggccttgaggctacagctccagcaggaaatggagctgctcaacgcctaccagagcaaaatcaagatgcaaacagaggcacaacatgaacgtgagctccagaagctagagcagagagtgtctctgcgcagagcacaccttgagcagaagattgaagaggagctggctgcccttcagaaggaacgcagcgagagaataaagaacctattggaaaggcaagagcgagagattgaaacttttgacatggagagcctcagaatgggatttgggaatttggttacattagattttcctaaggaggactacagatgagattaaattttttgccatttacaaaaaaaaaaaaaaaaaagaaaacagaaaaaaattcagaccctgcaaaaccacattccccattttaacgggcgttgctctcactctctctctctcttactcttactgacatcgtgtcggactagtgcctgtttattcttactccatcaggggcccccttcctccccccgtgtcaactttcagtgctggccaaaacctggccgtctcttctattcacagtacacgtcacagtattgatgtgattcaaaatgtttcagtgaaaactttggagacagttttaacaaaaccaataaaccaacaacaaaaaaagtggatgtatattgctttaagcaatcactcattaccaccaatctgtgaaagtaaagcaaaaaataataataataaatgccaagggggagagagacacaatatccgcagccttacaccttaactagctgctgcattattttattttattttatttttttggtatttattcatcaggaataaaaaaaacaaagttttattaaagattgaaaatttgatacattttacagaaactaattgtgatgtacatatcagtggtgacatattattacttttttggggacggggggtgggtggggtgaagagatcttgtgatttttaagaacctgctggcaagagtttaacttgtcttcagcatattctgattgtatcataatcattttctgctgttgcagaggatgtgaatacacttaaggagctcacagaatcccagtagcacaaattgggctttggcaaatcgtgtattttgtgtatagaaggaatttaaggagaggtattacttattttcatattgtattttaactgtttctctgatcaaatttttttacttcctcctcctgttcctccccacctccctccttttccagttcagtatttggagttcaacactgtctctcaatcagatcatcttgatctttttctttatctcccttccccttcctaagtcccatttcttggtcataaatattgcattattcacactttcaaactgtgtattttcttacaataaaaaatgatgaaaaaaaaaaaggctttacttcttttgcatgcactttaaaaacaaaacaaaacatttttcaggttccaaggaagagcatgataactgtcagagcttttaattatatttgtaaataaaagtgttcatcaca

SEQ ID NO: 190380 - protein, 157 aa, Artificial Sequence
  derived and/or modified sequence
MTRLALHELKNLTQYSWLLDGFPRTLPQAEALDRAYQIDTVINLNVPFEVIKQRLTARWIHPASGRVYNIEFNPPKTVGIDDLTGEPLIQREDDKPETVIKRLKAYEDQTKPVLEYYQKKGVLETFSGTETNKIWPYVYAFLQTKVPQRSQKASVTP

SEQ ID NO: 190381 - protein, 227 aa, Artificial Sequence
  derived and/or modified sequence
MGASARLLRAVIMGAPGSGKGTVSSRITTHFELKHLSSGDLLRDNMLRGTEIGVLAKAFIDQGKLIPDDVMTRLALHELKNLTQYSWLLDGFPRTLPQAEALDRAYQIDTVINLNVPFEVIKQRLTARWIHPASGRVYNIEFNPPKTVGIDDLTGEPLIQREDDKPETVIKRLKAYEDQTKPVLEYYQKKGVLETFSGTETNKIWPYVYAFLQTKVPQRSQKASVTP

SEQ ID NO: 190382 - DNA, 684 bp, Artificial Sequence
  derived and/or modified sequence
atgggagcctcagcccgcctcctgcgtgctgtcattatgggggctccagggtccggaaagggcactgtctcttctcgaatcacaacacactttgaacttaagcacctcagcagcggcgatttgttgcgcgacaacatgctgcgcggcaccgagattggcgttctggccaaggcttttatcgaccagggaaagttaattccagatgacgtgatgacaaggttggcactgcacgaactgaagaaccttacccagtattcctggctgcttgacggctttcccaggacactgccgcaggccgaggcactggacagggcttaccagatcgacaccgttatcaatttgaatgttccttttgaagtcattaagcagaggctcaccgcacgctggattcatccagcctccggcagggtgtacaacatcgaattcaatcctccaaagactgtagggatcgatgacctgacaggagaaccactgattcaaagggaggacgataagccagagacggtgataaaacgccttaaagcctacgaggaccagacaaaacccgtgctcgagtattaccagaagaagggtgtcctggaaacctttagcgggaccgagacgaacaaaatctggccgtacgtctacgcctttctccaaaccaaggtgccccagcgctcacagaaggcctccgtaaccccttag

SEQ ID NO: 190383 - DNA, 1536 bp, Artificial Sequence
  derived and/or modified sequence
acacactcttttacgttatttataaaagagtctcactcaatggaagctggatttcctctcctgtaaaatgagaaattggcgtgttagccaaggctttcattgaccaagggaaactcatcccagatgatgtcatgactcggctggcccttcatgagctgaaaaatctcacccagtatagctggctgttggatggttttccaaggacacttccacaggcagaagccctagatagagcttatcagatcgacacagtgattaacctgaatgtgccctttgaggtcattaaacaacgccttactgctcgctggattcatcccgccagtggccgagtctataacattgaattcaaccctcccaaaactgtgggcattgatgacctgactggggagcctctcattcagcgtgaggatgataaaccagagacggttatcaagagactaaaggcttatgaagaccaaacaaagccagtcctggaatattaccagaaaaaaggggtgctggaaacattctccggaacagaaaccaacaagatttggccctatgtatatgctttcctacaaactaaagttccacaaagaagccagaaagcttcagttactccatgaggagaaatgtgtgtaactattaatagtaagatgggcaaacctcctagtccttgcatttagaagctgcttttcctaagacttctagtatgtatgaattctttgaaaattatattacttttatttctactgattttattttggatactaaggatgtgccaaatgattcggatactaagatgcatcgtttgaaatcatctagtgtgttgtatgcagttatcctcaaaaacatcagcgatgtctgaacctttaaaacatctgttagagcaaaattaaaagagcatttggtagtaatctaactttttgttcagttaataagtggttgataaagtttccatatttttctggaaaagttaaaaaaagttacatgtcatttggagaaaatacgtaatcagaaatttgtgcatagattgatgccaaaaaagacatttccagcattgtggaacatggtgagacactatataaaattccagaaagaaagcaactggatttacagatttattgtgagacacaaattcactgctgcctttacactaagaaatgtatatgttaaccatatatgctgtatttattttgtcgttaagcatactttcagtttactcagaattttcaatttgctataaagatgtatcaattagcatatagaaaaatattactttaagatgacttgtttcctttgaaaatacctgtgtactgagggttatgatttgtgtcaaaaattgacataagtgcttttacaagcaccaaagttgaatgaattttcaacaaaatgtaattaaagtctatgttttcagttatgactcaggttaagaaatgtgttttaggatctacttgctggtttttctttttgatccaaatgtgtgatctgccctgataaataacaagttatagtaccatctcccccgccaataaaaaagagaagaaaaaagagaaa

SEQ ID NO: 190384 - DNA, 2736 bp, Artificial Sequence
  derived and/or modified sequence
gtcgggggcggggggtgcgccggggtagccgagaggcggacgcaacagcggggtcccgcgctgtctgggcggccccaggggctgtcggctcacttccgggaacgccggggaaccgcagtagccgcctgctagtggcgctgctagccggccggcgcaggctgccgagcgggtgagcgcgcaggccaggccaaagccctggtacccgcgcggtgcgggcctcagtctgcggccatgggggcgtccgcgcggctgctgcgagcggtgatcatgggggccccgggctcgggcaagggcaccgtgtcgtcgcgcatcactacacacttcgagctgaagcacctctccagcggggacctgctccgggacaacatgctgcggggcacagaaattggcgtgttagccaaggctttcattgaccaagggaaactcatcccagatgatgtcatgactcggctggcccttcatgagctgaaaaatctcacccagtatagctggctgttggatggttttccaaggacacttccacaggcagaagccctagatagagcttatcagatcgacacagtgattaacctgaatgtgccctttgaggtcattaaacaacgccttactgctcgctggattcatcccgccagtggccgagtctataacattgaattcaaccctcccaaaactgtgggcattgatgacctgactggggagcctctcattcagcgtgaggatgataaaccagagacggttatcaagagactaaaggcttatgaagaccaaacaaagccagtcctggaatattaccagaaaaaaggggtgctggaaacattctccggaacagaaaccaacaagatttggccctatgtatatgctttcctacaaactaaagttccacaaagaagccagaaagcttcagttactccatgaggagaaatgtgtgtaactattaatagtaagatgggcaaacctcctagtccttgcatttagaagctgcttttcctaagacttctagtatgtatgaattctttgaaaattatattacttttatttctactgattttattttggatactaaggatgtgccaaatgattcggatactaagatgcatcgtttgaaatcatctagtgtgttgtatgcagttatcctcaaaaacatcagcgatgtctgaacctttaaaacatctgttagagcaaaattaaaagagcatttggtagtaatctaactttttgttcagttaataagtggttgataaagtttccatatttttctggaaaagttaaaaaaagttacatgtcatttggagaaaatacgtaatcagaaatttgtgcatagattgatgccaaaaaagacatttccagcattgtggaacatggtgagacactatataaaattccagaaagaaagcaactggatttacagatttattgtgagacacaaattcactgctgcctttacactaagaaatgtatatgttaaccatatatgctgtatttattttgtcgttaagcatactttcagtttactcagaattttcaatttgctataaagatgtatcaattagcatatagaaaaatattactttaagatgacttgtttcctttgaaaatacctgtgtactgagggttatgatttgtgtcaaaaattgacataagtgcttttacaagcaccaaagttgaatgaattttcaacaaaatgtaattaaagtctatgttttcagttatgactcaggttaagaaatgtgttttaggatctacttgctggtttttctttttgatccaaatgtgtgatctgccctgataaataacaagttatagtaccatctcccccgccaataaaaaagagaagaaaaaagagaaacccgtggcactatgtaaataaagtaagcatactttgttgttagtaaatagatgaggcatgcctgggaaatgctcccttggcataaatagcaatcaatcataattagtaaacaggtgtaccaataaaaagaatttacatgataggttaacaaggaccaggaaagtgagtttcctgaaggagttctttgttcctgatcaaagaaattgatacctgttagcattcactgccaccatattttaaggagaaagaactctattggtgtcgtctgagcagccatttaaaaattggaatctaaaggatggttgctgatgtactgtgtggtctggtagaagtggggaaatatgagagatggaggaaaaacttgattatgtcttccatggcatatttactcttactttacttcgtgccaaatcaaatgaaacaagccgtcttacaagtcgttattgcctttaaaaatctgttccgtttttttcccaggtacttaaaatacaagtgccagtaagtggttcttatgtgttttggggggaaaattttatttcccttttcttctgatatttaaaaaattcatcgatctttcaagatgaaccaaggttttttaaaagaaatataggaaacacttcattctttataaaactttctataatgccttatttgaatgttaatcttatgtgctttctaaaaaatgttgtgaaataccaaacttatggattatcactaggttatcaagcatatattagtctttatcagaataaaatgaaatttcataactgtggctattactttgttcttggtccttcacagggcctgctccatcccaccttcctttctgctgcctgatgtctcaatggcttctgaatgactgttctaataaatgatcttaaaacagtcca

SEQ ID NO: 190385 - DNA, 2353 bp, Artificial Sequence
  derived and/or modified sequence
tattttatgcaattgcacagccacctcatcatttagcaacctccatcctgatcagtcagcagccatcagccatggaggcaagaccctccatcagcaaaaagattaagactctctgaaggctcagatgatcattaacattttttagcaataaaactattttaaattaaggtaggtacattgttattttagacataatgctattgcacttaatagactacaatgtaatgtaaatatataacttttatatgcaccgagaaaccaaaaaatttgtgtgactcacatattcactttattgtggtagtctggaaccaaacccacaatatctccagggtaggcctgtatgtgtctttttgactataaccatgttcgtgaatgtgaagtagtatctccttgtggttttcatttgacttccctaatgattaaggacgttgatcatgtgttcatgggcttattggccatttgtatatcgttgaagaaatgtgtattcagatcctatgcccgtttaacatttttttaaaattgagttgtaagagttctttagatattctagatacaaattccttaccagctacatgatttgcaaaatttttcttccatcccatgctatgcattgtcttttcacttcttttcttttcgtttcttttttaagagatggggtttcaccatgttggccaggctggtctcgaactcctgacctcaggtgatctgcccacctcagcctcccaaagtgctggggttacaggtatgaaccactgttcccggccataacctttgtttttatcagaaaagttgatgatgcacattttcagatgagtatgccattcagacttcccctttaggcaactcgttccgaggtgcctggaatgggataaaacaaatgcacttactgatttttttccccgctttgctgtagaaattggcgtgttagccaaggctttcattgaccaagggaaactcatcccagatgatgtcatgactcggctggcccttcatgagctgaaaaatctcacccagtatagctggctgttggatggttttccaaggacacttccacaggcagaagccctagatagagcttatcagatcgacacagtgattaacctgaatgtgccctttgaggtcattaaacaacgccttactgctcgctggattcatcccgccagtggccgagtctataacattgaattcaaccctcccaaaactgtgggcattgatgacctgactggggagcctctcattcagcgtgaggatgataaaccagagacggttatcaagagactaaaggcttatgaagaccaaacaaagccagtcctggaatattaccagaaaaaaggggtgctggaaacattctccggaacagaaaccaacaagatttggccctatgtatatgctttcctacaaactaaagttccacaaagaagccagaaagcttcagttactccatgaggagaaatgtgtgtaactattaatagtaagatgggcaaacctcctagtccttgcatttagaagctgcttttcctaagacttctagtatgtatgaattctttgaaaattatattacttttatttctactgattttattttggatactaaggatgtgccaaatgattcggatactaagatgcatcgtttgaaatcatctagtgtgttgtatgcagttatcctcaaaaacatcagcgatgtctgaacctttaaaacatctgttagagcaaaattaaaagagcatttggtagtaatctaactttttgttcagttaataagtggttgataaagtttccatatttttctggaaaagttaaaaaaagttacatgtcatttggagaaaatacgtaatcagaaatttgtgcatagattgatgccaaaaaagacatttccagcattgtggaacatggtgagacactatataaaattccagaaagaaagcaactggatttacagatttattgtgagacacaaattcactgctgcctttacactaagaaatgtatatgttaaccatatatgctgtatttattttgtcgttaagcatactttcagtttactcagaattttcaatttgctataaagatgtatcaattagcatatagaaaaatattactttaagatgacttgtttcctttgaaaatacctgtgtactgagggttatgatttgtgtcaaaaattgacataagtgcttttacaagcaccaaagttgaatgaattttcaacaaaatgtaattaaagtctatgttttcagttatgactcaggttaagaaatgtgttttaggatctacttgctggtttttctttttgatccaaatgtgtgatctgccctgataaataacaagttatagtaccatctcccccgccaat

SEQ ID NO: 190386 - DNA, 684 bp, Artificial Sequence
  derived and/or modified sequence
atgggcgccagcgcccggctgctgcgggccgtcatcatgggcgcccctggcagcggcaagggcaccgtgagcagccgcatcaccacccactttgagctgaagcacctgagcagcggggacctgctgcgggacaacatgctgcggggcacagaaattggagtgctggccaaggccttcatcgaccagggcaagctgatcccagatgatgtgatgacccggctggccctgcacgagctgaagaacctgacccagtacagctggctgctggatggcttccccaggaccctgccccaggccgaggccctggaccgggcctaccagattgacaccgtcatcaacctgaatgtgccctttgaggtgatcaagcagaggctgacagcccgctggatccacccagccagcggccgggtgtacaacatcgagttcaacccccccaagacagtgggcattgatgacctgaccggggagcccctcatccagcgggaggatgacaagccagagaccgtcatcaagaggctgaaggcctatgaggaccagaccaagcctgtgctggagtactaccagaagaagggcgtgctggagaccttctctggaacagagaccaacaagatctggccctacgtgtatgccttcctgcagaccaaggtgccccagaggagccagaaggcctctgtgaccccctag

SEQ ID NO: 190387 - DNA, 684 bp, Artificial Sequence
  derived and/or modified sequence
atgggcgccagcgcccggctgctgcgggccgtgatcatgggcgccccgggctcaggcaaaggcactgtgtcttcgaggattactacccactttgagctcaagcacttgagtagcggtgacctacttcgggacaatatgctccgaggcactgagattggagttctagcaaaagcctttatcgaccagggcaagctcataccggatgatgtgatgactcggctcgcactccacgagctgaagaatctgacccaatattcttggttgttagacggatttccaaggaccctcccccaggcagaggccctcgatcgcgcctatcagattgacacagtaataaacctcaatgtaccatttgaggtgataaaacagagattaactgcgcggtggatccacccagcttctggcagggtctacaacatcgaattcaaccctcctaagaccgtggggattgacgacctgaccggagaaccactcattcagagagaagatgacaagccagagacggttatcaagaggctgaaagcgtacgaggaccaaactaagcccgtgctcgagtactaccagaagaagggcgtgctggagacctttagcggcacggagaccaataagatctggccttatgtgtacgcgttcttgcaaactaaggtgccccagagaagccaaaaagcgtccgtaactccatag

SEQ ID NO: 190388 - DNA, 684 bp, Artificial Sequence
  derived and/or modified sequence
atgggggcttccgccaggctcctacgtgccgtgatcatgggcgctccaggcagcggcaaggggacagtcagtagccgtatcactacccacttcgagctaaagcacctgagcagtggcgatctgctcagggataatatgctacggggtacagagatcggagtactggccaaagcctttatagatcaggggaagctgatccctgacgacgtaatgactagactggcgctacacgagctgaaaaatctgacacagtatagctggttgctcgatgggtttccacggacccttccccaggcagaggctctagacagagcctaccagatcgacactgtaattaaccttaacgtgccattcgaagtgatcaaacagcgattaactgccaggtggatacaccccgcatccggtagggtttacaacattgagttcaatccaccgaagacagtggggattgacgatctcacaggcgagccacttattcaaagggaggacgacaaacctgagactgtaattaaacggttaaaagcctatgaggaccaaactaaacccgttctcgagtactaccaaaagaaaggggtcctggagaccttcagcggcactgagacaaataagatttggccgtacgtatacgcctttttacagaccaaggtgccccagagaagccagaaagcctctgttactccttag

SEQ ID NO: 190389 - DNA, 684 bp, Artificial Sequence
  derived and/or modified sequence
atgggcgccagcgccagactgctgagagccgtgatcatgggcgcccccggcagcggcaagggcaccgtgagcagcagaatcaccacccacttcgagctgaagcacctgagcagcggcgacctgctgagagacaacatgctgagaggcaccgagatcggcgtgctggccaaggccttcatcgaccagggcaagctgatccccgacgacgtgatgaccagactggccctgcacgagctgaagaacctgacccagtacagctggctgctggacggcttccccagaaccctgccccaggccgaggccctggacagagcctaccagatcgacaccgtgatcaacctgaacgtgcccttcgaggtgatcaagcagagactgaccgccagatggatccaccccgccagcggcagagtgtacaacatcgagttcaacccccccaagaccgtgggcatcgacgacctgaccggcgagcccctgatccagagagaggacgacaagcccgagaccgtgatcaagagactgaaggcctacgaggaccagaccaagcccgtgctggagtactaccagaagaagggcgtgctggagaccttcagcggcaccgagaccaacaagatctggccctacgtgtacgccttcctgcagaccaaggtgccccagagaagccagaaggccagcgtgaccccctag

SEQ ID NO: 190390 - protein, 172 aa, Artificial Sequence
  derived and/or modified sequence
MLLPNILLTGTPGVGKTTLGKELASKSGLKYINVGDLAREEQLYDGYDEEYDCPILDEDRVVDELDNQMREGGVIVDYHGCDFFPERWFHIVFVLRTDTNVLYERLETRGYNEKKLTDNIQCEIFQVLYEEATASYKEEIVHQLPSNKPEELENNVDQILKWIEQWIKDHNS

SEQ ID NO: 190391 - DNA, 519 bp, Artificial Sequence
  derived and/or modified sequence
atgctgctgcccaacatcctgctgaccggcacccccggcgtgggcaagaccaccctgggcaaggagctggccagcaagagcggcctgaagtacatcaacgtgggcgacctggccagagaggagcagctgtacgacggctacgacgaggagtacgactgccccatcctggacgaggacagagtggtggacgagctggacaaccagatgagagagggcggcgtgatcgtggactaccacggctgcgacttcttccccgagagatggttccacatcgtgttcgtgctgagaaccgacaccaacgtgctgtacgagagactggagaccagaggctacaacgagaagaagctgaccgacaacatccagtgcgagatcttccaggtgctgtacgaggaggccaccgccagctacaaggaggagatcgtgcaccagctgcccagcaacaagcccgaggagctggagaacaacgtggaccagatcctgaagtggatcgagcagtggatcaaggaccacaacagctag

SEQ ID NO: 190392 - DNA, 519 bp, Artificial Sequence
  derived and/or modified sequence
atgctgcttcccaacatactactgacaggaactccaggagtgggcaagaccacactcggaaaagagcttgcatcaaaatctggactgaaatatatcaatgtcggggacctggctagagaagaacaactttatgacggttatgatgaggagtacgattgtcccattctggatgaagacagggtcgtggatgaattagacaaccagatgcgggagggcggggtcatagtggattaccacggctgcgatttctttcctgaaagatggtttcatattgtgttcgtgctgcgcacagacacaaatgttttgtacgagcgactggaaacacgcggctataatgagaagaagctgaccgataacattcagtgcgagatcttccaagtcttgtacgaagaggcaaccgcgtcctacaaggaggagattgtccaccagttgccaagcaacaagccggaggagctggaaaataacgtggaccaaattttaaaatggatcgagcagtggatcaaggatcacaacagctag

SEQ ID NO: 190393 - DNA, 519 bp, Artificial Sequence
  derived and/or modified sequence
atgctgctgcccaacatcctgctgaccggcaccccaggagtgggcaagaccaccctgggcaaggagctggccagcaagagcggcctgaagtacatcaacgtgggggacctggcccgggaggagcagctgtatgatggctatgatgaggagtatgactgccccatcctggatgaggacagagtggtggatgagctggacaaccagatgagggagggcggcgtgattgtggactaccacggctgtgacttcttccctgagcgctggttccacatcgtgtttgtgctgaggacagacaccaacgtgctgtatgagcggctggagacccggggctacaatgagaagaagctgacagacaacatccagtgtgagatcttccaggtgctgtatgaggaggccacagccagctacaaggaggagatcgtgcaccagctgcccagcaacaagccagaggagctggagaacaacgtggaccagatcctgaagtggattgagcagtggatcaaggaccacaacagctag

SEQ ID NO: 190394 - DNA, 519 bp, Artificial Sequence
  derived and/or modified sequence
atgctgctgcccaacatcctgctgaccggcacccccggcgtgggcaagaccaccctgggtaaagagctggcttcgaagtcaggcctaaagtacattaacgtcggcgacctcgccagagaagaacaactttatgacggctacgacgaggagtacgactgccctatcctggacgaagatagagtggtcgacgagttggacaaccaaatgcgggaggggggggtgatcgtagactaccacggttgtgacttcttcccagagaggtggtttcatattgttttcgtcctcaggaccgataccaacgtgctgtacgagcgcttggagaccagaggctacaacgaaaagaaactgacggacaacattcagtgtgaaatttttcaggtgctctatgaggaagccacggcctcttacaaggaagagatcgtacaccagctaccttccaataagcctgaagaactcgagaataacgtggatcagatccttaaatggattgagcagtggatcaaggaccacaactcgtag

SEQ ID NO: 190395 - DNA, 519 bp, Artificial Sequence
  derived and/or modified sequence
atgctgttgcctaacattctgcttaccggtaccccgggagtcggtaagacaacactgggaaaggagctcgcgtctaagtccggactgaaatatatcaacgtgggagaccttgccagggaggagcagttgtatgatgggtatgatgaggagtacgattgccccattctcgatgaggatcgagtcgtggatgagctggacaatcagatgcgtgaaggcggagtgattgttgattatcacggctgtgacttttttccggaacgatggtttcacattgtctttgtcctgaggacagacaccaatgtgttatatgaacgactcgaaaccagaggatacaatgagaagaaactgacagataacatccaatgtgaaattttccaggttttgtacgaagaagctaccgctagctataaagaggaaatcgtacatcagctgccaagcaataaaccagaggaactggaaaataatgttgatcagatcttgaagtggatcgagcagtggatcaaggatcataacagctag

SEQ ID NO: 190396 - DNA, 1648 bp, Artificial Sequence
  derived and/or modified sequence
gtagagcaaagggcacgtgagcgaggcgcccgaagccgtcgcggcggggaccatgttgcttccgaacatcctgctcaccggtacaccaggggttggaaaaaccacactaggcaaagaacttgcgtcaaaatcaggactgaaatacattaatgtgggtgatttagctcgagaagagcaattgtatgatggctatgatgaagagtatgactgtcccattttagatgaagacagagtagttgatgagttagataaccaaatgagagaaggtggagttattgttgattaccatggttgtgatttcttccctgaacgctggtttcatatagtttttgtgctgagaacagataccaatgtattgtacgaaagacttgaaacaaggggttataatgagaagaaactaacagacaatattcagtgtgagatttttcaagttctttatgaagaagccacagcatcctacaaggaagaaatcgtgcatcagctgcccagtaataaaccagaagagctagaaaataatgtagatcagatcttgaaatggattgagcagtggatcaaagatcataactcttgacttataaggctagctacttaataatcactcttgttgatatctctgccgacatcatagaaattgttcaagtgtcagtaacactttattaaaatcatgttgcagaaccagcaggtggatagtatataggtttatgcctgtgtttctttttctccatgagaaagctaaacatgaaatataatgaatatagtattattaaggattgagacaaaaactgtgattttaatacttaaattgctaaagaataaataaatctgacaaaatgggtggatatcttttaagtttattacagaaaaaaatgcagatgatctcttaaaataaaactaaagataaagcaacagagtattccttttttctttctttaaattagaaaaaaagttaagtgttgtactcgatacaaagttcaaaaggtacaaaagagcatgttgaaaagttaggtctcccttccagaccaccctatccccaggcaccccaggttccttccctttaggaaataatgttactggtttcctatatgtctttttagaggttttatgcctgcacagtgtatatgtacatgtgtacattttttaaagaatataacagtatattatgcacactattctgtacctttcttttttcacttactatatttgaagattatatcatctcagtacagacctccctgttcttttttttagttgagatagatatacatatcatacaataaaatttaccattttgaagtgtataatcagaaccgggtatggtggcttatgcctgtaatcccagcaaatggggaggctgaggtggagaatcgcttgaggcaggagttcaagaccagcctgggcaacatagtgagaccttagactctaaaaataaacataaataaaatttataatccgttggtttttagcttattaacaaggttatgtaactgtcaccactgtggaggaagcagtgatgataaagggaactcctataccctttagcagtcactctctattctttcctcctcatccccttgcagtcactagtctactttctgtctctatggatttgcatattctggatatttcatataaatgggattatacagta

SEQ ID NO: 190397 - protein, 1227 aa, Artificial Sequence
  derived and/or modified sequence
MTQKVEELKETVKEEFMPWVSQYLVMKRVSIEPNFHSLYSNFLDTLKNPEFNKMVLNETYRNIKDLDVKSLLLEAYVKGQQELLYVVPFVAKVLESSIRSVVFRPPNPWTMAIMNVLAELHQEHDLKLNLKFEIEVLCKNLALDINELKPGNLLKDKDRLKNLDEQLSAPKKDVKQPEELPPITTTTTSTTPATNTTCTATVPPQPQYSYHDINVYSLAGLAPHITLNPTIPLFQAHPQLKQCVRQAIERAVQELVHPVVDRSIKIAMTTCEQIVRKDFALDSEESRMRIAAHHMMRNLTAGMAMITCREPLLMSISTNLKNSFASALRTASPQQREMMDQAAAQLAQDNCELACCFIQKTAVEKAGPEMDKRLATEFELRKHARQEGRRYCDPVVLTYQAERMPEQIRLKVGGVDPKQLAVYEEFARNVPGFLPTNDLSQPTGFLAQPMKQAWATDDVAQIYDKCITELEQHLHAIPPTLAMNPQAQALRSLLEVVVLSRNSRDAIAALGLLQKAVEGLLDATSGADADLLLRYRECHLLVLKALQDGRAYGSPWCNKQITRCLIECRDEYKYNVEAVELLIRNHLVNMQQYDLHLAQSMENGLNYMAVAFAMQLVKILLVDERSVAHVTEADLFHTIETLMRINAHSRGNAPEGLPQLMEVVRSNYEAMIDRAHGGPNFMMHSGISQASEYDDPPGLREKAEYLLREWVNLYHSAAAGRDSTKAFSAFVGQMHQQGILKTDDLITRFFRLCTEMCVEISYRAQAEQQHNPAANPTMIRAKCYHNLDAFVRLIALLVKHSGEATNTVTKINLLNKVLGIVVGVLLQDHDVRQSEFQQLPYHRIFIMLLLELNAPEHVLETINFQTLTAFCNTFHILRPTKAPGFVYAWLELISHRIFIARMLAHTPQQKGWPMYAQLLIDLFKYLAPFLRNVELTKPMQILYKGTLRVLLVLLHDFPEFLCDYHYGFCDVIPPNCIQLRNLILSAFPRNMRLPDPFTPNLKVDMLSEINIAPRILTNFTGVMPPQFKKDLDSYLKTRSPVTFLSDLRSNLQVSNEPGNRYNLQLINALVLYVGTQAIAHIHNKGSTPSMSTITHSAHMDIFQNLAVDLDTEGRYLFLNAIANQLRYPNSHTHYFSCTMLYLFAEANTEAIQEQITRVLLERLIVNRPHPWGLLITFIELIKNPAFKFWNHEFVHCAPEIEKLFQSVAQCCMGQKQAQQVMEGTGAS

SEQ ID NO: 190398 - protein, 2376 aa, Artificial Sequence
  derived and/or modified sequence
MNLDSLSLALSQISYLVDNLTKKNYRASQQEIQHIVNRHGPEADRHLLRCLFSHVDFSGDGKSSGKDFHQTQFLIQECALLITKPNFISTLSYAIDNPLHYQKSLKPAPHLFAQLSKVLKLSKVQEVIFGLALLNSSSSDLRGFAAQFIKQKLPDLLRSYIDADVSGNQEGGFQDIAIEVLHLLLSHLLFGQKGAFGVGQEQIDAFLKTLRRDFPQERCPVVLAPLLYPEKRDILMDRILPDSGGVAKTMMESSLADFMQEVGYGFCASIEECRNIIVQFGVREVTAAQVARVLGMMARTHSGLTDGIPLQSISAPGSGIWSDGKDKSDGAQAHTWNVEVLIDVLKELNPSLNFKEVTYELDHPGFQIRDSKGLHNVVYGIQRGLGMEVFPVDLIYRPWKHAEGQLSFIQHSLINPEIFCFADYPCHTVATDILKAPPEDDNREIATWKSLDLIESLLRLAEVGQYEQVKQLFSFPIKHCPDMLVLALLQINTSWHTLRHELISTLMPIFLGNHPNSAIILHYAWHGQGQSPSIRQLIMHAMAEWYMRGEQYDQAKLSRILDVAQDLKALSMLLNGTPFAFVIDLAALASRREYLKLDKWLTDKIREHGEPFIQACMTFLKRRCPSILGGLAPEKDQPKSAQLPPETLATMLACLQACAGSVSQELSETILTMVANCSNVMNKARQPPPGVMPKGRPPSASSLDAISPVQIDPLAGMTSLSIGGSAAPHTQSMQGFPPNLGSAFSTPQSPAKAFPPLSTPNQTTAFSGIGGLSSQLPVGGLGTGSLTGIGTGALGLPAVNNDPFVQRKLGTSGLNQPTFQQSKMKPSDLSQVWPEANQHFSKEIDDEANSYFQRIYNHPPHPTMSVDEVLEMLQRFKDSTIKREREVFNCMLRNLFEEYRFFPQYPDKELHITACLFGGIIEKGLVTYMALGLALRYVLEALRKPFGSKMYYFGIAALDRFKNRLKDYPQYCQHLASISHFMQFPHHLQEYIEYGQQSRDPPVKMQGSITTPGSIALAQAQAQAQVPAKAPLAGQVSTMVTTSTTTTVAKTVTVTRPTGVSFKKDVPPSINTTNIDTLLVATDQTERIVEPPENIQEKIAFIFNNLSQSNMTQKVEELKETVKEEFMPWVSQYLVMKRVSIEPNFHSLYSNFLDTLKNPEFNKMVLNETYRNIKVLLTSDKAAANFSDRSLLKNLGHWLGMITLAKNKPILHTDLDVKSLLLEAYVKGQQELLYVVPFVAKVLESSIRSVVFRPPNPWTMAIMNVLAELHQEHDLKLNLKFEIEVLCKNLALDINELKPGNLLKDKDRLKNLDEQLSAPKKDVKQPEELPPITTTTTSTTPATNTTCTATVPPQPQYSYHDINVYSLAGLAPHITLNPTIPLFQAHPQLKQCVRQAIERAVQELVHPVVDRSIKIAMTTCEQIVRKDFALDSEESRMRIAAHHMMRNLTAGMAMITCREPLLMSISTNLKNSFASALRTASPQQREMMDQAAAQLAQDNCELACCFIQKTAVEKAGPEMDKRLATEFELRKHARQEGRRYCDPVVLTYQAERMPEQIRLKVGGVDPKQLAVYEEFARNVPGFLPTNDLSQPTGFLAQPMKQAWATDDVAQIYDKCITELEQHLHAIPPTLAMNPQAQALRSLLEVVVLSRNSRDAIAALGLLQKAVEGLLDATSGADADLLLRYRECHLLVLKALQDGRAYGSPWCNKQITRCLIECRDEYKYNVEAVELLIRNHLVNMQQYDLHLAQSMENGLNYMAVAFAMQLVKILLVDERSVAHVTEADLFHTIETLMRINAHSRGNAPEGLPQLMEVVRSNYEAMIDRAHGGPNFMMHSGISQASEYDDPPGLREKAEYLLREWVNLYHSAAAGRDSTKAFSAFVGQMHQQGILKTDDLITRFFRLCTEMCVEISYRAQAEQQHNPAANPTMIRAKCYHNLDAFVRLIALLVKHSGEATNTVTKINLLNKVLGIVVGVLLQDHDVRQSEFQQLPYHRIFIMLLLELNAPEHVLETINFQTLTAFCNTFHILRPTKAPGFVYAWLELISHRIFIARMLAHTPQQKGWPMYAQLLIDLFKYLAPFLRNVELTKPMQILYKGTLRVLLVLLHDFPEFLCDYHYGFCDVIPPNCIQLRNLILSAFPRNMRLPDPFTPNLKVDMLSEINIAPRILTNFTGVMPPQFKKDLDSYLKTRSPVTFLSDLRSNLQVSNEPGNRYNLQLINALVLYVGTQAIAHIHNKGSTPSMSTITHSAHMDIFQNLAVDLDTEGRYLFLNAIANQLRYPNSHTHYFSCTMLYLFAEANTEAIQEQITRVLLERLIVNRPHPWGLLITFIELIKNPAFKFWNHEFVHCAPEIEKLFQSVAQCCMGQKQAQQVMEGTGAS

SEQ ID NO: 190399 - protein, 316 aa, Artificial Sequence
  derived and/or modified sequence
MLLLELNAPEHVLETINFQTLTAFCNTFHILRPTKAPGFVYAWLELISHRIFIARMLAHTPQQKGWPMYAQLLIDLFKYLAPFLRNVELTKPMQILYKGTLRVLLVLLHDFPEFLCDYHYGFCDVIPPNCIQLRNLILSAFPRNMRLPDPFTPNLKVDMLSEINIAPRILTNFTGVMPPQFKKDLDSYLKTRSPVTFLSDLRSNLQVSNEPGNRYNLQLINALVLYVGTQAIAHIHNKGSTPSMSTITHSAHMDIFQNLAVDLDTEGRYLFLNAIANQSGTQIATLTTSVAPCCTFLQRPIRKPSKNRSQEFSWNG

SEQ ID NO: 190400 - DNA, 3684 bp, Artificial Sequence
  derived and/or modified sequence
atgacgcagaaagtggaggagttaaaggaaacagtgaaagaggagtttatgccgtgggtatcccaatatctcgttatgaagcgagtatcaattgagccaaacttccactccctgtattccaacttcctcgatactctaaagaatccagagttcaacaaaatggtactcaatgagacctataggaatatcaaagatctcgatgtgaaatctctcttattggaagcctacgttaagggtcaacaggaactgctatatgtcgtgcctttcgtcgccaaggttttagaatcatccatacggtccgtggtgtttcggccccccaatccttggaccatggccataatgaacgtcctagccgagttacatcaggagcatgatttgaaactgaatctgaagtttgagattgaggtgctctgcaagaacttggctctggatatcaacgagctgaagcccggaaacctgctcaaggataaggacagactgaagaacctggatgagcagctgtcagcgccaaaaaaggatgtgaaacagcccgaggaactcccaccaattaccacaacaactaccagcaccacaccagcaacgaataccacttgcactgcgacagtgccaccacagccacagtatagctatcacgatatcaatgtgtacagcttggctggattggccccacacataactctcaatcccacaattcctctgtttcaggcccacccccagcttaagcagtgtgttcgccaagctattgaaagagccgtccaagagctggtgcatcccgtggtagatcgttctattaaaattgccatgacgacctgtgagcagatcgtgagaaaggatttcgccttagacagcgaggagtctaggatgaggatcgctgcccatcatatgatgcgaaacctcacggcaggcatggcaatgattacttgccgagagccattgctcatgtccatctctaccaatcttaagaattcctttgcttccgctctccggacagcctccccccagcagcgcgagatgatggaccaggccgctgcacagctggctcaggataactgtgagctggcatgctgtttcatccagaaaacagccgttgagaaggccggtcccgagatggacaagagactggcgacggaattcgagctgcggaagcatgctcgccaggagggtcgaaggtattgcgatcccgtggttctaacatatcaggccgagaggatgccagagcaaattagactgaaggtaggaggggtagacccaaagcaactcgctgtttatgaggagtttgccagaaatgtgcccgggttcctgccaaccaacgatttgagccagcccacagggtttctcgcccagccaatgaagcaggcatgggcaactgacgacgtggcgcagatctatgacaagtgcatcaccgagctggaacagcatctgcatgctataccgcctactctggcaatgaatcctcaggcacaggcattgcgttctcttctggaagtggtggttctgtctagaaactccagagatgccatagccgccctggggctgctgcagaaagccgtggagggcctgcttgatgcgacttccggggcagatgccgacttgcttcttaggtaccgtgagtgccatctgctggttctgaaggctctccaggacgggagggcatacgggtcaccatggtgcaacaagcagattacacgttgtcttattgagtgtagagacgagtataagtataatgtggaggccgttgagctgctgattcggaatcacctggtgaatatgcagcagtacgatctgcatttggcccagagcatggagaacggcctgaattacatggcggtcgccttcgcaatgcagctggtcaaaatcctgttggttgatgaacggtccgttgcccacgtgacagaagccgatcttttccacacgatcgaaaccctgatgaggataaatgcccattcccgcggaaatgcccccgagggcctgccacaactgatggaagtagtgagatcaaattacgaagctatgatcgatcgcgcacacggaggtcctaacttcatgatgcatagcggaatcagtcaggcaagtgagtatgacgatccaccagggctgagggagaaggccgaatacctgctcagagaatgggtcaatctgtaccactcggccgcggctggccgagactcgacgaaagcattttccgcatttgtaggacagatgcatcagcaggggattctgaagaccgatgacctgatcacgagattcttccgactgtgcactgagatgtgcgtggagatctcctatcgagcccaggcagaacagcagcacaaccccgctgccaacccaaccatgattcgggcaaaatgctaccacaacctggacgccttcgtcagactaatcgctttactcgttaagcattctggtgaggctaccaatacagtgacaaagattaatctgctgaacaaggtcctaggcattgttgtgggcgtgctgttgcaggaccacgacgtcagacagagcgagtttcagcaattgccataccacaggatttttatcatgctgctgctcgagctgaacgcccctgagcacgtgctggagactattaactttcaaaccctaaccgcattttgcaatacgttccatatcctgcggcctactaaagctcccggatttgtctatgcatggctggagctcatctcccatagaatctttatcgcgcgtatgctggcacacaccccccagcagaaaggctggcccatgtacgcacaactgttgattgatctttttaagtacttagcacctttcctcaggaacgtggagctgacaaaaccaatgcagattctgtataaggggactctgcgggtgcttctggtgctcctccatgattttccagagttcttgtgtgactaccactacggcttctgtgatgtaatcccccctaattgtatccagctgagaaatctcattttgtccgctttccctcggaacatgagacttccggatcctttcacaccgaatctaaaggtggatatgctgagtgagatcaacatcgccccgaggattctcaccaattttacaggcgttatgccaccccagtttaagaaggacctggattcttacctcaaaacccgctcacccgtgacctttcttagtgatctgagatccaatctccaggtgtccaatgaacccgggaataggtataatctgcagcttatcaacgctctggtgctctatgtgggcacacaggcaatcgctcacatccataacaaaggctccacaccgtcaatgagcaccattacacattccgcacacatggacattttccagaacctggcagtggatctcgataccgaaggccgctatctttttttaaatgccatcgccaatcagctcaggtatcccaattctcacacccactacttctcttgcaccatgctgtatctattcgctgaagcgaacactgaagccatccaagaacaaattaccagagtcttgttggagaggctcatcgtcaatcggccccacccctggggtctgttaataacttttattgaactcataaagaaccctgccttcaagttctggaaccatgaatttgtccattgcgcgcctgaaatcgagaaactattccagtcagtagcccaatgctgtatggggcagaagcaggctcaacaagtgatggagggcacaggagccagttag

SEQ ID NO: 190401 - DNA, 7131 bp, Artificial Sequence
  derived and/or modified sequence
atgaacttggatagtctaagtctggcccttagtcagatatcttatctagtggacaacctgaccaaaaagaattatcgcgcctcccagcaggagatccagcatatagtaaacaggcacggtcctgaggcagaccgccacctactgaggtgcctgttcagccatgtcgacttcagcggagatggtaagtccagcggaaaggactttcatcagacccagtttcttatccaggagtgcgccctccttattaccaagccaaatttcatctccacactctcatatgcaatcgataaccctctgcattatcaaaagtcactgaagcccgctcctcacctattcgctcagctgagcaaggtacttaagctgagtaaggttcaggaagtgattttcggcctcgcactgcttaattccagtagcagcgatttgagggggtttgctgcccagtttataaagcaaaaacttcccgacttgttgcgcagctatatcgacgctgatgtctcgggaaatcaggagggcggattccaggacatcgcgatcgaggtgttacatctcctgctaagccacttgctgtttgggcagaagggggcgttcggagtgggacaagagcagatcgacgcctttctcaagacccttagaagagattttcctcaggagaggtgcccagtggtgctggctcctttactctacccagagaaaagagacatactcatggacaggattctgccagattccggtggggttgcgaagactatgatggagagctcacttgccgatttcatgcaagaggtgggatatggcttctgcgcctctattgaagaatgcagaaatatcattgtgcagttcggagtgagagaggtcactgcagcgcaggtcgcacgagtgctcggcatgatggcacggacacattcaggactcacagatggaatccccctgcagtccataagtgctccaggctcaggcatttggtcagacgggaaggataagtctgatggcgctcaggcccatacatggaacgtcgaggtgctcatcgacgtgttaaaagaactgaacccaagcctcaatttcaaagaagtgacttatgagctcgaccatcccggctttcaaataagggatagtaaaggtttgcacaatgtcgtgtatggaattcagcgtgggctagggatggaagtcttcccagtggacctgatctaccgaccctggaagcacgcagagggccaactgtctttcatccagcactcacttatcaatccagagattttctgtttcgccgactacccttgccacaccgtggcaacagatattctaaaggctcctcctgaggacgacaatcgtgaaattgctacttggaagtcattggatttaattgaatcactcctgcgtctagccgaggtgggccaatatgagcaggtcaaacagcttttttcattccctatcaaacattgccccgatatgttagtcctggccttattgcaaatcaatactagttggcataccctacggcacgaactcattagcacactaatgcccatttttctcgggaatcacccaaatagcgcgatcattctccattatgcttggcacggccagggtcagtcaccatctatccggcagctgataatgcacgccatggctgagtggtatatgcgtggtgagcagtacgaccaggctaaactgtctcggatacttgatgtagctcaagacctgaaggctctgagcatgctcctgaatgggactcctttcgcgttcgttatcgatctcgccgcactcgcctctagaagagagtacttaaagcttgacaagtggctaaccgataagatcagagaacacggcgaaccattcattcaggcctgtatgacctttttaaagcggagatgtccaagcattttaggcggcctggcacccgaaaaggatcagcccaagtccgcacagctgcctccggagaccctcgcaacaatgttagcctgtttacaggcctgcgcagggagcgtgtcacaggagctatccgagacaattctgactatggttgctaactgtagcaatgtcatgaacaaggctcggcagccaccgccaggtgtgatgccgaagggaagaccccctagtgcctcctccctggacgctatctctccagtccagattgatcctttggctggtatgacttccctatcgatcggcgggtctgcagctcctcatactcagtccatgcaaggctttcctccaaacctgggctccgccttttctactccgcagagtccggccaaggctttcccgcctttatcaaccccgaatcagaccaccgccttctctggaattggtgggctctcaagccagctacccgtcggaggcctgggaactggatccctcacgggcatcggcactggggctctcgggttgcctgctgttaataatgacccctttgttcagagaaaactcggcacctcagggctaaaccagccgacgttccagcagagcaaaatgaaaccgagcgatctctcccaggtgtggcctgaggccaaccaacattttagcaaggaaatcgacgacgaggccaattcatacttccaaaggatttacaaccaccctccccaccccaccatgtccgtcgatgaagtgttagaaatgctccagcgattcaaagacagcaccatcaaaagggaaagggaggtctttaattgcatgctcagaaacttgttcgaagaatacagatttttccctcagtacccggataaagagctgcacatcaccgcctgtctattcgggggaatcattgaaaagggtttagtgacttacatggccctgggcctggcccttaggtatgttctcgaggctctccgtaagccattcggcagtaaaatgtactactttggtatcgcagcccttgatcgcttcaaaaacaggctcaaggattacccacagtactgccagcacctcgccagtatctcacatttcatgcagtttcctcaccatttgcaggagtatattgaatatgggcagcagagtcgagatcccccagtcaagatgcagggaagtattacgacccctgggtcaatcgcactggcacaggcccaagcacaagctcaagtgccggcaaaggcgcctctggcaggccaagtaagcaccatggtgaccacaagcaccacaaccacagttgctaagactgtcacagtgactcggcctaccggcgtctcatttaaaaaagacgtcccaccctccattaatacgaccaacatcgataccctgctcgtggctacagaccaaactgagcggatcgtcgaaccacctgaaaacattcaggaaaaaatagcatttattttcaacaatctcagccagtctaatatgactcaaaaagtcgaggagcttaaagagactgttaaggaagagtttatgccttgggtgtctcagtacttggttatgaaaagggtatctatcgagcccaactttcactcactgtactcaaacttcttggatacactcaaaaatccagagttcaacaaaatggtgttaaatgagacttataggaacatcaaggtgttgttgacctccgataaggctgccgctaacttctccgaccgtagcctccttaagaacctcggacactggctgggaatgattactctcgctaaaaataaaccaattctgcatactgacttggacgtaaagagcctgttgttggaggcctacgttaaagggcaacaagaactgttatatgtggtgcctttcgtggccaaggtactggaatctagtattcggtctgtagtgttccggcctcctaatccttggaccatggcgataatgaacgtattagctgagttacatcaggagcatgacctgaaacttaacttgaagttcgaaatcgaggttctgtgcaaaaatctggctttggacataaatgaactcaaaccgggcaaccttctgaaggacaaggacaggctgaaaaacctggacgagcaactctccgccccaaaaaaggacgtgaagcaaccggaagaactccccccaattacaaccaccacaaccagcacgactccagccactaatacaacctgcaccgcgaccgtgccgccacagcctcagtatagttatcacgacatcaacgtgtactctctagccggcctggctccgcacataacattaaacccaactatccccttgtttcaggctcacccacaactgaaacaatgcgttcgccaagcaatcgaaagggcggtccaggaactggtccaccccgtagtagaccggagtataaaaatcgccatgactacgtgcgaacaaattgtccgcaaagatttcgcactcgacagcgaggagtccagaatgcgcattgcagcccaccacatgatgcgtaatctgacagccggcatggccatgatcacatgccgggaacctttactaatgagcatctccacgaatttaaagaatagctttgcttctgccttaaggacagcgagcccacaacaacgtgaaatgatggatcaggccgcggctcagctggcccaagacaattgcgaattggcctgctgcttcatccagaaaacggcagtggaaaaggctgggcctgagatggataagcgcctggcaaccgagttcgaactaagaaaacacgctcggcaagagggaagacggtactgcgacccggtggtactgacgtatcaggcagagcgtatgcctgaacagatcagactgaaggtggggggtgtggatccaaaacagctggctgtgtatgaggaatttgccaggaatgttccaggatttctacccacgaatgatctgtctcagcctactgggttcctggctcagcccatgaaacaagcttgggccaccgatgatgtcgcacaaatctatgataagtgcatcactgagcttgagcagcacctgcacgccataccccccactctcgccatgaatccccaagctcaggctctgcgttcgcttctcgaagttgtagtgctgtcccggaactccagagacgcaatcgctgcgctgggattgttgcagaaagctgtcgagggactgcttgacgcaaccagcggggccgatgctgacctcctgctccgatacagagagtgccacctactggtgttaaaggccttgcaggatggacgagcttacggctccccttggtgtaataagcagattaccagatgtctcatagagtgccgggatgaatacaagtataatgtggaggctgtggaactcttaatccgcaatcacttggtcaacatgcagcaatatgacttgcatctggcacagtctatggagaatgggcttaattatatggccgtggccttcgcaatgcagctcgttaagatcctactggtagatgagagatcagttgcacatgtgaccgaagcagacctcttccacacaatcgagactctgatgcgaataaatgctcattcacggggaaatgctcccgaaggactcccgcaattgatggaggttgtgagatctaactacgaagctatgatagatcgtgcccacggtgggcctaattttatgatgcatagcgggataagccaggcctccgaatatgacgaccctcctggactgcgcgagaaagcagagtacctgctgagggaatgggtaaatttataccattctgcggctgcaggacgggatagcaccaaggctttctcagcctttgttggccaaatgcaccagcagggcatcctgaaaaccgatgacttgatcaccagattcttcagactgtgcactgagatgtgcgtggaaatatcctaccgagcgcaagctgagcaacaacacaatcctgccgcgaatcctacaatgattcgtgcaaagtgttaccacaacctcgatgccttcgtccgattaatcgcactgctggtgaagcactccggcgaggccactaacaccgtcacaaaaattaaccttctgaacaaggtgttgggaattgtggtgggagtcctgctccaggaccacgatgtcaggcagtctgaatttcagcagttgccttatcacaggatttttatcatgttactgttggagttaaacgctcccgaacatgtgctggaaacgatcaacttccagacgttgaccgccttttgcaacactttccatattctcagacctacaaaagcgcccggctttgtttacgcatggctcgagctgataagtcaccgcatttttatagcgcgaatgctggcacatacccctcagcagaagggttggccaatgtatgctcagttgctgattgatttgttcaaatacttagctccttttctgaggaacgtcgagctgacaaagcccatgcaaatcctctacaaagggacgttgagagttctacttgtgttgctccacgacttcccggagttcctgtgcgactaccactatggcttttgcgatgtcatacctccaaactgtatccagctccgaaacctaattttgagcgcatttcctcgaaatatgcgcctgcccgacccatttactcccaacttaaaggttgacatgctctccgagataaatatcgcaccacgcatcttaactaacttcaccggcgtcatgcccccacagtttaaaaaagacctggatagttacttaaaaactcggagccccgtgacgttcttatctgaccttaggagcaatctacaggtttcaaatgaaccggggaatcgctataatctccagctaataaatgcccttgtgctttatgtgggcactcaagcaattgcacacatccataataaaggatcgacaccctctatgtccacaattactcattctgctcacatggatattttccagaatctggcggttgaccttgacacagaaggccgctatttgttcctgaacgccattgcgaaccagttaagatacccaaattcacacactcactacttcagttgcacaatgctgtatctatttgctgaggccaatacagaggcaatccaggaacaaatcactcgcgtgctgttagagcgcctcattgtcaacaggccccatccgtggggtctgctgataacctttatcgaactgatcaagaatccagcttttaagttctggaaccacgaattcgtccactgcgccccagaaattgagaagctgtttcagagcgtggcgcagtgttgtatgggccagaagcaggcccagcaggtgatggaaggtaccggtgctagctag

SEQ ID NO: 190402 - DNA, 3213 bp, Artificial Sequence
  derived and/or modified sequence
atgctcctgaatgggactcctttcgcttttgtgattgaccttgcagccctcgctagtcggagagaatatctaaagctggataagtggttgaccgacaaaattcgggaacatggcgagccatttatccaggcgtgtatgacgttcttaaaacgtcgctgcccgtcgatcctgggtggcctcgcacccgagaaagatcagcccaaatctgctcagctgccacccgagacactggccacaatgctggcttgcctgcaggcatgtgcaggatccgtgtctcaagagctgtctgaaaccattttgaccatggtagcaaattgcagtaatgtgatgaataaagctcgacaaccaccccccggcgtcatgccaaaaggtcgacctcctagtgcatcaagcctggacgcaatttccccagtgcaaattgacccactcgcagggatgacttccctttcaattggcggctcagccgctccccacacccagagcatgcagggcttcccccctaatctggggtctgcgttcagcactccacagtcccctgccaaggcgttcccacctttaagcacaccaaaccaaacaaccgctttctcaggaataggtgggctctctagccagctgcccgtgggggggctgggcactggatctctgacgggcatcgggactggggcattggggttacccgcagtcaacaacgacccttttgtacagaggaagctgggaaccagtggcttaaaccagcctactttccagcaatctaagatgaagcccagcgatcttagccaggtttggccagaggcgaaccaacacttctcgaaagagatcgacgacgaggcaaacagttacttccagcgcatttacaatcaccccccccaccccacaatgtctgtggacgaagtactggagatgctgcagcgcttcaaagattccactattaaacgcgagcgagaggtttttaattgtatgctgagaaacctgttcgaagagtatcgcttctttccccagtacccagataaggagctacatattaccgcatgcctcttcggggggattattgagaaggggctcgttacatatatggccctgggactcgccctgcggtacgtgttggaggcattaagaaaacccttcgggtcaaaaatgtattacttcggcattgccgccctggatcggttcaagaacaggctgaaagattatccccaatactgccaacacctcgcctccatttcccacttcatgcagtttcctcatcacctgcaggagtacatcgagtatggacaacagtcacgggacccgccggtcaagatgcaaggatctatcactacaccaggctctattgccctggcacaggcccaagcacaggcacaggtgccagctaaggccccgcttgcaggtcaggtctctactatggttacaacgtcgaccactacaacagtggcaaaaaccgtgacagtgacacggccaacaggagtctccttcaagaaagacgtcccgccctctataaacaccactaatattgacacccttctggtggcgacagaccagaccgaaagaatagtggaacctccagagaacatccaggaaaagatcgcattcattttcaataacctgtctcagtccaatatgactcagaaggtcgaagaactaaaagaaacagttaaggaagagtttatgccttgggtttctcaatacctggttatgaagagggtcagtatcgagcctaacttccactctctgtattctaatttcctcgatacgctaaaaaaccttattacacgtttctttaggctatgcacagagatgtgtgtagagatttcctatagggctcaagcagaacaacagcataatcccgcagcaaatccgaccatgattagagctaagtgctaccacaacctggatgccttcgtgagactgattgctctgctggtcaagcatagcggcgaagcgaccaacaccgttacaaagattaacttactgaacaaggtattgggtatcgtcgtcggggtgctcttgcaggatcacgacgtgcggcagtcagaatttcaacaactcccataccaccgaattttcatcatgttattgctcgagctgaacgcgccagagcacgtcctggaaacaatcaattttcaaacactgactgcattttgcaataccttccatattctccggcccaccaaagccccaggatttgtctacgcatggctggagctcatatcgcatagaatctttatagcaaggatgttggcacataccccccaacagaaaggttggcccatgtacgcgcagttactgattgatttgtttaagtatttagccccattcctgagaaatgtcgaactgaccaaaccaatgcagattctatacaaaggcaccctgcgggttctgctggtgctgctccacgactttccggagtttctgtgtgactatcactacggtttttgtgacgtcatcccaccaaactgcattcagctgcggaacctgatacttagtgcgttccctcgcaacatgaggcttccagaccccttcaccccaaacttgaaagttgatatgctgtcagaaatcaatatagccccccgcatcctcacaaatttcaccggagtcatgccgcctcagtttaaaaaagatctggacagttacctcaagacccggagcccggtgaccttccttagcgatttacgtagcaatctccaggtctcaaacgagcctggtaatcgttacaatcttcagctgattaatgcccttgttctctatgtcggcacacaggccatagcccacattcataacaagggctcgaccccatctatgtccaccattacccattctgcccacatggacatcttccaaaatttggccgtcgatctggataccgaggggagatacttgttccttaacgccatcgcaaatcagctccggtaccccaattcccacactcattacttcagctgcactatgctctatttatttgccgaagcaaacacagaggccattcaagaacagattacacgcgtccttctggaacggctgatcgttaacagacctcatccctggggcctgctcataacatttattgaactgattaagaatcccgcctttaagttctggaaccacgaattcgttcattgcgcccctgagatcgaaaaactctttcagtcggtagcccaatgttgtatgggacagaagcaagcccaacaagtgatggaagggactggagcctcttag

SEQ ID NO: 190403 - DNA, 3684 bp, Artificial Sequence
  derived and/or modified sequence
atgacccagaaggtggaggagctgaaggagaccgtgaaggaggagttcatgccctgggtgtcccagtacctggtgatgaagagggtgtccattgagcccaacttccacagcctgtacagcaacttcctggacaccctgaagaaccctgagttcaacaagatggtgctgaatgagacctacagaaacatcaaggacctggatgtgaagagcctgctgctggaggcctacgtgaagggccagcaggagctgctgtatgtggtgccctttgtggccaaggtgctggagagcagcatccgctctgtggtgttccggccccccaacccctggaccatggccatcatgaatgtgctggccgagctgcaccaggagcatgacctgaagctgaacctgaagtttgaaattgaggtgctgtgcaagaacctggccctggacatcaatgagctgaagccaggcaacctgctgaaggacaaggaccggctgaagaacctggatgagcagctgagcgcccccaagaaggatgtgaagcagcctgaggagctgccccccatcaccaccaccaccaccagcaccaccccagccaccaacaccacctgcacagccaccgtgcccccccagccccagtacagctaccatgacatcaacgtgtacagcctggccggcctggccccccacatcaccctgaaccccaccatccccctcttccaggcccacccccagctgaagcagtgtgtgcggcaggccatcgagagagctgtgcaggagctggtgcaccctgtggtggacaggagcatcaagatcgccatgaccacctgtgagcagatcgtgaggaaggactttgccctggacagcgaggagagcaggatgagaattgctgcccaccacatgatgaggaacctgacagctggcatggccatgatcacctgccgggagcccctgctgatgagcatcagcaccaacctgaagaacagctttgccagcgccctgaggacagccagcccccagcagcgggagatgatggaccaggccgccgcccagctggcccaggacaactgtgagctggcctgctgcttcatccagaagacagctgtggagaaggccggccctgagatggacaagaggctggccacagaatttgagctgaggaagcacgcccggcaggagggccgccgctactgtgaccctgtggtgctgacctaccaggccgagaggatgcctgagcagatccggctgaaggtgggcggcgtggaccccaagcagctggccgtgtatgaggagtttgccagaaatgtgcccggcttcctgcccaccaatgacctgagccagcccaccggcttcctggcccagcccatgaagcaggcctgggccacagatgatgtggcccagatctatgacaagtgcatcacagagctggagcagcacctgcacgccatcccccccaccctggccatgaacccccaggcccaggccctgcggagcctgctggaggtggtggtgctgagcaggaacagcagagatgccatcgccgccctgggcctgctgcagaaggctgtggagggcctgctggatgccaccagcggggctgatgctgacctgctgctgcgctaccgggagtgccacctgctggtgctgaaggccctgcaggacggccgggcctacggcagcccctggtgcaacaagcagatcacccgctgcctgattgaatgtagagatgagtacaagtacaacgtggaggccgtggagctgctgatccggaaccacctggtgaacatgcagcagtatgacctgcacctggcccagagcatggagaatggcctgaactacatggctgtggcctttgccatgcagctggtgaagatcctgctggtggatgagaggtctgtggcccacgtgacagaagctgacctcttccacaccatcgagaccctgatgaggatcaatgcccacagcagaggaaatgcccctgagggcctgccccagctgatggaggtggtgcgcagcaactatgaggccatgattgaccgggcccacggcggccccaacttcatgatgcacagcggcatcagccaggcctctgaatatgatgaccccccaggcctgcgggagaaggccgagtacctgctgcgggagtgggtgaacctgtaccacagcgctgctgctggccgggacagcaccaaggccttcagcgcctttgtgggccagatgcaccagcagggcatcctgaagacagatgacctgatcacccgcttcttccggctgtgcacagagatgtgtgtggagatctcctaccgggcccaggccgagcagcagcacaacccagctgccaaccccaccatgatccgggccaagtgctaccacaacctggatgcctttgtgcggctcatcgccctgctggtgaagcacagcggggaggccaccaacacagtgaccaagatcaacctgctgaacaaggtgctgggcatcgtggtgggcgtgctgctgcaggaccatgatgtgcggcagagcgagttccagcagctgccctaccaccgcatcttcatcatgctgctgctggagctgaatgcccctgagcacgtgctggagaccatcaacttccagaccctgacagccttctgcaacaccttccacatcctgcggcccaccaaggcccctggctttgtgtatgcctggctggagctgatcagccaccgcatcttcatcgccaggatgctggcccacaccccccagcagaagggctggcccatgtatgcccagctgctgattgacctcttcaagtacctggcccccttcctgagaaatgtggagctgaccaagcccatgcagatcctgtacaagggcaccctgcgggtgctgctggtgctgctgcatgacttccctgagttcctgtgtgactaccactacggcttctgtgatgtgattcctcccaactgcatccagctgaggaacctgatcctgagcgccttccccaggaacatgaggctgcctgaccccttcacccccaacctgaaggtggacatgctgtctgagatcaacatcgccccccgcatcctgaccaacttcaccggggtgatgccaccccagttcaagaaggacctggacagctacctgaagaccaggagccctgtgaccttcctgagtgacctgcggagcaacctgcaggtgtccaatgaacctggcaaccgctacaacctgcagctgatcaatgccctggtgctgtatgtgggcacccaggccatcgcccacatccacaacaagggcagcacccccagcatgagcaccatcacccacagcgcccacatggacatcttccagaacctggccgtggacctggacacagagggccgctacctgttcctgaatgccatcgccaaccagctgcgctaccccaacagccacacccactacttcagctgcaccatgctgtacctgtttgctgaggccaacacagaggccatccaggagcagatcaccagggtgctgctggagcggctcatcgtgaaccggccccacccctggggcctgctgatcaccttcatcgagctgatcaagaacccagccttcaagttctggaaccatgaatttgtgcactgtgcccctgagattgagaagctgttccagagcgtggcccagtgctgcatgggccagaagcaggcccagcaggtgatggagggcaccggggccagctag

SEQ ID NO: 190404 - DNA, 7131 bp, Artificial Sequence
  derived and/or modified sequence
atgaacctggacagcctgagcctggccctgagccagatctcctacctggtggacaacctgaccaagaagaactaccgggccagccagcaggagatccagcacatcgtgaacagacatggccctgaggccgacagacacctgctgcgctgcctcttcagccacgtggacttctctggagatggcaagagcagcggcaaggacttccaccagacccagttcctgatccaggagtgtgccctgctgatcaccaagcccaacttcatcagcaccctgtcctatgccatcgacaaccccctgcactaccagaagagcctgaagccagccccccacctgtttgcccagctgagcaaggtgctgaagctgagcaaggtgcaggaggtgatcttcggcctggccctgctgaacagcagcagcagtgacctgcggggctttgctgcccagttcatcaagcagaagctgcctgacctgctgcggagctacattgatgctgatgtgtctggcaaccaggagggcggcttccaggacatcgccatcgaggtgctgcacctgctgctgagccacctgctgtttggccagaagggggccttcggcgtgggccaggagcagattgatgccttcctgaagaccctgcggcgggacttcccccaggagcgctgccctgtggtgctggcccccctgctgtacccagagaagagggacatcctgatggaccgcatcctgcctgattctggaggagtggccaagaccatgatggagagcagcctggccgacttcatgcaggaggtgggctacggcttctgtgccagcattgaggagtgcaggaacatcatcgtgcagtttggagtgcgggaggtgacagctgcccaggtggcccgggtgctgggcatgatggcccggacccacagcggcctgacagatggcatccccctgcagagcatcagcgcccctggcagcggcatctggagcgatggcaaggacaagagtgatggagcccaggcccacacctggaatgtggaggtgctgattgatgtgctgaaggagctgaaccccagcctgaacttcaaggaggtgacctatgagctggaccaccctggcttccagatccgggacagcaagggcctgcacaacgtggtgtatggcatccagaggggcctgggcatggaggtgtttcctgtggacctgatctaccggccctggaagcacgccgagggccagctgtccttcatccagcacagcctcatcaaccctgagatcttctgctttgctgactacccctgccacacagtggccacagacatcctgaaggcccccccagaagatgacaaccgggagatcgccacctggaagagcctggacctgattgagagcctgctgcggctggccgaggtgggccagtatgagcaggtgaagcagctgttctccttccccatcaagcactgcccagacatgctggtgctggccctgctgcagatcaacacctcctggcacaccctgcggcatgagctgatcagcaccctgatgcccatcttcctgggcaaccaccccaacagcgccatcatcctgcactacgcctggcacggccagggccagagccccagcatccggcagctgatcatgcacgccatggccgagtggtacatgagaggagagcagtatgaccaggccaagctgagccgcatcctggatgtggcccaggacctgaaggccctgtccatgctgctgaatggcaccccatttgcctttgtgattgacctggccgccctggccagcagaagagagtacctgaagctggacaagtggctgacagacaagatccgggagcacggggagcccttcatccaggcctgcatgaccttcctgaagaggcgctgccccagcatcctgggcggcctggcccctgagaaggaccagcccaagagcgcccagctgcccccagagaccctggccaccatgctggcctgcctgcaggcctgtgccggctctgtgtcccaggagctgtctgagaccatcctgaccatggtggccaactgcagcaatgtgatgaacaaggcccggcagcccccacctggggtgatgcccaagggccggcccccatctgccagcagcctggatgccatcagccctgtgcagattgaccccctggccggcatgaccagcctgagcatcggcggcagcgctgccccccacacccagagcatgcagggcttcccccccaacctgggcagcgccttcagcaccccccagagccctgccaaggccttcccccccctgagcacccccaaccagaccacagccttctctggaattggaggcctgagcagccagctgcctgtgggcggcctgggcaccggcagcctgactggaattggaactggagccctgggcctgcctgctgtgaacaatgacccctttgtgcagaggaagctgggcaccagcggcctgaaccagcccaccttccagcagagcaagatgaagcccagcgacctgagccaggtgtggccagaggccaaccagcacttcagcaaggagattgatgatgaggccaacagctacttccagaggatctacaaccaccccccccaccccaccatgtctgtggatgaggtgctggagatgctgcagcgcttcaaggacagcaccatcaagcgggagcgggaggtgttcaactgcatgctgaggaacctgtttgaggagtaccgcttcttcccccagtacccagacaaggagctgcacatcacagcctgcctgtttggaggcatcatcgagaagggcctggtgacctacatggccctgggcctggccctgcgctacgtgctggaggccctgaggaagcccttcggcagcaagatgtactactttggaattgctgccctggaccgcttcaagaaccggctgaaggactacccccagtactgccagcacctggccagcatcagccacttcatgcagttcccccaccacctgcaggagtacatcgagtatggccagcagagccgggacccccctgtgaagatgcagggcagcatcaccaccccaggcagcatcgccctggcccaggcccaggcccaggcccaggtgcctgccaaggcccccctggccggccaggtgtccaccatggtgaccaccagcaccaccaccaccgtggccaagacagtgacagtgacccggcccaccggggtgtccttcaagaaggatgtgcccccatccatcaacaccaccaacatcgacaccctgctggtggccacagaccagacagagcgcatcgtggagcccccagagaacatccaggagaagatcgccttcatcttcaacaacctgagccagagcaacatgacccagaaggtggaggagctgaaggagaccgtgaaggaggagttcatgccctgggtgtcccagtacctggtgatgaagagggtgtccattgagcccaacttccacagcctgtacagcaacttcctggacaccctgaagaaccctgagttcaacaagatggtgctgaatgagacctacagaaacatcaaggtgctgctgaccagtgacaaggctgctgccaacttcagtgacaggagcctgctgaagaacctgggccactggctgggcatgatcaccctggccaagaacaagcccatcctgcacacagacctggatgtgaagagcctgctgctggaggcctacgtgaagggccagcaggagctgctgtatgtggtgccctttgtggccaaggtgctggagagcagcatccgctctgtggtgttccggccccccaacccctggaccatggccatcatgaatgtgctggccgagctgcaccaggagcatgacctgaagctgaacctgaagtttgaaattgaggtgctgtgcaagaacctggccctggacatcaatgagctgaagccaggcaacctgctgaaggacaaggaccggctgaagaacctggatgagcagctgagcgcccccaagaaggatgtgaagcagcctgaggagctgccccccatcaccaccaccaccaccagcaccaccccagccaccaacaccacctgcacagccaccgtgcccccccagccccagtacagctaccatgacatcaacgtgtacagcctggccggcctggccccccacatcaccctgaaccccaccatccccctcttccaggcccacccccagctgaagcagtgtgtgcggcaggccatcgagagagctgtgcaggagctggtgcaccctgtggtggacaggagcatcaagatcgccatgaccacctgtgagcagatcgtgaggaaggactttgccctggacagcgaggagagcaggatgagaattgctgcccaccacatgatgaggaacctgacagctggcatggccatgatcacctgccgggagcccctgctgatgagcatcagcaccaacctgaagaacagctttgccagcgccctgaggacagccagcccccagcagcgggagatgatggaccaggccgccgcccagctggcccaggacaactgtgagctggcctgctgcttcatccagaagacagctgtggagaaggccggccctgagatggacaagaggctggccacagaatttgagctgaggaagcacgcccggcaggagggccgccgctactgtgaccctgtggtgctgacctaccaggccgagaggatgcctgagcagatccggctgaaggtgggcggcgtggaccccaagcagctggccgtgtatgaggagtttgccagaaatgtgcccggcttcctgcccaccaatgacctgagccagcccaccggcttcctggcccagcccatgaagcaggcctgggccacagatgatgtggcccagatctatgacaagtgcatcacagagctggagcagcacctgcacgccatcccccccaccctggccatgaacccccaggcccaggccctgcggagcctgctggaggtggtggtgctgagcaggaacagcagagatgccatcgccgccctgggcctgctgcagaaggctgtggagggcctgctggatgccaccagcggggctgatgctgacctgctgctgcgctaccgggagtgccacctgctggtgctgaaggccctgcaggacggccgggcctacggcagcccctggtgcaacaagcagatcacccgctgcctgattgagtgcagagatgagtacaagtacaacgtggaggccgtggagctgctgatccggaaccacctggtgaacatgcagcagtatgacctgcacctggcccagagcatggagaatggcctgaactacatggctgtggcctttgccatgcagctggtgaagatcctgctggtggatgagaggtctgtggcccacgtgacagaggccgacctcttccacaccatcgagaccctgatgaggatcaatgcccacagcagaggaaatgcccctgagggcctgccccagctgatggaggtggtgcgcagcaactatgaggccatgattgaccgggcccatggaggccccaacttcatgatgcacagcggcatcagccaggcctctgaatatgatgatcctcctggcctgcgggagaaggccgagtacctgctgcgggagtgggtgaacctgtaccacagcgctgctgctggccgggacagcaccaaggccttcagcgcctttgtgggccagatgcaccagcagggcatcctgaagacagatgacctgatcacccgcttcttccggctgtgcacagagatgtgtgtggagatctcctaccgggcccaggccgagcagcagcacaacccagctgccaaccccaccatgatccgggccaagtgctaccacaacctggatgcctttgtgcggctgattgccctgctggtgaagcacagcggggaggccaccaacacagtgaccaagatcaacctgctgaacaaggtgctgggcatcgtggtgggcgtgctgctgcaggaccatgatgtgcggcagagcgagttccagcagctgccctaccaccgcatcttcatcatgctgctgctggagctgaatgcccctgagcacgtgctggagaccatcaacttccagaccctgacagccttctgcaacaccttccacatcctgcggcccaccaaggcccctggctttgtgtatgcctggctggagctgatcagccaccgcatcttcatcgccaggatgctggcccacaccccccagcagaagggctggcccatgtatgcccagctgctgattgacctcttcaagtacctggcccccttcctgagaaatgtggagctgaccaagcccatgcagatcctgtacaagggcaccctgcgggtgctgctggtgctgctgcatgacttccctgagttcctgtgtgactaccactacggcttctgtgatgtgatcccccccaactgcatccagctgaggaacctgatcctgagcgccttccccaggaacatgaggctgcctgaccccttcacccccaacctgaaggtggacatgctgtctgagatcaacatcgccccccgcatcctgaccaacttcaccggggtgatgccaccccagttcaagaaggacctggacagctacctgaagaccaggagccctgtgaccttcctgagtgacctgcggagcaacctgcaggtgtccaatgagcccggcaaccgctacaacctgcagctgatcaatgccctggtgctgtatgtgggcacccaggccatcgcccacatccacaacaagggcagcacccccagcatgagcaccatcacccacagcgcccacatggacatcttccagaacctggccgtggacctggacacagagggccgctacctgttcctgaatgccatcgccaaccagctgcgctaccccaacagccacacccactacttcagctgcaccatgctgtacctgtttgctgaggccaacacagaggccatccaggagcagatcaccagggtgctgctggagcggctgattgtgaaccggccccacccctggggcctgctgatcaccttcatcgagctgatcaagaacccagccttcaagttctggaaccacgagtttgtgcactgtgcccctgagattgagaagctgttccagagcgtggcccagtgctgcatgggccagaagcaggcccagcaggtgatggagggcactggagccagctag

SEQ ID NO: 190405 - DNA, 3213 bp, Artificial Sequence
  derived and/or modified sequence
atgctgctgaatggcaccccatttgccttcgtcatcgacctggccgccctggccagccggcgggagtacctgaagctggacaagtggctgacagacaagatccgggagcacggggagcccttcatccaggcctgcatgaccttcctgaagaggcgctgccccagcatcctgggcggcctggcccctgagaaggaccagcccaagagcgcccagctgcccccagagaccctggccaccatgctggcctgcctgcaggcctgtgccggctctgtgtcccaggagctgtctgagaccatcctgaccatggtggccaactgcagcaatgtgatgaacaaggcccggcagcccccacctggggtgatgcccaagggccggccccccagcgccagcagcctggatgccatcagccctgtgcagattgaccccctggccggcatgaccagcctgagcattggaggcagcgctgccccccacacccagagcatgcagggcttcccccccaacctgggcagcgccttcagcaccccccagagccctgccaaggccttcccccccctgagcacccccaaccagaccacagccttcagcggcatcggcggcctgagcagccagctgcctgtgggcggcctgggcaccggcagcctgaccggcatcggcaccggggccctgggcctgcctgctgtgaacaatgacccctttgtgcagaggaagctgggcaccagcggcctgaaccagcccaccttccagcagagcaagatgaagcccagcgacctgagccaggtgtggccagaggccaaccagcacttcagcaaggagattgatgatgaggccaacagctacttccagaggatctacaaccaccccccccaccccaccatgtctgtggatgaggtgctggagatgctgcagcgcttcaaggacagcaccatcaagcgggagcgggaggtgttcaactgcatgctgaggaacctgtttgaggagtaccgcttcttcccccagtacccagacaaggagctgcacatcacagcctgcctgtttggaggcatcatcgagaagggcctggtgacctacatggccctgggcctggccctgcgctacgtgctggaggccctgaggaagcccttcggcagcaagatgtactacttcggcattgctgccctggaccgcttcaagaaccggctgaaggactacccccagtactgccagcacctggccagcatcagccacttcatgcagttcccccaccacctgcaggagtacattgaatatggccagcagagccgggacccccctgtgaagatgcagggcagcatcaccaccccaggcagcatcgccctggcccaggcccaggcccaggcccaggtgcctgccaaggcccccctggccggccaggtgtccaccatggtgaccaccagcaccaccaccaccgtggccaagacagtgacagtgacccggcccactggagtgtccttcaagaaggatgtgccccccagcatcaacaccaccaacatcgacaccctgctggtggccacagaccagacagaaagaattgtggagcccccagagaacatccaggagaagatcgccttcatcttcaacaacctgagccagagcaacatgacccagaaggtggaggagctgaaggagaccgtgaaggaggagttcatgccctgggtgtcccagtacctggtgatgaagagggtgtccattgagcccaacttccacagcctgtacagcaacttcctggacaccctgaagaacctgatcacccgcttcttccggctgtgcacagagatgtgtgtggagatctcctaccgggcccaggccgagcagcagcacaacccagctgccaaccccaccatgatccgggccaagtgctaccacaacctggatgcctttgtgcggctgattgccctgctggtgaagcacagcggggaggccaccaacacagtgaccaagatcaacctgctgaacaaggtgctgggcatcgtggtgggcgtgctgctgcaggaccatgatgtgcggcagagcgagttccagcagctgccctaccaccgcatcttcatcatgctgctgctggagctgaatgcccctgagcacgtgctggagaccatcaacttccagaccctgacagccttctgcaacaccttccacatcctgcggcccaccaaggcccctggctttgtgtatgcctggctggagctgatcagccaccgcatcttcatcgccaggatgctggcccacaccccccagcagaagggctggcccatgtatgcccagctgctgattgacctcttcaagtacctggcccccttcctgagaaatgtggagctgaccaagcccatgcagatcctgtacaagggcaccctgcgggtgctgctggtgctgctgcatgacttccctgagttcctgtgtgactaccactacggcttctgtgatgtgatcccccccaactgcatccagctgaggaacctgatcctgagcgccttccccaggaacatgaggctgcctgaccccttcacccccaacctgaaggtggacatgctgtctgagatcaacatcgccccccgcatcctgaccaacttcaccggggtgatgccaccccagttcaagaaggacctggacagctacctgaagaccaggagccctgtgaccttcctgagtgacctgcggagcaacctgcaggtgtccaatgagcccggcaaccgctacaacctgcagctgatcaatgccctggtgctgtatgtgggcacccaggccatcgcccacatccacaacaagggcagcacccccagcatgagcaccatcacccacagcgcccacatggacatcttccagaacctggccgtggacctggacacagagggccgctacctgttcctgaatgccatcgccaaccagctgcgctaccccaacagccacacccactacttcagctgcaccatgctgtacctgtttgctgaggccaacacagaggccatccaggagcagatcaccagggtgctgctggagcggctgattgtgaaccggccccacccctggggcctgctgatcaccttcatcgagctgatcaagaacccagccttcaagttctggaaccacgagtttgtgcactgtgcccctgagattgagaagctgttccagagcgtggcccagtgctgcatgggccagaagcaggcccagcaggtgatggagggcactggagccagctag

SEQ ID NO: 190406 - DNA, 3684 bp, Artificial Sequence
  derived and/or modified sequence
atgacccagaaggtggaggagctgaaggagaccgtgaaggaggagttcatgccctgggttagccagtacctcgtcatgaagcgcgtgtccattgagcctaactttcattccctatactccaactttttggacacccttaagaatcctgaattcaacaaaatggtgctgaacgaaacctatcggaatatcaaagatctggacgtcaagagcctgctcctcgaggcatacgtgaagggacagcaagaactcctgtatgtcgtacccttcgtggccaaagtgctggagtcttcaattcgatctgtagttttccggccacctaacccatggacaatggccataatgaacgtcctggcggagctgcaccaggaacatgatctgaagctgaacttgaaattcgagattgaggtgttgtgtaagaaccttgccctcgacatcaacgagttaaagccgggcaatctactgaaggataaagacagactgaaaaatttggatgaacaactgtccgcccctaagaaggacgttaagcagccagaggaactgccccctatcaccaccaccacgacttctactactcccgcgacgaacacaacctgcaccgccaccgtgccacctcaaccacaatatagttatcatgatatcaacgtttatagtctggcaggtctggcacctcatataaccctgaacccaaccatccctttattccaggcgcaccctcagctcaagcaatgtgtccggcaggctatcgaacgagctgtgcaggagcttgtgcaccctgtcgtcgatcgatctattaaaatcgcaatgacaacctgtgaacagatcgtgagaaaggattttgcgctggacagcgaggagtcccggatgagaatcgcggcacatcacatgatgcgaaacctgactgcgggcatggccatgatcacttgtagagaacctctgcttatgtccatctcaactaacttgaaaaactcctttgctagcgcactgcgaaccgctagccctcagcagagagagatgatggaccaggcagcagcgcaactggctcaagacaattgcgaactagcctgttgttttatccagaagaccgcggtagagaaggctggacccgagatggataaacggttagcaacagagttcgaactccggaagcacgcgaggcaggaaggcagacggtattgtgaccccgtcgtgctgacctaccaagccgagcggatgccagagcagattcggctgaaagtggggggggtcgatcccaagcagctcgcagtgtatgaagaatttgctcgtaacgtgcccggctttctgccgacaaacgatctgagccaacccacagggtttctcgctcagccaatgaagcaggcgtgggccactgacgatgtggcacagatctatgataaatgtatcaccgagctggaacagcacctgcacgccataccacctaccctagctatgaacccacaagcgcaagcactgcgttccctgctggaggtcgttgtcctgagtcggaattcacgggatgcgatagcagctctgggactgctccaaaaggccgtagagggacttctggatgccactagcggagcagacgccgacttactcctgaggtatagagagtgccacctgctcgttcttaaggccctgcaggatgggcgcgcctatggaagtccttggtgcaacaaacaaatcacacggtgcctcattgaatgcagagatgaatataagtacaacgtggaggcagtggagttattgataaggaaccacctggtaaatatgcagcagtatgatctacacctagcacagtccatggaaaacgggctgaactacatggccgtcgcttttgctatgcagctagtgaaaatcctgcttgttgacgaacgatctgtcgcccatgtcactgaagcggatctctttcatacaatcgaaacactgatgcgcattaatgcacacagtcgcggcaatgctcccgagggcttgcctcagctgatggaagtcgtcaggagcaactacgaagccatgatagaccgcgcccatggcggtccgaactttatgatgcactctggcatcagtcaggcctctgagtacgacgatcctcctggactgagggaaaaggccgaatatctcctcagggagtgggtcaatctctaccattccgccgccgcaggccgtgatagcactaaggcattttccgccttcgtaggacagatgcaccagcagggaattctgaaaactgatgaccttattacccggttttttcgcctttgcacagaaatgtgtgtcgaaatttcttatcgtgcgcaggcagagcagcagcacaaccctgccgcgaaccccaccatgatccgggctaaatgttatcataacttggatgccttcgtacggctgatcgcccttctggtcaaacattctggagaggccaccaatactgttaccaagatcaaccttttaaacaaggtgctgggtatcgtggtgggcgtgctgttgcaagatcatgacgtgcggcaaagcgagttccagcagctcccataccaccggatcttcattatgctgctgcttgaactgaacgcgcctgaacatgtgctggagacaattaattttcagactttgacggccttttgcaacaccttccacattctccgacctacgaaggcaccaggattcgtctatgcctggctggagctgatttcccatcgcatttttatcgcaaggatgctcgctcacacacctcagcagaaaggatggcctatgtatgctcagcttctaattgacttgttcaaatatcttgcccccttcctccgcaatgtcgaacttactaaacctatgcagatcctatataagggaacccttagggttttgctcgtcttgttacacgatttccctgaattcctctgtgactaccactacggcttctgcgatgttattccgcctaattgcattcagctgagaaatctcattctcagtgcattccctcgcaacatgaggctgcctgatccattcacacctaacctgaaagtcgacatgctttctgaaatcaatattgcaccccgcatcctaactaacttcacaggagtgatgcccccccagtttaagaaggacctggactcttatctgaaaacacggtccccggtcacatttttatcagacctccgaagcaacttgcaggtttcaaacgaacctggcaacaggtataacctccaacttatcaacgcactcgtgctgtacgttggtactcaagccatcgcccacatccataacaaaggatccaccccttccatgtcaacaattacccattccgcacacatggatatttttcagaatctggcagtggatttggatacggaagggcgataccttttcttgaacgccatcgccaaccagctgcgctatccgaatagtcacacccactacttttcttgcaccatgctctacctgtttgcggaggccaatacagaagccattcaggagcagatcacacgggtcctgctggagcggctgatcgtcaaccgacctcacccctgggggctcctgattacgttcatcgagcttatcaagaatcctgcgttcaaattctggaaccacgaatttgtacattgtgctccggaaatcgagaagttgtttcagagcgtggcccagtgctgtatgggccagaaacaagcccagcaggtgatggaaggaactggcgcatcttag

SEQ ID NO: 190407 - DNA, 7131 bp, Artificial Sequence
  derived and/or modified sequence
atgaacctggacagcctgagcctggccctgagccagatcagctacttggtcgacaacttaacgaagaaaaattatcgcgcaagccagcaagaaatacagcacatcgtgaaccggcacggcccagaggcggacaggcatctgctgcgctgtcttttctcacatgtggacttttccggggatggtaaatcctcaggtaaggatttccatcagacccagttcctgatccaggaatgtgccctcctgattacaaaaccaaattttatttcaaccctctcttacgccatcgataaccctctgcattaccaaaagtctctgaagcctgctccccaccttttcgctcagctatccaaggtcctgaaactgtctaaagtccaggaagtgatattcggcctcgcactgcttaatagttcatcctccgacttgcgagggttcgccgctcagttcatcaaacagaagctgcctgacctcctgaggagttatatcgatgccgacgtgtcaggtaatcaggaaggcgggttccaagatattgctatcgaggtgctccacctcttgctgtcacatctcttgttcggacagaagggcgccttcggggtgggtcaggaacagatcgacgccttcctaaagacgctgaggcgcgactttccccaggagaggtgtcccgttgtcctggcaccgctcctgtatcccgaaaagcgcgatatcctcatggatagaattttgccagacagcggcggggtcgccaagaccatgatggagtcttctcttgcagattttatgcaagaagtcggctatggcttttgtgcttctatcgaggagtgtaggaatatcatcgtccagtttggcgtgcgcgaggtgaccgcagcccaggtggcaagggtgctgggcatgatggcacgaacgcattcgggactgacagatggaataccactgcaatccataagcgcacctggctccgggatctggtctgatggcaaggataaatcagatggggctcaggcccatacatggaatgtcgaggtgctcattgacgttctgaaagaactgaatccttccctgaactttaaagaagtcacatacgagttagaccatccgggtttccagattcgagatagcaagggactgcacaatgtggtgtatggcatccagcgggggctgggtatggaggtctttccagtggacttgatttacaggccatggaagcacgcggagggtcagctcagctttatacaacattcactgataaatccggagatcttctgcttcgctgattatccttgtcataccgtggccacagatatcttgaaggcacctcccgaagatgacaatcgtgagatcgctacttggaaatcgctggatctgattgaatccctgctgcgtctggccgaagttggccaatacgagcaagtcaagcagctcttttctttcccaataaagcattgtcccgacatgctcgtgcttgcactcttacaaattaacacaagttggcacactctccgacacgagctcatctccaccctaatgcccatctttctcggtaatcacccaaattcagctatcatattgcattacgcctggcacgggcagggacagtctccttctattcgccaattaatcatgcatgccatggccgagtggtacatgcggggcgaacagtacgaccaggccaagctgtcacgtatactcgacgtcgcgcaggacttgaaagccttgtcgatgttgctgaatgggactccatttgcgttcgttattgatctggctgcacttgcctcacggagagaatacctgaaactggacaaatggttgactgataagatccgagaacatggcgagcctttcatacaagcttgtatgacttttctaaagagaagatgtcccagcatcttgggcggcctcgcccccgagaaggaccagccaaaatctgcccagcttcccccagaaaccctggccaccatgcttgcgtgtttgcaggcttgcgctgggagcgtgtctcaagagctgagtgagacaatactgaccatggtagctaattgttctaatgtcatgaacaaagcaagacagcccccgccgggtgtaatgccaaaggggcggcccccttccgccagcagtttggatgccatttctcctgtacagatagacccacttgcaggcatgactagcctatcgatcggcggctcagcggcccctcatacccagagtatgcagggatttcccccaaatctcggcagtgctttttctactccacagagtccagccaaggcgttccctccactttcaaccccaaatcagaccaccgctttttctggaattgggggcctctcatctcagctacctgtcgggggcctgggtacaggatccctcactgggattggcaccggggccctcggcttgcctgcagtgaataacgatccattcgtgcagcgaaaattggggactagtgggctcaaccagcctactttccagcaaagcaaaatgaaaccatcagacctgagccaggtttggcctgaggcaaatcagcacttctccaaagagatcgatgacgaggctaattcttactttcagagaatatataatcatcctccgcacccaacaatgtcagtggatgaggtgctggaaatgctgcaacggtttaaggactccaccatcaaacgggaacgggaagtgttcaattgtatgttgagaaacctattcgaagaataccgtttcttcccacagtaccccgacaaggaactccatatcactgcctgcctgtttgggggtatcattgagaaagggcttgtgacctatatggccctaggcctggctctgcggtacgttttggaggccttaagaaaacccttcgggtcaaagatgtattacttcggcatcgccgcgttagatcggttcaagaaccgacttaaggactacccacagtactgtcagcacttggcgagcatatcacactttatgcagtttcctcaccatcttcaggagtatatagaatatggtcaacaatccagggatccaccagtaaaaatgcagggctcaatcacgacacccggttctatagctcttgcacaagcgcaagcacaagcccaggtcccggccaaagctcctctggccggtcaggtaagtaccatggtgaccacctcaactactactaccgtggcgaagacagtaactgtaaccagaccaacgggggtctcttttaagaaagacgtgcctccgtcaatcaacactactaatatcgacaccttgttagtagcgactgaccagactgagcgcatcgtcgagccacccgaaaatattcaggaaaagatagcctttatctttaataacctttcgcagagcaacatgacccagaaagttgaagagttgaaggagacagttaaagaggaatttatgccctgggtgtctcaatacctggtcatgaagcgcgtgtccatcgaacctaacttccattctctgtatagcaattttttagacacccttaagaaccccgaatttaacaaaatggtcctcaatgaaacctacaggaacatcaaggtcctgctgacctccgataaggccgccgccaacttctctgatcgatcactgttgaagaatctgggacattggctgggtatgatcacgctggctaaaaacaagcctattctgcacacggatttggatgtcaagagcttgctgctggaagcctacgttaagggccagcaggagctattgtacgtcgtaccgtttgttgctaaggtcctggagagttccatccggtccgtggtgttccgaccacctaacccttggactatggccataatgaatgtgctggctgagcttcatcaggaacacgatctcaagttgaacctgaaattcgaaattgaggtcctgtgcaaaaacctcgctctggacataaatgagctgaaacctggtaacctgttaaaagacaaggacagactgaagaatctggacgaacagctctccgcacccaaaaaggatgttaaacagcccgaggaattaccccctatcactactactactacaagtaccacccccgcaacaaacacaacctgtacagcaaccgttccgcctcagccgcagtacagctatcacgacataaacgtgtattcgttagccgggctggccccccacatcacgctgaatccaacaatccctctctttcaggcgcacccccagctgaaacagtgtgtaaggcaagctattgaaagagctgtgcaggagctcgtacacccggtggttgatagatccattaaaatcgccatgaccacttgtgagcagatcgtgcgtaaggatttcgccctggactccgaagagtcaaggatgcgcattgccgctcatcacatgatgcgaaacctgaccgccggaatggcaatgattacctgccgcgagcccctgctcatgtctatcagtaccaatttgaaaaattctttcgctagtgccctgagaaccgccagtccccagcagagagagatgatggaccaggcggcagcccagttagcgcaagataactgcgaattggcatgctgtttcattcagaaaacagccgtggagaaagctggcccggaaatggacaagcggttagcgaccgagtttgaactgcgtaagcacgccagacaggagggccgccgttattgcgaccccgtggtactgacataccaggcggagaggatgcccgaacagatccgcctgaaagtaggcggcgtcgatcccaaacagctcgctgtgtacgaagaattcgccaggaacgtgccgggctttttgcctacgaatgatttatcccaaccaactggcttcttagcacagccgatgaagcaggcctgggctacagacgatgttgcccaaatttatgataagtgtataaccgagctggagcagcacctgcatgcgattcccccaacacttgccatgaaccctcaggcccaggcgttgcgcagtctgttggaggtcgttgttctgagccggaacagccgtgatgccatagcagctctcgggctcctgcagaaagctgtagaaggccttctggatgctacctcgggagctgatgccgacctattactaaggtacagagagtgtcacttgctggtgctgaaggccttgcaggacggacgggcttacggaagcccctggtgcaacaaacagataacccggtgtctgatagagtgtcgcgacgaatataagtataatgttgaagccgtggagttactgatcagaaatcacctcgtgaacatgcagcaatacgacctgcatctcgcgcaaagtatggaaaatggactaaattacatggccgtggcattcgctatgcagctcgtcaagatcctgcttgtggacgaaagatctgttgctcatgtcacagaggcagatctgttccacactatagaaacccttatgcggattaatgcacatagcagaggcaatgcccctgagggactcccgcagttgatggaggtggtgagatctaactatgaggcaatgattgatagagcacacggtgggcccaactttatgatgcactcagggatcagtcaagcaagtgagtatgatgaccccccaggcctcagggaaaaggctgagtacctgctcagggaatgggtcaatctctaccacagcgcagcggccgggagagatagtaccaaagccttttccgcttttgttgggcagatgcaccagcaaggcattctcaagaccgatgacttaattacacgtttctttaggctctgcacggagatgtgtgtagagatctcctacagagctcaggccgagcagcagcacaatccggctgccaatcctacgatgatacgcgcaaaatgttaccataaccttgacgcattcgttagactcatcgctcttttggtcaagcacagtggagaagctacaaatacagtcacaaaaatcaatttgctgaacaaagtgttgggaatcgttgtgggggtcctcctacaggatcacgatgttcggcaaagcgaatttcagcaactgccttaccatcgaattttcataatgcttttattagaactaaacgcccctgaacacgtgttggaaaccattaatttccagaccttgactgccttttgcaacacttttcatattctgcgaccaaccaaagcaccagggttcgtgtatgcatggctcgagcttatctcgcacaggatcttcattgcacgcatgttagcgcatactccccagcagaaggggtggccgatgtatgcccagcttttaatcgatttgttcaaatacctcgccccttttctcagaaacgttgaattgactaagcctatgcagattttgtataaggggacactccgcgttttgctggtacttctgcacgatttcccagaattcctttgcgactaccattacggattttgcgatgtgataccgccaaactgtatacaactcaggaacctcattctttcagcctttccacgcaatatgcgactacccgatccatttacccccaaccttaaagtcgacatgctctccgaaattaacatcgcccctaggattcttaccaacttcacaggtgtgatgccaccgcagttcaagaaggatctcgattcctacttgaagacaagatctcctgttacattcctatcggacctgcgatccaatctccaggtgtctaatgaacctggaaaccgctacaatctccagctgataaatgccttggtcctatacgtgggtacacaggcgatcgctcatatccacaataaaggaagtacaccctccatgtctaccatcacgcactcagcccacatggatatttttcagaatttggccgtggacttggatacggaaggaagatatttgtttctcaacgcaattgcaaatcagctgcgctaccctaattcccatactcattacttctcatgtactatgctataccttttcgcggaagccaacaccgaggctatccaggaacaaatcactagggtgctcctagagagattaattgtaaataggccccacccttggggattgctcattacattcattgagcttataaagaacccagcttttaaattctggaatcacgagttcgtgcattgtgcccctgagatcgagaagctgtttcagtccgttgctcagtgttgcatggggcagaagcaagcccagcaggtgatggaagggaccggggcctcatag

SEQ ID NO: 190408 - DNA, 3213 bp, Artificial Sequence
  derived and/or modified sequence
atgctgctgaacggcacccccttcgccttcgtgatcgacctggccgccctggcctctcgtagggagtacttgaaactggataagtggctgactgataagattcgcgagcacggtgaaccctttatacaagcttgcatgacctttctgaagcggaggtgccctagtatcctgggagggcttgcacccgagaaagaccagcccaagtctgctcagctcccccccgagacattagctaccatgctcgcttgcctgcaggcctgtgccgggtccgtgagtcaggagttaagcgagaccattttgaccatggttgctaactgctcaaatgtgatgaataaggcccggcagcctcccccaggagtgatgcccaaaggccgcccccctagtgccagctccctcgacgctatttcacctgtccagatagaccccctggctggcatgacttccctgtctataggaggaagcgccgccccacacacgcagtccatgcaagggtttccgccaaatctcggctccgcattcagcacgccccagtcccccgctaaagccttcccgcctctgagtacccccaatcaaacaaccgcattcagtggtatagggggattaagctcccagctgcctgtaggcggactgggcacagggagcctcaccggaatcggcaccggcgctctagggttgcctgcagtgaacaacgatccatttgtacaacgcaagttgggcacttctggcttaaaccagccaacctttcagcaaagcaaaatgaagccctctgatctgtcacaggtttggcccgaagcgaaccagcatttctcgaaggagatcgatgatgaagccaattcttacttccagaggatctataaccacccaccacatcccaccatgagtgtcgatgaggttctagaaatgttgcaaagatttaaagacagcactatcaagcgtgagcgggaggtgtttaactgtatgttgagaaatctcttcgaggagtatagatttttcccacaatacccagataaagagctgcatattactgcctgtctatttggcggcattattgaaaagggcttggtaacatacatggccctgggtctcgctctcagatatgttctggaagcattgagaaagcccttcggttctaagatgtactacttcggtatcgcggctctggaccggtttaaaaacaggttgaaggactaccctcagtattgccagcacctcgcatcgatctcacatttcatgcagttccctcaccacttgcaggaatacatcgagtacggccagcaatctcgcgacccacccgtcaagatgcaggggtccatcaccactccaggcagtattgctctagcacaggcacaagcacaggctcaggtgcccgcaaaggccccgttggccggtcaggtaagcaccatggttacaactagtactaccacaacagtcgccaagaccgtcacagtgactaggccgaccggcgtgagcttcaaaaaagatgtccccccatctatcaatacaactaatattgacactctcttagttgcaacggaccagacagagaggatcgtcgagccacctgaaaacatccaggagaaaattgcgttcatcttcaacaacctatcacagagcaatatgacccagaaggtggaggaactgaaggaaaccgttaaggaagaatttatgccctgggtgtcacagtacttagtgatgaagcgggtttccattgaacctaattttcatagtctgtactcgaatttcctggacacccttaagaatctcataacgcgctttttcagactgtgcaccgagatgtgtgtagagatttcttaccgagcgcaggccgagcagcagcataaccccgcggccaacccgaccatgatccgcgccaagtgttatcacaacctggatgctttcgtaaggctgattgcgctgctggtgaagcactccggcgaagccacgaatactgtgacaaagattaacttgctcaacaaagtgctcggcatagtcgtaggggtattgctgcaggatcatgatgtgaggcagagcgaatttcagcagctgccttatcatcggatattcataatgcttcttctggagcttaatgcaccggagcacgtcctggaaaccatcaactttcagacgctcactgctttctgtaacacattccacattctacgacctaccaaggcacccggcttcgtgtacgcctggttggagcttatatcccaccggatcttcatcgcacggatgctggcgcacaccccgcagcagaagggctggcccatgtatgcacagctgttaatcgatctgttcaagtacctggctcccttcctacggaacgttgaactgacaaagccaatgcagatcctgtacaagggaactttgcgggtcctcctggtcttattacatgacttccccgagtttctttgcgattaccactatggcttttgcgacgtgataccaccaaattgtatccagcttaggaacctgatactcagcgccttccctcggaatatgcgtctgcccgacccctttacgccgaacctcaaagtcgatatgctgtctgagatcaacattgcccctcgaatactgactaacttcaccggcgtgatgccccctcaattcaaaaaggaccttgattcctacttgaagacccgttcacctgtcacctttctgtcagacctccgatccaatcttcaggtcagcaacgagccaggcaatcgttacaacctgcagttaatcaacgccctggtgctgtatgtgggaacgcaggctattgctcacatccacaataaggggagcactcccagcatgtctacgattacacattccgctcacatggacattttccagaacctggccgtggatctcgacaccgagggccgctacctatttctgaatgcgatcgcaaatcaattgcgttaccctaactctcacacacattacttctcttgcacaatgctctacctcttcgcggaagcgaacacagaagctatccaggagcagattactagggtgctgttggaaagattaattgtgaacagaccacatccttggggtcttttaatcacttttatcgaactgatcaaaaatccggcctttaagttctggaaccatgaattcgttcattgtgcccccgagattgagaaactgttccaatctgttgctcagtgctgcatgggccagaaacaggcccagcaggtgatggagggtaccggggcctcctag

SEQ ID NO: 190409 - DNA, 3684 bp, Artificial Sequence
  derived and/or modified sequence
atgactcaaaaagtcgaagagctgaaagaaaccgtgaaggaggagtttatgccttgggtttcacaatatctagtcatgaaacgcgtctccattgagcccaattttcacagcctctacagtaactttctcgatactttaaaaaacccggaattcaacaaaatggtgctgaacgaaacatatcggaacattaaagatctggatgtgaaatcactgctcctcgaagcatatgtgaaaggacaacaagagttgttgtacgtagtgccatttgtggccaaagtgctggaaagcagcatccggtcagtggtatttcgtcctcccaacccatggacaatggctataatgaacgtgctggccgagctccaccaagagcatgatctaaagctgaacctgaagttcgaaattgaggttctatgcaaaaacttggccctggacatcaacgaacttaaacctggaaatcttctgaaagacaaggaccgtctcaagaacttagatgaacaattaagtgcaccaaagaaagacgtgaagcagcctgaagaattaccaccaattacgacgaccacgacttccaccactcctgcgaccaacaccacctgcacggccaccgtgcccccacagccccagtacagctatcatgatataaatgtctatagcctcgcaggccttgcacctcatatcacattgaatccaaccattccgctctttcaagctcaccctcagctgaagcaatgcgttcgacaggcaattgagcgggctgtgcaggaactagtgcaccccgttgtcgaccggtccataaagattgccatgacaacatgcgagcagatcgtccgcaaagatttcgctcttgatagtgaggagtcccgtatgcgaatcgccgctcatcatatgatgcgcaacctgaccgccggtatggctatgattacctgtagggagcccctgctgatgagcatcagcaccaacctgaagaatagctttgcgagtgctctgcgcactgccagcccccagcagagggagatgatggaccaggccgcagctcagcttgctcaagataactgtgaactggcctgctgcttcattcagaaaacggcagtagagaaagctggaccagagatggacaaaagactggccaccgagtttgaactcagaaagcatgccaggcaggagggcaggaggtactgcgatcctgttgttttgacctaccaagcggagcgcatgcccgagcagatacggctgaaggtggggggtgtcgacccaaagcaattggctgtctatgaagaatttgcgcgaaacgtgccgggttttctgcctaccaacgacctatctcagccgactggttttcttgcgcaacctatgaaacaagcatgggccacagacgacgtggcccagatatatgacaagtgcataaccgaactggagcagcacctacatgcaataccacccaccctggccatgaatccccaggcccaggctcttaggtctcttctcgaagtggtggtgttatcaagaaattcccgagacgcaattgcagccctgggcctcctccagaaagccgtggaaggactgcttgacgcaaccagcggggctgatgccgacctgctgctgaggtacagagagtgccacttgctggtgctgaaagctctgcaggatggcagggcttatgggtctccctggtgtaataagcagatcaccagatgtcttatcgaatgccgggacgagtacaagtacaacgtcgaggccgtcgagcttttaattagaaatcatctggttaacatgcagcagtatgacctccaccttgctcagagcatggagaatggattaaactatatggcggtcgctttcgctatgcagctggtcaaaatcttgcttgtcgacgagcggtctgtggcccacgtgaccgaagctgatctgttccacaccatagagactctgatgagaataaatgcccacagtaggggcaatgcccctgagggactcccccagctcatggaggtggtcagatcgaattatgaagccatgatcgaccgtgcccacggagggccaaactttatgatgcactccggtatatctcaagcgagcgagtacgatgatccccctggattacgagaaaaagcagaatacctacttagggagtgggttaatttgtaccattccgctgccgctggaagagattcaacgaaagcattctctgccttcgtcggacagatgcaccagcagggcatactaaaaacagacgacctgatcacgaggttctttcgcttatgtaccgagatgtgcgtggaaataagttatcgtgctcaggccgaacagcagcataaccctgcggcaaaccccaccatgattagggccaaatgttaccacaatctggacgcctttgtgcggctcatagccctgctcgtgaaacatagcggcgaagcaacaaacacggtgacgaagatcaatctgttaaataaggtgctcggaattgtggtcggcgtgcttctgcaggatcatgatgtgaggcaatcagaatttcagcagctgccatatcacaggatctttattatgctgctgctggagctcaatgctccagaacacgtcctggagacaataaacttccagacgttgacggccttctgtaatacattccatatcctgcgccctacgaaggcgccaggattcgtgtatgcatggcttgaactaatcagccaccgcatcttcattgcccgtatgttggcacacacaccgcagcagaaaggctggccaatgtacgcccagctgcttatcgaccttttcaagtatttagccccattcctgcggaatgtagagctcaccaaacctatgcagatcttgtacaaaggaactttgcgggtgttactggtcctcctacatgattttcctgagtttctgtgtgactatcactatggcttctgcgatgtgattcccccaaactgcatccaactgcgcaacttgattctgagcgccttcccccgtaatatgcggcttccggatccattcactccgaaccttaaagtggacatgctatctgaaattaatatcgcccctaggatacttactaactttactggagtgatgccccctcagttcaaaaaggatctggacagctaccttaagactcgatccccagtcaccttcctaagtgatctcagatcgaacctgcaggtgtccaatgagcctggcaatcggtacaatctgcagttgattaacgcactggtgctatacgtgggcacccaagcaatagcgcacattcataataaggggtctacgccatctatgtccaccatcacccattctgcccacatggatatattccagaacctggccgtggatctcgacacagaaggccgatacttatttctcaatgctatcgccaatcagcttcgctatccaaattcccatacccactatttcagctgcacaatgctgtacctgtttgcagaggccaacactgaggccattcaggagcaaataacccgggtgctacttgagcggttaatagtgaataggccccacccttgggggcttctgattacattcatagaactgattaagaacccagcttttaaattctggaaccatgagtttgtgcattgtgcacccgagattgaaaaattgtttcagagcgtggctcaatgttgtatgggccagaaacaggcgcagcaggtcatggaaggaaccggggcaagctag

SEQ ID NO: 190410 - DNA, 7130 bp, Artificial Sequence
  derived and/or modified sequence
atgaacttggattccctatctctggcgctgagtcagatctcatacttagtggataaccttactaaaaagaactatagagccagtcagcaggagattcagcacatcgtcaatcggcatggacctgaggcagatcgccacctactcagatgcctttttagtcacgtggacttttccggagacggcaaatcttccggtaaagattttcatcagacccagttcttaatccaggaatgtgcccttttgattaccaagcccaatttcatttcaacattaagttatgcgatcgacaatcctcttcattatcagaaatctttaaaacctgccccacatctgtttgcacagctgagtaaagtccttaagctgtctaaggtgcaggaagttatctttggactggcactgctcaactccagttcatctgacctccgaggttttgccgcacagttcatcaagcagaaactgccagacctccttaggagctacatagacgcagatgtgtcaggaaatcaggaggggggtttccaagacatcgcgatcgaagtcctgcatctcctactctcacacctgctgttcggtcagaaaggtgcctttggtgtcggacaagagcagatcgacgcttttctgaaaaccctgcgcagagacttcccccaggagagatgtcccgtcgttcttgcccctcttctctacccagagaagcgggacatcttgatggatcgcattctgcccgactccggcggtgtggcaaagaccatgatggaaagctcgttggccgattttatgcaagaggtcggttatggattttgcgcgtcaatagaggaatgtcgaaatatcatagtgcagtttggcgtgcgtgaagtgactgctgcccaggtcgccagggtgctgggtatgatggccaggacacatagcggcctcactgatggtatccccctgcaatctatctccgccccagggtcaggtatctggtccgatggaaaggataagtccgacggtgctcaggctcacacatggaatgtggaggtgctaatcgacgtgctgaaagagttaaacccctctttgaactttaaggaagtaacatatgaattggaccacccaggattccaaatccgggactcaaaaggtctccacaacgtagtttatggcatccagagaggcctcgggatggaggtcttccctgtggatttgatttatagaccatggaaacatgctgaaggtcaattatcattcatacaacatagcctcattaaccccgagatattttgtttcgctgattacccatgccacacagttgctacggacattcttaaagctccaccggaggatgataacagggagatagccacttggaaaagcctggacttgatcgaatcactcttgcgattggccgaggttggtcagtacgagcaagtaaagcaactgttctcatttcccattaagcattgcccggatatgctggtgctggcgctgctgcaaatcaatacgtcctggcataccctgcggcacgaattgatctctactttgatgccaatttttctggggaaccatccaaacagcgcaattatattgcactatgcgtggcacggccagggtcagtcacccagcatccgacagctgattatgcacgccatggcggagtggtacatgcggggagagcaatacgaccaggcaaagctgagtcggatcttggacgtggctcaggacctcaaggctctttcaatgcttttgaatggcactccattcgccttcgtaatcgatctggctgccttggcaagccgcagagagtatcttaaattggataaatggttaacagacaagattcgagagcatggcgaaccatttatccaggcctgtatgacttttctcaagcgtcggtgcccatcaatcctcggagggctcgcacctgagaaggatcagccaaagagtgcccaactgcctccagaaacactcgcaaccatgctcgcatgcttgcaagcatgtgctggttccgtgagccaggaactatccgaaacaatcctgacaatggtggctaactgttccaatgtcatgaataaggcgcgacagccccctcccggtgtgatgccaaaggggaggccccctagcgctagctctctagacgccatatctcctgtgcagattgacccactggccggaatgaccagtttgtctatagggggaagcgcagctcctcacacacagtccatgcagggcttcccacctaacttagggtctgctttctcaaccccacaaagccccgctaaggcttttcctccgctgtcaacaccaaaccagacaactgctttctccggcatcggaggcttgtccagccagctgccagtgggcggacttggtacaggaagtctgacgggtattggcaccggtgcgttgggactgcccgcagtcaataacgaccccttcgtacagagaaaattgggaacatcaggcctgaaccaacctaccttccagcagtcaaaaatgaagccaagcgatctgtcacaggtgtggcctgaggcgaatcagcattttagcaaagagattgacgacgaggccaatagctattttcagaggatatataaccatcctccccacccaacaatgagcgtggacgaggtcctcgagatgctgcagcgctttaaagattcaaccattaaaagggaaagggaagtgttcaattgtatgctgaggaatctgttcgaggagtacaggttctttccacagtaccctgacaaggaactgcatatcaccgcatgcctattcgggggaataatcgagaaaggattggtcacatatatggctctcggccttgcactgcgttacgtcttggaagccctgaggaagccttttgggtctaaaatgtactatttcgggattgctgcactggatcgctttaagaaccgtcttaaagattacccccagtactgccagcacctcgcctccatctctcacttcatgcaatttcctcatcacctgcaggaatacattgaatatggacagcagtccagggatccccctgtgaaaatgcagggatctattaccactccagggtccatcgccttagcccaagcgcaggcacaggcccaggtccccgcaaaagccccactggcgggtcaggtgtccaccatggttacaacctctactactaccaccgtggcgaaaaccgttacggtgaccaggcctacgggggttagtttcaagaaagatgtgcctccatccatcaatacgacaaacatcgatacgcttcttgtggctactgatcagacggagagaatcgttgagccacctgaaaacatacaggagaaaattgccttcatctttaataacctgtcacagtctaacatgactcagaaggtggaggagctcaaagagaccgtcaaagaagagtttatgccctgggtgagtcaatatcttgtgatgaagagagtcagcattgagccgaactttcacagtctgtattcaaatttcttggataccctgaaaaaccccgaattcaacaaaatggtgctgaatgagacctatcgaaatattaaagttttgctcactagtgataaagctgccgcaaacttctcagatcgaagtctgttgaaaaatctgggccactggctcggaatgatcactctcgcaaagaataaaccaattctccacactgacctggatgtgaagagcttgctacttgaggcctacgttaaggggcaacaggagctcctgtacgtggttcccttcgtcgccaaagtgctggaaagctctattcgctcggtggtgttcaggccgcctaacccatggaccatggccatcatgaacgtcctggccgaactccaccaagagcacgacctaaagttgaacctcaagttcgaaatcgaagtactgtgtaaaaacctcgctttggacataaacgagcttaaacctggaaacctgttaaaagacaaggacagactgaagaatctcgatgagcaacttagcgcccctaaaaaggacgtcaagcagcccgaggaacttcccccaatcacgacgaccaccacctcgactactcccgctaccaacaccacttgcactgcaactgtgccacctcagccacagtacagctaccatgatataaatgtgtattctttagccggtctcgccccacatatcaccctgaatcctaccatcccgctgttccaggcgcatccacagttgaaacaatgcgttaggcaagccatcgaaagagccgtgcaagaacttgtacatcctgtggtcgaccgctctatcaaaatcgcgatgacaacctgcgagcagattgtgcgaaaggattttgccctggattctgaggagtcaaggatgcgaattgccgctcaccacatgatgcgcaatttgacagcagggatggccatgattacatgtcgggaacccctgctcatgagtatcagtacaaatcttaagaactcattcgcttccgcgttgcggactgcctcccctcagcagcgcgaaatgatggatcaagccgcagctcagctggcacaggataactgtgagctcgcatgctgcttcattcagaagacagcagtagagaaagcagggccagaaatggacaagcgcctcgctaccgagttcgagctgagaaaacatgccaggcaggagggccgacgctactgtgatcccgtggtgctgacataccaggctgaacgtatgcccgagcaaatccgccttaaggtcggcggtgtggaccctaaacaactagctgtttacgaagagtttgcacggaacgtgcctggatttttaccgaccaacgacctatcgcagcctacaggttttctcgcccagccgatgaagcaggcctgggccaccgatgatgttgcccagatctacgacaaatgcatcaccgagctggagcagcatcttcacgctatcccccctacactagccatgaatccacaggcacaggccttacggagcctccttgaagtggtagtactgagtaggaattcacgcgacgccatcgcggcacttggcctgttgcagaaagccgtggagggcctcctcgacgctacatcaggagcggacgcagacctgctgttgagatatagagagtgccacctcttagtgctcaaagccttgcaagacggtcgtgcctatgggtccccatggtgcaataaacagatcaccagatgcctcatagaatgtagagacgaatacaagtataacgtggaggcagtcgaattgttgatcaggaatcatctcgtcaatatgcagcagtacgaccttcacctggcccagagtatggaaaacgggctcaattatatggcagtcgcttttgcaatgcaactggtgaagatcttacttgtggacgaacggagcgttgcacacgtgacggaggcggacctattccatacaatcgagacactcatgaggatcaacgctcacagccgcggtaacgccccagagggactgccacagctgatggaagtggtgcgctccaattacgaggctatgatcgaccgcgctcacggaggccctaactttatgatgcactcaggcatcagtcaagctagcgaatatgacgatccacccggattacgtgaaaaagctgagtatcttctgcgtgagtgggtcaacctgtatcattcggctgctgcaggccgagactcaacaaaagcattttccgcattcgtcggccagatgcaccagcagggaatcctcaagacagacgacttgattactaggttttttcggctttgcaccgaaatgtgcgtggaaatctcatatcgggcacaagctgaacagcagcacaatcctgcagctaatcctaccatgatacgcgctaagtgctatcataacctggatgcgttcgtgagactgatcgccttgctcgtgaagcattcaggtgaagctaccaataccgtgaccaagataaacctgctgaataaagttcttggaatcgttgtgggtgtgctgctgcaggaccatgacgtaagacagagtgaatttcaacagctcccataccataggattttcatcatgctgttattggaattgaacgctcccgagcatgtgctggaaaccatcaatttccagaccctgacggcattctgcaacactttccacatcctgaggcccaccaaggcccctggatttgtgtatgcctggctcgaacttatctctcaccgtatttttatagcccgaatgttagcccacacccctcagcagaaggggtggcccatgtatgcccaactgctgatagatctgttcaagtatctcgctccgttcctgcgcaacgtggagctcacgaagccgatgcagatactttacaaggggactttacgggtgcttctggttctcctgcacgatttccctgaattcctttgcgattaccattatgggttctgcgacgtgattccccctaattgcatacaactccggaatctgattctcagtgcttttcctcggaatatgagactgcctgatcccttcaccccgaatctgaaagtggatatgctctctgagatcaacatagcccctaggattcttaccaactttacgggcgtaatgcctccacagtttaagaaagacttagactcttacctgaagactagaagtccggtgacgtttctgagcgatctccggagcaatctgcaggtctcaaatgagccgggaaatagatacaacctgcagctgattaacgcactcgttctgtacgttggcacccaggctatagcacacatccataacaagggatccactccaagtatgtcaactatcactcactcagcacatatggacatctttcagaacctggcagtggatctggacactgagggccgatatttgttcttaaacgccattgccaatcagctgcgatatcccaactcgcatacacattatttctcttgcacaatgttgtatctgttcgccgaagctaataccgaagctattcaggaacagattacgcgagttctcctcgaaagactgattgtgaatcgccctcacccttggggccttctgattacttttatcgagcttatcaaaaaccccgcttttaagttctggaatcatgagtttgttcattgcgccccagaaattgagaagctcttccagtctgtggcccaatgttgtatggggcaaaagcaggcccagcaggtgatggaaggcacgggtgcatctta

SEQ ID NO: 190411 - DNA, 3213 bp, Artificial Sequence
  derived and/or modified sequence
atgctgctcaatgggaccccttttgcttttgtaatagacctggcagcgcttgcctctcggagagagtacttaaagctggacaagtggctcaccgataaaatccgcgaacacggcgagccctttatccaagcgtgcatgacctttctcaagagaaggtgccccagcatactgggcggtttggcccctgaaaaggatcagcccaaatcagctcagctgccgccagaaaccctcgcaacaatgctggcctgtctgcaggcttgcgctgggtccgtaagtcaggaactgagcgaaaccatcctcaccatggttgcaaattgtagtaatgttatgaataaggccagacaaccaccgccaggcgtgatgccgaaagggagacctccatccgccagcagcttggatgctattagccccgtccaaatagatcctctggcgggtatgacctccctcagcattggaggaagcgctgcgccacatacacagtctatgcagggttttccccctaatttggggtcagctttctcaaccccccagtctcccgctaaagcttttccacccctgtctacgcctaaccagacaaccgcatttagcggaatagggggactgtcttcacaattgccagtgggaggcctaggcacaggatctctaactggaatcggtacaggagccctcggactcccagccgtaaataacgacccattcgtccagagaaagttggggacgtccggactcaaccaacctacatttcagcagtcaaagatgaagcctagtgatctatcccaagtgtggccggaggccaatcagcacttcagtaaagagatcgacgacgaagccaactcctactttcaacggatttacaaccaccctccgcaccccaccatgtctgtggacgaagtactcgagatgcttcaacggttcaaggattctacaatcaagcgggagagagaggtgtttaattgcatgctgcggaacctgttcgaagaatacagattttttccacagtatcccgacaaggagctccacatcacagcttgcctattcggaggaatcattgaaaaaggcctggtcacttacatggccttaggactggctctgaggtacgtcctagaggcccttagaaaaccttttggcagcaagatgtactattttggcatagctgccttagataggtttaagaacaggctcaaggactatccgcagtactgccagcacctagcatccatttctcacttcatgcagtttccacatcatctgcaggagtatattgagtatggccagcaatcccgagatccaccggttaagatgcagggctcaatcacaactcccggttccattgcactggctcaggcccaggctcaagcccaggtcccagccaaagcccctcttgcagggcaggtgtctacgatggtcaccacaagcacgacaactacagtggcaaagaccgtgacagtgactcgccctacaggcgtgagcttcaagaaggacgtcccgccttcaattaacacaaccaatatcgacacacttctggtcgcaaccgaccaaaccgagagaattgtggagccacccgagaacattcaggaaaagattgcatttatttttaataacttgtctcagagcaacatgacgcagaaagtggaagaacttaaagaaaccgtcaaagaggagttcatgccttgggtcagccagtatctcgttatgaaacgcgtgagcatcgagccgaattttcattctctgtactccaattttctcgataccctgaaaaacctgattacccgattcttccgcctgtgcaccgagatgtgcgtggagatctcttacagggcccaagctgaacagcaacataacccagcagctaatcctacgatgatacgcgcaaaatgttaccacaacctggacgccttcgtgcgacttattgccctcctggtgaagcactccggcgaagccaccaacaccgtgactaaaatcaatctcttgaataaagttttggggattgtggtgggagtgctgctgcaagaccacgatgttaggcaatccgaattccagcaactgccctaccaccggatcttcattatgctattgctggaactaaacgcaccagagcatgttttagagacaattaattttcagacgctgaccgccttttgcaatactttccatatcttgcggcctaccaaagctcctggatttgtttacgcatggctagagttgatttcacataggatctttatcgcacgtatgcttgcccacacacctcaacaaaaaggatggccgatgtacgcacagctcttgatcgatctgttcaagtacctggcccctttcttgaggaatgtcgagctgacaaagcccatgcagatactgtataaagggacactccgcgtgcttctcgtgctattgcatgactttcccgagttcctgtgcgactatcactatggattttgtgatgtgatccctcctaattgtatccagttgaggaatcttattctgtcagcattccccagaaacatgaggctgcctgatcctttcacgccgaacctgaaggtggacatgttaagcgagattaatattgctcccagaatcttaaccaatttcacgggcgtcatgccgccacaattcaagaaagaccttgactcttatttgaagactcggtcacccgtgaccttcctgtccgatctccgctctaatctgcaggtatctaatgaacctgggaatagatacaatctgcagctcataaatgccctagtgctgtacgtgggcacccaggctatcgcccacattcacaataaaggatctacaccatctatgtcaaccataacacactctgcccacatggatatctttcagaacttggccgttgacttggacaccgagggcagatacctattcctgaatgctattgccaatcagctgcgttatcctaacagtcacactcattatttttcctgtacgatgctgtaccttttcgccgaggccaacactgaggcaatacaggaacagataactcgcgtgctgctggaacggctcatagtcaacagaccacacccttggggattgttgatcacttttattgagctcataaaaaatccagcttttaagttctggaaccatgaattcgtgcactgtgcccctgaaatagagaagcttttccagtccgttgcacagtgttgcatgggacagaaacaggcacaacaggtcatggaaggcaccggagcaagttag

SEQ ID NO: 190412 - DNA, 4098 bp, Artificial Sequence
  derived and/or modified sequence
agctttaagaaagatgtgccaccttctattaatactacaaatatagatacgttgcttgtggccacagatcaaactgagagaattgtggagcccccagaaaatatccaggagaaaattgcttttattttcaataatctctcacagtcaaatatgacacaaaaggttgaagagctaaaggaaacggtgaaagaagaatttatgccttgggtttcacagtatctggttatgaagagagtcagtattgagccaaactttcatagcctgtattcaaacttccttgacacgctgaagaatcctgaatttaacaagatggttctgaatgagacctacagaaacattaaagacttggatgtgaaatcattgctgctagaggcttatgttaaaggacaacaagaattgctctatgtagtgccctttgttgccaaagtcttagaatctagcattcgtagtgtggtttttaggccaccaaacccttggacaatggcaattatgaatgtattagctgagctacatcaggagcatgacttaaagttaaacttgaagtttgaaatcgaggttctctgcaagaaccttgcattagacatcaatgagctaaaacctggaaacctcctaaaggataaagatcgcctgaagaatttagatgagcaactctctgctccaaagaaagatgtcaagcagccagaagaactccctcccatcacaaccacaacaacttctactacaccagctaccaacaccacttgtacagccacggttccaccacagccacagtacagctaccacgacatcaatgtctattcccttgcgggcttggcaccacacattactctgaatccaacaattcccttgtttcaggcccatccacagttgaagcagtgtgtgcgtcaggcaattgaacgggctgtccaggagctggtccatcctgtggtggatcgatcaattaagattgccatgactacttgtgagcaaatagtcaggaaggattttgccctggattcggaggaatctcgaatgcgaatagcagctcatcacatgatgcgtaacttgacagctggaatggctatgattacatgcagggaacctttgctcatgagcatatctaccaacttaaaaaacagttttgcctcagcccttcgtactgcttccccacaacaaagagaaatgatggatcaggcagctgctcaattagctcaggacaattgtgagttggcttgctgttttattcagaagactgcagtagaaaaagcaggccctgagatggacaagagattagcaactgaatttgagctgagaaaacatgctaggcaagaaggacgcagatactgtgatcctgttgttttaacatatcaagctgaacggatgccagagcaaatcaggctgaaagttggtggtgtggacccaaagcagttggctgtttacgaagagtttgcacgcaatgttcctggcttcttacctacaaatgacttaagtcagcccacgggatttttagcccagcccatgaagcaagcttgggcaacagatgatgtagctcagatttatgataagtgtattacagaactggagcaacatctacatgccatcccaccaactttggccatgaaccctcaagctcaggctcttcgaagtctcttggaggttgtagttttatctcgaaactctcgggatgccatagctgctcttggattgctccaaaaggctgtagagggcttactagatgccacaagtggtgctgatgctgaccttctgctgcgctacagggaatgccacctcttggtcctaaaagctctgcaggatggccgggcatatgggtctccatggtgcaacaaacagatcacaaggtgcctaattgaatgtcgagatgaatataaatataatgtggaggctgtggagctgctaattcgcaatcatttggttaatatgcagcagtatgatcttcacctagcgcagtcaatggagaatggcttaaactacatggctgtggcatttgctatgcagttagtaaaaatcctgctggtggatgaaaggagtgttgctcatgttactgaggcagatctgttccacaccattgaaaccctcatgaggattaatgctcattccagaggcaatgctccagaaggattgccccagctgatggaagtagtgcgatccaactatgaagcaatgattgatcgtgctcatggaggcccaaactttatgatgcattctgggatctctcaagcctcagagtatgatgaccctccaggcctgagggagaaggcagagtatcttctgagggaatgggtgaatctctaccattcagcagcagctggccgcgacagtaccaaagctttctctgcatttgttggacagatgcaccagcaaggaatactgaagaccgatgatctcataacaaggttctttcgtctgtgtactgaaatgtgtgttgaaatcagttaccgtgctcaggctgagcagcagcacaatcctgctgccaatcccaccatgatccgagccaagtgctatcacaacctggatgcctttgttcgactcattgcactgctcgtgaaacactcaggggaggccaccaacactgtcacaaagattaatctgctgaacaaggtccttggtatagtagtgggagttctccttcaggatcatgatgttcgtcagagtgaatttcagcaacttccctaccatcgaatttttatcatgcttctcttggaactcaatgcacctgagcatgtgttggaaaccattaatttccagacacttacagctttctgcaatacattccacatcttgaggcctaccaaagctcctggctttgtatatgcctggcttgaactgatttcccatcggatatttattgcaagaatgctggcacatacgccacagcagaaggggtggcctatgtatgcacagctactgattgatttattcaaatatttagcgcctttccttagaaatgtggaactcaccaaacctatgcaaatcctctacaagggcactttaagagtgctgctggttcttttgcatgatttcccagagttcctttgtgattaccattatgggttctgtgatgtgatcccacctaattgtatccagttaagaaatttgatcctgagtgcctttccaagaaacatgaggctccccgacccattcactcctaatctaaaggtggacatgttgagtgaaattaacattgctccccggattctcaccaatttcactggagtaatgccacctcagttcaaaaaggatttggattcctatcttaaaactcgatcaccagtcactttcctgtctgatctgcgcagcaacctacaggtatccaatgaacctgggaatcgctacaacctccagctcatcaatgcactggtgctctatgtcgggactcaggccattgcgcacatccacaacaagggcagcacaccttcaatgagcaccatcactcactcagcacacatggatatcttccagaatttggctgtggacttggacactgagggtcgctatctctttttgaatgcaattgcaaatcagctccggtacccaaatagccacactcactacttcagttgcaccatgctgtacctttttgcagaggccaatacggaagccatccaagaacagatcacaagagttctcttggaacggttgattgtaaataggccacatccttggggtcttcttattaccttcattgagctgattaaaaacccagcgtttaagttctggaaccatgaatttgtacactgtgccccagaaatcgaaaagttattccagtcggtcgcacagtgctgcatgggacagaagcaggcccagcaagtaatggaagggacaggtgccagttagacgaaactgcatctctgttgtacgtgtcagtctagaggtctcactgcaccgagttcataaactgactgaagaatcctttcagctcttcctgactttcccagccctttggtttgtgggtatctgccccaactactgttgggatcagcctcctgtcttatgtgggcacgttccaaagtttaaatgcatttttttgactcttggccaaaatttagaagatgctgtgaatatcattttgaacttgtgtaaatacatgaaagagaaaac

SEQ ID NO: 190413 - DNA, 8429 bp, Artificial Sequence
  derived and/or modified sequence
gacctccggcgccattttgtagagaaacaagcggagttaaccgaagagggggtcgaggagagccggagtcggggacccaggagtttcctgtgtccagcgctgccggagccgcctgaggtgccatgtttcagaacagagtaagacccctggtaaagaagaactgaagatattatacagataccagatatagcctaattacaaagaaagcattaacctgcctctgaggtgactaaaggggaataatggtgattttgcgccgggctcggccgcctgcttccgccccaaccagcaatgaatcttgactcgctctcgctggccttgtctcaaatcagctacctggtggacaatttaaccaagaaaaattaccgagccagccagcaggaaatacagcatattgtgaatcggcacggtcctgaggcagacaggcatttattacgctgcctattttcgcatgtggatttcagtggcgatggtaaaagcagtggcaaagatttccatcagactcagtttctgattcaggagtgtgcgttgctgattacaaagccaaattttatctcgacgctgtcctatgccattgataatccattgcactatcagaagagtttaaagcctgcaccccacttatttgcccagctgagtaaagtgctcaaattaagcaaagtacaagaggtaatttttggccttgccctgttgaattcttccagctcagatcttagaggtttcgctgcccagtttatcaaacagaagcttccagatcttctgcgttcttacattgacgcagacgtcagtggaaatcaagaaggtggcttccaagatatagcaatagaggtcctacacctcctcctctcccatctcctctttgggcagaagggagcctttggagttggacaagaacagatagacgcttttcttaagacgctgcgcagagattttccccaagaacgctgtcccgtggtgctcgcaccacttttataccctgaaaaacgggacattctaatggacaggatcctgcctgattccggaggggtagctaaaaccatgatggagagctctttggctgatttcatgcaagaagtaggctatggcttttgtgcaagtattgaagaatgtcgcaatataatcgtgcagtttggtgttcgggaggtcacagctgcccaggttgcaagggttttgggaatgatggctcgaactcattcaggattaacagatggcattccattacagagtatttctgctccgggcagtgggatctggagtgatgggaaagataaaagtgatggagcacaggcacacacatggaatgtagaagtcttgattgacgttcttaaagaactgaatccaagtttgaatttcaaggaagtaacttatgaactggaccatcctggatttcaaattcgtgacagtaaaggacttcataatgtggtttatggcattcagaggggtttgggtatggaagtgttcccagtagacctcatatatagaccttggaaacatgctgaaggccagctctccttcattcaacattcccttataaatccagagatcttctgttttgctgactatccctgtcatactgttgccactgatattctgaaagcaccaccagaggatgacaatcgagaaattgccacatggaagagcttggatttgattgaatctctgctgaggcttgcagaggttgggcagtatgagcaagtcaaacagctcttcagcttccctatcaaacactgtccagacatgctggtattggccttactacaaattaacacctcttggcataccttgcgccatgaacttatctccactctgatgccaattttccttggaaaccatcctaactcagctattattttgcactatgcatggcatgggcagggacagtctccctcaattcgccaacttatcatgcatgcaatggcagaatggtacatgagaggggagcagtatgatcaggccaaattgtctcgaatacttgatgtggcccaggacttgaaggccttgtcaatgctgctaaatggtactccatttgcctttgttattgaccttgctgcacttgcttcacgtcgtgaatacctcaaacttgataagtggctcacagataaaattcgagagcatggggagccttttatccaggcgtgtatgacttttttaaagagacggtgtccttctattttgggcggacttgccccagaaaaagaccagcccaaaagtgctcaacttcctccagaaactttggcgacaatgttggcctgtctgcaagcttgtgcagggagtgtttctcaggagctatcagaaactatcctcaccatggtagccaattgcagtaatgttatgaataaggccagacaaccaccacctggagttatgccaaaaggacgtcctcctagtgctagcagcttagatgccatttctcctgttcagattgaccctcttgctggaatgacatctcttagtataggtggttcagctgcccctcacacccagagtatgcagggttttcctccaaatttgggttctgcattcagtacccctcagtcaccagcaaaagcatttccacccctttcaacccccaatcagaccactgcattcagtggtattggaggactttcatcacagcttccagtaggtggtcttggcacaggcagcctgactggtataggaactggtgctcttggactccctgcagtgaataacgacccttttgtacagaggaaactgggcacctctggactgaatcagcctacattccagcagagtaagatgaaaccttcggacttgtctcaggtgtggccagaggcaaaccagcactttagtaaagagatagatgatgaagcaaacagctatttccagcgaatatataatcatccaccacatccaaccatgtctgttgatgaggtattagaaatgctgcagagatttaaagactctactataaagagggaacgagaagtatttaactgtatgctaaggaacttgtttgaagaatatcgtttttttccccagtatcctgataaagagttacatataacagcctgcctatttggtggtataattgagaaaggactggtcacttacatggcactaggtctggctctacgatatgttcttgaagccttacgcaagccttttggatccaaaatgtattatttcgggattgctgcactagatagatttaaaaacagattgaaggactatccccagtattgtcagcatttggcttctatcagtcactttatgcaatttccacatcatttacaggagtatattgagtatggacagcagtctagagatcctcctgtgaaaatgcaaggctctatcacaacccctggaagtattgcactggctcaggcccaggctcaggcccaggttccagcaaaagctcctcttgctggtcaagttagcactatggtaaccacctcaacaactaccactgttgctaaaacggttacggtcaccaggccaactggagtcagctttaagaaagatgtgccaccttctattaatactacaaatatagatacgttgcttgtggccacagatcaaactgagagaattgtggagcccccagaaaatatccaggagaaaattgcttttattttcaataatctctcacagtcaaatatgacacaaaaggttgaagagctaaaggaaacggtgaaagaagaatttatgccttgggtttcacagtatctggttatgaagagagtcagtattgagccaaactttcatagcctgtattcaaacttccttgacacgctgaagaatcctgaatttaacaagatggttctgaatgagacctacagaaacattaaagtgctcctgacctctgataaagctgcagccaatttctcagatcgttctttgctgaagaacttgggacattggctaggaatgatcacattagctaaaaacaaacccatcttacacactgacttggatgtgaaatcattgctgctagaggcttatgttaaaggacaacaagaattgctctatgtagtgccctttgttgccaaagtcttagaatctagcattcgtagtgtggtttttaggccaccaaacccttggacaatggcaattatgaatgtattagctgagctacatcaggagcatgacttaaagttaaacttgaagtttgaaatcgaggttctctgcaagaaccttgcattagacatcaatgagctaaaacctggaaacctcctaaaggataaagatcgcctgaagaatttagatgagcaactctctgctccaaagaaagatgtcaagcagccagaagaactccctcccatcacaaccacaacaacttctactacaccagctaccaacaccacttgtacagccacggttccaccacagccacagtacagctaccacgacatcaatgtctattcccttgcgggcttggcaccacacattactctgaatccaacaattcccttgtttcaggcccatccacagttgaagcagtgtgtgcgtcaggcaattgaacgggctgtccaggagctggtccatcctgtggtggatcgatcaattaagattgccatgactacttgtgagcaaatagtcaggaaggattttgccctggattcggaggaatctcgaatgcgaatagcagctcatcacatgatgcgtaacttgacagctggaatggctatgattacatgcagggaacctttgctcatgagcatatctaccaacttaaaaaacagttttgcctcagcccttcgtactgcttccccacaacaaagagaaatgatggatcaggcagctgctcaattagctcaggacaattgtgagttggcttgctgttttattcagaagactgcagtagaaaaagcaggccctgagatggacaagagattagcaactgaatttgagctgagaaaacatgctaggcaagaaggacgcagatactgtgatcctgttgttttaacatatcaagctgaacggatgccagagcaaatcaggctgaaagttggtggtgtggacccaaagcagttggctgtttacgaagagtttgcacgcaatgttcctggcttcttacctacaaatgacttaagtcagcccacgggatttttagcccagcccatgaagcaagcttgggcaacagatgatgtagctcagatttatgataagtgtattacagaactggagcaacatctacatgccatcccaccaactttggccatgaaccctcaagctcaggctcttcgaagtctcttggaggttgtagttttatctcgaaactctcgggatgccatagctgctcttggattgctccaaaaggctgtagagggcttactagatgccacaagtggtgctgatgctgaccttctgctgcgctacagggaatgccacctcttggtcctaaaagctctgcaggatggccgggcatatgggtctccatggtgcaacaaacagatcacaaggtgcctaattgaatgtcgagatgaatataaatataatgtggaggctgtggagctgctaattcgcaatcatttggttaatatgcagcagtatgatcttcacctagcgcagtcaatggagaatggcttaaactacatggctgtggcatttgctatgcagttagtaaaaatcctgctggtggatgaaaggagtgttgctcatgttactgaggcagatctgttccacaccattgaaaccctcatgaggattaatgctcattccagaggcaatgctccagaaggattgccccagctgatggaagtagtgcgatccaactatgaagcaatgattgatcgtgctcatggaggcccaaactttatgatgcattctgggatctctcaagcctcagagtatgatgaccctccaggcctgagggagaaggcagagtatcttctgagggaatgggtgaatctctaccattcagcagcagctggccgcgacagtaccaaagctttctctgcatttgttggacagatgcaccagcaaggaatactgaagaccgatgatctcataacaaggttctttcgtctgtgtactgaaatgtgtgttgaaatcagttaccgtgctcaggctgagcagcagcacaatcctgctgccaatcccaccatgatccgagccaagtgctatcacaacctggatgcctttgttcgactcattgcactgctcgtgaaacactcaggggaggccaccaacactgtcacaaagattaatctgctgaacaaggtccttggtatagtagtgggagttctccttcaggatcatgatgttcgtcagagtgaatttcagcaacttccctaccatcgaatttttatcatgcttctcttggaactcaatgcacctgagcatgtgttggaaaccattaatttccagacacttacagctttctgcaatacattccacatcttgaggcctaccaaagctcctggctttgtatatgcctggcttgaactgatttcccatcggatatttattgcaagaatgctggcacatacgccacagcagaaggggtggcctatgtatgcacagctactgattgatttattcaaatatttagcgcctttccttagaaatgtggaactcaccaaacctatgcaaatcctctacaagggcactttaagagtgctgctggttcttttgcatgatttcccagagttcctttgtgattaccattatgggttctgtgatgtgatcccacctaattgtatccagttaagaaatttgatcctgagtgcctttccaagaaacatgaggctccccgacccattcactcctaatctaaaggtggacatgttgagtgaaattaacattgctccccggattctcaccaatttcactggagtaatgccacctcagttcaaaaaggatttggattcctatcttaaaactcgatcaccagtcactttcctgtctgatctgcgcagcaacctacaggtatccaatgaacctgggaatcgctacaacctccagctcatcaatgcactggtgctctatgtcgggactcaggccattgcgcacatccacaacaagggcagcacaccttcaatgagcaccatcactcactcagcacacatggatatcttccagaatttggctgtggacttggacactgagggtcgctatctctttttgaatgcaattgcaaatcagctccggtacccaaatagccacactcactacttcagttgcaccatgctgtacctttttgcagaggccaatacggaagccatccaagaacagatcacaagagttctcttggaacggttgattgtaaataggccacatccttggggtcttcttattaccttcattgagctgattaaaaacccagcgtttaagttctggaaccatgaatttgtacactgtgccccagaaatcgaaaagttattccagtcggtcgcacagtgctgcatgggacagaagcaggcccagcaagtaatggaagggacaggtgccagttagacgaaactgcatctctgttgtacgtgtcagtctagaggtctcactgcaccgagttcataaactgactgaagaatcctttcagctcttcctgactttcccagccctttggtttgtgggtatctgccccaactactgttgggatcagcctcctgtcttatgtgggcacgttccaaagtttaaatgcatttttttgactcttggccaaaatttagaagatgctgtgaatatcattttgaacttgtgtaaatacatgaaagagaaaacctttgtctggaacttcttggctttgtgcaagctgtgtccaaggcaagtacataaactggtaccttgtaatgaagaggcagctgatgccatgcacttgtctgagggcatagctccatgtcttctgacattcctggtgtcccaaagaatagcaaaaagccagtttgaatattatgtaacttatttttttaatgtggacaggggaccttgaaaatcactaagttattaaaaatgtggatgtgctagaattggatatgtccaggaacatgggaagggctcactattggaatcccatgagtttccattttgtctctacccaaacgtattccaaagctgactgcatttgtaccatcttatttcttttggggattatacacctcagccgcctgagatgggggtcagctctttatataaagggaaaccagaccaggcctaaagcccacccctaccctcacccccccaatcctctcctgaaacttaaaaacagtgggaatataggaaagggaaccaaatctcattaattaattgttctcccccattaccccactgaatgaatggccatacaggctaagctgaataatgacaaagttgaaaggaccaatacagccccttttataaggattttgaatgttttgcaaatgtattggtccctgtgttgtattttgtagccttttcctgggcttcagctcccctacttcttgtatgtgtatgcatactgtagctaaccattaaagtcatgacacaca

SEQ ID NO: 190414 - DNA, 6223 bp, Artificial Sequence
  derived and/or modified sequence
gcgacctccggcgccattttgtagagaaacaagcggagttaaccgaagagggggtcgaggagagccggagtcggggacccaggagtttcctgtgtccagcgctgccggagccgcctgaggtgccatgtttcagaacagagtaagacccctggtaaagaagaactgaagatattatacagataccagatatagcctaattacaaagaaagcattaacctgcctctgaggtgactaaaggggaataatggtgattttgcgccgggctcggccgcctgcttccgccccaaccagcaatgaatcttgactcgctctcgctggccttgtctcaaatcagctacctggtggacaatttaaccaagaaaaattaccgagccagccagcaggaaatacagcatattgtgaatcggcacggtcctgaggcagacaggcatttattacgctgcctattttcgcatgtggatttcagtggcgatggtaaaagcagtggcaaagatttccatcagactcagtttctgattcaggagtgtgcgttgctgattacaaagccaaattttatctcgacgctgtcctatgccattgataatccattgcactatcagaagagtttaaagcctgcaccccacttatttgcccagctgagtaaagtgctcaaattaagcaaagtacaagaggtaatttttggccttgccctgttgaattcttccagctcagatcttagaggtttcgctgcccagtttatcaaacagaagcttccagatcttctgcgttcttacattgacgcagacgtcagtggaaatcaagaaggtggcttccaagatatagcaatagaggtcctacacctcctcctctcccatctcctctttgggcagaagggagcctttggagttggacaagaacagatagacgcttttcttaagacgctgcgcagagattttccccaagaacgctgtcccgtggtgctcgcaccacttttataccctgaaaaacgggacattctaatggacaggatcctgcctgattccggaggggtagctaaaaccatgatggagagctctttggctgatttcatgcaagaagtaggctatggcttttgtgcaagtattgaagaatgtcgcaatataatcgtgcagtttggtgttcgggaggtcacagctgcccaggttgcaagggttttgggaatgatggctcgaactcattcaggattaacagatggcattccattacagagtatttctgctccgggcagtgggatctggagtgatgggaaagataaaagtgatggagcacaggcacacacatggaatgtagaagtcttgattgacgttcttaaagaactgaatccaagtttgaatttcaaggaagtaacttatgaactggaccatcctggatttcaaattcgtgacagtaaaggacttcataatgtggtttatggcattcagaggggtttgggtatggaagtgttcccagtagacctcatatatagaccttggaaacatgctgaaggccagctctccttcattcaacattcccttataaatccagagatcttctgttttgctgactatccctgtcatactgttgccactgatattctgaaagcaccaccagaggatgacaatcgagaaattgccacatggaagagcttggatttgattgaatctctgctgaggcttgcagaggttgggcagtatgagcaagtcaaacagctcttcagcttccctatcaaacactgtccagacatgctggtattggccttactacaaattaacacctcttggcataccttgcgccatgaacttatctccactctgatgccaattttccttggaaaccatcctaactcagctattattttgcactatgcatggcatgggcagggacagtctccctcaattcgccaacttatcatgcatgcaatggcagaatggtacatgagaggggagcagtatgatcaggccaaattgtctcgaatacttgatgtggcccaggacttgaaggccttgtcaatgctgctaaatggtactccatttgcctttgttattgaccttgctgcacttgcttcacgtcgtgaatacctcaaacttgataagtggctcacagataaaattcgagagcatggggagccttttatccaggcgtgtatgacttttttaaagagacggtgtccttctattttgggcggacttgccccagaaaaagaccagcccaaaagtgctcaacttcctccagaaactttggcgacaatgttggcctgtctgcaagcttgtgcagggagtgtttctcaggagctatcagaaactatcctcaccatggtagccaattgcagtaatgttatgaataaggccagacaaccaccacctggagttatgccaaaaggacgtcctcctagtgctagcagcttagatgccatttctcctgttcagattgaccctcttgctggaatgacatctcttagtataggtggttcagctgcccctcacacccagagtatgcagggttttcctccaaatttgggttctgcattcagtacccctcagtcaccagcaaaagcatttccacccctttcaacccccaatcagaccactgcattcagtggtattggaggactttcatcacagcttccagtaggtggtcttggcacaggcagcctgactggtataggaactggtgctcttggactccctgcagtgaataacgacccttttgtacagaggaaactgggcacctctggactgaatcagcctacattccagcagagtaagatgaaaccttcggacttgtctcaggtgtggccagaggcaaaccagcactttagtaaagagatagatgatgaagcaaacagctatttccagcgaatatataatcatccaccacatccaaccatgtctgttgatgaggtattagaaatgctgcagagatttaaagactctactataaagagggaacgagaagtatttaactgtatgctaaggaacttgtttgaagaatatcgtttttttccccagtatcctgataaagagttacatataacagcctgcctatttggtggtataattgagaaaggactggtcacttacatggcactaggtctggctctacgatatgttcttgaagccttacgcaagccttttggatccaaaatgtattatttcgggattgctgcactagatagatttaaaaacagattgaaggactatccccagtattgtcagcatttggcttctatcagtcactttatgcaatttccacatcatttacaggagtatattgagtatggacagcagtctagagatcctcctgtgaaaatgcaaggctctatcacaacccctggaagtattgcactggctcaggcccaggctcaggcccaggttccagcaaaagctcctcttgctggtcaagttagcactatggtaaccacctcaacaactaccactgttgctaaaacggttacggtcaccaggccaactggagtcagctttaagaaagatgtgccaccttctattaatactacaaatatagatacgttgcttgtggccacagatcaaactgagagaattgtggagcccccagaaaatatccaggagaaaattgcttttattttcaataatctctcacagtcaaatatgacacaaaaggttgaagagctaaaggaaacggtgaaagaagaatttatgccttgggtttcacagtatctggttatgaagagagtcagtattgagccaaactttcatagcctgtattcaaacttccttgacacgctgaagaatctcataacaaggttctttcgtctgtgtactgaaatgtgtgttgaaatcagttaccgtgctcaggctgagcagcagcacaatcctgctgccaatcccaccatgatccgagccaagtgctatcacaacctggatgcctttgttcgactcattgcactgctcgtgaaacactcaggggaggccaccaacactgtcacaaagattaatctgctgaacaaggtccttggtatagtagtgggagttctccttcaggatcatgatgttcgtcagagtgaatttcagcaacttccctaccatcgaatttttatcatgcttctcttggaactcaatgcacctgagcatgtgttggaaaccattaatttccagacacttacagctttctgcaatacattccacatcttgaggcctaccaaagctcctggctttgtatatgcctggcttgaactgatttcccatcggatatttattgcaagaatgctggcacatacgccacagcagaaggggtggcctatgtatgcacagctactgattgatttattcaaatatttagcgcctttccttagaaatgtggaactcaccaaacctatgcaaatcctctacaagggcactttaagagtgctgctggttcttttgcatgatttcccagagttcctttgtgattaccattatgggttctgtgatgtgatcccacctaattgtatccagttaagaaatttgatcctgagtgcctttccaagaaacatgaggctccccgacccattcactcctaatctaaaggtggacatgttgagtgaaattaacattgctccccggattctcaccaatttcactggagtaatgccacctcagttcaaaaaggatttggattcctatcttaaaactcgatcaccagtcactttcctgtctgatctgcgcagcaacctacaggtatccaatgaacctgggaatcgctacaacctccagctcatcaatgcactggtgctctatgtcgggactcaggccattgcgcacatccacaacaagggcagcacaccttcaatgagcaccatcactcactcagcacacatggatatcttccagaatttggctgtggacttggacactgagggtcgctatctctttttgaatgcaattgcaaatcagctccggtacccaaatagccacactcactacttcagttgcaccatgctgtacctttttgcagaggccaatacggaagccatccaagaacagatcacaagagttctcttggaacggttgattgtaaataggccacatccttggggtcttcttattaccttcattgagctgattaaaaacccagcgtttaagttctggaaccatgaatttgtacactgtgccccagaaatcgaaaagttattccagtcggtcgcacagtgctgcatgggacagaagcaggcccagcaagtaatggaagggacaggtgccagttagacgaaactgcatctctgttgtacgtgtcagtctagaggtctcactgcaccgagttcataaactgactgaagaatcctttcagctcttcctgactttcccagccctttggtttgtgggtatctgccccaactactgttgggatcagcctcctgtcttatgtgggcacgttccaaagtttaaatgcatttttttgactcttggccaaaatttagaagatgctgtgaatatcattttgaacttgtgtaaatacatgaaagagaaaacctttgtctggaacttcttggctttgtgcaagctgtgtccaaggcaagtacataaactggtaccttgtaatgaagaggcagctgatgccatgcacttgtctgagggcatagctccatgtcttctgacattcctggtgtcccaaagaatagcaaaaagccagtttgaatattatgtaacttatttttttaatgtggacaggggaccttgaaaatcactaagttattaaaaatgtggatgtgctagaattggatatgtccaggaacatgggaagggctcactattggaatcccatgagtttccattttgtctctacccaaacgtattccaaagctgactgcatttgtaccatcttatttcttttggggattatacacctcagccgcctgagatgggggtcagctctttatataaagggaaaccagaccaggcctaaagcccacccctaccctcacccccccaatcctctcctgaaacttaaaaacagtgggaatataggaaagggaaccaaatctcattaattaattgttctcccccattaccccactgaatgaatggccatacaggctaagctgaataatgacaaagttgaaaggaccaatacagccccttttataaggattttgaatgttttgcaaatgtattggtccctgtgttgtattttgtagccttttcctgggcttcagctcccctacttcttgtatgtgtatgcatactgtagctaaccattaaagtcatgacac

SEQ ID NO: 190415 - DNA, 2241 bp, Artificial Sequence
  derived and/or modified sequence
aggtccttggtatagtagtgggagttctccttcaggatcatgatgttcgtcagagtgaatttcagcaacttccctaccatcgaatttttatcatgcttctcttggaactcaatgcacctgagcatgtgttggaaaccattaatttccagacacttacagctttctgcaatacattccacatcttgaggcctaccaaagctcctggctttgtatatgcctggcttgaactgatttcccatcggatatttattgcaagaatgctggcacatacgccacagcagaaggggtggcctatgtatgcacagctactgattgatttattcaaatatttagcgcctttccttagaaatgtggaactcaccaaacctatgcaaatcctctacaagggcactttaagagtgctgctggttcttttgcatgatttcccagagttcctttgtgattaccattatgggttctgtgatgtgatcccacctaattgtatccagttaagaaatttgatcctgagtgcctttccaagaaacatgaggctccccgacccattcactcctaatctaaaggtggacatgttgagtgaaattaacattgctccccggattctcaccaatttcactggagtaatgccacctcagttcaaaaaggatttggattcctatcttaaaactcgatcaccagtcactttcctgtctgatctgcgcagcaacctacaggtatccaatgaacctgggaatcgctacaacctccagctcatcaatgcactggtgctctatgtcgggactcaggccattgcgcacatccacaacaagggcagcacaccttcaatgagcaccatcactcactcagcacacatggatatcttccagaatttggctgtggacttggacactgagggtcgctatctctttttgaatgcaattgcaaatcagtccggtacccaaatagccacactcactacttcagttgcaccatgctgtacctttttgcagaggccaatacggaagccatccaagaacagatcacaagagttctcttggaacggttgattgtaaataggccacatccttggggtcttcttattaccttcattgagctgattaaaaacccagcgtttaagttctggaaccatgaatttgtacactgtgccccagaaatcgaaaagttattccagtcggtcgcacagtgctgcatgggacagaagcaggcccagcaagtaatggaagggacaggtgccagttagacgaaactgcatctctgttgtacgtgtcagtctagaggtctcactgcaccgagttcataaactgactgaagaatcctttcagctcttcctgactttcccagccctttggtttgtgggtatctgccccaactactgttgggatcagcctcctgtcttatgtgggcacgttccaaagtttaaatgcatttttttgactcttggccaaaatttagaagatgctgtgaatatcattttgaacttgtgtaaatacatgaaagagaaaacctttgtctggaacttcttggctttgtgcaagctgtgtccaaggcaagtacataaactggtaccttgtaatgaagaggcagctgatgccatgcacttgtctgagggcatagctccatgtcttctgacattcctggtgtcccaaagaatagcaaaaagccagtttgaatattatgtaacttatttttttaatgtggacaggggaccttgaaaatcactaagttattaaaaatgtggatgtgctagaattggatatgtccaggaacatgggaagggctcactattggaatcccatgagtttccattttgtctctacccaaacgtattccaaagctgactgcatttgtaccatcttatttcttttggggattatacacctcagccgcctgagatgggggtcagctctttatataaagggaaaccagaccaggcctaaagcccacccctaccctcacccccccaatcctctcctgaaacttaaaaacagtgggaatataggaaagggaaccaaatctcattaattaattgttctcccccattaccccactgaatgaatggccatacaggctaagctgaataatgacaaagttgaaaggaccaatacagccccttttataaggattttgaatgttttgcaaatgtattggtccctgtgttgtattttgtagccttttcctgggcttcagctcccctacttcttgtatgtgtatgcatactgtagctaaccattaaagtcatgacac

SEQ ID NO: 190416 - DNA, 3684 bp, Artificial Sequence
  derived and/or modified sequence
atgacccagaaggtggaggagctgaaggagaccgtgaaggaggagttcatgccctgggtgagccagtacctggtgatgaagagagtgagcatcgagcccaacttccacagcctgtacagcaacttcctggacaccctgaagaaccccgagttcaacaagatggtgctgaacgagacctacagaaacatcaaggacctggacgtgaagagcctgctgctggaggcctacgtgaagggccagcaggagctgctgtacgtggtgcccttcgtggccaaggtgctggagagcagcatcagaagcgtggtgttcagaccccccaacccctggaccatggccatcatgaacgtgctggccgagctgcaccaggagcacgacctgaagctgaacctgaagttcgagatcgaggtgctgtgcaagaacctggccctggacatcaacgagctgaagcccggcaacctgctgaaggacaaggacagactgaagaacctggacgagcagctgagcgcccccaagaaggacgtgaagcagcccgaggagctgccccccatcaccaccaccaccaccagcaccacccccgccaccaacaccacctgcaccgccaccgtgcccccccagccccagtacagctaccacgacatcaacgtgtacagcctggccggcctggccccccacatcaccctgaaccccaccatccccctgttccaggcccacccccagctgaagcagtgcgtgagacaggccatcgagagagccgtgcaggagctggtgcaccccgtggtggacagaagcatcaagatcgccatgaccacctgcgagcagatcgtgagaaaggacttcgccctggacagcgaggagagcagaatgagaatcgccgcccaccacatgatgagaaacctgaccgccggcatggccatgatcacctgcagagagcccctgctgatgagcatcagcaccaacctgaagaacagcttcgccagcgccctgagaaccgccagcccccagcagagagagatgatggaccaggccgccgcccagctggcccaggacaactgcgagctggcctgctgcttcatccagaagaccgccgtggagaaggccggccccgagatggacaagagactggccaccgagttcgagctgagaaagcacgccagacaggagggcagaagatactgcgaccccgtggtgctgacctaccaggccgagagaatgcccgagcagatcagactgaaggtgggcggcgtggaccccaagcagctggccgtgtacgaggagttcgccagaaacgtgcccggcttcctgcccaccaacgacctgagccagcccaccggcttcctggcccagcccatgaagcaggcctgggccaccgacgacgtggcccagatctacgacaagtgcatcaccgagctggagcagcacctgcacgccatcccccccaccctggccatgaacccccaggcccaggccctgagaagcctgctggaggtggtggtgctgagcagaaacagcagagacgccatcgccgccctgggcctgctgcagaaggccgtggagggcctgctggacgccaccagcggcgccgacgccgacctgctgctgagatacagagagtgccacctgctggtgctgaaggccctgcaggacggcagagcctacggcagcccctggtgcaacaagcagatcaccagatgcctgatcgagtgcagagacgagtacaagtacaacgtggaggccgtggagctgctgatcagaaaccacctggtgaacatgcagcagtacgacctgcacctggcccagagcatggagaacggcctgaactacatggccgtggccttcgccatgcagctggtgaagatcctgctggtggacgagagaagcgtggcccacgtgaccgaggccgacctgttccacaccatcgagaccctgatgagaatcaacgcccacagcagaggcaacgcccccgagggcctgccccagctgatggaggtggtgagaagcaactacgaggccatgatcgacagagcccacggcggccccaacttcatgatgcacagcggcatcagccaggccagcgagtacgacgacccccccggcctgagagagaaggccgagtacctgctgagagagtgggtgaacctgtaccacagcgccgccgccggcagagacagcaccaaggccttcagcgccttcgtgggccagatgcaccagcagggcatcctgaagaccgacgacctgatcaccagattcttcagactgtgcaccgagatgtgcgtggagatcagctacagagcccaggccgagcagcagcacaaccccgccgccaaccccaccatgatcagagccaagtgctaccacaacctggacgccttcgtgagactgatcgccctgctggtgaagcacagcggcgaggccaccaacaccgtgaccaagatcaacctgctgaacaaggtgctgggcatcgtggtgggcgtgctgctgcaggaccacgacgtgagacagagcgagttccagcagctgccctaccacagaatcttcatcatgctgctgctggagctgaacgcccccgagcacgtgctggagaccatcaacttccagaccctgaccgccttctgcaacaccttccacatcctgagacccaccaaggcccccggcttcgtgtacgcctggctggagctgatcagccacagaatcttcatcgccagaatgctggcccacaccccccagcagaagggctggcccatgtacgcccagctgctgatcgacctgttcaagtacctggcccccttcctgagaaacgtggagctgaccaagcccatgcagatcctgtacaagggcaccctgagagtgctgctggtgctgctgcacgacttccccgagttcctgtgcgactaccactacggcttctgcgacgtgatcccccccaactgcatccagctgagaaacctgatcctgagcgccttccccagaaacatgagactgcccgaccccttcacccccaacctgaaggtggacatgctgagcgagatcaacatcgcccccagaatcctgaccaacttcaccggcgtgatgcccccccagttcaagaaggacctggacagctacctgaagaccagaagccccgtgaccttcctgagcgacctgagaagcaacctgcaggtgagcaacgagcccggcaacagatacaacctgcagctgatcaacgccctggtgctgtacgtgggcacccaggccatcgcccacatccacaacaagggcagcacccccagcatgagcaccatcacccacagcgcccacatggacatcttccagaacctggccgtggacctggacaccgagggcagatacctgttcctgaacgccatcgccaaccagctgagataccccaacagccacacccactacttcagctgcaccatgctgtacctgttcgccgaggccaacaccgaggccatccaggagcagatcaccagagtgctgctggagagactgatcgtgaacagaccccacccctggggcctgctgatcaccttcatcgagctgatcaagaaccccgccttcaagttctggaaccacgagttcgtgcactgcgcccccgagatcgagaagctgttccagagcgtggcccagtgctgcatgggccagaagcaggcccagcaggtgatggagggcaccggcgccagctag

SEQ ID NO: 190417 - DNA, 7131 bp, Artificial Sequence
  derived and/or modified sequence
atgaacctggacagcctgagcctggccctgagccagatcagctacctggtggacaacctgaccaagaagaactacagagccagccagcaggagatccagcacatcgtgaacagacacggccccgaggccgacagacacctgctgagatgcctgttcagccacgtggacttcagcggcgacggcaagagcagcggcaaggacttccaccagacccagttcctgatccaggagtgcgccctgctgatcaccaagcccaacttcatcagcaccctgagctacgccatcgacaaccccctgcactaccagaagagcctgaagcccgccccccacctgttcgcccagctgagcaaggtgctgaagctgagcaaggtgcaggaggtgatcttcggcctggccctgctgaacagcagcagcagcgacctgagaggcttcgccgcccagttcatcaagcagaagctgcccgacctgctgagaagctacatcgacgccgacgtgagcggcaaccaggagggcggcttccaggacatcgccatcgaggtgctgcacctgctgctgagccacctgctgttcggccagaagggcgccttcggcgtgggccaggagcagatcgacgccttcctgaagaccctgagaagagacttcccccaggagagatgccccgtggtgctggcccccctgctgtaccccgagaagagagacatcctgatggacagaatcctgcccgacagcggcggcgtggccaagaccatgatggagagcagcctggccgacttcatgcaggaggtgggctacggcttctgcgccagcatcgaggagtgcagaaacatcatcgtgcagttcggcgtgagagaggtgaccgccgcccaggtggccagagtgctgggcatgatggccagaacccacagcggcctgaccgacggcatccccctgcagagcatcagcgcccccggcagcggcatctggagcgacggcaaggacaagagcgacggcgcccaggcccacacctggaacgtggaggtgctgatcgacgtgctgaaggagctgaaccccagcctgaacttcaaggaggtgacctacgagctggaccaccccggcttccagatcagagacagcaagggcctgcacaacgtggtgtacggcatccagagaggcctgggcatggaggtgttccccgtggacctgatctacagaccctggaagcacgccgagggccagctgagcttcatccagcacagcctgatcaaccccgagatcttctgcttcgccgactacccctgccacaccgtggccaccgacatcctgaaggccccccccgaggacgacaacagagagatcgccacctggaagagcctggacctgatcgagagcctgctgagactggccgaggtgggccagtacgagcaggtgaagcagctgttcagcttccccatcaagcactgccccgacatgctggtgctggccctgctgcagatcaacaccagctggcacaccctgagacacgagctgatcagcaccctgatgcccatcttcctgggcaaccaccccaacagcgccatcatcctgcactacgcctggcacggccagggccagagccccagcatcagacagctgatcatgcacgccatggccgagtggtacatgagaggcgagcagtacgaccaggccaagctgagcagaatcctggacgtggcccaggacctgaaggccctgagcatgctgctgaacggcacccccttcgccttcgtgatcgacctggccgccctggccagcagaagagagtacctgaagctggacaagtggctgaccgacaagatcagagagcacggcgagcccttcatccaggcctgcatgaccttcctgaagagaagatgccccagcatcctgggcggcctggcccccgagaaggaccagcccaagagcgcccagctgccccccgagaccctggccaccatgctggcctgcctgcaggcctgcgccggcagcgtgagccaggagctgagcgagaccatcctgaccatggtggccaactgcagcaacgtgatgaacaaggccagacagcccccccccggcgtgatgcccaagggcagaccccccagcgccagcagcctggacgccatcagccccgtgcagatcgaccccctggccggcatgaccagcctgagcatcggcggcagcgccgccccccacacccagagcatgcagggcttcccccccaacctgggcagcgccttcagcaccccccagagccccgccaaggccttcccccccctgagcacccccaaccagaccaccgccttcagcggcatcggcggcctgagcagccagctgcccgtgggcggcctgggcaccggcagcctgaccggcatcggcaccggcgccctgggcctgcccgccgtgaacaacgaccccttcgtgcagagaaagctgggcaccagcggcctgaaccagcccaccttccagcagagcaagatgaagcccagcgacctgagccaggtgtggcccgaggccaaccagcacttcagcaaggagatcgacgacgaggccaacagctacttccagagaatctacaaccaccccccccaccccaccatgagcgtggacgaggtgctggagatgctgcagagattcaaggacagcaccatcaagagagagagagaggtgttcaactgcatgctgagaaacctgttcgaggagtacagattcttcccccagtaccccgacaaggagctgcacatcaccgcctgcctgttcggcggcatcatcgagaagggcctggtgacctacatggccctgggcctggccctgagatacgtgctggaggccctgagaaagcccttcggcagcaagatgtactacttcggcatcgccgccctggacagattcaagaacagactgaaggactacccccagtactgccagcacctggccagcatcagccacttcatgcagttcccccaccacctgcaggagtacatcgagtacggccagcagagcagagacccccccgtgaagatgcagggcagcatcaccacccccggcagcatcgccctggcccaggcccaggcccaggcccaggtgcccgccaaggcccccctggccggccaggtgagcaccatggtgaccaccagcaccaccaccaccgtggccaagaccgtgaccgtgaccagacccaccggcgtgagcttcaagaaggacgtgccccccagcatcaacaccaccaacatcgacaccctgctggtggccaccgaccagaccgagagaatcgtggagccccccgagaacatccaggagaagatcgccttcatcttcaacaacctgagccagagcaacatgacccagaaggtggaggagctgaaggagaccgtgaaggaggagttcatgccctgggtgagccagtacctggtgatgaagagagtgagcatcgagcccaacttccacagcctgtacagcaacttcctggacaccctgaagaaccccgagttcaacaagatggtgctgaacgagacctacagaaacatcaaggtgctgctgaccagcgacaaggccgccgccaacttcagcgacagaagcctgctgaagaacctgggccactggctgggcatgatcaccctggccaagaacaagcccatcctgcacaccgacctggacgtgaagagcctgctgctggaggcctacgtgaagggccagcaggagctgctgtacgtggtgcccttcgtggccaaggtgctggagagcagcatcagaagcgtggtgttcagaccccccaacccctggaccatggccatcatgaacgtgctggccgagctgcaccaggagcacgacctgaagctgaacctgaagttcgagatcgaggtgctgtgcaagaacctggccctggacatcaacgagctgaagcccggcaacctgctgaaggacaaggacagactgaagaacctggacgagcagctgagcgcccccaagaaggacgtgaagcagcccgaggagctgccccccatcaccaccaccaccaccagcaccacccccgccaccaacaccacctgcaccgccaccgtgcccccccagccccagtacagctaccacgacatcaacgtgtacagcctggccggcctggccccccacatcaccctgaaccccaccatccccctgttccaggcccacccccagctgaagcagtgcgtgagacaggccatcgagagagccgtgcaggagctggtgcaccccgtggtggacagaagcatcaagatcgccatgaccacctgcgagcagatcgtgagaaaggacttcgccctggacagcgaggagagcagaatgagaatcgccgcccaccacatgatgagaaacctgaccgccggcatggccatgatcacctgcagagagcccctgctgatgagcatcagcaccaacctgaagaacagcttcgccagcgccctgagaaccgccagcccccagcagagagagatgatggaccaggccgccgcccagctggcccaggacaactgcgagctggcctgctgcttcatccagaagaccgccgtggagaaggccggccccgagatggacaagagactggccaccgagttcgagctgagaaagcacgccagacaggagggcagaagatactgcgaccccgtggtgctgacctaccaggccgagagaatgcccgagcagatcagactgaaggtgggcggcgtggaccccaagcagctggccgtgtacgaggagttcgccagaaacgtgcccggcttcctgcccaccaacgacctgagccagcccaccggcttcctggcccagcccatgaagcaggcctgggccaccgacgacgtggcccagatctacgacaagtgcatcaccgagctggagcagcacctgcacgccatcccccccaccctggccatgaacccccaggcccaggccctgagaagcctgctggaggtggtggtgctgagcagaaacagcagagacgccatcgccgccctgggcctgctgcagaaggccgtggagggcctgctggacgccaccagcggcgccgacgccgacctgctgctgagatacagagagtgccacctgctggtgctgaaggccctgcaggacggcagagcctacggcagcccctggtgcaacaagcagatcaccagatgcctgatcgagtgcagagacgagtacaagtacaacgtggaggccgtggagctgctgatcagaaaccacctggtgaacatgcagcagtacgacctgcacctggcccagagcatggagaacggcctgaactacatggccgtggccttcgccatgcagctggtgaagatcctgctggtggacgagagaagcgtggcccacgtgaccgaggccgacctgttccacaccatcgagaccctgatgagaatcaacgcccacagcagaggcaacgcccccgagggcctgccccagctgatggaggtggtgagaagcaactacgaggccatgatcgacagagcccacggcggccccaacttcatgatgcacagcggcatcagccaggccagcgagtacgacgacccccccggcctgagagagaaggccgagtacctgctgagagagtgggtgaacctgtaccacagcgccgccgccggcagagacagcaccaaggccttcagcgccttcgtgggccagatgcaccagcagggcatcctgaagaccgacgacctgatcaccagattcttcagactgtgcaccgagatgtgcgtggagatcagctacagagcccaggccgagcagcagcacaaccccgccgccaaccccaccatgatcagagccaagtgctaccacaacctggacgccttcgtgagactgatcgccctgctggtgaagcacagcggcgaggccaccaacaccgtgaccaagatcaacctgctgaacaaggtgctgggcatcgtggtgggcgtgctgctgcaggaccacgacgtgagacagagcgagttccagcagctgccctaccacagaatcttcatcatgctgctgctggagctgaacgcccccgagcacgtgctggagaccatcaacttccagaccctgaccgccttctgcaacaccttccacatcctgagacccaccaaggcccccggcttcgtgtacgcctggctggagctgatcagccacagaatcttcatcgccagaatgctggcccacaccccccagcagaagggctggcccatgtacgcccagctgctgatcgacctgttcaagtacctggcccccttcctgagaaacgtggagctgaccaagcccatgcagatcctgtacaagggcaccctgagagtgctgctggtgctgctgcacgacttccccgagttcctgtgcgactaccactacggcttctgcgacgtgatcccccccaactgcatccagctgagaaacctgatcctgagcgccttccccagaaacatgagactgcccgaccccttcacccccaacctgaaggtggacatgctgagcgagatcaacatcgcccccagaatcctgaccaacttcaccggcgtgatgcccccccagttcaagaaggacctggacagctacctgaagaccagaagccccgtgaccttcctgagcgacctgagaagcaacctgcaggtgagcaacgagcccggcaacagatacaacctgcagctgatcaacgccctggtgctgtacgtgggcacccaggccatcgcccacatccacaacaagggcagcacccccagcatgagcaccatcacccacagcgcccacatggacatcttccagaacctggccgtggacctggacaccgagggcagatacctgttcctgaacgccatcgccaaccagctgagataccccaacagccacacccactacttcagctgcaccatgctgtacctgttcgccgaggccaacaccgaggccatccaggagcagatcaccagagtgctgctggagagactgatcgtgaacagaccccacccctggggcctgctgatcaccttcatcgagctgatcaagaaccccgccttcaagttctggaaccacgagttcgtgcactgcgcccccgagatcgagaagctgttccagagcgtggcccagtgctgcatgggccagaagcaggcccagcaggtgatggagggcaccggcgccagctag

SEQ ID NO: 190418 - DNA, 3213 bp, Artificial Sequence
  derived and/or modified sequence
atgctgctgaacggcacccccttcgccttcgtgatcgacctggccgccctggccagcagaagagagtacctgaagctggacaagtggctgaccgacaagatcagagagcacggcgagcccttcatccaggcctgcatgaccttcctgaagagaagatgccccagcatcctgggcggcctggcccccgagaaggaccagcccaagagcgcccagctgccccccgagaccctggccaccatgctggcctgcctgcaggcctgcgccggcagcgtgagccaggagctgagcgagaccatcctgaccatggtggccaactgcagcaacgtgatgaacaaggccagacagcccccccccggcgtgatgcccaagggcagaccccccagcgccagcagcctggacgccatcagccccgtgcagatcgaccccctggccggcatgaccagcctgagcatcggcggcagcgccgccccccacacccagagcatgcagggcttcccccccaacctgggcagcgccttcagcaccccccagagccccgccaaggccttcccccccctgagcacccccaaccagaccaccgccttcagcggcatcggcggcctgagcagccagctgcccgtgggcggcctgggcaccggcagcctgaccggcatcggcaccggcgccctgggcctgcccgccgtgaacaacgaccccttcgtgcagagaaagctgggcaccagcggcctgaaccagcccaccttccagcagagcaagatgaagcccagcgacctgagccaggtgtggcccgaggccaaccagcacttcagcaaggagatcgacgacgaggccaacagctacttccagagaatctacaaccaccccccccaccccaccatgagcgtggacgaggtgctggagatgctgcagagattcaaggacagcaccatcaagagagagagagaggtgttcaactgcatgctgagaaacctgttcgaggagtacagattcttcccccagtaccccgacaaggagctgcacatcaccgcctgcctgttcggcggcatcatcgagaagggcctggtgacctacatggccctgggcctggccctgagatacgtgctggaggccctgagaaagcccttcggcagcaagatgtactacttcggcatcgccgccctggacagattcaagaacagactgaaggactacccccagtactgccagcacctggccagcatcagccacttcatgcagttcccccaccacctgcaggagtacatcgagtacggccagcagagcagagacccccccgtgaagatgcagggcagcatcaccacccccggcagcatcgccctggcccaggcccaggcccaggcccaggtgcccgccaaggcccccctggccggccaggtgagcaccatggtgaccaccagcaccaccaccaccgtggccaagaccgtgaccgtgaccagacccaccggcgtgagcttcaagaaggacgtgccccccagcatcaacaccaccaacatcgacaccctgctggtggccaccgaccagaccgagagaatcgtggagccccccgagaacatccaggagaagatcgccttcatcttcaacaacctgagccagagcaacatgacccagaaggtggaggagctgaaggagaccgtgaaggaggagttcatgccctgggtgagccagtacctggtgatgaagagagtgagcatcgagcccaacttccacagcctgtacagcaacttcctggacaccctgaagaacctgatcaccagattcttcagactgtgcaccgagatgtgcgtggagatcagctacagagcccaggccgagcagcagcacaaccccgccgccaaccccaccatgatcagagccaagtgctaccacaacctggacgccttcgtgagactgatcgccctgctggtgaagcacagcggcgaggccaccaacaccgtgaccaagatcaacctgctgaacaaggtgctgggcatcgtggtgggcgtgctgctgcaggaccacgacgtgagacagagcgagttccagcagctgccctaccacagaatcttcatcatgctgctgctggagctgaacgcccccgagcacgtgctggagaccatcaacttccagaccctgaccgccttctgcaacaccttccacatcctgagacccaccaaggcccccggcttcgtgtacgcctggctggagctgatcagccacagaatcttcatcgccagaatgctggcccacaccccccagcagaagggctggcccatgtacgcccagctgctgatcgacctgttcaagtacctggcccccttcctgagaaacgtggagctgaccaagcccatgcagatcctgtacaagggcaccctgagagtgctgctggtgctgctgcacgacttccccgagttcctgtgcgactaccactacggcttctgcgacgtgatcccccccaactgcatccagctgagaaacctgatcctgagcgccttccccagaaacatgagactgcccgaccccttcacccccaacctgaaggtggacatgctgagcgagatcaacatcgcccccagaatcctgaccaacttcaccggcgtgatgcccccccagttcaagaaggacctggacagctacctgaagaccagaagccccgtgaccttcctgagcgacctgagaagcaacctgcaggtgagcaacgagcccggcaacagatacaacctgcagctgatcaacgccctggtgctgtacgtgggcacccaggccatcgcccacatccacaacaagggcagcacccccagcatgagcaccatcacccacagcgcccacatggacatcttccagaacctggccgtggacctggacaccgagggcagatacctgttcctgaacgccatcgccaaccagctgagataccccaacagccacacccactacttcagctgcaccatgctgtacctgttcgccgaggccaacaccgaggccatccaggagcagatcaccagagtgctgctggagagactgatcgtgaacagaccccacccctggggcctgctgatcaccttcatcgagctgatcaagaaccccgccttcaagttctggaaccacgagttcgtgcactgcgcccccgagatcgagaagctgttccagagcgtggcccagtgctgcatgggccagaagcaggcccagcaggtgatggagggcaccggcgccagctag

SEQ ID NO: 190419 - protein, 244 aa, Artificial Sequence
  derived and/or modified sequence
MELFLAGRRVLVTGAGKGIGRGTVQALHATGARVVAVSRTQADLDSLVRECPGIEPVCVDLGDWEATERALGSVGPVDLLVNNAAVALLQPFLEVTKEAFDRSFEVNLRAVIQVSQIVARGLIARGVPGAIVNVSSQCSQRAVTNHSVYCSTKGALDMLTKVMALELGPHKIRVNAVNPTVVMTSMGQATWSDPHKAKTMLNRIPLGKFAEVEHVVNAILFLLSDRSGMTTGSTLPVEGGFWAC

SEQ ID NO: 190420 - DNA, 735 bp, Artificial Sequence
  derived and/or modified sequence
atggagcttttcctcgctggacgccgcgttctcgtgactggcgccgggaaagggatcggcagaggcacagttcaggcattgcacgccaccggggctagagtggtggccgtttcccgtacacaggctgacctggattctcttgtccgcgaatgccctgggatcgagcctgtatgtgttgatctgggagactgggaggctacggagagggcacttggctccgtggggccagttgacctactggttaacaatgccgcagtggcgttgctgcagccattcttggaggttaccaaggaagccttcgacaggtcgtttgaggtcaatttgagagcagtgatccaggtctcacagatcgtcgccaggggtctgattgcacgaggtgtgccgggcgcaatcgttaatgtatcttcccaatgctcccagagagcagtgaccaaccactcagtctattgcagtaccaaaggagccctggatatgctgactaaagtgatggcgttggagctgggcccacacaaaattagagtcaatgccgtgaacccaactgtcgtgatgacttccatgggccaggccacatggagcgacccccacaaggccaaaacaatgctgaaccgcattccccttggcaagttcgcagaggtggagcacgtcgtaaacgctattctttttctgctctctgaccgcagtggcatgacaaccggaagtaccctgccagtcgagggcgggttctgggcctgctag

SEQ ID NO: 190421 - DNA, 735 bp, Artificial Sequence
  derived and/or modified sequence
atggagctgttcctggccggccggcgggtgctggtgactggagctggaaaaggaattggccggggcaccgtgcaggccctgcacgccaccggggcccgggtggtggccgtgtccaggacccaggccgacctggacagcctggtgcgggagtgccccggcatcgagcctgtgtgtgtggacctgggggactgggaggccacagagcgggccctgggctctgtgggccctgtggacctgctggtgaacaatgctgctgtggccctgctgcagcccttcctggaggtgaccaaggaggcctttgacaggagctttgaggtgaacctgcgggccgtcatccaggtgtcccagatcgtggcccggggcctgattgcccggggcgtgcctggggccatcgtgaatgtgagcagccagtgcagccagagagctgtgaccaaccacagcgtgtactgcagcaccaagggggccctggacatgctgaccaaggtgatggccctggagctgggcccccacaagatccgggtgaatgctgtgaaccccaccgtggtgatgacctccatgggccaggccacctggagcgacccccacaaggccaagaccatgctgaaccgcatccccctgggcaagtttgctgaggtggagcacgtggtgaatgccatcctcttcctgctgagtgacagaagtggcatgaccaccggcagcaccctgcctgtggagggcggcttctgggcctgctag

SEQ ID NO: 190422 - DNA, 735 bp, Artificial Sequence
  derived and/or modified sequence
atggagctgttcctggccggccggcgggtgctggtgaccggcgccggaaagggtattggacgaggaaccgtacaagcactgcatgccactggcgcccgggtagtggcagtcagtaggacgcaggccgatttggattctctggtcagggaatgccccgggattgaacctgtttgcgtcgacctcggcgattgggaagccaccgagcgcgccctgggctctgtaggcccagtagacctgctagtgaacaatgcagcagtcgcacttttacaacctttccttgaggttacaaaggaagcgtttgacagaagcttcgaagtcaacttgcgcgcggtgatccaggtaagtcaaattgtagcccgaggactgattgcacgcggcgtacccggggcaattgtgaatgtttcatctcagtgctcacagagagcagtgacgaatcatagcgtgtattgctcaaccaagggtgcacttgatatgctgacgaaagtaatggccctagagctcggcccccataaaattcgggtaaacgcagtgaatccgacagtggtgatgacatccatgggacaggccacgtggtctgacccgcacaaagcaaagaccatgctcaacagaatcccactgggcaaattcgccgaggtcgagcacgttgtaaatgccatccttttcttactctcagataggtccggtatgaccacgggctcaaccctgcctgttgaaggaggattttgggcatgttag

SEQ ID NO: 190423 - DNA, 735 bp, Artificial Sequence
  derived and/or modified sequence
atggaattatttctggccggacgtcgggtgctggtaaccggcgcaggcaagggaatcggccgagggacagtgcaggccctccacgccactggagctcgcgtggtggccgttagccggacccaagccgacttggactctctagttcgcgaatgtcctgggatagagcccgtttgcgtggatttaggggattgggaggccaccgaacgcgcattgggctcagtgggccctgtggatctgctggtaaataacgccgctgtggcactactgcagccattccttgaggtaactaaggaggctttcgaccggtccttcgaggtgaacctacgcgctgtcattcaggtgagccagatcgttgcgaggggtctgattgctcggggtgtgcccggagccattgtgaatgtgagctctcagtgctcccagcgggcagtcacaaaccattctgtttattgcagcacaaagggcgcactggacatgttgacgaaggtgatggccttagaactaggtccgcacaaaattcgtgtcaatgctgtcaaccctaccgtggtaatgacatcaatggggcaggcaacctggtccgacccacacaaggctaaaaccatgcttaacagaatcccgttgggaaagtttgcagaggtagagcacgtcgttaatgccatacttttcctgcttagcgacaggtccgggatgaccacgggctccactctgcccgtggaaggaggattctgggcatgctag

SEQ ID NO: 190424 - DNA, 735 bp, Artificial Sequence
  derived and/or modified sequence
atggagctgttcctggccggcagaagagtgctggtgaccggcgccggcaagggcatcggcagaggcaccgtgcaggccctgcacgccaccggcgccagagtggtggccgtgagcagaacccaggccgacctggacagcctggtgagagagtgccccggcatcgagcccgtgtgcgtggacctgggcgactgggaggccaccgagagagccctgggcagcgtgggccccgtggacctgctggtgaacaacgccgccgtggccctgctgcagcccttcctggaggtgaccaaggaggccttcgacagaagcttcgaggtgaacctgagagccgtgatccaggtgagccagatcgtggccagaggcctgatcgccagaggcgtgcccggcgccatcgtgaacgtgagcagccagtgcagccagagagccgtgaccaaccacagcgtgtactgcagcaccaagggcgccctggacatgctgaccaaggtgatggccctggagctgggcccccacaagatcagagtgaacgccgtgaaccccaccgtggtgatgaccagcatgggccaggccacctggagcgacccccacaaggccaagaccatgctgaacagaatccccctgggcaagttcgccgaggtggagcacgtggtgaacgccatcctgttcctgctgagcgacagaagcggcatgaccaccggcagcaccctgcccgtggagggcggcttctgggcctgctag

SEQ ID NO: 190425 - DNA, 829 bp, Artificial Sequence
  derived and/or modified sequence
ggagactgcgccgacatggagctgttcctcgcgggccgccgggtgctggtcaccggggcaggcaaaggtatagggcgcggcacggtccaggcgctgcacgcgacgggcgcgcgggtggtggctgtgagccggactcaggcggatcttgacagccttgtccgcgagtgcccggggatagaacccgtgtgcgtggacctgggtgactgggaggccaccgagcgggcgctgggcagcgtgggccccgtggacctgctggtgaacaacgccgctgtcgccctgctgcagcccttcctggaggtcaccaaggaggcctttgacagatcctttgaggtgaacctgcgtgcggtcatccaggtgtcgcagattgtggccaggggcttaatagcccggggagtcccaggggccatcgtgaatgtctccagccagtgctcccagcgggcagtaactaaccatagcgtctactgctccaccaagggtgccctggacatgctgaccaaggtgatggccctagagctcgggccccacaagatccgagtgaatgcagtaaaccccacagtggtgatgacgtccatgggccaggccacctggagtgacccccacaaggccaagactatgctgaaccgaatcccacttggcaagtttgctgaggtagagcacgtggtgaacgccatcctctttctgctgagtgaccgaagtggcatgaccacgggttccactttgccggtggaagggggcttctgggcctgctgagctccctccacacacctcaagccccatgccgtgctcatcctacccccaatccctccaataaacctgattctgctgccca

SEQ ID NO: 190426 - protein, 720 aa, Artificial Sequence
  derived and/or modified sequence
MPRRKKKVKEVSESRNLEKKDVETTSSVSVKRKRRLEDAFIVISDSDGEEPKEENGLQKTKTKQSNRAKCLAKRKIAQMTEEEQFALALKMSEQEAREVNSQEEEEEELLRKAIAESLNSCRPSDASATRSRPLATGPSSQSHQEKTTDSGLTEGIWQLVPPSLFKGSHISQGNEAEEREEPWDHTEKTEEEPVSGSSGSWDQSSQPVFENVNVKSFDRCTGHSAEHTQCGKPQESTGRGSAFLKAVQGSGDTSRHCLPTLADAKGLQDTGGTVNYFWGIPFCPDGVDPNQYTKVILCQLEVYQKSLKMAQRQLLNKKGFGEPVLPRPPSLIQNECGQGEQASEKNECISEDMGDEDKEERQESRASDWHSKTKDFQESSIKSLKEKLLLEEEPTTSHGQSSQGIVEETSEEGNSVPASQSVAALTSKRSLVLMPESSAEEITVCPETQLSSSETFDLEREVSPGSRDILDGVRIIMADKEVGNKEDAEKEVAISTFSSSNQVSCPLCDQCFPPTKIERHAMYCNGLMEEDTEVLTRRQKEAKTKSDSGTAAQTSLDIDKNEKCYLCKSLVPFREYQCHVDSCLQLAKADQGDGPEGSGRACSTVEGKWQQRLKNPKEKGHSEGRLLSFLEQSEHKTSDADIKSSETGAFRVPSPGMEEAGCSREMQSSFTRRDLNESPVKSFVSISEATDCLVDFKKQVTVQPGSRTRTKAGRGRRRKF

SEQ ID NO: 190427 - protein, 642 aa, Artificial Sequence
  derived and/or modified sequence
MTEEEQFALALKMSEQEAREVNSQEEEEEELLRKAIAESLNSCRPSDASATRSRPLATGPSSQSHQEKTTDSGLTEGIWQLVPPSLFKGSHISQGNEAEEREEPWDHTEKTEEEPVSGSSGSWDQSSQPVFENVNVKSFDRCTGHSAEHTQCGKPQESTGRGSAFLKAVQGSGDTSRHCLPTLADAKGLQDTGGTVNYFWGIPFCPDGVDPNQYTKVILCQLEVYQKSLKMAQRQLLNKKGFGEPVLPRPPSLIQNECGQGEQASEKNECISEDMGDEDKEERQESRASDWHSKTKDFQESSIKSLKEKLLLEEEPTTSHGQSSQGIVEETSEEGNSVPASQSVAALTSKRSLVLMPESSAEEITVCPETQLSSSETFDLEREVSPGSRDILDGVRIIMADKEVGNKEDAEKEVAISTFSSSNQVSCPLCDQCFPPTKIERHAMYCNGLMEEDTEVLTRRQKEAKTKSDSGTAAQTSLDIDKNEKCYLCKSLVPFREYQCHVDSCLQLAKADQGDGPEGSGRACSTVEGKWQQRLKNPKEKGHSEGRLLSFLEQSEHKTSDADIKSSETGAFRVPSPGMEEAGCSREMQSSFTRRDLNESPVKSFVSISEATDCLVDFKKQVTVQPGSRTRTKAGRGRRRKF

SEQ ID NO: 190428 - protein, 719 aa, Artificial Sequence
  derived and/or modified sequence
MPRRKKKVKEVSESRNLEKKDVETTSSVSVKRKRRLEDAFIVISDSDGEEPKEENGLQKTKTKQSNRAKCLAKRKIAQMTEEEQFALALKMSEQEAREVNSQEEEEEELLRKAIAESLNSCRPSDASATRSRPLATGPSSQSHQEKTTDSGLTEGIWQLVPPSLFKGSHISQGNEAEEREEPWDHTEKTEEEPVSGSSGSWDQSSQPVFENVNVKSFDRCTGHSAEHTQCGKPQESTGRGSAFLKAVQGSGDTSRHCLPTLADAKGLQDTGGTVNYFWGIPFCPDGVDPNQYTKVILCQLEVYQKSLKMAQRQLLNKKGFGEPVLPRPPSLIQNECGQGEQASEKNECISEDMGDEDKEERQESRASDWHSKTKDFQESSIKSLKEKLLLEEEPTTSHGQSSQGIVEETSEEGNSVPASQSVAALTSKRSLVLMPESSAEEITVCPETQLSSSETFDLEREVSPGSRDILDGVRIIMADKEVGNKEDAEKEVAISTFSSSNQVSCPLCDQCFPPTKIERHAMYCNGLMEEDTVLTRRQKEAKTKSDSGTAAQTSLDIDKNEKCYLCKSLVPFREYQCHVDSCLQLAKADQGDGPEGSGRACSTVEGKWQQRLKNPKEKGHSEGRLLSFLEQSEHKTSDADIKSSETGAFRVPSPGMEEAGCSREMQSSFTRRDLNESPVKSFVSISEATDCLVDFKKQVTVQPGSRTRTKAGRGRRRKF

SEQ ID NO: 190429 - DNA, 2163 bp, Artificial Sequence
  derived and/or modified sequence
atgcccagaagaaagaagaaggtgaaggaggtgagcgagagcagaaacctggagaagaaggacgtggagaccaccagcagcgtgagcgtgaagagaaagagaagactggaggacgccttcatcgtgatcagcgacagcgacggcgaggagcccaaggaggagaacggcctgcagaagaccaagaccaagcagagcaacagagccaagtgcctggccaagagaaagatcgcccagatgaccgaggaggagcagttcgccctggccctgaagatgagcgagcaggaggccagagaggtgaacagccaggaggaggaggaggaggagctgctgagaaaggccatcgccgagagcctgaacagctgcagacccagcgacgccagcgccaccagaagcagacccctggccaccggccccagcagccagagccaccaggagaagaccaccgacagcggcctgaccgagggcatctggcagctggtgccccccagcctgttcaagggcagccacatcagccagggcaacgaggccgaggagagagaggagccctgggaccacaccgagaagaccgaggaggagcccgtgagcggcagcagcggcagctgggaccagagcagccagcccgtgttcgagaacgtgaacgtgaagagcttcgacagatgcaccggccacagcgccgagcacacccagtgcggcaagccccaggagagcaccggcagaggcagcgccttcctgaaggccgtgcagggcagcggcgacaccagcagacactgcctgcccaccctggccgacgccaagggcctgcaggacaccggcggcaccgtgaactacttctggggcatccccttctgccccgacggcgtggaccccaaccagtacaccaaggtgatcctgtgccagctggaggtgtaccagaagagcctgaagatggcccagagacagctgctgaacaagaagggcttcggcgagcccgtgctgcccagaccccccagcctgatccagaacgagtgcggccagggcgagcaggccagcgagaagaacgagtgcatcagcgaggacatgggcgacgaggacaaggaggagagacaggagagcagagccagcgactggcacagcaagaccaaggacttccaggagagcagcatcaagagcctgaaggagaagctgctgctggaggaggagcccaccaccagccacggccagagcagccagggcatcgtggaggagaccagcgaggagggcaacagcgtgcccgccagccagagcgtggccgccctgaccagcaagagaagcctggtgctgatgcccgagagcagcgccgaggagatcaccgtgtgccccgagacccagctgagcagcagcgagaccttcgacctggagagagaggtgagccccggcagcagagacatcctggacggcgtgagaatcatcatggccgacaaggaggtgggcaacaaggaggacgccgagaaggaggtggccatcagcaccttcagcagcagcaaccaggtgagctgccccctgtgcgaccagtgcttcccccccaccaagatcgagagacacgccatgtactgcaacggcctgatggaggaggacaccgaggtgctgaccagaagacagaaggaggccaagaccaagagcgacagcggcaccgccgcccagaccagcctggacatcgacaagaacgagaagtgctacctgtgcaagagcctggtgcccttcagagagtaccagtgccacgtggacagctgcctgcagctggccaaggccgaccagggcgacggccccgagggcagcggcagagcctgcagcaccgtggagggcaagtggcagcagagactgaagaaccccaaggagaagggccacagcgagggcagactgctgagcttcctggagcagagcgagcacaagaccagcgacgccgacatcaagagcagcgagaccggcgccttcagagtgcccagccccggcatggaggaggccggctgcagcagagagatgcagagcagcttcaccagaagagacctgaacgagagccccgtgaagagcttcgtgagcatcagcgaggccaccgactgcctggtggacttcaagaagcaggtgaccgtgcagcccggcagcagaaccagaaccaaggccggcagaggcagaagaagaaagttctag

SEQ ID NO: 190430 - DNA, 1929 bp, Artificial Sequence
  derived and/or modified sequence
atgaccgaggaggagcagttcgccctggccctgaagatgagcgagcaggaggccagagaggtgaacagccaggaggaggaggaggaggagctgctgagaaaggccatcgccgagagcctgaacagctgcagacccagcgacgccagcgccaccagaagcagacccctggccaccggccccagcagccagagccaccaggagaagaccaccgacagcggcctgaccgagggcatctggcagctggtgccccccagcctgttcaagggcagccacatcagccagggcaacgaggccgaggagagagaggagccctgggaccacaccgagaagaccgaggaggagcccgtgagcggcagcagcggcagctgggaccagagcagccagcccgtgttcgagaacgtgaacgtgaagagcttcgacagatgcaccggccacagcgccgagcacacccagtgcggcaagccccaggagagcaccggcagaggcagcgccttcctgaaggccgtgcagggcagcggcgacaccagcagacactgcctgcccaccctggccgacgccaagggcctgcaggacaccggcggcaccgtgaactacttctggggcatccccttctgccccgacggcgtggaccccaaccagtacaccaaggtgatcctgtgccagctggaggtgtaccagaagagcctgaagatggcccagagacagctgctgaacaagaagggcttcggcgagcccgtgctgcccagaccccccagcctgatccagaacgagtgcggccagggcgagcaggccagcgagaagaacgagtgcatcagcgaggacatgggcgacgaggacaaggaggagagacaggagagcagagccagcgactggcacagcaagaccaaggacttccaggagagcagcatcaagagcctgaaggagaagctgctgctggaggaggagcccaccaccagccacggccagagcagccagggcatcgtggaggagaccagcgaggagggcaacagcgtgcccgccagccagagcgtggccgccctgaccagcaagagaagcctggtgctgatgcccgagagcagcgccgaggagatcaccgtgtgccccgagacccagctgagcagcagcgagaccttcgacctggagagagaggtgagccccggcagcagagacatcctggacggcgtgagaatcatcatggccgacaaggaggtgggcaacaaggaggacgccgagaaggaggtggccatcagcaccttcagcagcagcaaccaggtgagctgccccctgtgcgaccagtgcttcccccccaccaagatcgagagacacgccatgtactgcaacggcctgatggaggaggacaccgaggtgctgaccagaagacagaaggaggccaagaccaagagcgacagcggcaccgccgcccagaccagcctggacatcgacaagaacgagaagtgctacctgtgcaagagcctggtgcccttcagagagtaccagtgccacgtggacagctgcctgcagctggccaaggccgaccagggcgacggccccgagggcagcggcagagcctgcagcaccgtggagggcaagtggcagcagagactgaagaaccccaaggagaagggccacagcgagggcagactgctgagcttcctggagcagagcgagcacaagaccagcgacgccgacatcaagagcagcgagaccggcgccttcagagtgcccagccccggcatggaggaggccggctgcagcagagagatgcagagcagcttcaccagaagagacctgaacgagagccccgtgaagagcttcgtgagcatcagcgaggccaccgactgcctggtggacttcaagaagcaggtgaccgtgcagcccggcagcagaaccagaaccaaggccggcagaggcagaagaagaaagttctag

SEQ ID NO: 190431 - DNA, 2160 bp, Artificial Sequence
  derived and/or modified sequence
atgcccagaagaaagaagaaggtgaaggaggtgagcgagagcagaaacctggagaagaaggacgtggagaccaccagcagcgtgagcgtgaagagaaagagaagactggaggacgccttcatcgtgatcagcgacagcgacggcgaggagcccaaggaggagaacggcctgcagaagaccaagaccaagcagagcaacagagccaagtgcctggccaagagaaagatcgcccagatgaccgaggaggagcagttcgccctggccctgaagatgagcgagcaggaggccagagaggtgaacagccaggaggaggaggaggaggagctgctgagaaaggccatcgccgagagcctgaacagctgcagacccagcgacgccagcgccaccagaagcagacccctggccaccggccccagcagccagagccaccaggagaagaccaccgacagcggcctgaccgagggcatctggcagctggtgccccccagcctgttcaagggcagccacatcagccagggcaacgaggccgaggagagagaggagccctgggaccacaccgagaagaccgaggaggagcccgtgagcggcagcagcggcagctgggaccagagcagccagcccgtgttcgagaacgtgaacgtgaagagcttcgacagatgcaccggccacagcgccgagcacacccagtgcggcaagccccaggagagcaccggcagaggcagcgccttcctgaaggccgtgcagggcagcggcgacaccagcagacactgcctgcccaccctggccgacgccaagggcctgcaggacaccggcggcaccgtgaactacttctggggcatccccttctgccccgacggcgtggaccccaaccagtacaccaaggtgatcctgtgccagctggaggtgtaccagaagagcctgaagatggcccagagacagctgctgaacaagaagggcttcggcgagcccgtgctgcccagaccccccagcctgatccagaacgagtgcggccagggcgagcaggccagcgagaagaacgagtgcatcagcgaggacatgggcgacgaggacaaggaggagagacaggagagcagagccagcgactggcacagcaagaccaaggacttccaggagagcagcatcaagagcctgaaggagaagctgctgctggaggaggagcccaccaccagccacggccagagcagccagggcatcgtggaggagaccagcgaggagggcaacagcgtgcccgccagccagagcgtggccgccctgaccagcaagagaagcctggtgctgatgcccgagagcagcgccgaggagatcaccgtgtgccccgagacccagctgagcagcagcgagaccttcgacctggagagagaggtgagccccggcagcagagacatcctggacggcgtgagaatcatcatggccgacaaggaggtgggcaacaaggaggacgccgagaaggaggtggccatcagcaccttcagcagcagcaaccaggtgagctgccccctgtgcgaccagtgcttcccccccaccaagatcgagagacacgccatgtactgcaacggcctgatggaggaggacaccgtgctgaccagaagacagaaggaggccaagaccaagagcgacagcggcaccgccgcccagaccagcctggacatcgacaagaacgagaagtgctacctgtgcaagagcctggtgcccttcagagagtaccagtgccacgtggacagctgcctgcagctggccaaggccgaccagggcgacggccccgagggcagcggcagagcctgcagcaccgtggagggcaagtggcagcagagactgaagaaccccaaggagaagggccacagcgagggcagactgctgagcttcctggagcagagcgagcacaagaccagcgacgccgacatcaagagcagcgagaccggcgccttcagagtgcccagccccggcatggaggaggccggctgcagcagagagatgcagagcagcttcaccagaagagacctgaacgagagccccgtgaagagcttcgtgagcatcagcgaggccaccgactgcctggtggacttcaagaagcaggtgaccgtgcagcccggcagcagaaccagaaccaaggccggcagaggcagaagaagaaagttctag

SEQ ID NO: 190432 - DNA, 96 bp, Artificial Sequence
  derived and/or modified sequence
atgcccagaagaaagaagaaggtgaaggaggtgagcgagagcagaaacctggagaagaaggacgtggagaccaccagcagcgtgagcgtgaagtag

SEQ ID NO: 190433 - DNA, 2163 bp, Artificial Sequence
  derived and/or modified sequence
atgccacgccggaagaagaaggtgaaggaggtcagtgagtcaaggaacctagaaaagaaggacgtggagacaacatctagcgtgagtgtgaagaggaaaaggaggctagaagatgcctttattgtcatttcggatagtgatggtgaggagcccaaagaagagaacggtctgcagaagacaaaaaccaaacaaagcaaccgcgctaagtgtttagctaagaggaaaatcgcacagatgaccgaggaggagcagttcgctctcgcactcaagatgtcagaacaggaggcccgagaggtgaattcacaggaagaagaagaggaggagctgctgcggaaagccattgctgagagcctcaactcgtgcaggccctccgacgcgagcgccacacgctctcgccccctggctaccggtccttcgtcacagtcccatcaagaaaagacaaccgacagtggactgactgaaggaatttggcagcttgtcccccccagtctgtttaaagggtcacacattagtcagggtaacgaagctgaggagcgggaagagccctgggaccacaccgagaagaccgaggaagagcctgtctctggctcatctggctcatgggatcagtcatcgcagcctgtgttcgaaaatgttaatgttaaaagcttcgatcgctgcacaggtcacagcgccgaacacacacagtgtggcaaaccacaggagtctacagggcgaggctctgccttcttgaaggcagtccagggtagcggcgataccagcagacactgtctgcccaccctcgctgacgccaaaggccttcaggatactggcggcactgtcaattacttctgggggatccccttttgcccggatggtgtagaccctaaccagtatacaaaggttatcctctgccagctggaagtgtaccaaaaatctctgaagatggcccagcgtcaattactcaacaaaaagggcttcggtgagccggtcttaccaagaccgcctagcctcattcagaatgagtgcgggcagggggagcaagcgtccgagaaaaacgaatgcatctcagaggacatgggcgatgaggacaaagaagagcgccaggagtcaagagcgtctgattggcactcaaagaccaaggattttcaagaatctagcattaaaagtctgaaggagaagctcctattggaggaagagcccacaacctcacacgggcaatcgtcccaggggatcgtggaagaaacaagtgaggaggggaattccgtcccagcgagccagtcggtggccgctctgacttccaaacgaagcctggtactcatgcccgagtcatcagcagaagagatcaccgtttgcccggaaacccagctctctagcagcgagacattcgaccttgagcgtgaggtaagcccaggttcaagggatatcctggacggagtcagaatcatcatggccgataaggaagtcggcaacaaagaagacgccgaaaaggaggtagcaataagcactttcagtagctcgaatcaggtgtcctgtcctttatgcgaccagtgcttcccccccacaaaaattgaacgccatgctatgtattgcaatggcctgatggaggaggacacagaggtcttaacacgacgacagaaggaggctaaaaccaaatctgactcaggcactgccgcacagacttccctagacatcgacaaaaatgagaagtgctatctctgtaagagcctcgtgccgtttcgtgaataccaatgtcatgtggattcctgtttacagctcgccaaggcagatcagggtgacggacccgaaggatctggccgagcctgctcgacagtagaaggtaagtggcagcaacgcctgaagaacccaaaagaaaaagggcacagcgaggggagacttctctccttcctggaacaatctgaacataaaaccagcgatgctgacattaaatcatctgaaactggcgccttccgcgtccctagcccgggtatggaagaagcaggatgtagccgggagatgcagtcctctttcaccaggcgggatcttaacgaatcaccagtgaaaagctttgtcagcatcagcgaggccacagattgcctggtggattttaagaaacaggtgaccgtacagcctgggtctcgtacccggacgaaggccgggcgcggcaggaggcgtaaattctag

SEQ ID NO: 190434 - DNA, 1929 bp, Artificial Sequence
  derived and/or modified sequence
atgactgaggaagaacaatttgccctcgccctcaaaatgtcggagcaggaggcccgggaggtgaatagccaggaagaagaggaggaggagttgcttagaaaagccatcgcagagtcgctcaacagttgcaggccctctgacgcaagcgcgactaggtcccgcccactcgccaccgggccatcttctcagagtcatcaggaaaagacgacagattcagggctgaccgaaggcatttggcagctggtgccaccatctcttttcaaaggatcccacatttcccaaggaaacgaggccgaggaaagagaggagccttgggatcatacagagaagacagaggaggagcctgtgtcaggttccagcgggtcatgggatcagtcatcgcaacctgtgtttgagaacgttaatgtcaagagcttcgaccgctgcaccggacattcagctgagcatactcaatgcgggaagcctcaagagtccaccggtagaggctcggcctttttgaaagctgtccagggatccggcgatacatcccggcactgcctgcccactctggcagatgcgaagggactgcaagacacaggaggaacagttaactatttctggggcatccctttttgtccagacggggtggaccccaaccagtacacaaaggtaatcctttgccagcttgaggtgtatcagaagtccctgaagatggcccagcgtcagctgttgaataagaaaggctttggggaacctgtgttacccaggcccccttcacttatacaaaatgaatgtggacagggcgaacaagcaagtgaaaagaacgaatgcatctccgaagacatgggggacgaggacaaggaggaacggcaggagagcagggcgagtgactggcactctaaaactaaggatttccaggagagctctatcaaaagtctcaaagaaaaactcctgctagaagaggagcctaccacaagccacggtcagtcctcacagggcattgtggaagagacttcagaagagggcaacagcgtgcccgcaagccagtccgtagctgctctgactagtaagcgctcactagtcctgatgcccgaatcaagtgcggaagagattacagtgtgtccagaaacccaattgtcctcaagcgaaacttttgatctggagcgcgaggttagcccaggatctcgagacatactcgatggggtgaggataatcatggccgataaggaggtcggaaataaggaagacgcagaaaaggaggtggctatcagtaccttcagctcctccaatcaggtgagttgtcctctgtgcgaccagtgctttcccccaactaaaattgagaggcatgccatgtactgcaacggccttatggaggaagatacagaagtacttacgcggaggcagaaggaggctaaaacgaaatccgactccgggacagcggctcagacgtctctcgatatagacaaaaacgagaaatgttacttgtgtaaaagcttggttccattccgtgagtatcagtgccacgttgactcctgtctgcagttagcaaaagccgatcagggagacggtcccgagggatctggcagggcatgtagtaccgtcgaggggaaatggcaacagcgactgaagaatccgaaagaaaaaggtcacagtgaaggccgacttctcagctttctcgagcaaagcgagcacaaaacgtcggatgctgatatcaaatcaagtgagacaggcgctttccgagtgccttccccaggaatggaagaggcaggttgtagccgcgagatgcagtcttcttttacgaggcgcgacctaaatgaaagccccgtcaagtcttttgtctctatcagcgaggccacagattgcctggtggactttaagaaacaggtgaccgtgcagcctgggtctcgtactcggaccaaggctgggagaggcaggagaagaaagttttag

SEQ ID NO: 190435 - DNA, 2160 bp, Artificial Sequence
  derived and/or modified sequence
atgccgcgaaggaagaagaaagtgaaggaggtaagcgagagccgcaacctcgaaaagaaggatgttgagacaaccagcagtgtgagtgtcaaaagaaaaagacgcttagaggacgcatttattgtcatctcggactctgacggagaagaaccaaaggaggagaacggccttcagaagacaaaaacgaagcaaagtaatagagcaaagtgcctggctaagcgtaagatcgcccagatgactgaagaggagcagtttgctcttgcgttgaagatgtccgagcaggaagccagagaagtcaatagccaagaagaggaggaggaagagcttctccgtaaggccatagccgaatctctcaactcatgtaggccgtccgacgcatccgccacaaggtcgcgacctcttgctacaggaccctcttcacagagtcatcaagaaaagacaactgactccggactgacagaggggatatggcaattagttcccccctctctgtttaagggatcccatatcagccagggcaacgaggcagaggagagagaggaaccatgggaccacacggagaagaccgaagaggagcctgtgtccggatcttcgggcagctgggatcaatcatcccagcctgtatttgagaatgtcaatgtgaagtccttcgatagatgcactggtcattccgctgagcatactcagtgtggtaaaccgcaagagtcaactggccgaggtagcgcttttctgaaggcagtgcagggaagcggcgatacttcacggcactgcctccccacgctcgcagatgctaaaggcctgcaagatactggaggcaccgtaaactacttctggggtattcctttctgtcccgacggtgtggaccctaatcagtacactaaggtgattttgtgccaactcgaggtgtatcagaaatctctgaaaatggcccaaaggcagttgctcaataagaagggttttggcgagcctgtactccctaggcctccatcactcatacagaacgaatgcggccagggagaacaggcttctgaaaagaacgaatgcataagtgaggatatgggggacgaagacaaggaagaacggcaggagagtagggccagcgattggcactcaaaaaccaaggacttccaagagagtagcattaaaagtcttaaggagaagttgcttctggaggaagaaccaaccactagtcacggccagtcttcacagggcattgtggaggaaaccagtgaagaagggaactccgtgcccgcctcccagtcagtggccgcactcacgtccaagcgctccctggtgctcatgccagagagctccgcggaagagatcactgtgtgtccagaaacccaactgagttcttcagagacattcgatctggagcgcgaggtttcacccggaagccgtgatatcctcgatggcgtccgcattatcatggccgacaaagaagtcggcaataaggaggacgcagaaaaggaagttgccatttctacattttcatcttcaaaccaggtgtcttgtccactttgcgatcagtgtttccctccaacgaagatcgagcgccacgctatgtactgcaacggactcatggaggaggatacagtgctcaccagacggcagaaagaagctaagactaagagtgacagcggcaccgctgctcagacatctttagacatagataaaaacgaaaagtgctatttgtgcaagtcattggtgccctttagggaataccaatgccacgtcgactcttgtctacagctggcgaaagcagaccaaggggatggcccagaggggagtggacgtgcgtgttcaacagtggaaggtaaatggcagcagcgactgaaaaatccgaaagagaagggccactctgaaggacgactcctgagctttctggagcagtccgaacacaagacaagtgacgccgatattaagtcctccgagaccggagcattcagagtgccttctcccgggatggaggaggctggctgttcgcgggagatgcagtcgtcttttactcgtcgtgacttaaatgaatcacccgtcaagtcgttcgtgagtatcagcgaagccacagattgtcttgtggactttaagaaacaggtcacagttcagccagggtccaggacacgtaccaaggcaggccgtggcagacggcggaagttctag

SEQ ID NO: 190436 - DNA, 96 bp, Artificial Sequence
  derived and/or modified sequence
atgccaaggcggaaaaaaaaagtgaaggaagtctcggagtctagaaatttggagaaaaaagatgtggaaacaacttcttctgtgagcgtgaaatag

SEQ ID NO: 190437 - DNA, 2160 bp, Artificial Sequence
  derived and/or modified sequence
atgcccaggagaaagaagaaagtgaaggaggtgagcgagtcgcggaacctggaaaaaaaggatgtagagaccacctcatccgtgtctgtgaagaggaagcgccgccttgaggatgcctttattgtcataagcgattcagacggtgaagagccaaaggaggagaacggtctgcagaagacgaaaacaaaacagtctaatagagccaaatgtctcgccaagcgtaaaatcgcacagatgactgaagaagaacagtttgcgctggcgctgaagatgagtgaacaggaagcaagagaggttaatagccaagaggaggaagaagaagaactgctcagaaaggccatcgcagaaagcctcaatagctgccgcccaagtgacgcgtcagcaacaagatctcggccactcgccaccggtccttcctctcaatcgcaccaggagaagacgacagactcaggtcttaccgaggggatctggcagctggttcctccctcgctctttaaaggctctcatatcagtcagggcaatgaggcagaagagagagaggaaccatgggatcacaccgagaaaaccgaagaggagcccgtttctggaagctctgggtcctgggatcaaagctctcaacctgtgttcgagaatgtgaacgtaaaatcattcgacagatgtaccgggcactccgctgagcacacccagtgtggcaagccacaggagtcgaccggcaggggctcagctttcctgaaagctgtccaagggagtggggatacatcacgccactgtctacctaccctggcagacgccaagggtctccaagacacaggcggaacggtcaactatttctggggaattcctttttgtcccgacggagtagatcccaaccagtacacaaaagtgatactgtgccagttggaggtctatcaaaaatcgctcaagatggcccagcgacaattactcaataagaagggctttggcgagccagtactaccgagacccccttcgctcatccagaatgaatgtgggcagggcgaacaggcctctgagaaaaacgagtgcattagcgaggatatgggggatgaagacaaggaggagagacaggagagcagagcgagcgattggcactctaagacgaaagatttccaagagtcttctatcaaatcactgaaagagaaactgctcttggaggaggagccgactacttcgcatggccagtctagtcagggaatagtggaagagacatcagaagagggtaacagcgtgcccgcaagtcagagcgtagccgctctgaccagcaagagatccctggtgttgatgcccgaaagctccgcagaggagattaccgtgtgcccagagacccagcttagcagtagcgaaacattcgatctggagagggaggtatcaccgggcagtagagacattcttgacggagtgcggattattatggcagacaaagaagtgggaaataaggaagatgctgagaaagaagtggctatcagtacgttttctagttcgaatcaggtctcttgcccattatgcgaccagtgtttcccccctaccaagatcgaacgacacgccatgtattgcaacgggctgatggaagaggacactgtgttaacacggagacagaaagaggcgaagactaagtcggacagtgggacagccgcccagacatccctggacattgataagaatgagaaatgctatctttgcaaatctctcgtcccgttccgcgaataccagtgccatgtggatagttgtctgcagctcgccaaggctgaccaaggcgacgggccggaaggctcaggccgggcctgtagcaccgtcgagggcaaatggcaacagagattgaagaatccaaaggagaaaggtcactctgagggacgattactgagttttctggaacagtcagaacacaaaacctctgacgcagacattaaaagctccgaaaccggtgcgtttcgggtccctagccctggcatggaagaggcagggtgtagcagagagatgcagtctagctttacgagacgggacctgaatgaatcacctgtaaagtcttttgttagtatcagcgaagcgacagactgtctcgtcgattttaaaaaacaggttacagtgcagccaggctctcgcacccgcactaaagccggccgtgggcgacgcagaaaattctag

SEQ ID NO: 190438 - DNA, 2163 bp, Artificial Sequence
  derived and/or modified sequence
atgcccaggaggaagaagaaggtgaaggaggtgtctgagagcaggaacctggagaagaaggatgtggagaccaccagctctgtgtctgtgaagaggaagaggcggctggaggatgccttcatcgtcatcagtgacagtgatggagaggagcccaaggaggagaatggcctgcagaagaccaagaccaagcagagcaacagagccaagtgcctggccaagaggaagatcgcccagatgacagaggaggagcagtttgccctggccctgaagatgtctgagcaggaggcccgggaggtgaacagccaggaggaggaggaggaggagctgctgaggaaggccatcgccgagagcctgaacagctgccggcccagtgatgccagcgccaccaggagccggcccctggccaccggccccagcagccagagccaccaggagaagaccacagacagcggcctgacagagggcatctggcagctggtgccccccagcctcttcaagggcagccacatcagccagggcaatgaggccgaggagcgggaggagccctgggaccacacagagaagacagaggaggagcctgtgtctggcagcagcggctcctgggaccagagcagccagcctgtgtttgaaaatgtgaatgtgaagagctttgaccgctgcaccggccacagcgctgagcacacccagtgtgggaagccccaggagagcacaggccggggcagcgccttcctgaaggctgtgcagggcagcggggacaccagccgccactgcctgcccaccctggctgatgccaagggcctgcaggacaccggcggcaccgtgaactacttctggggcatccccttctgcccagatggagtggaccccaaccagtacaccaaggtgatcctgtgccagctggaggtgtaccagaagagcctgaagatggcccagaggcagctgctgaacaagaagggctttggagagcctgtgctgccccggccccccagcctcatccagaatgaatgtggccagggcgagcaggccagcgagaagaatgaatgcatcagcgaggacatgggagatgaggacaaggaggagcggcaggagagccgggccagtgactggcacagcaagaccaaggacttccaggagagcagcatcaagagcctgaaggagaagctgctgctggaggaggagcccaccaccagccacggccagagcagccagggcatcgtggaggagaccagcgaggagggcaacagcgtgcctgccagccagagcgtggccgccctgaccagcaagaggagcctggtgctgatgcctgagagcagcgctgaggagatcaccgtgtgcccagagacccagctgagcagcagcgagacctttgacctggagcgggaggtgtccccaggcagccgggacatcctggatggagtgcgcatcatcatggctgacaaggaggtgggcaacaaggaggatgctgagaaggaggtggccatcagcaccttcagcagcagcaaccaggtgtcctgccccctgtgtgaccagtgcttcccccccaccaagattgaaagacatgccatgtactgcaatggcctgatggaggaggacacagaggtgctgacccggcggcagaaggaggccaagaccaagagtgacagcggcacagctgcccagaccagcctggacatcgacaagaatgagaagtgctacctgtgcaagagcctggtgcccttccgggagtaccagtgccacgtggacagctgcctgcagctggccaaggctgaccagggagatggccctgagggcagcggccgggcctgcagcacagtggagggcaagtggcagcagaggctgaagaaccccaaggagaagggccacagcgagggccgcctgctgtccttcctggagcagagcgagcacaagaccagtgatgctgacatcaagagcagcgagactggagccttccgggtgcccagccctggcatggaggaggccggctgcagccgggagatgcagagcagcttcacccggcgggacctgaatgaaagccctgtgaagagctttgtgtccatcagcgaggccacagactgcctggtggacttcaagaagcaggtgacagtgcagcccggcagcaggaccaggaccaaggccggccggggcagaagaaggaagttctag

SEQ ID NO: 190439 - DNA, 1929 bp, Artificial Sequence
  derived and/or modified sequence
atgacagaggaggagcagtttgccctggccctgaagatgtctgagcaggaggcccgggaggtgaacagccaggaggaggaggaggaggagctgctgaggaaggccatcgccgagagcctgaacagctgccggcccagtgatgccagcgccaccaggagccggcccctggccaccggccccagcagccagagccaccaggagaagaccacagacagcggcctgacagagggcatctggcagctggtgccccccagcctcttcaagggcagccacatcagccagggcaatgaggccgaggagcgggaggagccctgggaccacacagagaagacagaggaggagcctgtgtctggcagcagcggctcctgggaccagagcagccagcctgtgtttgaaaatgtgaatgtgaagagctttgaccgctgcaccggccacagcgctgagcacacccagtgtgggaagccccaggagagcacaggccggggcagcgccttcctgaaggctgtgcagggcagcggggacaccagccgccactgcctgcccaccctggctgatgccaagggcctgcaggacaccggcggcaccgtgaactacttctggggcatccccttctgcccagatggagtggaccccaaccagtacaccaaggtgatcctgtgccagctggaggtgtaccagaagagcctgaagatggcccagaggcagctgctgaacaagaagggctttggagagcctgtgctgccccggccccccagcctcatccagaatgaatgtggccagggcgagcaggccagcgagaagaatgaatgcatcagcgaggacatgggagatgaggacaaggaggagcggcaggagagccgggccagtgactggcacagcaagaccaaggacttccaggagagcagcatcaagagcctgaaggagaagctgctgctggaggaggagcccaccaccagccacggccagagcagccagggcatcgtggaggagaccagcgaggagggcaacagcgtgcctgccagccagagcgtggccgccctgaccagcaagaggagcctggtgctgatgcctgagagcagcgctgaggagatcaccgtgtgcccagagacccagctgagcagcagcgagacctttgacctggagcgggaggtgtccccaggcagccgggacatcctggatggagtgcgcatcatcatggctgacaaggaggtgggcaacaaggaggatgctgagaaggaggtggccatcagcaccttcagcagcagcaaccaggtgtcctgccccctgtgtgaccagtgcttcccccccaccaagattgaaagacatgccatgtactgcaatggcctgatggaggaggacacagaggtgctgacccggcggcagaaggaggccaagaccaagagtgacagcggcacagctgcccagaccagcctggacatcgacaagaatgagaagtgctacctgtgcaagagcctggtgcccttccgggagtaccagtgccacgtggacagctgcctgcagctggccaaggctgaccagggagatggccctgagggcagcggccgggcctgcagcacagtggagggcaagtggcagcagaggctgaagaaccccaaggagaagggccacagcgagggccgcctgctgtccttcctggagcagagcgagcacaagaccagtgatgctgacatcaagagcagcgagactggagccttccgggtgcccagccctggcatggaggaggccggctgcagccgggagatgcagagcagcttcacccggcgggacctgaatgaaagccctgtgaagagctttgtgtccatcagcgaggccacagactgcctggtggacttcaagaagcaggtgacagtgcagcccggcagcaggaccaggaccaaggccggccggggcagaagaaggaagttctag

SEQ ID NO: 190440 - DNA, 2160 bp, Artificial Sequence
  derived and/or modified sequence
atgcccaggaggaagaagaaggtgaaggaggtgtctgagagcaggaacctggagaagaaggatgtggagaccaccagctctgtgtctgtgaagaggaagaggcggctggaggatgccttcatcgtcatcagtgacagtgatggagaggagcccaaggaggagaatggcctgcagaagaccaagaccaagcagagcaacagagccaagtgcctggccaagaggaagatcgcccagatgacagaggaggagcagtttgccctggccctgaagatgtctgagcaggaggcccgggaggtgaacagccaggaggaggaggaggaggagctgctgaggaaggccatcgccgagagcctgaacagctgccggcccagtgatgccagcgccaccaggagccggcccctggccaccggccccagcagccagagccaccaggagaagaccacagacagcggcctgacagagggcatctggcagctggtgccccccagcctcttcaagggcagccacatcagccagggcaatgaggccgaggagcgggaggagccctgggaccacacagagaagacagaggaggagcctgtgtctggcagcagcggctcctgggaccagagcagccagcctgtgtttgaaaatgtgaatgtgaagagctttgaccgctgcaccggccacagcgctgagcacacccagtgtgggaagccccaggagagcacaggccggggcagcgccttcctgaaggctgtgcagggcagcggggacaccagccgccactgcctgcccaccctggctgatgccaagggcctgcaggacaccggcggcaccgtgaactacttctggggcatccccttctgcccagatggagtggaccccaaccagtacaccaaggtgatcctgtgccagctggaggtgtaccagaagagcctgaagatggcccagaggcagctgctgaacaagaagggctttggagagcctgtgctgccccggccccccagcctcatccagaatgaatgtggccagggcgagcaggccagcgagaagaatgaatgcatcagcgaggacatgggagatgaggacaaggaggagcggcaggagagccgggccagtgactggcacagcaagaccaaggacttccaggagagcagcatcaagagcctgaaggagaagctgctgctggaggaggagcccaccaccagccacggccagagcagccagggcatcgtggaggagaccagcgaggagggcaacagcgtgcctgccagccagagcgtggccgccctgaccagcaagaggagcctggtgctgatgcctgagagcagcgctgaggagatcaccgtgtgcccagagacccagctgagcagcagcgagacctttgacctggagcgggaggtgtccccaggcagccgggacatcctggatggagtgcgcatcatcatggctgacaaggaggtgggcaacaaggaggatgctgagaaggaggtggccatcagcaccttcagcagcagcaaccaggtgtcctgccccctgtgtgaccagtgcttcccccccaccaagattgaaagacatgccatgtactgcaatggcctgatggaggaggacacagtgctgacccggcggcagaaggaggccaagaccaagagtgacagcggcacagctgcccagaccagcctggacatcgacaagaatgagaagtgctacctgtgcaagagcctggtgcccttccgggagtaccagtgccacgtggacagctgcctgcagctggccaaggctgaccagggagatggccctgagggcagcggccgggcctgcagcacagtggagggcaagtggcagcagaggctgaagaaccccaaggagaagggccacagcgagggccgcctgctgtccttcctggagcagagcgagcacaagaccagtgatgctgacatcaagagcagcgagaccggggccttccgggtgcccagccctggcatggaggaggccggctgcagccgggagatgcagagcagcttcacccggcgggacctgaatgaaagccctgtgaagagctttgtgtccatcagcgaggccacagactgcctggtggacttcaagaagcaggtgacagtgcagcccggcagcaggaccaggaccaaggccggccggggcagaagaaggaagttctag

SEQ ID NO: 190441 - DNA, 96 bp, Artificial Sequence
  derived and/or modified sequence
atgcccaggaggaagaagaaggtgaaggaggtgtctgagagcaggaacctggagaagaaggatgtggagaccaccagctctgtgtctgtgaagtag

SEQ ID NO: 190442 - DNA, 2163 bp, Artificial Sequence
  derived and/or modified sequence
atgccccggcggaagaagaaggtgaaggaggtgagcgagagccggaacttggaaaagaaagatgtggagaccacatccagcgtgtcagtaaaaagaaaaaggcgcttggaggatgcatttatcgtgatctcagacagcgacggagaagagccaaaggaagaaaatggcctgcagaagaccaagactaagcagtccaaccgcgcgaaatgcctagctaagcgaaagatagctcagatgacagaggaggaacagtttgctctggcacttaaaatgtctgagcaggaagcccgcgaggtgaactcccaggaagaagaggaagaggagttgcttcgtaaggccatcgcagagagcttgaattcatgccgcccatccgacgcctccgctacaaggtctcggcccctcgctactggtccatcttcgcagtcccaccaggaaaaaacaacagattccggcttaacagaagggatctggcagctcgttccaccttccttgtttaaggggagccacataagccagggtaatgaagcagaggagagggaggagccctgggatcatacggaaaagactgaagaggagccagtctcagggagttctgggagctgggaccagagttctcagcccgtttttgaaaatgtaaatgtgaaatcttttgaccggtgcaccggacattctgcagaacacacacagtgcggcaagccacaggagtctacaggtaggggatctgcctttcttaaggcagtacagggcagcggggacacatctcgacactgcctacctactctggcagatgctaaaggactgcaggataccgggggaacagtcaactatttttggggtatacccttctgtcccgatggcgttgatcccaaccagtatactaaagtcattctgtgtcagctggaggtgtaccagaaatcactgaaaatggcccagcgtcaacttttaaacaaaaagggtttcggtgaaccagtgttgcctcgccccccttccctgatacagaatgaatgcggtcagggggaacaggcatccgaaaagaatgagtgcattagcgaggacatgggggatgaggacaaggaagagcggcaggaatcccgcgctagtgattggcactccaaaacgaaagacttccaggaatcgtcaatcaagtctctgaaagagaaacttctgctcgaggaagaaccaacaacatcacacggtcaatcaagccaaggcatcgtggaggagactagcgaggaaggcaattccgttcccgcatcacagtcggtggcagctcttacctcaaaaaggtccttggttctgatgcccgaaagctccgccgaagaaatcaccgtgtgtcctgaaactcagctctccagctccgaaacatttgacttggaacgggaggtctcgcctggcagcagggacatacttgacggagtcagaatcatcatggcagacaaggaagttgggaataaagaggacgccgaaaaggaggtggctatttctacttttagcagctcaaaccaggtttcgtgtccgctttgcgaccaatgttttccccctaccaaaattgaaaggcatgccatgtattgcaatggtctgatggaggaagacaccgaggtgcttactagaagacaaaaagaggccaagacgaaatcagattccgggaccgccgcgcagacctccttggacatagacaagaacgagaagtgctacctttgcaaaagccttgtgcccttccgagagtaccagtgccacgtggacagttgtctgcagctcgcaaaagcggatcaaggagacggccctgagggttcaggaagagcgtgttcaaccgtcgaggggaagtggcagcagcgcctgaaaaacccaaaggaaaagggtcactctgaaggacgattgcttagctttctggaacagtccgaacacaagacctcggatgccgacatcaagtccagtgagaccggtgcgtttcgggtccccagccccggtatggaggaagccggatgctccagggagatgcagtccagcttcacccgccgcgatctgaatgaaagccctgtcaaaagttttgtcagcatcagtgaagctacagattgcctggtggattttaagaaacaagtgactgtgcagcctggcagtagaaccaggactaaagcaggaagaggccgacgaaggaaattctag

SEQ ID NO: 190443 - DNA, 1929 bp, Artificial Sequence
  derived and/or modified sequence
atgaccgaggaggagcagttcgccctggccctgaagatgagcgagcaggaggcacgagaggttaactctcaggaggaggaagaagaggagctgctgagaaaagcaatcgccgagagccttaatagctgcaggccttctgatgcctcggccactaggtcgcgccctcttgctacaggcccttcctcccagtcacaccaggaaaagactacagacagtgggcttactgaagggatttggcagctggtacctccaagtctgttcaagggctcgcatatttcacagggcaatgaggctgaggagcgcgaagagccgtgggaccatacagaaaagacagaggaggagcctgttagcggctcttccggcagttgggaccagtcctcccagcccgtatttgaaaacgtcaatgttaaaagcttcgacagatgtactggccattccgcggaacatactcagtgcggaaaaccacaggaatcgaccggacgtgggtccgccttccttaaagccgtgcagggatctggggatacctccaggcactgcctgcctactcttgccgatgcaaaaggtttgcaggatacaggcggaaccgttaactacttctgggggatcccgttctgtcccgacggcgtggaccctaatcagtatacaaaagtcatcctgtgtcagctggaggtgtaccagaaatctctgaaaatggcccagcgccagcttttgaacaagaaagggttcggagaacctgtgttgcctcgacccccatctctaatccagaatgaatgcgggcaaggtgagcaagccagtgagaagaacgagtgcatctcagaggacatgggcgatgaagacaaagaggaacggcaagagagtcgtgcttccgattggcatagcaaaacaaaggatttccaggagtcttccataaaaagcctcaaagagaagcttctattggaagaagaacctactaccagccacggccagtcttctcagggcatagtggaagagacatccgaggagggaaattcagtgcccgcttctcagagtgttgcggcactgacaagcaagcggtcattggttctgatgcctgaatcgtctgctgaagagattaccgtgtgccccgaaacacaattgtccagttcagaaactttcgacctagaaagggaggtctcaccaggaagtagggacatcttggatggcgttaggatcattatggccgacaaggaggtcgggaacaaagaggacgccgaaaaagaagtggccatttcaactttctctagttccaaccaagtatcatgcccactttgtgaccagtgttttccccccacaaaaatcgaaagacatgctatgtactgcaacggcctgatggaggaagacactgaggtcttgactcggcggcagaaggaggcaaagacaaagtcagattcggggacggccgcacaaacatccctggacatcgacaagaatgagaaatgctatctctgcaagagtctcgtccctttccgggaatatcagtgccacgtcgactcctgcctgcagctggcaaaagctgatcagggtgacgggcctgaaggctcagggagagcgtgttctaccgtggaaggaaagtggcagcagcgtctgaagaacccgaaggagaagggccattcagaggggcgtttgctgtcattcctcgaacaaagcgaacacaagacctcagatgcagatattaagagctcagagacaggcgcctttcgggtcccttctccaggcatggaagaagccggatgttcaagggaaatgcaatctagtttcacaagacgcgaccttaatgaatcccccgtcaagtccttcgtctcaatcagcgaagcgactgactgtctcgtggattttaaaaaacaggtgaccgtccagcctgggagtagaactagaacaaaagccgggaggggtaggcggcgtaagttctag

SEQ ID NO: 190444 - DNA, 2160 bp, Artificial Sequence
  derived and/or modified sequence
atgccccggcggaagaagaaggtgaaggaggtgagcgagagccggaatttggagaagaaggacgtagaaacaaccagtagtgtgagcgtgaaaaggaagagacgcctggaagacgcctttattgtgatctctgacagtgacggtgaggagccgaaagaagaaaacggactccaaaaaacaaaaacaaaacagagcaatagggccaaatgcctggccaagcggaaaatagctcaaatgacagaggaggaacagtttgctctggctctgaagatgagcgagcaggaagctagggaagtcaatagccaggaagaggaagaggaggaattgctccgaaaggccatagccgaatcacttaatagctgcaggcccagcgatgcttctgccactcggtctaggccgttggctactgggccatcatcccagagtcaccaggaaaaaactactgattcaggacttaccgagggaatttggcaactagtaccccctagcctgtttaaaggcagccacatctcccaggggaacgaagcggaagaacgggaagagccctgggatcacactgagaaaacggaggaggaacccgtaagcggcagcagcgggagttgggaccagagcagtcagccagtcttcgagaatgtgaatgtaaagagctttgatcggtgcacaggccacagcgcagaacatacgcaatgtggcaagccacaggagagtaccggaaggggctcagcattcctgaaagcagtgcagggtagtggcgatacctcccgacactgcctccctacactggcagatgcaaaaggacttcaggacactggcggtacggtcaactacttttgggggattcctttctgtcctgatggagtggacccaaaccaatacacaaaggttatcctgtgccagctagaagtgtatcagaagtcgctgaaaatggcccagaggcaacttctgaataaaaagggattcggagagccagtactgcctagacccccatcgctcatccagaatgaatgtggccaaggcgaacaggccagtgaaaagaacgaatgtatttcagaggatatgggggacgaggacaaggaggaacgacaggaatcacgcgcctccgattggcatagtaagaccaaggattttcaggaatcatccatcaaaagcttgaaagaaaaattgttgctggaagaggaacctacaacatctcacgggcagtcctcacagggtatcgttgaagagacgagtgaggaagggaattctgtccctgcttcgcaatctgttgcggcattgacctcaaaacgttctctcgtgctgatgcccgagtccagcgcggaggagatcactgtctgtcctgagactcagcttagctcttccgagaccttcgatcttgagcgagaggtttcacccggatctagggacatcctggatggcgtgcgtatcattatggctgataaggaagtgggcaataaggaggatgccgagaaagaggtagcaatcagcacctttagcagtagcaaccaggtaagttgtccattgtgtgatcagtgctttccacccacgaaaatcgaacgccacgccatgtactgcaatggactgatggaagaagatactgtattgacccgcagacagaaggaggcgaaaactaagtcagacagtggcacagctgcccagacttctctggacatcgacaagaatgagaagtgctacctgtgtaaatcccttgtccccttccgggagtaccaatgccacgtagactcatgtcttcagcttgcgaaagctgaccagggcgacggcccagaaggatccggacgggcttgcagtactgtagaaggcaagtggcagcagcgactaaaaaatcccaaagagaagggccatagtgaaggaagattgctctctttcttggagcaatcagagcacaaaactagtgatgcggatatcaaatcatcagagacaggagcctttcgtgttccatcaccaggaatggaggaggcgggatgctctcgggaaatgcagtcctcttttacccgcagagacctgaacgaatcccccgtgaagagctttgtgagcatcagtgaggccactgattgcttggtcgactttaaaaagcaggttaccgtacagcccgggagccgcacacggaccaaggctggtagaggacgaagacgaaaattttag

SEQ ID NO: 190445 - DNA, 96 bp, Artificial Sequence
  derived and/or modified sequence
atgccccggcggaagaagaaggtgaaggaggtgagcgagagccggaacttggagaagaaagacgtcgaaactacgtcttcagtgagtgtcaaatag

SEQ ID NO: 190446 - DNA, 2160 bp, Artificial Sequence
  derived and/or modified sequence
atgccccggcggaagaagaaggtgaaggaggtgagcgagagccggaacttggagaagaaggacgtagaaacaacctcttccgtcagcgtgaaacggaagaggcgcctggaggacgccttcattgtgatctccgactcggacggcgaggaacccaaagaggagaatggattgcagaagacaaaaaccaaacagtccaacagggctaagtgtttggccaaacgaaaaattgcacagatgactgaggaggagcagttcgctctcgccctgaaaatgtctgagcaggaagcccgcgaagtgaattcccaggaggaggaagaggaagaactgctccgtaaagctatcgcagaatcactcaattcatgcagacctagcgacgcttctgccaccaggtctcggcctctagccactggtccaagcagccagtctcatcaggaaaaaacaacggatagcgggttaacggagggcatctggcaactggtgccgccttcactctttaaggggtcccatatcagtcagggcaacgaggccgaagagcgtgaagagccctgggatcataccgagaagacggaagaggagccagttagcggatctagtggatcctgggatcagtctagtcaacctgttttcgagaacgtgaatgtgaagtcatttgatcggtgcacgggacattccgccgagcatacccaatgtggcaagcctcaggaaagtaccggccgtggcagcgccttcctgaaggctgtgcagggctctggcgacacctctagacactgcttaccaaccctggctgatgctaaaggtctgcaagataccggcggaaccgtgaattatttctggggaatcccattttgccctgacggtgtggacccaaatcaatatactaaggtcatcttgtgtcagctcgaggtgtatcaaaaatctctgaaaatggcacaaaggcagctgctcaataagaaaggttttggagagcccgttctcccccgtccgccatcgctgatccaaaacgagtgcggccaaggtgagcaagcatctgaaaagaatgagtgcatttccgaagacatgggggatgaggataaggaagagcgccaggagagcagagcatcagattggcactccaagacgaaggattttcaggaaagtagtatcaaatccctgaaagagaaactgctcctcgaggaggagccaacaacttcccacggccagtcctcccagggaattgtggaggaaacctccgaggagggcaactccgttccagcctcacagtccgtcgccgcgttgacctccaaacgctcactggtgcttatgcccgagtcctcagccgaggagatcaccgtctgtcccgaaactcaactgtcttcaagcgagacttttgatctcgagcgcgaagtctccccaggcagtcgtgacatcttggacggcgtgcgaattattatggctgataaggaagttgggaacaaagaggacgccgagaaggaggtggccatttcgactttctcatcgagcaatcaggtttcttgcccgctatgtgaccagtgttttccccccacaaagatcgagcggcacgccatgtattgcaacgggttgatggaagaagatactgttctgacgagacggcaaaaagaagccaagacaaaatccgatagcggaacagcagctcagactagcctagacattgataaaaacgaaaaatgctacctgtgtaaaagcctggtcccatttcgagaataccagtgccacgttgacagttgcctccagctggccaaagcagatcaaggcgatggcccggagggcagcgggagagcttgttctacagtcgagggcaagtggcagcaacggctgaagaatccaaaagagaagggccatagtgagggcaggctgctcagtttcttggagcagagcgaacataaaacgagcgacgcggacatcaagtcttcggagaccggggcatttagggttcctagccccgggatggaagaggccgggtgtagccgagagatgcagtcatctttcacaaggcgcgatctgaatgagtccccggttaagtcatttgtgagcatctctgaggctaccgactgtcttgtcgacttcaaaaagcaagtaactgtgcagccaggaagcaggactaggactaaagcggggcgggggaggagacggaaattctag

SEQ ID NO: 190447 - DNA, 2163 bp, Artificial Sequence
  derived and/or modified sequence
atgcccagacggaagaagaaagtgaaggaggtgagtgagagtcgtaatttggagaaaaaggacgtcgagacaacatcttcagtgtctgtgaagaggaaaaggaggctagaggacgcgttcatcgtgatatcagatagcgacggggaggagcctaaagaagaaaacggccttcagaaaaccaagactaagcagtctaacagagcaaaatgcctggcgaagcgaaaaatcgcccagatgacagaggaagagcaattcgctctggctctcaagatgtctgagcaggaggcgagagaggtaaatagccaggaagaagaggaggaggaactgctgaggaaggctatcgccgaatctctgaactcgtgccgtccttccgacgcttcagccaccagaagcaggccacttgccactggaccaagttcacaatcacaccaggaaaaaaccacggattctggcctgactgaaggcatctggcaactcgttcctcctagcctcttcaaagggtcacatatatctcaggggaatgaagctgaagagcgggaggagccctgggaccacacagagaagactgaagaggagcccgtcagcgggagcagtggatcttgggatcagtcctctcagccggtcttcgaaaacgttaacgtgaagtcttttgacagatgtaccggccactccgcggaacatacacagtgcggtaagcctcaggaatcgaccggacgcggatctgcttttctaaaagcagtacagggctccggcgatacgtctaggcactgcttgccgaccctcgccgatgccaaggggttgcaggatacaggcggtacagttaattatttttggggaatccctttctgtcccgatggggtggacccaaatcagtatactaaggtcatcctgtgtcagctggaggtttatcagaagtcactcaaaatggcacagaggcagctcctgaacaagaaaggctttggagagcccgtgctgcctcggccaccaagcctgatccagaatgaatgcggacagggcgagcaggcgagcgaaaaaaatgaatgtatctccgaggacatgggggatgaggacaaagaagaacgacaggaaagtcgggcaagcgattggcatagtaaaacaaaagattttcaagaaagtagtatcaagagcctgaaggagaaactgttgttagaggaggagcctaccacctcccatggccagtctagtcaggggatagtagaggaaacaagcgaggagggcaacagcgtgccagcaagtcagtctgtggcagccctaacctccaagaggtcactggtactcatgcccgagagtagcgctgaggagatcacggtctgcccggagacccagctcagctccagcgagaccttcgacttggaacgcgaggtgagtcctggaagccgcgatattcttgacggagtgcgaattatcatggccgataaggaagtgggtaataaagaggacgccgagaaagaggttgctatatctacgttctccagtagcaatcaagtgtcatgtcctctctgcgaccaatgctttccccctaccaagattgaacggcacgcaatgtactgcaatggactaatggaagaagatacagaggttctgactcgcaggcagaaagaagcgaaaactaagagcgattctggaactgcggctcaaacaagcttagatatcgataagaatgagaagtgttatttatgtaagtcgcttgtgcccttcagggagtaccagtgccatgttgattcatgcctccagcttgccaaggctgaccaaggtgatggtccagagggatccggaagggcatgtagcaccgtggaaggcaagtggcagcaacgtcttaagaatcctaaggaaaagggacactccgaagggaggctgctgtcctttttagagcagtccgagcacaagacgtcagatgcggatattaagtcttctgagactggggctttccgtgtgccaagccctggcatggaggaggcgggttgttccagagaaatgcaatcctctttcactcgcagagaccttaacgaatctcccgtcaaatcttttgtgagtatttctgaggcgacggactgcctggtcgatttcaagaaacaggtgaccgtacagcccggtagcagaacgcgcaccaaagcagggagaggcagaaggcggaagttctag

SEQ ID NO: 190448 - DNA, 1929 bp, Artificial Sequence
  derived and/or modified sequence
atgactgaggaggagcaatttgctttagctttgaaaatgagtgaacaagaggctagggaagtcaactctcaggaagaggaagaggaggagctccttcggaaagctatcgccgaatccctgaactcttgccgtccaagcgatgccagcgccacccgttctcgaccactcgctacagggccaagcagccaaagccaccaggagaaaactacggactccgggctgacagaggggatctggcagctagtgcctccgtcattatttaagggtagtcatataagccagggcaacgaggccgaagagagggaagagccatgggaccatacggagaagaccgaggaggaaccagtgtccgggagttccgggtcctgggatcagtccagccagccagtgtttgagaatgtcaacgttaaatcattcgacaggtgcaccggccattctgccgagcatacccagtgtggcaaacctcaggaaagtacagggcgtgggagcgccttcctgaaggccgtccaaggatccggtgataccagcaggcattgtctaccgacacttgcagacgcaaagggcctgcaagatactggcggaacagtgaactatttctggggcattccattctgccccgacggagtagacccgaaccagtataccaaggtgatcctgtgtcagttggaggtttatcagaaaagtctcaaaatggcccaacgtcagctgctgaacaagaagggcttcggagagcctgtgctgcccaggcccccttcactgatccagaacgagtgcgggcaaggcgagcaagctagcgaaaaaaatgagtgcatctctgaggatatgggggatgaagacaaagaggaacggcaggaaagccgagcttccgattggcattccaaaacaaaggattttcaggaatcatcaattaaaagcctcaaagagaagcttcttcttgaagaggaacccaccacgagccacggccagtcttctcaggggattgtggaagagacttcagaggagggaaactctgttcctgcctcccaatccgtggccgcattgacctccaaaagaagcctcgtcttgatgcccgagagcagtgccgaagagattactgtgtgcccggaaacgcagctttcatcaagtgaaacattcgatctagagagagaggtgagccctggaagtagagatattctggatggcgtacggataatcatggccgacaaggaggtcgggaataaagaggacgccgagaaggaagtagccatcagcaccttctcttcctccaatcaggtcagctgtcctctatgcgatcagtgcttccccccaacgaaaattgagcgccatgcaatgtattgcaacggattgatggaagaagatacagaggtgctcaccagacgccaaaaggaggcgaaaacgaagagcgactcagggaccgcggctcagacaagcctggacatcgacaagaatgaaaaatgctatctgtgcaaatcactggtgccctttagagaataccaatgccatgtcgactcgtgcttgcagcttgctaaagcagatcagggcgatggaccagaaggatccggacgggcttgttcaactgtggagggcaagtggcagcagaggctaaaaaaccccaaagagaaaggacactcggagggacggctactgtctttcctggaacagtctgaacacaaaacttcagatgctgatatcaaatctagcgaaacaggcgctttccgagtaccatctccaggaatggaggaggcgggttgcagccgggagatgcaaagtagcttcacaaggagagacctgaacgaatcccctgtcaagagcttcgtgagcatctccgaagcaaccgactgcttagtcgatttcaagaagcaggtgaccgtccagcccggatcacgcaccagaaccaaggcgggacggggtaggaggaggaagttctag

SEQ ID NO: 190449 - DNA, 2160 bp, Artificial Sequence
  derived and/or modified sequence
atgcctcgcagaaagaagaaagtgaaggaagtcagcgagtcgagaaacctggaaaagaaagacgtcgaaacgacctcgtcagtatcagtgaaacgtaaaaggcgactagaggatgcctttattgtgatttctgatagtgacggtgaagaacccaaggaggagaacgggctacagaaaaccaaaactaaacaatccaacagagccaagtgcttagctaagcgcaagatcgctcaaatgaccgaggaagagcagtttgcgctcgcgctcaagatgagtgagcaagaggctcgtgaggtaaatagtcaggaggaagaagaggaagaactcctcaggaaggccatagcagaatcccttaattcatgccgtccatctgacgcatccgcaactaggtctagaccactggcaaccggccctagcagccaaagccatcaggagaagactaccgattcgggactgaccgagggcatctggcagctggtgcccccaagcctgttcaaggggtcacatatcagccagggtaatgaggcagaagagagggaggagccatgggaccacacagagaagactgaggaggagcctgtgtctggaagcagcgggtcttgggaccagtcctcacaacctgtgttcgaaaacgtcaacgttaaaagcttcgatagatgtacaggacatagcgccgaacacacacagtgtgggaagccgcaggaatcaactgggagagggagcgctttcctgaaagctgtgcaaggatcaggagacacaagtcggcattgcctccccacactggctgatgccaaaggtctgcaggacactggaggaacggtgaattatttttggggaatacctttctgcccggatggggtggaccccaaccagtacaccaaggtcatcctgtgtcagctagaggtgtaccaaaagtcactgaagatggctcaacgccagctactaaacaagaaagggttcggagagccagtgctgcccagacccccatcacttatccagaacgaatgtgggcagggagaacaagcctcggaaaaaaacgaatgtatatccgaagacatgggcgacgaggataaagaagaacgccaggagagtcgagcaagtgactggcattcaaagactaaagactttcaagagtcctccatcaagtccctgaaggagaaattgttactggaagaggaacctactacctcacacggacagagctcccagggtatcgtggaggaaacttctgaggagggaaacagtgtccccgcatcgcaaagcgtggcagctctgacttctaaacgcagcctggtcctaatgccagaaagtagcgcagaagaaatcactgtgtgtcccgagacacagctatcgtcaagcgaaacgttcgaccttgaacgggaggtcagtccaggtagcagggacatactcgatggcgtgcgtatcattatggcagacaaggaagtggggaataaggaagacgctgagaaggaggtcgccatcagcaccttctcgagcagcaaccaggtctcatgtcctctgtgcgaccaatgttttcccccaactaaaattgagcggcacgccatgtactgtaatggtctaatggaggaggatactgtcctcaccagacgccagaaagaggccaagaccaaaagcgattctggcacggcagcacaaacttctctcgacatcgataaaaacgagaaatgctacctctgcaagtcccttgtgccattccgagagtaccaatgccatgtggactcctgtttgcagctggctaaggctgaccagggtgacggccctgagggtagcggcagagcatgttcaacagtagagggcaaatggcagcagcggctcaagaacccgaaagaaaagggtcacagcgaaggtcgcctactgtcctttctggagcagtccgagcataaaacttccgatgccgacataaagtcgtcagagactggcgctttcagagtcccgagtccgggtatggaggaggccggatgttctagggaaatgcagtctagcttcactaggcgggatttaaacgagtctcctgttaagagctttgtcagcattagtgaagccaccgactgtcttgtcgacttcaagaagcaggtgacagtgcaaccagggtcccgcaccagaaccaaggccggtcgaggccgacggaggaaattttag

SEQ ID NO: 190450 - DNA, 96 bp, Artificial Sequence
  derived and/or modified sequence
atgccgagacgaaaaaaaaaagttaaggaggtttcagaatctcgaaacctcgagaagaaagatgtggagactacgagctctgtgtccgttaagtag

SEQ ID NO: 190451 - DNA, 2160 bp, Artificial Sequence
  derived and/or modified sequence
atgcccaggaggaaaaagaaagtgaaggaggtttctgagagccgcaatctcgaaaaaaaagacgtagagacaacgtccagtgtcagcgtcaaacgtaagcgacgcctggaggacgcctttatcgtcatttctgactctgatggagaggaacctaaagaagagaacggcctacagaaaacgaagaccaagcagtccaatcgcgcaaaatgcctcgccaaacgaaagattgcccagatgactgaggaggaacagttcgcacttgccctcaaaatgagcgaacaagaagcacgggaggtgaattcccaggaggaggaagaggaagagttgcttcgcaaagcaatcgcagagtcgctgaacagctgccggccaagcgacgcctccgctacgcgaagccgcccactggctaccgggccatcctcccagtcccaccaggaaaagaccactgactccgggctcactgaaggcatttggcaattggtgcctcccagcctgtttaaggggtcacacatttcacaaggtaacgaggctgaggaaagggaggaaccctgggatcatacagagaagacagaggaggagcctgttagcggatcatccggctcatgggaccagtcctctcaacctgtgttcgagaacgttaacgttaaaagtttcgatcggtgcacagggcactcagctgaacatacacagtgcggtaagcctcaggagtccacaggtaggggtagtgcttttctgaaagctgtgcaggggagtggagatacttcgaggcactgtctacccactcttgctgatgcaaaagggctgcaggacaccggagggactgtcaactatttctgggggatcccattctgccccgatggcgtcgatccaaaccagtataccaaggtgatcctatgtcaactggaagtctaccaaaagtctcttaaaatggcgcagcgccagctgctgaacaaaaaaggtttcggagagcccgtgctccccagacccccttctttgattcagaacgagtgcggacagggcgagcaggcatctgagaaaaatgagtgcattagcgaggatatgggcgatgaggacaaagaagagaggcaggaatcccgtgcatccgactggcactccaaaaccaaggatttccaggagtcctcgatcaagagtctaaaagaaaaactgctgctggaagaagaacccaccacatcacacggacagtccagccagggaatcgttgaggaaacttctgaggagggcaactcggtgcccgcaagccagagcgtcgccgcacttacctccaaaaggtctctggtgctcatgcctgagagttctgcagaagagatcacggtatgtccagaaacacagctgtcctcgtctgagaccttcgatctggagagagaggtgagccccggatctcgggacattctggacggcgtgaggattatcatggctgacaaggaggttggtaacaaagaagatgctgagaaggaggtggccataagcaccttttctagctcgaaccaggtttcctgccctctgtgtgatcagtgctttcctcccaccaaaatcgaacgtcatgctatgtactgcaacggcctcatggaagaggacacggtactcaccagaagacagaaggaagcgaagactaagagcgatagtggtacggctgcccagacctccctcgacatcgacaagaacgaaaaatgttatttgtgcaagagcctggtgcccttcagagaataccagtgtcatgtcgacagctgcctgcagctggcaaaggctgatcaaggggacggccctgagggaagtggtcgagcctgctctacagtggaaggcaagtggcagcagcgcctgaagaatccaaaagagaaggggcactcggaaggccgactgctgtcgtttttggaacagtcagaacataaaacgtctgatgctgatataaagtcctcagagacgggcgcattccgagtcccttcacccggtatggaggaagccggttgttccagagagatgcagtccagctttacccgtcgggatctgaatgagtcacccgtgaaaagttttgtgtcgatctccgaagctactgactgcctcgtggatttcaaaaagcaggttacggtgcagcctggatcacggactaggactaaggccggtcggggacggaggcgaaagttctag

SEQ ID NO: 190452 - DNA, 2604 bp, Artificial Sequence
  derived and/or modified sequence
gaagtcgggggtgggtccctccggacgccgaagtgggctcgggatgcggggctgggaccctcccgattccggggcggattccggacgccgggaccggccattactggtgccgggttgggcttctccagatgccggggctgggtccttcccaaggttgagacaaaaggatgccacggagaaagaaaaaagttaaagaagtctccgaatctcggaacctggagaagaaggatgtggaaactaccagttctgtcagtgtgaagaggaagcgtagacttgaggatgcattcattgtgatatccgatagtgatggagaggaaccaaaggaggaaaatgggttgcagaaaacgaagacaaaacagtcgaatagagcaaagtgtttggccaaaagaaaaatcgcacagatgacagaagaagaacagtttgctctggctctcaaaatgagtgagcaggaagctagggaggtgaacagccaggaggaggaagaagaggagctcttgaggaaagccattgctgaaagcctgaatagttgccggccttctgatgcttccgctaccagatctcgacctctggccactggaccgtcttcccagtcccatcaagagaaaaccacagactctgggctcactgaaggcatatggcagctggtacctccatcactgtttaaaggctcacatatcagtcagggaaacgaggctgaggaaagagaggagccttgggaccacactgaaaaaactgaagaggagccggtctctggcagctcaggaagctgggaccagtcaagccagccagtgtttgagaatgtgaacgttaaatcttttgacagatgtactggccactcggctgagcacacacagtgtgggaagccacaggaaagtactgggaggggttctgcttttctcaaagctgtccagggtagcggggacacatctaggcactgtctacctaccctagcagatgccaaaggtctccaggacactgggggcactgtgaactatttctggggtattccattctgccctgatggagtagaccctaaccagtataccaaggtcattctctgccagttggaggtttatcaaaagagcctgaaaatggctcagaggcagctccttaataaaaaaggttttggggaaccagtgttacctagacctccttctctgatccagaatgaatgtggccaaggagagcaggctagtgagaaaaatgaatgcatctcagaagatatgggagatgaagacaaagaggagaggcaggagtctagggcatctgactggcactcaaaaaccaaggatttccaggaaagctcaattaaaagcttgaaagagaaacttttgttggaggaagaaccaacaaccagtcatggtcagtcttcccaagggattgttgaagaaacttctgaagagggaaactctgtacctgcttcacaaagtgttgctgctttgaccagtaagagaagcttagtccttatgccagagagttctgcagaagaaatcactgtttgtcctgagacccagctaagttcctctgaaacttttgaccttgaaagagaagtctctccaggtagcagagatatcttggatggagtcagaataataatggcagataaggaggttggtaacaaggaagatgctgagaaggaagtagctatttctaccttctcatccagtaaccaggtatcctgcccgctatgtgaccaatgctttccacccacaaagattgaacgacatgccatgtactgcaatggtctgatggaggaagatacagaagtattgactcggagacaaaaagaggccaagaccaagagtgacagtgggacagctgcccagacttctctagacattgacaagaatgagaagtgttacctctgtaaatccctggtcccatttagagagtatcagtgtcatgtggactcctgtctccagcttgcaaaggctgaccaaggagatggacctgaagggagtggaagagcatgttcaactgtggaggggaagtggcagcagaggctgaagaacccaaaggaaaaaggccacagtgaaggccgactccttagtttcttggaacagtctgagcacaagacttcagatgcagacatcaagtcttcagaaacaggagccttcagggtgccttcaccagggatggaagaggcaggctgcagcagagagatgcagagttctttcacacgtcgtgacttaaatgaatctcccgtcaagtcttttgtttccatttcagaagccacagattgcttagtggactttaaaaagcaagttactgtccagccaggtagtcggacacggaccaaagctggcagaggaagaaggagaaaattctgaatttctagggtccaaaagttgacaaaaccattagtaggaggggtgggccatgttcattaagccatagtggtccctagttcattgttgagcaagttttagccctgcagttttcaccaccagcacctacccagcattctggtttttatgttttttatgatctatgcagacaactgtgtattctgttttataacagtttgtttgaatttacttacagttaaaaaatttaaatatatttatgtttgtacgaaatcttatttcaatagatggaaatttt

SEQ ID NO: 190453 - DNA, 2489 bp, Artificial Sequence
  derived and/or modified sequence
cggacgcgcgcgcccctccccctccccccgcgctcccaacgtgtggcggctcgcgacccccggcaacccggagaaggtctacagagcggcctgcgccagcgaacaaaaggatgccacggagaaagaaaaaagttaaagaagtctccgaatctcggaacctggagaagaaggatgtggaaactaccagttctgtcagtgtgaagaggaagcgtagacttgaggatgcattcattgtgatatccgatagtgatggagaggaaccaaaggaggaaaatgggttgcagaaaacgaagacaaaacagtcgaatagagcaaagtgtttggccaaaagaaaaatcgcacagatgacagaagaagaacagtttgctctggctctcaaaatgagtgagcaggaagctagggaggtgaacagccaggaggaggaagaagaggagctcttgaggaaagccattgctgaaagcctgaatagttgccggccttctgatgcttccgctaccagatctcgacctctggccactggaccgtcttcccagtcccatcaagagaaaaccacagactctgggctcactgaaggcatatggcagctggtacctccatcactgtttaaaggctcacatatcagtcagggaaacgaggctgaggaaagagaggagccttgggaccacactgaaaaaactgaagaggagccggtctctggcagctcaggaagctgggaccagtcaagccagccagtgtttgagaatgtgaacgttaaatcttttgacagatgtactggccactcggctgagcacacacagtgtgggaagccacaggaaagtactgggaggggttctgcttttctcaaagctgtccagggtagcggggacacatctaggcactgtctacctaccctagcagatgccaaaggtctccaggacactgggggcactgtgaactatttctggggtattccattctgccctgatggagtagaccctaaccagtataccaaggtcattctctgccagttggaggtttatcaaaagagcctgaaaatggctcagaggcagctccttaataaaaaaggttttggggaaccagtgttacctagacctccttctctgatccagaatgaatgtggccaaggagagcaggctagtgagaaaaatgaatgcatctcagaagatatgggagatgaagacaaagaggagaggcaggagtctagggcatctgactggcactcaaaaaccaaggatttccaggaaagctcaattaaaagcttgaaagagaaacttttgttggaggaagaaccaacaaccagtcatggtcagtcttcccaagggattgttgaagaaacttctgaagagggaaactctgtacctgcttcacaaagtgttgctgctttgaccagtaagagaagcttagtccttatgccagagagttctgcagaagaaatcactgtttgtcctgagacccagctaagttcctctgaaacttttgaccttgaaagagaagtctctccaggtagcagagatatcttggatggagtcagaataataatggcagataaggaggttggtaacaaggaagatgctgagaaggaagtagctatttctaccttctcatccagtaaccaggtatcctgcccgctatgtgaccaatgctttccacccacaaagattgaacgacatgccatgtactgcaatggtctgatggaggaagatacagaagtattgactcggagacaaaaagaggccaagaccaagagtgacagtgggacagctgcccagacttctctagacattgacaagaatgagaagtgttacctctgtaaatccctggtcccatttagagagtatcagtgtcatgtggactcctgtctccagcttgcaaaggctgaccaaggagatggacctgaagggagtggaagagcatgttcaactgtggaggggaagtggcagcagaggctgaagaacccaaaggaaaaaggccacagtgaaggccgactccttagtttcttggaacagtctgagcacaagacttcagatgcagacatcaagtcttcagaaacaggagccttcagggtgccttcaccagggatggaagaggcaggctgcagcagagagatgcagagttctttcacacgtcgtgacttaaatgaatctcccgtcaagtcttttgtttccatttcagaagccacagattgcttagtggactttaaaaagcaagttactgtccagccaggtagtcggacacggaccaaagctggcagaggaagaaggagaaaattctgaatttctagggtccaaaagttgacaaaaccattagtaggaggggtgggccatgttcattaagccatagtggtccctagttcattgttgagcaagttttagccctgcagttttcaccaccagcacctacccagcattctggtttttatgttttttatgatctatgcagacaactgtgtattctgttttataacagtttgtttgaatttacttacagtt

SEQ ID NO: 190454 - DNA, 2570 bp, Artificial Sequence
  derived and/or modified sequence
gggctcgggatgcggggctgggaccctcccgattccggggcggattccggacgccgggaccggccattactggtgccgggttgggcttctccagatgccggggctgggtccttcccaaggttgagacaaaaggatgccacggagaaagaaaaaagttaaagaagtctccgaatctcggaacctggagaagaaggatgtggaaactaccagttctgtcagtgtgaagaggaagcgtagacttgaggatgcattcattgtgatatccgatagtgatggagaggaaccaaaggaggaaaatgggttgcagaaaacgaagacaaaacagtcgaatagagcaaagtgtttggccaaaagaaaaatcgcacagatgacagaagaagaacagtttgctctggctctcaaaatgagtgagcaggaagctagggaggtgaacagccaggaggaggaagaagaggagctcttgaggaaagccattgctgaaagcctgaatagttgccggccttctgatgcttccgctaccagatctcgacctctggccactggaccgtcttcccagtcccatcaagagaaaaccacagactctgggctcactgaaggcatatggcagctggtacctccatcactgtttaaaggctcacatatcagtcagggaaacgaggctgaggaaagagaggagccttgggaccacactgaaaaaactgaagaggagccggtctctggcagctcaggaagctgggaccagtcaagccagccagtgtttgagaatgtgaacgttaaatcttttgacagatgtactggccactcggctgagcacacacagtgtgggaagccacaggaaagtactgggaggggttctgcttttctcaaagctgtccagggtagcggggacacatctaggcactgtctacctaccctagcagatgccaaaggtctccaggacactgggggcactgtgaactatttctggggtattccattctgccctgatggagtagaccctaaccagtataccaaggtcattctctgccagttggaggtttatcaaaagagcctgaaaatggctcagaggcagctccttaataaaaaaggttttggggaaccagtgttacctagacctccttctctgatccagaatgaatgtggccaaggagagcaggctagtgagaaaaatgaatgcatctcagaagatatgggagatgaagacaaagaggagaggcaggagtctagggcatctgactggcactcaaaaaccaaggatttccaggaaagctcaattaaaagcttgaaagagaaacttttgttggaggaagaaccaacaaccagtcatggtcagtcttcccaagggattgttgaagaaacttctgaagagggaaactctgtacctgcttcacaaagtgttgctgctttgaccagtaagagaagcttagtccttatgccagagagttctgcagaagaaatcactgtttgtcctgagacccagctaagttcctctgaaacttttgaccttgaaagagaagtctctccaggtagcagagatatcttggatggagtcagaataataatggcagataaggaggttggtaacaaggaagatgctgagaaggaagtagctatttctaccttctcatccagtaaccaggtatcctgcccgctatgtgaccaatgctttccacccacaaagattgaacgacatgccatgtactgcaatggtctgatggaggaagatacagtattgactcggagacaaaaagaggccaagaccaagagtgacagtgggacagctgcccagacttctctagacattgacaagaatgagaagtgttacctctgtaaatccctggtcccatttagagagtatcagtgtcatgtggactcctgtctccagcttgcaaaggctgaccaaggagatggacctgaagggagtggaagagcatgttcaactgtggaggggaagtggcagcagaggctgaagaacccaaaggaaaaaggccacagtgaaggccgactccttagtttcttggaacagtctgagcacaagacttcagatgcagacatcaagtcttcagaaacaggagccttcagggtgccttcaccagggatggaagaggcaggctgcagcagagagatgcagagttctttcacacgtcgtgacttaaatgaatctcccgtcaagtcttttgtttccatttcagaagccacagattgcttagtggactttaaaaagcaagttactgtccagccaggtagtcggacacggaccaaagctggcagaggaagaaggagaaaattctgaatttctagggtccaaaagttgacaaaaccattagtaggaggggtgggccatgttcattaagccatagtggtccctagttcattgttgagcaagttttagccctgcagttttcaccaccagcacctacccagcattctggtttttatgttttttatgatctatgcagacaactgtgtattctgttttataacagtttgtttgaatttacttacagttaaaaaatttaaatatatttatgtttgtacgaaatcttatttcaatagatggaaattttaat

SEQ ID NO: 190455 - DNA, 2502 bp, Artificial Sequence
  derived and/or modified sequence
cggacgcgcgcgcccctccccctccccccgcgctcccaacgtgtggcggctcgcgacccccggcaacccggagaaggtctacagagcggcctgcgccagcgaacaaaaggatgccacggagaaagaaaaaagttaaagaagtctccgaatctcggaacctggagaagaaggatgtggaaactaccagttctgtcagtgtgaagaggaagcgtagacttgaggatgcattcattgtgatatccgatagtgatggagaggaaccaaaggaggaaaatgggttgcagaaaacgaagacaaaacagtcgaatagagcaaagtgtttggccaaaagaaaaatcgcacagatgacagaagaagaacagtttgctctggctctcaaaatgagtgagcaggaagctagggaggtgaacagccaggaggaggaagaagaggagctcttgaggaaagccattgctgaaagcctgaatagttgccggccttctgatgcttccgctaccagatctcgacctctggccactggaccgtcttcccagtcccatcaagagaaaaccacagactctgggctcactgaaggcatatggcagctggtacctccatcactgtttaaaggctcacatatcagtcagggaaacgaggctgaggaaagagaggagccttgggaccacactgaaaaaactgaagaggagccggtctctggcagctcaggaagctgggaccagtcaagccagccagtgtttgagaatgtgaacgttaaatcttttgacagatgtactggccactcggctgagcacacacagtgtgggaagccacaggaaagtactgggaggggttctgcttttctcaaagctgtccagggtagcggggacacatctaggcactgtctacctaccctagcagatgccaaaggtctccaggacactgggggcactgtgaactatttctggggtattccattctgccctgatggagtagaccctaaccagtataccaaggtcattctctgccagttggaggtttatcaaaagagcctgaaaatggctcagaggcagctccttaataaaaaaggttttggggaaccagtgttacctagacctccttctctgatccagaatgaatgtggccaaggagagcaggctagtgagaaaaatgaatgcatctcagaagatatgggagatgaagacaaagaggagaggcaggagtctagggcatctgactggcactcaaaaaccaaggatttccaggaaagctcaattaaaagcttgaaagagaaacttttgttggaggaagaaccaacaaccagtcatggtcagtcttcccaagggattgttgaagaaacttctgaagagggaaactctgtacctgcttcacaaagtgttgctgctttgaccagtaagagaagcttagtccttatgccagagagttctgcagaagaaatcactgtttgtcctgagacccagctaagttcctctgaaacttttgaccttgaaagagaagtctctccaggtagcagagatatcttggatggagtcagaataataatggcagataaggaggttggtaacaaggaagatgctgagaaggaagtagctatttctaccttctcatccagtaaccaggtatcctgcccgctatgtgaccaatgctttccacccacaaagattgaacgacatgccatgtactgcaatggtctgatggaggaagatacagtattgactcggagacaaaaagaggccaagaccaagagtgacagtgggacagctgcccagacttctctagacattgacaagaatgagaagtgttacctctgtaaatccctggtcccatttagagagtatcagtgtcatgtggactcctgtctccagcttgcaaaggctgaccaaggagatggacctgaagggagtggaagagcatgttcaactgtggaggggaagtggcagcagaggctgaagaacccaaaggaaaaaggccacagtgaaggccgactccttagtttcttggaacagtctgagcacaagacttcagatgcagacatcaagtcttcagaaacaggagccttcagggtgccttcaccagggatggaagaggcaggctgcagcagagagatgcagagttctttcacacgtcgtgacttaaatgaatctcccgtcaagtcttttgtttccatttcagaagccacagattgcttagtggactttaaaaagcaagttactgtccagccaggtagtcggacacggaccaaagctggcagaggaagaaggagaaaattctgaatttctagggtccaaaagttgacaaaaccattagtaggaggggtgggccatgttcattaagccatagtggtccctagttcattgttgagcaagttttagccctgcagttttcaccaccagcacctacccagcattctggtttttatgttttttatgatctatgcagacaactgtgtattctgttttataacagtttgtttgaatttacttacagttaaaaaatttaaatata

SEQ ID NO: 190456 - protein, 426 aa, Artificial Sequence
  derived and/or modified sequence
MSPAFRAMDVEPRAKGVLLEPFVHQVGGHSCVLRFNETTLCKPLVPREHQFYETLPAEMRKFTPQYKGVVSVRFEEDEDRNLCLIAYPLKGDHGIVDIVDNSDCEPKSKLLRWTTNKKHHVLETEKTPKDWVRQHRKEEKMKSHKLEEEFEWLKKSEVLYYTVEKKGNISSQLKHYNPWSMKCHQQQLQRMKENAKHRNQYKFILLENLTSRYEVPCVLDLKMGTRQHGDDASEEKAANQIRKCQQSTSAVIGVRVCGMQVYQAGSGQLMFMNKYHGRKLSVQGFKEALFQFFHNGRYLRRELLGPVLKKLTELKAVLERQESYRFYSSSLLVIYDGKERPEVVLDSDAEDLEDLSEESADESAGAYAYKPIGASSVDVRMIDFAHTTCRLYGEDTVVHEGQDAGYIFGLQSLIDIVTEISEESGE

SEQ ID NO: 190457 - DNA, 1281 bp, Artificial Sequence
  derived and/or modified sequence
atgagtcccgctttcagggcgatggacgtggaaccacgcgccaagggcgtgctgttagagcctttcgttcaccaagtgggggggcatagctgcgttctgcgcttcaacgaaaccacactgtgtaagcctctcgtcccacgcgagcatcagttttacgaaacgttgcctgctgaaatgcgtaaattcaccccacagtataagggggtggtgagcgtgcggttcgaggaggatgaggatagaaacctctgtcttatagcgtatccactcaagggcgaccacgggatcgtagacatagtggacaattctgattgcgagccaaaatctaaattgctgcgttggaccacaaacaaaaaacaccacgtgctggagactgaaaaaacaccaaaggattgggttcgccaacaccggaaagaggagaagatgaagagccacaaactcgaggaagagtttgaatggcttaaaaagtctgaagtgctctattacaccgttgagaagaagggaaacatctcaagccagcttaaacattacaatccatggagcatgaaatgccatcaacaacagctccagaggatgaaggaaaatgcgaagcatcgaaaccagtacaagttcatacttctcgagaacctaacatcgcgctatgaagtaccatgtgtactggatctcaagatgggcaccagacagcatggcgacgatgcctcagaagagaaagccgcaaatcaaatcagaaagtgccagcagtcaacctctgccgtaattggagtgcgcgtctgtgggatgcaggtgtaccaagcgggttctggacagctcatgttcatgaacaagtaccatggccgcaagctcagtgtgcagggcttcaaggaggctttgttccaattttttcataacggtcggtatttaaggagggagcttctggggccggttctcaagaaattgacggagctgaaagccgtgctcgagcggcaggaatcctataggttctattcctcttcgctgctcgtgatctatgatggaaaggagcgacccgaggtggtcctggatagcgacgcagaggatctcgaagacctgtctgaagagtccgccgacgagtcggccggcgcctacgcctacaaacccataggcgcgtccagtgtcgacgtgaggatgatagacttcgcccacacaacttgcagactgtatggggaggacaccgtggtgcacgaaggccaggatgctgggtacatttttggcttgcagtccttgatcgacattgtaactgagatttccgaggaatcaggcgagtag

SEQ ID NO: 190458 - DNA, 1281 bp, Artificial Sequence
  derived and/or modified sequence
atgagccctgccttccgggccatggatgtggagccccgggccaagggcgtgctgctggagccctttgtgcaccaggtgggcggccacagctgtgtgctgcgcttcaatgagaccaccctgtgcaagcccctggtgccccgggagcaccagttctatgagaccctgcctgctgagatgaggaagttcaccccccagtacaagggcgtggtgtctgtgcgctttgaggaggatgaggacaggaacctgtgcctgattgcctaccccctgaagggggaccatggaattgtggacatcgtggacaacagcgactgtgagcccaagagcaagctgctgcgctggaccaccaacaagaagcaccacgtgctggagacagagaagacccccaaggactgggtgcggcagcacaggaaggaggagaagatgaagagccacaagctggaggaggagtttgagtggctgaagaagtctgaggtgctgtactacacagtggagaagaagggcaacatcagcagccagctgaagcactacaacccctggagcatgaagtgccaccagcagcagctgcagaggatgaaggaaaatgccaagcacaggaaccagtacaagttcatcctgctggagaacctgaccagccgctatgaggtgccctgtgtgctggacctgaagatgggcacccggcagcacggagatgatgccagcgaggagaaggccgccaaccagatcaggaagtgccagcagagcaccagcgctgtgattggagtgcgggtgtgtggcatgcaggtgtaccaggccggcagcggccagctgatgttcatgaacaagtaccacggcaggaagctgtctgtgcagggcttcaaggaggccctcttccagttcttccacaacggccgctacctgcggcgggagctgctgggccctgtgctgaagaagctgacagagctgaaggctgtgctggagcggcaggagagctaccgcttctacagcagcagcctgctggtgatctatgatggcaaggagaggcctgaggtggtgctggacagtgatgctgaggacctggaggacctgtctgaggagagcgcagatgaatctgctggggcctatgcctacaagcccatcggggccagctctgtggatgtgaggatgattgactttgcccacaccacctgccgcctgtatggagaggacacagtggtgcatgagggccaggatgctggctacatcttcggcctgcagagcctgattgacatcgtgacagagatcagcgaggagagcggggagtag

SEQ ID NO: 190459 - DNA, 1281 bp, Artificial Sequence
  derived and/or modified sequence
atgagccccgccttccgggccatggacgtggagccccgggccaagggtgttctgctagaaccattcgtccaccaggtgggggggcattcctgtgtgctgcgctttaatgaaactacactgtgtaaacctctggtgccacgcgagcaccagttttacgaaacgttgccagctgagatgcgaaagttcaccccgcagtataaaggtgtagtgagcgtaaggtttgaggaggatgaggaccgcaacctgtgcctgatcgcttatcccctcaaaggggatcacggcattgtggatatcgtggataattccgattgcgaacctaagtccaaactactccggtggacaaccaacaagaagcaccacgttctggagactgaaaagacgcctaaagactgggtccggcaacaccggaaagaggaaaaaatgaagagccacaagttggaggaagaattcgaatggctaaagaagagcgaagtgctgtactataccgttgagaaaaaaggcaatatcagctcacaattaaagcattacaacccttggtccatgaagtgccatcagcagcagctgcagcggatgaaggaaaacgcgaaacaccgcaatcaatataagtttatactgctggaaaacctcacttccagatacgaggttccttgtgtgctcgatctgaaaatgggaactcgtcagcatggcgatgacgcttccgaggaaaaggcagccaaccagatccgtaagtgccagcagtcaacttcggctgtgataggcgttagggtgtgtggcatgcaggtgtaccaggccgggtccgggcaattaatgtttatgaacaagtaccacgggcgcaagctttccgtccagggcttcaaagaggcactgttccagttttttcataatggccggtatcttcgccgagagctgctagggcctgtcctaaagaaactcaccgagctgaaggcggtcctggagaggcaagaaagctacaggttctattcttccagcctgctggtcatttatgacgggaaggagcggcccgaggttgtcctcgacagcgacgcagaagacctagaggacttaagcgaggaatctgccgacgagagtgccggagcgtacgcctacaagccaatcggagccagttcggtggacgtccgcatgatagattttgctcacacgacatgccggctttacggcgaagacactgtcgttcacgaagggcaagacgcaggctatattttcgggctgcagtcgctaatcgatatcgtcacagaaattagtgaggagtctggtgagtag

SEQ ID NO: 190460 - DNA, 1281 bp, Artificial Sequence
  derived and/or modified sequence
atgtctcctgcctttcgggcaatggatgtggagcctcgcgctaaaggtgtcctgctagaaccatttgtgcaccaggtcggtggccatagttgtgtacttcgatttaacgaaacgacgctgtgtaaaccccttgtgccacgagaacatcaattctacgagactctcccggcagaaatgaggaaattcacacctcagtacaaaggcgtggtttccgtgaggttcgaggaggacgaggatagaaacctctgcctaatcgcttaccccctgaaaggggatcacggaattgtagatattgtcgacaacagtgactgtgaacctaagagcaaactcttacgctggacaactaacaagaaacaccacgtactggaaaccgaaaagaccccaaaggattgggtcaggcagcacaggaaagaagaaaagatgaagagccataagctcgaagaggagttcgagtggcttaaaaagtccgaggtactctattatacagtggagaaaaaaggtaatatcagttcacagctgaagcattataacccttggtctatgaaatgtcatcagcagcaacttcagcggatgaaggagaatgccaaacatcggaatcaatacaaattcattctcttagagaacctcacatcgcggtacgaagtgccctgcgttctggacctgaagatggggaccagacagcacggggatgacgcttccgaagagaaggcagcaaaccaaatcaggaagtgtcagcagagcacatcagcagttatcggtgttcgcgtgtgcgggatgcaggtctatcaagccggaagcggccagctcatgtttatgaacaagtatcacgggcgaaagttatctgtccagggttttaaagaggcactgttccaatttttccataacggtagatacttacggagggaactgctgggcccagtgctaaagaagcttaccgaactgaaagcagtgcttgaacgtcaagaatcttacaggttttacagtagctctctcttggtgatttatgatgggaaggaacgaccagaggttgtgcttgattctgacgctgaagacctcgaagacctgtcagaggaatccgcggatgagtcagcaggcgcatatgcctacaagccaatcggagcgtccagtgtggatgtgcggatgatagactttgcccatacaacgtgccggctatacggagaagacactgttgtgcacgaagggcaagacgccggttatatttttggtctgcagtctcttattgatattgtcacggaaatttcagaggagtcgggcgaatag

SEQ ID NO: 190461 - DNA, 1281 bp, Artificial Sequence
  derived and/or modified sequence
atgagccccgccttcagagccatggacgtggagcccagagccaagggcgtgctgctggagcccttcgtgcaccaggtgggcggccacagctgcgtgctgagattcaacgagaccaccctgtgcaagcccctggtgcccagagagcaccagttctacgagaccctgcccgccgagatgagaaagttcaccccccagtacaagggcgtggtgagcgtgagattcgaggaggacgaggacagaaacctgtgcctgatcgcctaccccctgaagggcgaccacggcatcgtggacatcgtggacaacagcgactgcgagcccaagagcaagctgctgagatggaccaccaacaagaagcaccacgtgctggagaccgagaagacccccaaggactgggtgagacagcacagaaaggaggagaagatgaagagccacaagctggaggaggagttcgagtggctgaagaagagcgaggtgctgtactacaccgtggagaagaagggcaacatcagcagccagctgaagcactacaacccctggagcatgaagtgccaccagcagcagctgcagagaatgaaggagaacgccaagcacagaaaccagtacaagttcatcctgctggagaacctgaccagcagatacgaggtgccctgcgtgctggacctgaagatgggcaccagacagcacggcgacgacgccagcgaggagaaggccgccaaccagatcagaaagtgccagcagagcaccagcgccgtgatcggcgtgagagtgtgcggcatgcaggtgtaccaggccggcagcggccagctgatgttcatgaacaagtaccacggcagaaagctgagcgtgcagggcttcaaggaggccctgttccagttcttccacaacggcagatacctgagaagagagctgctgggccccgtgctgaagaagctgaccgagctgaaggccgtgctggagagacaggagagctacagattctacagcagcagcctgctggtgatctacgacggcaaggagagacccgaggtggtgctggacagcgacgccgaggacctggaggacctgagcgaggagagcgccgacgagagcgccggcgcctacgcctacaagcccatcggcgccagcagcgtggacgtgagaatgatcgacttcgcccacaccacctgcagactgtacggcgaggacaccgtggtgcacgagggccaggacgccggctacatcttcggcctgcagagcctgatcgacatcgtgaccgagatcagcgaggagagcggcgagtag

SEQ ID NO: 190462 - protein, 704 aa, Artificial Sequence
  derived and/or modified sequence
MARELRALLLWGRRLRPLLRAPALAAVPGGKPILCPRRTTAQLGPRRNPAWSLQAGRLFSTQTAEDKEEPLHSIISSTESVQGSTSKHEFQAETKKLLDIVARSLYSEKEVFIRELISNASDALEKLRHKLVSDGQALPEMEIHLQTNAEKGTITIQDTGIGMTQEELVSNLGTIARSGSKAFLDALQNQAEASSKIIGQFGVGFYSAFMVADRVEVYSRSAAPGSLGYQWLSDGSGVFEIAEASGVRTGTKIIIHLKSDCKEFSSEARVRDVVTKYSNFVSFPLYLNGRRMNTLQAIWMMDPKDVREWQHEEFYRYVAQAHDKPRYTLHYKTDAPLNIRSIFYVPDMKPSMFDVSRELGSSVALYSRKVLIQTKATDILPKWLRFIRGVVDSEDIPLNLSRELLQESALIRKLRDVLQQRLIKFFIDQSKKDAEKYAKFFEDYGLFMREGIVTATEQEVKEDIAKLLRYESSALPSGQLTSLSEYASRMRAGTRNIYYLCAPNRHLAEHSPYYEAMKKKDTEVLFCFEQFDELTLLHLREFDKKKLISVETDIVVDHYKEEKFEDRSPAAECLSEKETEELMAWMRNVLGSRVTNVKVTLRLDTHPAMVTVLEMGAARHFLRMQQLAKTQEERAQLLQPTLEINPRHALIKKLNQLRASEPGLAQLLVDQIYENAMIAAGLVDDPRAMVGRLNELLVKALERH

SEQ ID NO: 190463 - DNA, 2115 bp, Artificial Sequence
  derived and/or modified sequence
atggccagagagctgagagccctgctgctgtggggcagaagactgagacccctgctgagagcccccgccctggccgccgtgcccggcggcaagcccatcctgtgccccagaagaaccaccgcccagctgggccccagaagaaaccccgcctggagcctgcaggccggcagactgttcagcacccagaccgccgaggacaaggaggagcccctgcacagcatcatcagcagcaccgagagcgtgcagggcagcaccagcaagcacgagttccaggccgagaccaagaagctgctggacatcgtggccagaagcctgtacagcgagaaggaggtgttcatcagagagctgatcagcaacgccagcgacgccctggagaagctgagacacaagctggtgagcgacggccaggccctgcccgagatggagatccacctgcagaccaacgccgagaagggcaccatcaccatccaggacaccggcatcggcatgacccaggaggagctggtgagcaacctgggcaccatcgccagaagcggcagcaaggccttcctggacgccctgcagaaccaggccgaggccagcagcaagatcatcggccagttcggcgtgggcttctacagcgccttcatggtggccgacagagtggaggtgtacagcagaagcgccgcccccggcagcctgggctaccagtggctgagcgacggcagcggcgtgttcgagatcgccgaggccagcggcgtgagaaccggcaccaagatcatcatccacctgaagagcgactgcaaggagttcagcagcgaggccagagtgagagacgtggtgaccaagtacagcaacttcgtgagcttccccctgtacctgaacggcagaagaatgaacaccctgcaggccatctggatgatggaccccaaggacgtgagagagtggcagcacgaggagttctacagatacgtggcccaggcccacgacaagcccagatacaccctgcactacaagaccgacgcccccctgaacatcagaagcatcttctacgtgcccgacatgaagcccagcatgttcgacgtgagcagagagctgggcagcagcgtggccctgtacagcagaaaggtgctgatccagaccaaggccaccgacatcctgcccaagtggctgagattcatcagaggcgtggtggacagcgaggacatccccctgaacctgagcagagagctgctgcaggagagcgccctgatcagaaagctgagagacgtgctgcagcagagactgatcaagttcttcatcgaccagagcaagaaggacgccgagaagtacgccaagttcttcgaggactacggcctgttcatgagagagggcatcgtgaccgccaccgagcaggaggtgaaggaggacatcgccaagctgctgagatacgagagcagcgccctgcccagcggccagctgaccagcctgagcgagtacgccagcagaatgagagccggcaccagaaacatctactacctgtgcgcccccaacagacacctggccgagcacagcccctactacgaggccatgaagaagaaggacaccgaggtgctgttctgcttcgagcagttcgacgagctgaccctgctgcacctgagagagttcgacaagaagaagctgatcagcgtggagaccgacatcgtggtggaccactacaaggaggagaagttcgaggacagaagccccgccgccgagtgcctgagcgagaaggagaccgaggagctgatggcctggatgagaaacgtgctgggcagcagagtgaccaacgtgaaggtgaccctgagactggacacccaccccgccatggtgaccgtgctggagatgggcgccgccagacacttcctgagaatgcagcagctggccaagacccaggaggagagagcccagctgctgcagcccaccctggagatcaaccccagacacgccctgatcaagaagctgaaccagctgagagccagcgagcccggcctggcccagctgctggtggaccagatctacgagaacgccatgatcgccgccggcctggtggacgaccccagagccatggtgggcagactgaacgagctgctggtgaaggccctggagagacactag

SEQ ID NO: 190464 - DNA, 2115 bp, Artificial Sequence
  derived and/or modified sequence
atggctagggaactccgggccctcctgttgtgggggcgccgattgcggcctttgcttcgtgccccggcactggccgcagttcccggtggcaagcccatcctctgcccacgtagaacaaccgctcagctcggtccccgccgcaatccagcttggagcctccaggccggacgcttattctcaacgcagactgcagaagataaggaggagccgcttcatagtatcatttctagcacagaaagcgtgcagggtagcacctcaaaacacgagtttcaagctgaaactaagaagctactggacatagtcgcccgcagcctgtactccgaaaaggaggtcttcatccgggaactgattagcaatgcctcggacgctttggagaagttgcgccataaactggtcagtgacgggcaggctctgcccgaaatggaaatccacttgcagacgaacgctgaaaaagggaccatcacaatccaggatacaggaattggcatgacccaagaggaattagtgagcaacctgggaactatcgcccgtagcggttctaaggccttcctcgacgctctgcaaaatcaggccgaggcatctagcaaaattatcggccagttcggcgttggtttttactctgcattcatggtggccgaccgggttgaggtgtactccaggagcgctgcgccaggctcgctggggtatcaatggctgtcagacggatccggggtttttgagatcgctgaagcatcaggggtgaggacaggaaccaagataattatccatttgaaatcagactgcaaggaattcagttctgaagctagagtgagagacgtcgtcacaaaatatagcaatttcgtgagcttccctctttatctgaacgggcgcagaatgaatactttgcaagctatctggatgatggaccctaaggatgttcgcgagtggcagcacgaggagttttatcggtatgtcgcccaagctcacgataagcccagatacaccctgcactataaaactgatgcaccactgaacattagaagtattttttacgtgcctgacatgaaaccatcaatgttcgatgtctcaagggagctcggctcatctgtcgcactgtacagtagaaaggttctcattcaaacaaaagctacagacattcttcctaaatggctcaggttcattagaggagtggtcgactctgaagacatccctcttaacctgtcccgggaactgctgcaggaatctgccttgatcagaaagcttagggatgtacttcaacagcggttgatcaagtttttcattgaccagagtaaaaaagacgcggagaagtatgctaagttttttgaagactacggcctgttcatgagggagggaatagtcactgccaccgaacaagaggtgaaggaggatatcgccaaattgttaagatacgagagctctgccctccccagcggacagctgactagtctctcagagtacgcctccaggatgcgggcgggtacacggaatatctactacttgtgtgctcctaacaggcatctggcagaacactcgccatattacgaagcgatgaagaaaaaagacaccgaggtgctgttctgctttgagcagttcgatgagctgactttattgcatctgagagagtttgataaaaaaaaattgattagcgtagagaccgacatcgttgttgatcactacaaggaggaaaagttcgaggaccgttcccccgcagctgagtgcctgagcgaaaaagagacggaggaacttatggcgtggatgagaaatgtacttggcagtcgcgttaccaatgtcaaagtcaccctgcgcctggatacgcaccccgccatggttactgtgctggagatgggagcggcacgccacttcctacgcatgcagcagctcgcaaagacacaggaggagagagcccagttgctgcaacccactctggaaatcaaccctcgccacgcactgattaagaaactcaaccaacttagggcttctgaaccaggacttgcgcagttacttgttgatcagatttacgagaacgcgatgatcgcggcaggcctggtggatgaccctcgagcgatggtgggccgtctgaacgaactcctcgtgaaggcactggaaagacactag

SEQ ID NO: 190465 - DNA, 2115 bp, Artificial Sequence
  derived and/or modified sequence
atggcccgggagctgcgggccctgctgctgtggggccgccgcctgcggcccctgctgcgggccccagccctggccgctgtgcctgggggcaagcccatcctgtgccccaggaggaccacagcccagctgggccccaggagaaatcctgcctggagcctgcaggccggccgcctcttcagcacccagacagctgaggacaaggaggagcccctgcacagcatcatcagcagcacagagagcgtgcagggcagcaccagcaagcatgagttccaggccgagaccaagaagctgctggacatcgtggcccggagcctgtacagcgagaaggaggtgttcatccgggagctgatcagcaatgccagtgatgccctggagaagctgcggcacaagctggtgtctgatggccaggccctgcctgagatggagatccacctgcagaccaatgctgagaagggcaccatcaccatccaggacacaggaattggcatgacccaggaggagctggtgagcaacctgggcaccatcgcccggagcggcagcaaggccttcctggatgccctgcagaaccaggccgaggccagcagcaagatcatcggccagtttggagtgggcttctacagcgccttcatggtggccgacagagtggaggtgtacagccgctctgctgcccctggcagcctgggctaccagtggctgagtgatggcagcggcgtgtttgaaattgctgaggccagcggcgtgaggacaggcaccaagatcatcatccacctgaagagtgactgcaaggagttcagcagcgaggcccgggtgagagatgtggtgaccaagtacagcaactttgtgtccttccccctgtacctgaatggccgcaggatgaacaccctgcaggccatctggatgatggaccccaaggatgtgcgggagtggcagcacgaggagttctaccgctacgtggcccaggcccatgacaagccccgctacaccctgcactacaagacagatgcccccctgaacatccgcagcatcttctacgtgcctgacatgaagcccagcatgtttgatgtgtcccgggagctgggcagctctgtggccctgtacagcaggaaggtgctgatccagaccaaggccacagacatcctgcccaagtggctgcgcttcatccggggcgtggtggacagcgaggacatccccctgaacctgagccgggagctgctgcaggagagcgccctgatcaggaagctgagagatgtgctgcagcagaggctcatcaagttcttcatcgaccagagcaagaaggatgctgagaagtatgccaagttctttgaggactatggcctcttcatgagggagggcatcgtgacagccacagagcaggaggtgaaggaggacatcgccaagctgctgcgctatgagagcagcgccctgcccagcggccagctgaccagcctgtctgaatatgccagcaggatgagagctggcaccaggaacatctactacctgtgtgcccccaacagacacctggccgagcacagcccctactatgaggccatgaagaagaaggacacagaggtgctcttctgctttgagcagtttgatgagctgaccctgctgcacctgcgggagtttgacaagaagaagctgatctctgtggagacagacatcgtggtggaccactacaaggaggagaagtttgaagatagaagccctgctgctgagtgcctgtctgagaaggagacagaggagctgatggcctggatgagaaatgtgctgggcagccgggtgaccaacgtgaaggtgaccctgcggctggacacccacccagccatggtgacagtgctggagatgggcgccgcccggcacttcctgaggatgcagcagctggccaagacccaggaggagcgggcccagctgctgcagcccaccctggagatcaaccccaggcatgccctgatcaagaagctgaaccagctgcgggccagcgagcccggcctggcccagctgctggtggaccagatctatgaaaatgccatgattgctgctggcctggtggatgacccccgggccatggtgggccgcctgaatgagctgctggtgaaggccctggagcggcactag

SEQ ID NO: 190466 - DNA, 2115 bp, Artificial Sequence
  derived and/or modified sequence
atggcccgggagctgcgggccctgctgctgtggggccggcggctgcggccattattgcgagcacctgctctcgctgccgtcccgggaggcaagcccatcctgtgtccgcgtcgcaccacagctcaactagggccccgtcgaaacccagcttggagcctccaagcaggccgcttattttcaacacagactgcagaggataaggaagagccccttcattcaattattagctccacggaaagtgtgcaaggaagcacctctaagcatgaatttcaagccgagaccaagaagttgctcgacatcgtggcaaggtcgttatattccgagaaagaggtgtttatccgcgaactcattagcaacgctagtgacgcactggaaaaactgcgccataagctggtaagtgatggacaggccttgcccgaaatggaaattcatctccagacaaatgctgagaaagggacgatcacaatacaggataccgggatagggatgacacaggaggaactggtgtcaaatctcggcacaatagcccgatccggcagtaaggcctttttggacgctctgcagaaccaggctgaagcatcatcaaaaatcatcggacaattcggagttggattctacagcgccttcatggtggccgaccgcgtggaagtctatagcaggagcgctgcacctggaagccttggctaccaatggctgtccgatggttcaggtgtgttcgagattgcggaggcatccggcgttcggaccggaaccaagatcatcatacacctcaagtccgactgcaaggagttctctagcgaagccagggtgagagacgtggtgacaaagtattccaacttcgttagctttcctctgtacctgaatggacgcagaatgaacaccctgcaggcaatatggatgatggatccaaaggacgttcgcgagtggcagcacgaggagttctaccggtacgtcgcccaggctcacgataagccacgctacaccctccattataagaccgacgccccgttaaacatacggtctattttctatgtgcctgatatgaagccgagcatgtttgacgtttcccgcgagctcggctcatccgtggccctctacagccggaaggtcctcatccagacaaaggcaacagacattctaccaaagtggctaaggtttataaggggggttgtcgactcagaggatatcccacttaacctgtctagggagctgctgcaggagagtgccctcatccgcaagttgcgagacgtgctgcagcagcgactaatcaaatttttcatcgaccagtcgaagaaagatgcggaaaaatatgccaaatttttcgaagactacggactctttatgcgtgagggcatcgtcactgcaactgagcaggaagtgaaagaagatatagccaagctgctacgttacgagtcatcggcgctcccttccggacagttaacttctctatctgaatatgcgtcacggatgcgggccggaacccgcaacatttactatctgtgtgcccccaatagacaccttgccgagcacagtccgtattacgaggcgatgaagaagaaggacacagaagtgctgttctgcttcgaacagttcgatgagctcaccctgctgcacctgcgggagttcgacaagaaaaaactgatttctgtcgaaaccgacattgtcgttgaccactacaaagaggagaaattcgaggataggagccccgccgctgaatgtctgtctgagaaagaaacagaggagttaatggcttggatgagaaacgtgctgggcagtagagtgacaaacgtcaaagtgacacttcgactcgatacccatccagccatggtaaccgtgctggagatgggggcagctagacatttcctgcgtatgcagcagctggccaaaactcaggaggaacgggcgcagctcctccagcctacgctcgagattaatccccggcatgctctaatcaaaaaactgaaccagctgcgcgcctccgagcccgggttggcgcagctgcttgtagatcagatctacgagaacgccatgatagctgctggcttagtcgacgaccccagggccatggtgggccgactgaacgagctgctggtcaaggcacttgagagacactag

SEQ ID NO: 190467 - DNA, 2115 bp, Artificial Sequence
  derived and/or modified sequence
atggcccgtgagcttcgagccctccttctttgggggcgtagattgaggcctttgctgcgcgcacctgcactagccgcagtgcccggtgggaagcctatcctctgtcctagacgcacaaccgctcagctggggcctcgcaggaaccccgcatggtctcttcaggcaggaagactgttttcgacgcagacagcagaggataaggaggagcccctgcattcaattatcagcagtaccgagtctgttcagggatctacatcaaagcatgagtttcaagctgagaccaaaaagctgctggatatcgttgctaggtcactatatagtgagaaggaagtcttcatcagagagcttatttctaacgccagtgacgccctcgagaaactcaggcacaagctggtgagtgacgggcaggccttaccagagatggagatacacttgcagaccaatgccgaaaagggtacgatcaccattcaagacacaggcatcggcatgactcaggaggagctagtgagtaacctcgggaccattgccaggagcgggtctaaagccttcctggatgcattacagaaccaggccgaagccagctctaagattattgggcagtttggcgttgggttttactcggccttcatggtagctgatcgtgtcgaagtgtattcgcgcagcgcagcgcctgggtccctgggatatcagtggctttcggatggctctggtgtcttcgagatcgcagaggcatcaggagtgaggaccggaactaagatcataatccatctgaagtccgactgcaaggagttctccagcgaggcccgtgtgagagatgtggttaccaagtattcgaacttcgtttcattccctctttacctgaatggtagacgcatgaataccctgcaggccatctggatgatggaccccaaggatgttcgggagtggcaacatgaagaattctaccggtatgtggctcaagcccacgacaagcccagatacacgttacattacaagaccgacgcacccctcaatatacggagcattttctatgtgcctgatatgaagccctcaatgttcgatgttagccgcgagttgggaagtagcgtggccctatacagccgaaaagttctcatccagaccaaagctaccgatattctgcccaaatggttacggttcattcggggagtcgtcgattccgaagacatccctctcaatctatcccgggaactcctccaagagtccgctctgatccgtaagttacgggacgtgctgcaacagagattaatcaagttcttcattgaccagagtaaaaaagacgccgaaaaatacgcgaaattcttcgaagactacggtctcttcatgcgtgaaggaatagtgactgcaactgagcaggaagtaaaggaagatattgccaagctgcttaggtatgagtcgtccgccctgccttctggccagcttacctcactgagtgagtatgcatcccgcatgcgtgctgggactcgaaatatttactacctgtgcgccccaaatcggcacttggccgaacacagtccctactatgaggcaatgaaaaagaaagacactgaggtcctgttctgtttcgaacagtttgatgaactgaccttgctgcacctacgggagtttgataagaaaaaactcatatccgtggagaccgacattgtggtagatcactataaggaggagaagtttgaggaccgctcccctgcggcagaatgcctcagcgagaaggagacggaggagcttatggcatggatgaggaacgtgctcggaagcagggtcacaaatgtgaaggtgaccctgcggcttgatacgcaccccgctatggttacggttctggagatgggggctgccagacacttcctgcgcatgcaacaactggccaaaacgcaagaggagagggcacaactgctgcaacctactcttgagattaacccaaggcacgccctgataaagaaattaaatcaactgagggctagtgaacctggcctggcccagcttctggtcgatcaaatctatgagaatgcaatgattgccgctggtctcgtggacgacccacgtgcgatggtcgggaggctgaacgaactccttgtgaaagccctggagcgccactag

SEQ ID NO: 190468 - DNA, 2263 bp, Artificial Sequence
  derived and/or modified sequence
cccttcccatcgtgtacggtcccgcgtggctgcgcgcggcgctctgggagtacgacatggcgcgcgagctgcgggcgctgctgctgtggggccgccgcctgcggcctttgctgcgggcgccggcgctggcggccgtgccgggaggaaaaccaattctgtgtcctcggaggaccacagcccagttgggccccaggcgaaacccagcctggagcttgcaggcaggacgactgttcagcacgcagaccgccgaggacaaggaggaacccctgcactcgattatcagcagcacagagagcgtgcagggttccacttccaaacatgagttccaggccgagacaaagaagcttttggacattgttgcccggtccctgtactcagaaaaagaggtgtttatacgggagctgatctccaatgccagcgatgccttggaaaaactgcgtcacaaactggtgtctgacggccaagcactgccagaaatggagattcacttgcagaccaatgccgagaaaggcaccatcaccatccaggatactggtatcgggatgacacaggaagagctggtgtccaacctggggacgattgccagatcggggtcaaaggccttcctggatgctctgcagaaccaggctgaggccagcagcaagatcatcggccagtttggagtgggtttctactcagctttcatggtggctgacagagtggaggtctattcccgctcggcagccccggggagcctgggttaccagtggctttcagatggttctggagtgtttgaaatcgccgaagcttcgggagttagaaccgggacaaaaatcatcatccacctgaaatccgactgcaaggagttttccagcgaggcccgggtgcgagatgtggtaacgaagtacagcaacttcgtcagcttccccttgtacttgaatggaaggcggatgaacaccttgcaggccatctggatgatggaccccaaggatgtccgtgagtggcaacatgaggagttctaccgctacgtcgcgcaggctcacgacaagccccgctacaccctgcactataagacggacgcaccgctcaacatccgcagcatcttctacgtgcccgacatgaaaccgtccatgtttgatgtgagccgggagctgggctccagcgttgcactgtacagccgcaaagtcctcatccagaccaaggccacggacatcctgcccaagtggctgcgcttcatccgaggtgtggtggacagtgaggacattcccctgaacctcagccgggagctgctgcaggagagcgcactcatcaggaaactccgggacgttttacagcagaggctgatcaaattcttcattgaccagagtaaaaaagatgctgagaagtatgcaaagttttttgaagattacggcctgttcatgcgggagggcattgtgaccgccaccgagcaggaggtcaaggaggacatagcaaagctgctgcgctacgagtcctcggcgctgccctccgggcagctaaccagcctctcagaatacgccagccgcatgcgggccggcacccgcaacatctactacctgtgcgcccccaaccgtcacctggcagagcactcaccctactatgaggccatgaagaagaaagacacagaggttctcttctgctttgagcagtttgatgagctcaccctgctgcaccttcgtgagtttgacaagaagaagctgatctctgtggagacggacatagtcgtggatcactacaaggaggagaagtttgaggacaggtccccagccgccgagtgcctatcagagaaggagacggaggagctcatggcctggatgagaaatgtgctggggtcgcgtgtcaccaacgtgaaggtgaccctccgactggacacccaccctgccatggtcaccgtgctggagatgggggctgcccgccacttcctgcgcatgcagcagctggccaagacccaggaggagcgcgcacagctcctgcagcccacgctggagatcaaccccaggcacgcgctcatcaagaagctgaatcagctgcgcgcaagcgagcctggcctggctcagctgctggtggatcagatatacgagaacgccatgattgctgctggacttgttgacgaccctagggccatggtgggccgcttgaatgagctgcttgtcaaggccctggagcgacactgacagccagggggccagaaggactgacaccacagatgacagccccacctccttgagctttatttacctaaatttaaaggtatttcttaacccga

SEQ ID NO: 190469 - protein, 565 aa, Artificial Sequence
  derived and/or modified sequence
MAEGKAGGAAGLFAKQVQKKFSRAQEKVLQKLGKAVETKDERFEQSASNFYQQQAEGHKLYKDLKNFLSAVKVMHESSKRVSETLQEIYSSEWDGHEELKAIVWNNDLLWEDYEEKLADQAVRTMEIYVAQFSEIKERIAKRGRKLVDYDSARHHLEAVQNAKKKDEAKTAKAEEEFNKAQTVFEDLNQELLEELPILYNSRIGCYVTIFQNISNLRDVFYREMSKLNHNLYEVMSKLEKQHSNKVFVVKGLSSSSRRSLVISPPVRTATVSSPLTSPTSPSTLSLKSESESVSATEDLAPDAAQGEDNSEIKELLEEEEIEKEGSEASSSEEDEPLPACNGPAQAQPSPTTERAKSQEEVLPSSTTPSPGGALSPSGQPSSSATEVVLRTRTASEGSEQPKKRASIQRTSAPPSRPPPPRATASPRPSSGNIPSSPTASGGGSPTSPRASLGTGTASPRTSLEVSPNPEPPEKPVRTPEAKENENIHNQNPEELCTSPTLMTSQVASEPGEAKKMEDKEKDNKLISANSSEGQDQLQVSMVPENNNLTAPEPQEEVSTSENPQL

SEQ ID NO: 190470 - protein, 539 aa, Artificial Sequence
  derived and/or modified sequence
MVLQKLGKAVETKDERFEQSASNFYQQQAEGHKLYKDLKNFLSAVKVMHESSKRVSETLQEIYSSEWDGHEELKAIVWNNDLLWEDYEEKLADQAVRTMEIYVAQFSEIKERIAKRGRKLVDYDSARHHLEAVQNAKKKDEAKTAKAEEEFNKAQTVFEDLNQELLEELPILYNSRIGCYVTIFQNISNLRDVFYREMSKLNHNLYEVMSKLEKQHSNKVFVVKGLSSSSRRSLVISPPVRTATVSSPLTSPTSPSTLSLKSESESVSATEDLAPDAAQGEDNSEIKELLEEEEIEKEGSEASSSEEDEPLPACNGPAQAQPSPTTERAKSQEEVLPSSTTPSPGGALSPSGQPSSSATEVVLRTRTASEGSEQPKKRASIQRTSAPPSRPPPPRATASPRPSSGNIPSSPTASGGGSPTSPRASLGTGTASPRTSLEVSPNPEPPEKPVRTPEAKENENIHNQNPEELCTSPTLMTSQVASEPGEAKKMEDKEKDNKLISANSSEGQDQLQVSMVPENNNLTAPEPQEEVSTSENPQL

SEQ ID NO: 190471 - DNA, 1698 bp, Artificial Sequence
  derived and/or modified sequence
atggctgaaggcaaggctggcggagccgctggtctgtttgctaagcaggtgcagaagaaattcagccgcgctcaggaaaaagtcctacagaagcttggcaaagccgttgagacgaaagatgaaagattcgaacagagcgccagcaacttctatcagcagcaagcagagggccataagctgtataaagatctgaaaaacttcctgtctgccgtcaaggttatgcatgaatcttctaaaagggtttccgagacactccaggagatctactcgagcgaatgggatgggcacgaggagctgaaagctatagtgtggaataatgatcttttgtgggaggactacgaagaaaagctggccgaccaggccgtccgcacgatggaaatctacgttgctcagttctctgagatcaaagagcggatcgcgaagcggggtcgcaaactggtggattacgattccgcccggcaccatctcgaagctgtgcagaacgctaagaaaaaagatgaggcaaaaaccgcaaaggcagaggaagagttcaataaggcccagactgtgttcgaggacctgaaccaagagttgctggaggaattgccgatcctgtacaacagtcgcataggctgttatgtcaccatctttcagaacattagcaacttacgcgatgtgttctatagggaaatgtctaagctgaaccacaatctttatgaagttatgagcaaactagagaaacagcacagtaacaaggtgtttgtcgtaaaggggctgtcctcttcttcccgtagatctctggtaatctcccccccagtgaggacagccactgtttcaagtcccctaaccagcccgacttcccccagtaccctgtcactaaagtcagaatctgagtctgtgagtgccacagaggacctcgcacctgacgccgcacagggcgaggataacagcgagattaaggaactgctggaagaggaggaaattgagaaggagggctcagaagccagttcaagtgaagaggatgaaccactccccgcctgtaacgggccagcccaggctcagccttcacctacgacagagagagcaaagagtcaagaagaggtcttgccatctagtactacaccttcccctggaggagcactgagcccctctgggcagccctcgtccagtgcaactgaagtggtgctccggacccggacagcgtctgaaggaagtgaacagccaaaaaaaagagcaagtatccagaggacttcagcaccccctagccgtccacccccaccacgggcaaccgcatcaccccggccatcctccggaaatatccccagcagccctactgcaagcggaggggggagccctaccagtccccgcgcgagcctgggcacagggaccgcgtccccgcggacctcgctggaggtttcaccaaatccagagccccctgagaaacccgtgcgcacccctgaggccaaggaaaatgagaacatccacaatcagaaccccgaggaactgtgtaccagcccaaccctcatgacctcccaggtggcaagtgaacctggggaggctaaaaagatggaagacaaagaaaaggacaacaaactgatctccgccaatagcagtgaggggcaggaccagctgcaggtgtccatggtgcccgaaaataacaatctgactgcgccagagcctcaggaggaggtgtcaaccagtgagaatcctcaattgtag

SEQ ID NO: 190472 - DNA, 1698 bp, Artificial Sequence
  derived and/or modified sequence
atggccgagggcaaggccggcggggccgccggcctgtttgccaagcaggtgcagaagaagttcagccgggcccaggagaaggtgctgcagaagctgggcaaggctgtggagaccaaggatgaaagatttgagcagagcgccagcaacttctaccagcagcaggccgagggccacaagctgtacaaggacctgaagaacttcctgtctgctgtgaaggtgatgcatgagagcagcaagagggtgtctgagaccctgcaggagatctacagcagcgagtgggatggccacgaggagctgaaggccatcgtgtggaacaatgacctgctgtgggaggactatgaggagaagctggccgaccaggccgtgaggaccatggagatctacgtggcccagttcagcgagatcaaggagagaattgccaagaggggcaggaagctggtggactatgattctgcccggcaccacctggaggccgtgcagaatgccaagaagaaggatgaggccaagacagccaaggccgaggaggagttcaacaaggcccagacagtgtttgaggacctgaaccaggagctgctggaggagctgcccatcctgtacaacagcagaattggctgctacgtgaccatcttccagaacatcagcaacctgagagatgtgttctaccgggagatgagcaagctgaaccacaacctgtatgaggtgatgagcaagctggagaagcagcacagcaacaaggtgtttgtggtgaagggcctgagcagcagcagcagaagaagcctggtgatcagcccccctgtgaggacagccaccgtgagcagccccctgaccagccccaccagccccagcaccctgagcctgaagtctgagagcgagagcgtgtctgccacagaggacctggccccagatgctgcccagggcgaggacaacagcgagatcaaggagctgctggaggaggaggagattgagaaggagggcagcgaggccagcagcagtgaagaagatgagcccctgcctgcctgcaatggacctgcccaggcccagcccagccccaccacagagcgggccaagagccaggaggaggtgctgcccagcagcaccacccccagccctgggggcgccctgagccccagcggccagcccagcagcagcgccacagaggtggtgctgcggaccaggacagccagcgagggcagcgagcagcccaagaagagggccagcatccagaggaccagcgccccacccagcaggcctcctccaccccgggccacagccagcccccggcccagcagcggcaacatccccagcagccccacagccagcggcggcggcagccccaccagcccccgggccagcctgggcaccggcacagccagccccaggaccagcctggaggtgagccccaaccctgagcccccagagaagcctgtgaggaccccagaggccaaggaaaatgaaaacatccacaaccagaaccctgaggagctgtgcaccagccccaccctgatgaccagccaggtggccagcgagcccggggaggccaagaagatggaggacaaggagaaggacaacaagctgatcagcgccaacagcagcgagggccaggaccagctgcaggtgtccatggtgcctgagaacaacaacctgacagcccctgagccccaggaggaggtgtccaccagcgagaacccccagctgtag

SEQ ID NO: 190473 - DNA, 1698 bp, Artificial Sequence
  derived and/or modified sequence
atggccgagggcaaggccggcggcgccgccggcctgttcgccaagcaggtgcagaagaaattcagccgggctcaggagaaggtgcttcagaagctggggaaagccgtcgagacaaaagatgaacggtttgaacagtccgcctctaatttttatcagcagcaggctgagggccacaagctatataaagacttaaagaactttctctccgctgtcaaggtgatgcatgagtcaagcaagagggtaagtgaaactctccaggagatttatagtagcgaatgggacgggcatgaagagcttaaagctatagtatggaataatgacctgctttgggaagactacgaggagaagctggccgatcaagccgttaggaccatggaaatttatgttgcccagttctccgagataaaggagaggattgccaagcgtgggaggaaactcgtggactatgacagtgctagacaccacctcgaggccgtccagaatgcgaagaaaaaagacgaagcaaagaccgccaaagctgaggaagagtttaataaagcccaaaccgtgttcgaggacctcaaccaggagctgctcgaagagctgcctatcctctataactctagaatcggatgctatgtcacgatcttccagaacatatccaacctccgggatgtcttctaccgagaaatgtcaaagctcaatcataacttgtacgaagtgatgtctaaactcgaaaagcagcacagcaataaggtttttgtggtgaagggcctgtctagttcgtcccgacgcagcctggtgatcagcccccctgtcaggacagccactgtcagctcaccactgactagcccaacatctccctcaacacttagtttaaaatcagaatctgaatccgtgagtgccacggaagatctggctcccgatgcagcccagggggaggacaatagcgaaattaaggagttattggaggaggaggagattgaaaaagaggggtctgaagccagcagtagtgaggaggatgaacctctgcccgcctgtaacggccctgctcaggcccaaccctcccctacaactgagcgagcaaagtcccaagaggaggtactgccctcttctaccaccccgtctcccggaggggcgctgtcaccaagcgggcagcctagcagttccgcgacggaagtggtgttacgcacacgaaccgctagtgaagggagcgaacagccaaaaaaacgtgcctcaatacagcggacttcagcacctcccagtcggccaccccccccgcgcgccacagctagcccgcggccttctagcggcaatattccttcttcaccaacagctagcgggggaggctctcccaccagcccgcgagcgagcctgggaaccggcactgcgtctcctagaacgtctctggaagtttcccccaaccccgagccgcccgagaaaccagttaggaccccggaggccaaagagaacgaaaatatacataatcagaacccagaagagttgtgcacatctccaaccctaatgacgtctcaagttgcctccgaacctggggaagccaaaaaaatggaggacaaggaaaaggacaacaagttgatctcagctaatagctcggaaggtcaggatcagctgcaggtgagcatggtaccagagaacaacaacctgacagcccctgagccacaggaagaagtgtccacaagtgaaaacccacaactatag

SEQ ID NO: 190474 - DNA, 1698 bp, Artificial Sequence
  derived and/or modified sequence
atggccgaggggaaagccggaggtgccgctggcctgtttgccaagcaagtgcaaaagaaattctcccgagctcaggagaaggtgctccagaagctcgggaaggcggttgagactaaggacgagagatttgaacagagtgcttcaaacttctatcaacagcaggctgaggggcacaagctatacaaagacctgaagaacttcctgagcgctgttaaggtaatgcacgagagtagcaagcgggtatccgagaccctccaggagatttactcctctgagtgggatggacacgaagagcttaaagcaatcgtgtggaacaatgacctgctgtgggaggactatgaggagaaactagctgaccaagcagtgcggacgatggaaatctacgttgcccagttttccgagataaaggagcggatcgccaagcggggaaggaagctggtagactatgatagtgcaaggcaccatctagaagccgtccagaatgcaaagaagaaagatgaggcaaaaacagcaaaagcagaggaagagttcaataaagcacaaacagtgttcgaggatctaaaccaggagctgctagaggagctaccaatcttgtataacagtagaatcgggtgctatgtaacgatttttcagaatattagcaatcttcgagatgtattctaccgggaaatgagtaagctaaaccacaacctgtatgaggttatgtccaagctggaaaaacaacactccaataaggtttttgtggtgaagggccttagctcctcgtcacgccgatccctggttatcagcccccctgtcaggaccgcgacagtgtcttctcccctgacctcgcccacctccccctctacactgtccctgaagtcagaatctgagtcagtcagcgccacagaggatttggcccctgacgccgctcagggggaagataacagcgagattaaggaactgctggaggaagaggagatcgagaaggaaggttccgaagctagctcctcagaagaggatgaacctctccccgcttgcaacggtcccgctcaggctcaacccagccctacaacagaacgagccaaatcacaggaggaggttctcccctccagcacaacaccctccccagggggtgcgctgagccctagtggccagccatcgagctccgcaaccgaggttgtgctccggactcgaacagcaagcgaggggtcagagcagcccaagaaaagggctagtattcagaggacctccgcccctccttctcgacctcctccacctcgtgctaccgcctcacccaggccctcttcgggcaacatcccctcatcccctacggccagtggaggaggttcccctacatccccgagggcaagcctgggtaccggaaccgcaagccctcggacctcccttgaagtgtctccgaatcccgaacctccagagaagcccgtgagaactccggaggctaaagagaatgagaatattcacaatcaaaaccctgaagagctttgcaccagcccaactctgatgacgtctcaggtagcctcagagcccggagaggccaagaaaatggaggacaaagagaaagataataagctgatatccgcaaattcttctgaagggcaagaccagctgcaagtttccatggtacctgagaacaataacctgactgctcccgagcctcaggaagaggtatctactagcgagaacccacagctgtag

SEQ ID NO: 190475 - DNA, 2210 bp, Artificial Sequence
  derived and/or modified sequence
agaaaaccacagggcgcggggccagggcggcggcccccagggagttggcaggatggcagagggcaaggcaggcggcgcggccggcctcttcgccaagcaggtgcagaagaagtttagcagggcccaggagaaggtgctgcagaaattggggaaagctgtagaaaccaaagatgaacgatttgaacaaagcgctagcaacttctaccaacaacaggcagaaggccacaagctgtacaaggacctgaagaacttccttagtgcagtcaaagtgatgcatgaaagttcaaaaagagtgtcagaaaccctgcaggagatctacagcagcgagtgggacggtcatgaggagctgaaggccatcgtatggaataatgatctcctttgggaagactacgaggagaaactggctgaccaggctgtaaggaccatggaaatctatgttgcccagttcagtgaaattaaggagagaattgccaagcggggtcggaaactcgtggactatgacagtgcccgacaccacctggaggcagtgcagaatgccaagaagaaagatgaggccaagactgccaaggcagaggaagagttcaacaaagcccagactgtgtttgaagatctgaaccaagaactactagaggagctgcctattctttataatagtcgtattggctgctatgtgaccatcttccaaaacatttccaacttgagggatgtcttctacagggaaatgagcaagctgaaccacaatctctacgaggtgatgagcaaactggagaagcaacattccaataaagtctttgtggtgaagggactgtcaagcagcagcaggcgctctttagtcatttctcccccagttcgaacagctacagtctccagtcctcttacctcacctactagtccctctacactttccttgaagagtgagagtgaatctgtctcagcaactgaagatctggcacctgatgcagcccaaggggaagacaattctgagatcaaggagctcttagaagaggaggaaatagagaaggaaggatctgaagcaagctcctctgaggaagatgagcctctaccagcctgcaatggccccgcccaggcccagccctctcctaccactgaaagggccaagtcccaggaggaagttctccccagctccacaactccatcaccaggcggagccctgagcccttcagggcagccttcatcatctgccacagaagtagtcctccgaacccgcaccgcaagtgaaggatctgaacaaccaaagaagagagcctctatccagaggacctcagcaccccctagtaggcctcctccacccagagccactgcaagccccaggccctcctcagggaacataccttccagccctacagcctctggagggggttcacccaccagccctagggcctccttggggactgggactgcaagtcctaggacctccctagaggtctctcctaatccagaaccaccagagaagccagtaagaactcctgaggccaaagaaaatgaaaacatccacaatcagaaccctgaagaactttgtacttcccccaccttaatgacatctcaggttgcttcagagcctggagaggcaaagaagatggaagacaaggaaaaggataataagcttatctcagctaactcctcggagggccaagaccagcttcaagtctccatggtaccagaaaacaacaacctcacagcacctgaacctcaagaagaggtatccacaagtgaaaatccacaactctgaagagaaactaccaagactcctcctgccccaaacctcgccagagaagctcttcaaccagagggtataggtcagagggatataagagccagcatccatccctgggttctcagtaggaatgctggtgctgtctaaagacctggcattaatggaggcggaggagcagccttacgggagggatggagggaggcaggctggggagaagagaacattagactcagggaatatttaattctggttttagcattattagaataagactttatacattaactaaagtggagctttaatcactataaaaagcaaaagtatctatagacacagacacttgcctatacagagacataaccacacacactcagaggatagtgaacaaatctgtctttgacttacgacccattttgcaagacttaaagccggaagaacacattttcagattgttaaataaagtctgattctgact

SEQ ID NO: 190476 - DNA, 1698 bp, Artificial Sequence
  derived and/or modified sequence
atggccgagggcaaggccggcggcgccgccggcctgttcgccaagcaggtgcagaagaagttcagcagagcccaggagaaggtgctgcagaagctgggcaaggccgtggagaccaaggacgagagattcgagcagagcgccagcaacttctaccagcagcaggccgagggccacaagctgtacaaggacctgaagaacttcctgagcgccgtgaaggtgatgcacgagagcagcaagagagtgagcgagaccctgcaggagatctacagcagcgagtgggacggccacgaggagctgaaggccatcgtgtggaacaacgacctgctgtgggaggactacgaggagaagctggccgaccaggccgtgagaaccatggagatctacgtggcccagttcagcgagatcaaggagagaatcgccaagagaggcagaaagctggtggactacgacagcgccagacaccacctggaggccgtgcagaacgccaagaagaaggacgaggccaagaccgccaaggccgaggaggagttcaacaaggcccagaccgtgttcgaggacctgaaccaggagctgctggaggagctgcccatcctgtacaacagcagaatcggctgctacgtgaccatcttccagaacatcagcaacctgagagacgtgttctacagagagatgagcaagctgaaccacaacctgtacgaggtgatgagcaagctggagaagcagcacagcaacaaggtgttcgtggtgaagggcctgagcagcagcagcagaagaagcctggtgatcagcccccccgtgagaaccgccaccgtgagcagccccctgaccagccccaccagccccagcaccctgagcctgaagagcgagagcgagagcgtgagcgccaccgaggacctggcccccgacgccgcccagggcgaggacaacagcgagatcaaggagctgctggaggaggaggagatcgagaaggagggcagcgaggccagcagcagcgaggaggacgagcccctgcccgcctgcaacggccccgcccaggcccagcccagccccaccaccgagagagccaagagccaggaggaggtgctgcccagcagcaccacccccagccccggcggcgccctgagccccagcggccagcccagcagcagcgccaccgaggtggtgctgagaaccagaaccgccagcgagggcagcgagcagcccaagaagagagccagcatccagagaaccagcgccccccccagcagaccccccccccccagagccaccgccagccccagacccagcagcggcaacatccccagcagccccaccgccagcggcggcggcagccccaccagccccagagccagcctgggcaccggcaccgccagccccagaaccagcctggaggtgagccccaaccccgagccccccgagaagcccgtgagaacccccgaggccaaggagaacgagaacatccacaaccagaaccccgaggagctgtgcaccagccccaccctgatgaccagccaggtggccagcgagcccggcgaggccaagaagatggaggacaaggagaaggacaacaagctgatcagcgccaacagcagcgagggccaggaccagctgcaggtgagcatggtgcccgagaacaacaacctgaccgcccccgagccccaggaggaggtgagcaccagcgagaacccccagctgtag

SEQ ID NO: 190477 - protein, 709 aa, Artificial Sequence
  derived and/or modified sequence
MGKARRSPPGHHRHCEGCFNRHCHIPVEPNTSCLVISCHLLCGATFHMCKEAEHQLLCPLEQVPCLNSEYGCPLSMSRHKLAKHLQVCPASVVCCSMEWNRWPNVDSETTLHENIMKETPSEECLDTALALQDQKVLFRSLKMVELFPETREATEEEPTMNGETSVEEMGGAVGGVDIGLVPHGLSATNGEMAELSQEEREVLAKTKEGMDLVKFGQWENIFSKEHAASALTNSSASCESKNKNDSEKEQISSGHNMVEGEGAPKKKEPQENQKQQDVRTAMETTGLAPWQDGVLERLKTAVDAKDYNMYLVHNGRMLIHFGQMPACTPKERDFVYGKLEAQEVKTVYTFKVPVSYCGKRARLGDAMLSCKPSEHKAVDTSDLGITVEDLPKSDLIKTTLQCALERELKGHVISESRSIDGLFMDFATQTYNFEPEQFSSGTVLADLTAATPGGLHVELHSECVTRRHNKSSSAFTFTCNKFFRRDEFPLHFKNVHTDIQSCLNGWFQHRCPLAYLGCTFVQNHFRPPGQKAKVIYSQELKTFAIKPEVAPELSEGRKNNHLLGHGGKSQNSLTSLPLEILKYIAGFLDSVSLAQLSQVSVLMRNICATLLQERGMVLLQWKKKRYSHGGTSWRVHREIWQFSSLFSKIKSWEFNEVTSMSEHLKSCPFNIVEHKTDPILLTSMCQPREQARESLVSTFRIRPRGRYVS

SEQ ID NO: 190478 - DNA, 5926 bp, Artificial Sequence
  derived and/or modified sequence
ctgttctggccttgaaaatgatccttcttaaaaggattttcctccttcctcaagggaaagaaaacctattgatataaaacttcacttcccattcagtttcccctgctaaatgccactccagtagagactgagtgttgataaatacaggggaaggaaaaagtcgtaagctgagcctggtcacattgccccttgtgatatcgttttatttttaacttcgcaacacttggactatttctgttgaagttttctctcctttccctgccttcccaacagaacgctgtcctctactgcagctgatgcaacccagccacctcccggcaatccgcttacttgcaatcaagggttcaggtgcaagcagatgctgactcagcctgttccattaagagctaagaagcaagaagaaattggggcgccatggggaaagcccgcagatccccgccagggcaccacaggcattgtgagggatgcttcaaccgccactgccacattcctgtggaacccaacacctcctgcctggtaataagctgccacctgctctgtggtgccaccttccacatgtgcaaagaggcagagcaccagctcctctgccctttagagcaggttccgtgcctcaactccgaatatggctgccctctgtccatgtcccgccacaaactggccaagcacctgcaggtgtgccccgccagcgtggtctgctgctccatggagtggaaccgctggccaaatgtggactctgaaaccacccttcatgaaaacatcatgaaagagacccccagtgaggagtgtttggacacagccctggccctgcaggatcagaaggtcctcttcagatccttgaaaatggtggaacttttcccagaaactagagaggctactgaggaggaaccaactatgaatggtgaaaccagtgtggaggaaatgggaggagcagtgggtggagtggatatcggtttggtaccacatggtctgtcagcaactaatggggagatggcagagctaagtcaagaagaacgggaggtgctagccaaaaccaaagaagggatggacctggtcaagtttggccagtgggaaaatattttcagcaaagagcacgcagcctctgctttaacaaattcatcagcgagctgtgagagcaagaacaagaatgactccgagaaagaacagatttccagtggccataacatggtagaaggagagggcgctcccaaaaagaaagaaccacaggaaaatcagaagcagcaggacgttcgtacagccatggaaaccacagggcttgccccttggcaggatggtgttctggaaagactgaaaacagctgtggatgcaaaggactataacatgtatctagtgcacaatgggcggatgctgatacactttggtcagatgcctgcttgtacacccaaggagagagactttgtttatggcaagctggaggctcaggaagttaagactgtttacaccttcaaagttcctgtgagctactgtggaaagcgagctcgacttggagatgccatgttgagttgtaagccaagtgaacacaaggcagtggatacttcagatttggggatcactgtggaggacctgcccaaatcagatctcatcaagaccaccctccagtgtgctttggaaagagaactcaaaggccacgtcatctctgaatccagaagcattgatggactgttcatggattttgccacacaaacatacaactttgagccagaacagttttcctctgggacagtgctggctgacctaaccgctgccaccccagggggactccacgtggagctccacagcgagtgtgtgaccaggagacacaacaaaagcagctctgccttcactttcacttgcaacaaattcttcaggagggatgagttccccctgcacttcaagaatgtccacacagacattcagtcatgtctcaatggctggttccagcatcgatgccccctcgcctacttgggatgtacatttgttcaaaaccatttccgtcccccagggcaaaaggcaaaagtaatctatagccaggagctcaagacctttgccattaagccggaggttgctccagagctgagcgagggaaggaagaacaaccatcttttgggtcatggaggaaaaagccagaattctttaaccagcctgcccctggagattttgaagtacattgctgggttcttggacagcgtcagcctggcccagctctcccaggtgtctgtgctgatgaggaatatctgtgccactttgttacaagagagaggaatggtccttttgcaatggaagaaaaagaggtattcccatggaggcacctcctggagagtccacagagagatctggcagttcagcagcctcttctccaaaatcaagagctgggagtttaatgaagtcacctccatgtctgagcacctgaagtcctgtcctttcaacattgtagagcacaaaactgacccgattcttttgactagcatgtgtcagccccgtgagcaggcccgagagagcttagtctccacctttagaatcagaccacgaggaagatacgtctcctaaaaattcagatgccactcgatgcacccttcttggatttcttctcggagttcctgaagtaggacagagtgtgtggttttgaggactcccttctgtaaactgcctatttgcttatcggggtgtattggaacacgcaatgtccttcgaaacctcaacacgaggcctaagaatttcctaagccatgtcttgtaccatagtgccacattgatgacttgtttccttttttcttttcttttcttttcttttttctttctttctaaaatagattggtctgagaagaaaataagtaatttgaggccatttggaagatgggcccaatttcttaagtgatgagagagcacgaaattccataaccagtacaggcctgtgcttttacatgggctttttagttcacaaagcactttcaaatttatgggacaggaaatgcaggatgggactccccagggaacgcagggtgaagggaacaaagctggaggctctggagctgggtctgttttgacggtcaagtccagggctcattttggttattctactgcctctaggccagggtagtcctaacacagcctgacataggagagcccctggctgagcatggcagccttgaagacaccacaggccaaaacatgaggggcagaaatgggatcacagagtctgttgctagaatcttggcaacatacagcaggaaagccttgataaatcgggagtccaaaggagacaccatatttatggagaacattaggacaaaaagtcaccaacttactttgtaacattttaataatgacttaagggtcaagatttttttcttctgaaaattatgttctgagttaggcagaacatagccatggccctgggccaccctgtgctatctgaaatgacctcaatacactaatgccaacctcagcgtcatgccagaatgcacagggcagcccagggagatcacacctttggcaaagtccagacaaggcccactgcagttcctatggcgccagtcaccagctcctagacagcacttgggtaccccattggggtcttggagaggaagacatgtgaacataacggctccctgaaattgctcctacccatccatatttctggtcatgctttcagtctgacaaaaatggatgatactgctgtttttggtaacaaacagtgaatattcataagaacaaaagtaaaagaaaaaaagacacagtagaaactggcatcccctaaagcagggcttcttagccttggaactattgacatttttaaatggataattctttttttttttttctaggtggggaggggatggagttcactcttgttgcccaggctggagcgcaatgacatgatctcggctcaccgcaacctccgcctcctgggttcaagcgattctcctgcctcagcctcccgagtagctgggattactcgcctggctaattttgtatttttagtagagacgggctttctccatgttgttcaggctggtctcaaactcccgacctcaggtgactcgcccgccttggccttccaaagtgctgggtttacaggtgtgagccactgcgccctgcctgaactggataattctttgttgcaagggactgttctgtgtactacaggatacttggcagcatccttggcctatccattaaatgtcagtagcacccccacagtggcaacaatcaaaaatgtcaccagacattgctaaatattggggagcaaaatggctccccgttgaaaatccctaaaggatgtcatactagtgacaataagttaggatatgcttattttttagtacagcaaaatcttatcgcacatagctatccacaatagttatgatttaatgcagctctttatttatgaaataggttttagacatgtggtgattttaagttgggaaccagaaggaaatgattcgtttggtatggcttcatgtccttcagccacccccaagaatgtatcctttcagctctctttggttatacctgaagccaggagcgttgagttattagccttgtgtttatattcctctcactgtaattggtgtcattttcccagcagtcctagcagtcctcaagcaagtgggaaatcggaaaagaaaaggacaggcattgtagggaagcagaggataaagaatttagccaacaaaagaaacaatctagtcaatctgggtgcttttatttcctgggttctctctaaacatggctcagagctggtgtagatgaagtaggtgaaacctctgaaaagagtctagaaggcagtagagcaagtcccagaccagaaacatgctcatcttttcatcgtaatgtgccactcggtactatttggtaatgtcactctatttttcctaatcccatcctttggtttgtatttcatatttgtatataaggcaccattttctaaaaatatgactagggtgtgacctaaggttttattctgtgaagatgagtaactggaaagaagctaacactgcagtgggaaggaaggaagagagttgtccaggtggtagttcgacgtgttttgaatctagtccttcctacatggaggataaaagctcctaaagtccactctgggtttgtgattttaatagaaatagaaagggaaactatagaccaatggagatgaaaatcaggggctatcgacagatggaggagaaataaggtgctacatagagaaaggaagagggcagaaggctttcccttcccaaactgggtgagctggggaagccttggttcaggagagtggcactgcccacaactgctttgtgggttgtgcacttccagccgcactctccccctccagttgctgccttcagagccgtactgaagcacgagcttcaataagacaagcacacttcatagtgagagggcagcggtaccaaagcctttcagagagactatggattagacagaaatgatttgtgagaggaagctggagtgaacagcatgaacagcgagtgttacctgacagaggcaagacagctagaagtggcttcagatttagaaacagctgaggggagcaaagacggactgtgtacacagggagggaggatgtctatgggcagagcccttggtgagtatcatcaccaagaaaggcagtccagagtagagatcagccgaatatggaggctgaggtctgtagaactgggccagagaggaccttactgccttagtagcataagggtctggaaaagaagtttctatctcacaacaaaggaaaaagtgaaaagcaaggtggaacttgaagatacgtcacgaaaatcactataaaagtctgatttatgtgtgatgtcaaatcaaactgaaatgaagaatgagattgagtatatctgtggtgactgacctctgtatactagaaacctcaacatctctagaagaggaaataaaagctgctttgcactctg

SEQ ID NO: 190479 - DNA, 2130 bp, Artificial Sequence
  derived and/or modified sequence
atgggcaaagcacgtaggtcacctcccggccatcataggcactgcgaggggtgcttcaaccggcactgccacattcccgtggaacccaacaccagttgtctcgtcatctcttgccatctcctttgcggtgcaacatttcatatgtgcaaagaagccgagcatcaactgttgtgccccctggagcaggttccatgtctgaattcggagtacggctgccccttgagcatgtctcgccacaagctggccaagcatctccaggtgtgccccgcatctgtagtatgctgctctatggagtggaataggtggcctaacgtggactcagagacaacactgcacgagaatattatgaaagagacccccagcgaggaatgcctggataccgctctcgccctgcaggatcaaaaggtgttatttcgctctctcaaaatggtggaactcttccccgagaccagggaggcaacggaggaagaacccactatgaacggcgaaacatctgttgaggaaatggggggtgctgtggggggagtagacatcggactcgtccctcacgggctgagtgcgaccaacggtgagatggctgaattgtctcaggaggagcgggaggtgctcgccaaaacgaaggagggaatggatctggtcaaatttggacagtgggaaaacatattctctaaggagcatgccgcatctgccctaactaatagctcagccagctgcgaatctaagaacaaaaacgatagtgagaaagagcaaatcagctcggggcacaatatggtggagggcgaaggggcgcccaaaaagaaggaaccacaggagaaccagaagcagcaggacgtgaggactgctatggagactacaggtttggccccttggcaggacggcgtccttgagcggctgaagaccgctgtagatgctaaggattataatatgtaccttgtgcacaacggccgtatgctcatccacttcggacagatgcccgcttgtacacctaaggagcgagacttcgtctacggcaagctggaggcacaggaggtgaagactgtctacaccttcaaggtgccagtctcttactgcggaaagcgcgcacgcctgggcgacgccatgctcagttgcaagcccagcgagcataaggccgtagacacaagtgatctgggcatcaccgttgaggatctccctaagtctgacctaatcaagaccacactccaatgtgcccttgagagagagctaaaaggtcacgtgatttccgagtccaggtcaattgatgggctgttcatggatttcgccacacagacctacaattttgaaccagagcagttctccagcggaacagtactggccgatctgaccgctgctactccaggtggcctacatgtggaacttcactctgaatgcgtgactcgcagacacaacaagtcttccagtgccttcactttcacctgcaacaaattctttcggagagacgagtttccgctccattttaagaatgtgcacacagacatacaatcctgcctcaacggatggtttcagcatcggtgtcccttagcttacctgggatgcacctttgtccaaaaccactttaggccacccggccagaaggcgaaggtcatctacagccaagagctaaagacctttgccattaagcctgaagtggcaccagaactgtctgagggccgcaagaacaatcacctccttggacacggcggaaagagtcaaaattctcttacctctcttccactggaaatcttgaaatatatcgccggctttttggattctgtgagcctagcacagttgagccaggtgagcgtgttgatgcggaatatctgcgcgaccctcctgcaagagcggggcatggtgctgctccagtggaagaagaagaggtattcgcatggcgggaccagctggcgggtgcaccgtgaaatttggcaatttagctctctgtttagcaaaatcaagagttgggaatttaatgaggtcacatctatgagtgagcacctaaaatcatgccccttcaacatagttgaacacaaaaccgaccccattctcctgaccagcatgtgtcaacctcgggaacaggcaagagaaagcttagttagtacgttcaggatcagaccacgcggtcggtacgtctcctag

SEQ ID NO: 190480 - DNA, 2130 bp, Artificial Sequence
  derived and/or modified sequence
atgggcaaggcccggcgcagccccccaggccaccaccgccactgtgagggctgcttcaacagacactgccacatccctgtggagcccaacaccagctgcctggtgatcagctgccacctgctgtgtggggccaccttccacatgtgcaaggaggccgagcaccagctgctgtgccccctggagcaggtgccctgcctgaacagtgaatatggctgccccctgtccatgagccgccacaagctggccaagcacctgcaggtgtgcccagcctctgtggtgtgctgcagcatggagtggaaccgctggcccaacgtggacagcgagaccaccctgcacgagaacatcatgaaggagaccccatctgaagaatgtctggacacagccctggccctgcaggaccagaaggtgctcttccgcagcctgaagatggtggagctgtttcctgagacccgggaggccacagaggaggagcccaccatgaatggagagacctctgtggaggagatgggcggcgctgtgggcggcgtggacatcggcctggtgccccacggcctgagcgccaccaatggagagatggccgagctgagccaggaggagcgggaggtgctggccaagaccaaggagggcatggacctggtgaagtttggccagtgggagaacatcttcagcaaggagcacgccgccagcgccctgaccaacagcagcgccagctgtgagagcaagaacaagaatgacagcgagaaggagcagatcagcagcggccacaacatggtggagggggagggcgcccccaagaagaaggagccccaggagaaccagaagcagcaggatgtgaggacagccatggagaccaccggcctggccccctggcaggatggagtgctggagcggctgaagacagctgtggatgccaaggactacaacatgtacctggtgcacaacggccgcatgctgatccacttcggccagatgcctgcctgcacccccaaggagcgggactttgtgtatggcaagctggaggcccaggaggtgaagacagtgtacaccttcaaggtgcctgtgtcctactgcggcaagagggcccggctgggagatgccatgctgagctgcaagcccagcgagcacaaggctgtggacaccagtgacctgggcatcaccgtggaggacctgcccaagagtgacctgatcaagaccaccctgcagtgtgccctggagcgggagctgaagggccacgtgatcagcgagagccgcagcattgatggcctcttcatggactttgccacccagacctacaactttgagcctgagcagttcagcagcggcaccgtgctggccgacctgacagctgccacccctgggggcctgcacgtggagctgcacagtgaatgtgtgacccggcggcacaacaagagcagcagcgccttcaccttcacctgcaacaagttcttcagaagagatgagttccccctgcacttcaagaatgtgcacacagacatccagagctgcctgaatggctggttccagcaccgctgccccctggcctacctgggctgcacctttgtgcagaaccacttccggcccccaggccagaaggccaaggtgatctacagccaggagctgaagacctttgccatcaagccagaggtggcccctgagctgtctgagggcaggaagaacaaccacctgctgggccatggaggcaagagccagaacagcctgaccagcctgcccctggagatcctgaagtacatcgccggcttcctggacagcgtgtccctggcccagctgagccaggtgtctgtgctgatgaggaacatctgtgccaccctgctgcaggagcggggcatggtgctgctgcagtggaagaagaagcgctacagccacggcggcacctcctggagggtgcaccgggagatctggcagttcagcagcctcttcagcaagatcaagtcctgggagttcaatgaggtgacctccatgtctgagcacctgaagagctgccccttcaacatcgtggagcacaagacagaccccatcctgctgacctccatgtgccagccccgggagcaggcccgggagagcctggtgtccaccttccgcatccggccccggggccgctacgtgtcctag

SEQ ID NO: 190481 - DNA, 2130 bp, Artificial Sequence
  derived and/or modified sequence
atgggcaaggcccggcggagcccccccggccaccaccggcactgcgaaggatgctttaatcggcattgccacatccccgtagaacctaatacctcttgtctggtaatcagctgtcacctcctgtgcggtgccacctttcacatgtgtaaagaggccgagcaccagctgttgtgccctctggagcaggttccttgcctgaacagcgaatacggctgccccctttccatgagccggcacaagctggccaaacatctgcaagtttgcccagcaagtgtggtatgctgctccatggagtggaaccgatggcctaacgtcgactctgagacaaccttgcatgagaacataatgaaggaaaccccctctgaggagtgcctcgataccgctctggcactgcaggatcagaaggtcctgtttcgttcactgaagatggtcgaactgttcccagagaccagagaagctaccgaagaagaaccgactatgaatggcgaaacttccgtagaagagatgggcggcgccgtgggaggggtggatattgggctggtgcctcacggactgtccgccactaatggggaaatggccgaactatcacaggaggaacgggaagtacttgccaaaactaaggagggaatggatttggtgaagtttggtcagtgggaaaatatcttctccaaagagcatgcagctagcgctttaacaaatagcagtgctagctgtgagagcaaaaacaaaaacgatagtgagaaggagcagataagtagcggtcataacatggtggagggagaaggtgctcctaagaaaaaggagccacaggagaaccagaagcagcaggacgtgagaacggctatggaaactactggcctggccccgtggcaggacggggttctggagaggctgaaaacagcagtggacgccaaggactataacatgtacctagttcataacgggcgcatgctcatccacttcggacaaatgcccgcgtgcacgcctaaggagcgtgacttcgtgtatggtaagctcgaagcacaggaagtcaaaactgtttatacattcaaggtgcctgtgtcctactgcggcaagagggcacgccttggggatgccatgttgtcttgtaagcccagcgagcacaaggctgtggataccagcgatctgggcatcacagttgaggatcttcccaagagcgatctgatcaaaaccaccctgcaatgcgctctggagcgtgaactcaaaggccatgtgatatccgagtcaagatcaatcgatggcttgttcatggactttgcaacacagacctacaattttgaacctgagcagttctcttcagggactgtgctggccgacctgacagccgcaacacccggtgggcttcatgttgagctccacagcgagtgcgtaacacggcgtcataataagtcaagttctgcatttacgtttacgtgtaataaatttttcagacgcgatgaattcccactgcattttaaaaacgtgcatactgacatacagagctgcctcaacggatggtttcagcataggtgtccgcttgcatatttggggtgcacgtttgtccagaaccactttagacctcctggccagaaggcaaaagtgatctacagtcaggagctcaagaccttcgcaatcaagccagaggtcgctccagagctttcagaaggccggaagaataatcaccttctggggcatggcggcaagtcccagaatagcttgacctccctccctcttgaaatcttaaaatacattgcgggatttctcgacagtgtgtctctcgcacagctgtcacaagtgtctgtgctgatgcgcaatatctgtgctaccttgctccaagagaggggtatggtgttgctccagtggaagaagaaaagatattcacacggaggaacctcctggcgagttcacagggagatctggcagtttagttctctgtttagtaaaatcaaatcatgggaattcaacgaagtcacgtccatgagtgagcacttgaagagctgtcccttcaatattgttgaacacaagacagatcctatactattgacttccatgtgccaacctagagagcaggcccgcgaatcactcgtcagtactttccgcatcaggccacgaggacgctatgtaagttag

SEQ ID NO: 190482 - DNA, 2130 bp, Artificial Sequence
  derived and/or modified sequence
atgggtaaagctcggaggtctccccctggacaccataggcactgcgaaggttgcttcaacaggcattgtcacattccagtcgagccaaatacttcttgcctggtgatcagttgtcatctcctatgtggagccacctttcacatgtgcaaggaggctgaacaccagctcctttgcccactggaacaagtgccctgtttaaattctgagtacggctgcccactcagcatgagtaggcacaagctcgccaaacatctccaggtgtgccctgcctccgtcgtgtgttgttctatggagtggaacaggtggcccaatgtagacagcgaaacaacacttcatgagaacattatgaaagaaacaccttccgaggagtgtctagacacagcccttgcattacaagaccagaaggttctgtttaggtcgctgaaaatggtggagttatttcccgagactagggaggccaccgaggaagagccaacgatgaacggcgaaacatccgtggaagagatggggggtgctgtaggtggcgtcgatatcgggctggtgcctcacggcctctccgccacaaacggggaaatggctgagttaagccaagaggaacgcgaggttttagctaaaactaaggagggaatggatctggtcaagttcgggcagtgggaaaacatctttagcaaagagcatgccgcttccgcactcacaaattcatcagcaagttgcgaatcgaagaacaagaacgatagtgagaaggagcagatcagttccgggcacaacatggtcgaaggcgaaggggctcccaaaaaaaaggagccccaggagaaccagaaacagcaagatgtgagaacagccatggagaccaccgggctggccccatggcaggacggggtattggaaagactcaaaacagctgtcgacgccaaggactacaatatgtacctggttcataatggcaggatgctgattcacttcggccaaatgccagcctgcaccccaaaagaaagggacttcgtgtatggcaagttggaagctcaggaggttaagaccgtgtacaccttcaaggttccagtgtcctactgcggtaagagagctcggttgggcgatgctatgctaagctgtaaaccctccgagcataaagctgtcgacacttctgatctgggaatcaccgtggaggacttgcctaagtctgacctgataaaaacgacactccagtgcgccctggaaagagagttaaaagggcacgtgattagcgagtctcgatccattgacggcttgttcatggacttcgcaacacagacctataacttcgagccagagcagttcagttctggcaccgttcttgccgatcttacagccgctacccctggcggtttgcatgtggaactacactccgagtgcgtcacaaggcgccataacaaaagttcctccgcatttacttttacctgtaacaagtttttcagacgagatgaattccctctccattttaaaaatgtgcacacagacatccagtcttgcctaaatggctggtttcagcatcggtgccctctagcctacctgggatgtacctttgtgcagaaccacttccgaccaccaggacagaaagctaaagtaatctacagtcaggaactgaagacctttgccatcaaacctgaggttgcgcctgaattgtcggaaggcaggaagaataaccacctcctcgggcatggaggcaagtcccagaactccctgacgtctctgccgttggaaattctcaagtacattgccggatttcttgattccgtttctctggctcaactcagccaggtcagcgtgctgatgagaaacatttgtgcaaccctactgcaggagcgaggaatggtactgctgcaatggaaaaagaagaggtactcacatgggggtaccagctggcgggtgcaccgagagatatggcagttctcatccctgttctctaaaatcaaaagctgggaattcaatgaggtgaccagcatgagtgagcatctgaagtcatgtccttttaacattgttgaacataaaaccgatcccatactgcttaccagcatgtgtcagccaagggaacaggcacgtgaatcactcgtgagtacttttagaattcgccctcgaggaagatacgttagctag

SEQ ID NO: 190483 - DNA, 2130 bp, Artificial Sequence
  derived and/or modified sequence
atgggcaaggccagaagaagcccccccggccaccacagacactgcgagggctgcttcaacagacactgccacatccccgtggagcccaacaccagctgcctggtgatcagctgccacctgctgtgcggcgccaccttccacatgtgcaaggaggccgagcaccagctgctgtgccccctggagcaggtgccctgcctgaacagcgagtacggctgccccctgagcatgagcagacacaagctggccaagcacctgcaggtgtgccccgccagcgtggtgtgctgcagcatggagtggaacagatggcccaacgtggacagcgagaccaccctgcacgagaacatcatgaaggagacccccagcgaggagtgcctggacaccgccctggccctgcaggaccagaaggtgctgttcagaagcctgaagatggtggagctgttccccgagaccagagaggccaccgaggaggagcccaccatgaacggcgagaccagcgtggaggagatgggcggcgccgtgggcggcgtggacatcggcctggtgccccacggcctgagcgccaccaacggcgagatggccgagctgagccaggaggagagagaggtgctggccaagaccaaggagggcatggacctggtgaagttcggccagtgggagaacatcttcagcaaggagcacgccgccagcgccctgaccaacagcagcgccagctgcgagagcaagaacaagaacgacagcgagaaggagcagatcagcagcggccacaacatggtggagggcgagggcgcccccaagaagaaggagccccaggagaaccagaagcagcaggacgtgagaaccgccatggagaccaccggcctggccccctggcaggacggcgtgctggagagactgaagaccgccgtggacgccaaggactacaacatgtacctggtgcacaacggcagaatgctgatccacttcggccagatgcccgcctgcacccccaaggagagagacttcgtgtacggcaagctggaggcccaggaggtgaagaccgtgtacaccttcaaggtgcccgtgagctactgcggcaagagagccagactgggcgacgccatgctgagctgcaagcccagcgagcacaaggccgtggacaccagcgacctgggcatcaccgtggaggacctgcccaagagcgacctgatcaagaccaccctgcagtgcgccctggagagagagctgaagggccacgtgatcagcgagagcagaagcatcgacggcctgttcatggacttcgccacccagacctacaacttcgagcccgagcagttcagcagcggcaccgtgctggccgacctgaccgccgccacccccggcggcctgcacgtggagctgcacagcgagtgcgtgaccagaagacacaacaagagcagcagcgccttcaccttcacctgcaacaagttcttcagaagagacgagttccccctgcacttcaagaacgtgcacaccgacatccagagctgcctgaacggctggttccagcacagatgccccctggcctacctgggctgcaccttcgtgcagaaccacttcagaccccccggccagaaggccaaggtgatctacagccaggagctgaagaccttcgccatcaagcccgaggtggcccccgagctgagcgagggcagaaagaacaaccacctgctgggccacggcggcaagagccagaacagcctgaccagcctgcccctggagatcctgaagtacatcgccggcttcctggacagcgtgagcctggcccagctgagccaggtgagcgtgctgatgagaaacatctgcgccaccctgctgcaggagagaggcatggtgctgctgcagtggaagaagaagagatacagccacggcggcaccagctggagagtgcacagagagatctggcagttcagcagcctgttcagcaagatcaagagctgggagttcaacgaggtgaccagcatgagcgagcacctgaagagctgccccttcaacatcgtggagcacaagaccgaccccatcctgctgaccagcatgtgccagcccagagagcaggccagagagagcctggtgagcaccttcagaatcagacccagaggcagatacgtgagctag

SEQ ID NO: 190484 - protein, 509 aa, Artificial Sequence
  derived and/or modified sequence
MAAIGVHLGCTSACVAVYKDGRAGVVANDAGDRVTPAVVAYSENEEIVGLAAKQSRIRNISNTVMKVKQILGRSSSDPQAQKYIAESKCLVIEKNGKLRYEIDTGEETKFVNPEDVARLIFSKMKETAHSVLGSDANDVVITVPFDFGEKQKNALGEAARAAGFNVLRLIHEPSAALLAYGIGQDSPTGKSNILVFKLGGTSLSLSVMEVNSGIYRVLSTNTDDNIGGAHFTETLAQYLASEFQRSFKHDVRGNARAMMKLTNSAEVAKHSLSTLGSANCFLDSLYEGQDFDCNVSRARFELLCSPLFNKCIEAIRGLLDQNGFTADDINKVVLCGGSSRIPKLQQLIKDLFPAVELLNSIPPDEVIPIGAAIEAGILIGKENLLVEDSLMIECSARDILVKGVDESGASRFTVLFPSGTPLPARRQHTLQAPGSISSVCLELYESDGKNSAKEETKFAQVVLQDLDKKENGLRDILAVLTMKRDGSLHVTCTDQETGKCEAISIEIAS

SEQ ID NO: 190485 - protein, 128 aa, Artificial Sequence
  derived and/or modified sequence
  misc_feature (1)..(1): Xaa can be any naturally occurring amino acid
XACVAVYKDGRAGVVANDAGDRVTPAVVAYSENEEIVGLAAKQSRIRNISNTVMKVKQILGRSSSDPQAQKYIAESKCLVIEKNGKLRYEIDTGEETKFVNPEDVARLIFSKMKGAYSPWSQSNSEDG

SEQ ID NO: 190486 - DNA, 1530 bp, Artificial Sequence
  derived and/or modified sequence
atggctgcaattggagtccacctcggttgtacttcagcctgtgttgccgtttataaagatggaagggccggtgtcgtggccaacgacgccggagatagggtcacacctgcggtggtcgcatacagcgagaacgaagagattgtcggactggcggcaaagcaatcaagaatcagaaatatatctaacactgtcatgaaagtgaaacagatcctgggaagaagttccagcgacccgcaagcccagaagtatattgccgagtcaaaatgcctcgtaatcgagaaaaatgggaagctgcgttacgagatcgataccggcgaagagacgaagttcgttaatcccgaggatgtggcacgcctcatcttctcaaagatgaaagaaacagctcattccgtactgggcagtgacgcaaacgatgttgttatcacggttcctttcgatttcggtgagaagcagaaaaatgcactgggtgaggcagcccgagctgccggctttaacgtgctccggctcattcacgagcccagcgcggccctcctcgcgtacggcattgggcaagattctccgacgggtaagtcaaacattttagtcttcaagctaggaggaacctctctgtccctgtccgtgatggaagttaactctgggatctatcgcgttctgtccaccaatacagatgataatattggcggggctcacttcactgaaaccctcgcccagtacctggcaagcgagtttcaaaggtcatttaagcacgacgtaagaggcaacgcccgtgccatgatgaaactcacaaattcagctgaagttgccaagcactccctctccactctggggagtgccaactgtttcctcgatagcttatacgaaggccaagacttcgattgtaatgtgtcacgagccagatttgagctcttatgctcacctctttttaacaaatgtatcgaagcgatccgggggctactggaccaaaatggcttcaccgctgatgatattaacaaagtagtgctctgcggagggtcatccaggatcccaaagttacagcagctcattaaggatctgtttcccgcagtcgagcttttaaactccatccctccagacgaagtgattcccataggagccgcaattgaagccggaatcctaatcggaaaagaaaatctcctggtcgaggatagcctgatgattgaatgcagcgctcgcgatattctcgtgaaaggcgttgatgagtcaggggccagcaggttcacagtcctgtttccatctgggactccgctgcccgctagacggcaacacacattacaggctccaggaagtataagctctgtatgcctggaactgtatgagtctgacgggaaaaactccgcgaaggaggagacgaagttcgcccaggtagtcctccaagacctagacaaaaaagagaacggccttagggacattctggcggtcctgacaatgaaacgcgatgggagtctccatgttacttgcaccgaccaggagacaggaaagtgcgaagccatttcaatagaaatcgcgtcatag

SEQ ID NO: 190487 - DNA, 387 bp, Artificial Sequence
  derived and/or modified sequence
taggcttgcgtagcagtttacaaggatggtagggccggcgtcgttgccaacgacgccggcgaccgagtgacacctgccgtggtggcctacagcgaaaatgaagaaatcgtcgggttagccgccaagcagtctagaatcaggaacatctcgaacaccgtgatgaaagttaaacagatactcggtcgatcaagtagcgatcctcaggctcagaagtatatcgccgagagtaaatgtctagtcattgagaaaaatgggaagttgcgatatgagatcgatacaggcgaagagactaaattcgtgaatcccgaggacgtggcccgactgatcttttctaagatgaagggcgcttactctccatggagtcagagtaacagcgaggatgggtag

SEQ ID NO: 190488 - DNA, 1904 bp, Artificial Sequence
  derived and/or modified sequence
gcactgtgcagtttccgcggagcgcagagacgcgctgaagctactcgcggactgcgcgtgaagaaaggcggaaccttcacgctgattggcggcgacgcgggaggctgtagcggccgaccggacgcagggggctggcgggaacgtgaagctccgcggtgcctgatggggccgttgggcggccggtagctgttgctgttgggggaccccctcattcctgccgctgccgtccctgctgcctcatggcggccatcggagttcacctgggctgcacctcagcctgtgtggccgtctataaggatggccgggctggtgtggttgcaaatgatgccggtgaccgagttactccagctgttgttgcttactcagaaaatgaagagattgttggattggcagcaaaacaaagtagaataagaaatatttcaaatacagtaatgaaagtaaagcagatcctgggcagaagctccagtgatccacaagctcagaaatacatcgcggaaagtaaatgtttagtcattgaaaaaaatgggaaattacgatatgaaatagatactggagaagaaacaaaatttgttaacccagaagatgttgccagactgatatttagtaaaatgaaagaaacggcacattctgtattgggctcagatgcaaatgatgtagttattactgtcccgtttgattttggagaaaagcaaaaaaatgctcttggagaagcagctagagctgctggatttaatgttttgcgattaattcacgaaccgtctgcagctcttcttgcttatggaattggacaagactcccctactggaaaaagcaatattttggtgtttaagcttggaggaacatccttatctctcagcgtcatggaagttaacagtggaatatatcgggttctttcaacaaacactgatgataacatcggtggtgcacatttcacagaaaccttagcacagtatctagcttctgagttccaaagatccttcaaacatgatgtgagaggaaatgcgcgagccatgatgaaattaacgaacagtgctgaagtagcgaaacattctttgtcaaccttgggaagtgccaactgttttcttgactcattatatgaaggtcaagattttgattgcaatgtgtccagagcaagatttgaacttctttgttctccactttttaataagtgtatagaagcaatcagaggactcttagatcaaaatggatttacagcagatgatatcaacaaggttgtcctttgtggagggtcttctcgaatcccaaagctacagcaactgattaaagatcttttcccagctgttgagcttctcaattctatccctcctgatgaagtgatccctattggtgcagctatagaagcaggaattcttattgggaaagaaaacctgttggtggaagactctcttatgatagagtgttcagccagagatattttagttaagggtgtggacgaatcaggagccagtagattcacagtgctgtttccatcagggactcctttgccagctcgaagacaacacacattgcaagcccctggaagcatatcttcagtgtgccttgaactctatgagtctgatgggaagaactctgccaaagaggaaaccaagtttgcacaggttgtactccaggatttagataaaaaagaaaatggattacgtgatatattagctgttcttactatgaaaagggatggatctttacatgtgacatgcacagatcaagaaactggaaaatgtgaagcaatctctattgagatagcatcttagtgttttagagaaatcaagaatttttaaaaacaagaatatcaacatttggttttgtgtataagtggtgtttgtattaaaatactttttcaatgaactgtataaactatgttttattaaactacaatatatcagtaa

SEQ ID NO: 190489 - DNA, 578 bp, Artificial Sequence
  derived and/or modified sequence
cagcctgtgtggccgtctataaggatggccgggctggtgtggttgcaaatgatgccggtgaccgagttactccagctgttgttgcttactcagaaaatgaagagattgttggattggcagcaaaacaaagtagaataagaaatatttcaaatacagtaatgaaagtaaagcagatcctgggcagaagctccagtgatccacaagctcagaaatacatcgcggaaagtaaatgtttagtcattgaaaaaaatgggaaattacgatatgaaatagatactggagaagaaacaaaatttgttaacccagaagatgttgccagactgatatttagtaaaatgaaaggagcttattctccatggagtcagtctaattcagaagatggttgatactgaagcctaagagccaggctgtttggaaagctaattctgtgtccaaatatatcaccaaaaccacaagaagtgctgcatgatttcagagcgcagagaagaaaattgacacgggggcggggtgggcaagcaagtgtattgggaaatatgttaagtgagatctttgtcataaattaataaacctcagaaagt

SEQ ID NO: 190490 - DNA, 1530 bp, Artificial Sequence
  derived and/or modified sequence
atggccgccatcggcgtgcacctgggctgcaccagcgcctgtgtggccgtgtacaaggatggccgggccggcgtggtggccaatgatgctggggacagagtgaccccagctgtggtggcctacagtgaaaatgaggagatcgtgggcctggccgccaagcagagccgcatccggaacatcagcaacacagtgatgaaggtgaagcagatcctgggccgcagcagcagtgacccccaggcccagaagtacatcgccgagagcaagtgcctggtgattgagaagaatggcaagctgcgctatgaaattgacaccggggaggagaccaagtttgtgaacccagaagatgtggcccggctcatcttcagcaagatgaaggagacagcccacagcgtgctgggcagtgatgccaatgatgtggtgatcaccgtgccctttgattttggagagaagcagaagaatgccctgggggaggccgcccgggccgccggcttcaacgtgctgcggctcatccacgagcccagcgctgccctgctggcctacggcatcggccaggacagccccaccgggaagagcaacatcctggtgttcaagctgggcggcaccagcctgagcctgtctgtgatggaggtgaacagcggcatctacagagtgctgagcaccaacacagatgacaacatcggcggggcccacttcacagagaccctggcccagtacctggccagcgagttccagaggagcttcaagcatgatgtgagaggaaatgcccgggccatgatgaagctgaccaacagcgctgaggtggccaagcacagcctgagcaccctgggcagcgccaactgcttcctggacagcctgtatgagggccaggactttgactgcaatgtgtcccgggccaggtttgagctgctgtgcagccccctcttcaacaagtgcatcgaggccatccggggcctgctggaccagaatggcttcaccgcagatgacatcaacaaggtggtgctgtgtggcggcagcagccgcatccccaagctgcagcagctgatcaaggacctcttccctgctgtggagctgctgaacagcatccccccagatgaggtgatccccatcggggccgccattgaagctggcatcctgattggcaaggagaacctgctggtggaggacagcctgatgattgaatgttctgcccgggacatcctggtgaagggcgtggatgaaagtggggccagccgcttcaccgtgctcttccccagcggcacccccctgcctgcccggcggcagcacaccctgcaggcccctggcagcatcagctctgtgtgcctggagctgtatgaaagtgatggcaagaacagcgccaaggaggagaccaagtttgcccaggtggtgctgcaggacctggacaagaaggaaaatggcctgcgggacatcctggccgtgctgaccatgaagagagatggcagcctgcacgtgacctgcacagaccaggagactggaaaatgtgaggccatcagcattgaaattgccagctag

SEQ ID NO: 190491 - DNA, 387 bp, Artificial Sequence
  derived and/or modified sequence
tgagcctgtgtggccgtgtacaaggatggccgggccggcgtggtggccaatgatgctggggacagagtgaccccagctgtggtggcctacagtgaaaatgaggagatcgtgggcctggccgccaagcagagccgcatccggaacatcagcaacacagtgatgaaggtgaagcagatcctgggccgcagcagcagtgacccccaggcccagaagtacatcgccgagagcaagtgcctggtgattgagaagaatggcaagctgcgctatgaaattgacacaggagaggagaccaagtttgtgaacccagaagatgtggcccggctcatcttcagcaagatgaagggggcctacagcccctggagccagagcaacagtgaagatggatag

SEQ ID NO: 190492 - DNA, 1530 bp, Artificial Sequence
  derived and/or modified sequence
atggccgccatcggcgtgcacctgggctgcaccagcgcctgcgtggccgtctataaggatggcagagctggggtggtagccaatgatgctggggacagagtgacccccgccgtggtcgcctactccgaaaacgaagagatcgtgggccttgctgccaaacaatctaggataagaaatatcagcaacacagtcatgaaagtcaagcaaatcctgggtagatcctcctctgaccctcaagcccaaaagtacattgcagagtctaaatgtctcgtaattgagaagaatggcaaactccgatacgaaatcgataccggggaggaaactaaattcgtgaaccctgaagacgttgccagactcatcttctcgaagatgaaggaaactgcccactctgtgcttggttccgacgccaacgacgtggtgatcacggtcccctttgattttggagagaaacagaagaatgctctaggtgaagcggcaagggccgccggcttcaacgtgctaagactaatccacgagccttccgccgcccttctggcgtacggcatcgggcaggacagccccactggcaagtctaatatcctcgtgttcaagcttggcggaacaagccttagcctcagcgtcatggaggtgaatagcgggatttaccgtgtcttgagcaccaatactgatgacaatatcggcggggctcacttcacggagaccctggcccagtacctcgcctctgaattccaaaggagctttaaacacgatgttaggggtaacgcccgagccatgatgaagctaactaactccgctgaagtggcaaagcacagtctctccaccctggggagtgccaactgtttcctcgatagtctgtatgagggacaggacttcgattgcaacgtgtccagagccagattcgaactcttatgtagcccattgtttaacaagtgcattgaggctattaggggattgttggatcagaacggcttcactgcagatgacattaacaaagtcgtgctgtgtggtggctccagcaggatccctaagctgcagcagctcattaaagacttgttcccagcggtcgagcttttgaactctatccccccagatgaggtgatcccaatcggtgccgcaattgaggctggaatcctgatcggtaaggagaatctcctggtggaggacagcttgatgatcgaatgtagcgctagggacatattggtcaagggggtggatgaaagtggtgcaagccgcttcacggtgctgttccctagtggcacacctctgccagcccgacggcagcacactctccaggcccccggctctatctcctcagtatgtctcgagctgtacgaatccgatgggaagaacagtgctaaggaagagaccaagtttgcacaggtggtactgcaagacctcgacaagaaggaaaacgggttacgggatatcttggccgtgctgaccatgaagcgcgacggttctctgcacgtgacatgcaccgatcaggagaccggaaaatgtgaagcaatcagcatcgaaatcgccagttag

SEQ ID NO: 190493 - DNA, 387 bp, Artificial Sequence
  derived and/or modified sequence
tgagcctgcgtggccgtgtacaaggacggccgggccggcgtggtggctaacgacgccggcgaccgagtgacccccgctgtggtcgcctactccgagaacgaggaaattgtggggctggccgcgaagcaatccaggatacgaaacatctcgaatacagtcatgaaggtgaagcagatactaggccgcagcagtagcgatcctcaggcccagaagtacatcgcagaaagtaagtgcctggtgattgaaaaaaatggtaagctgcggtatgagatcgatacaggggaggagacaaagttcgttaacccagaagacgtggcgcgtcttattttttccaagatgaaaggtgcatatagtccctggtcccagagcaatagtgaggatggctag

SEQ ID NO: 190494 - DNA, 1530 bp, Artificial Sequence
  derived and/or modified sequence
atggcagccattggagtccacttaggctgcacatccgcctgcgtcgccgtttacaaggacggcagggcaggagtggttgctaatgacgctggagacagggttacccctgccgtggtcgcgtattctgagaacgaggaaattgtgggcttggcggcaaagcagtcaaggatccggaacatttcaaacacggtcatgaaagttaagcagattctaggcagatccagctctgacccccaggcccagaaatatatcgcagaatccaaatgtcttgtcatagagaaaaacggaaagttgcgctacgaaattgatacaggggaggaaactaagttcgtgaacccggaagacgtcgctcgcctgatcttctccaagatgaaggaaacagcccacagcgttctaggcagcgatgctaacgatgtggtgattaccgtaccattcgacttcggcgagaagcaaaagaacgcactcggcgaagccgctcgagcggctggatttaatgtgcttaggcttatacatgagccatctgccgcactcctggcgtatggaattggtcaggacagtcctaccggtaaatctaatatcctggtcttcaagctcggaggcacgtctctaagtctctcggttatggaagttaattcaggaatctatagggtcctgtccaccaacacagacgataacatcggaggagcgcactttacggagactctggctcagtatttggcttcagagtttcaacgctccttcaaacatgatgtgagaggcaatgctagagctatgatgaaattgaccaattctgctgaagtggccaagcatagcttgagtaccctcggaagtgctaactgtttccttgacagtctatatgaaggccaagattttgattgtaatgtgtctcgcgctaggttcgaattactgtgctctcctctttttaataagtgcattgaggccataagagggctcctggatcaaaacggattcactgctgacgacataaataaagttgtactctgcggcggaagcagtcgcatcccgaaactgcagcagctaatcaaggacctttttcctgccgttgagctgcttaattctatccccccagacgaggttatacccatcggggcagccattgaagctggaattttaatcgggaaggagaacttgctggtggaggactctttgatgatcgaatgctccgccagggacatacttgtcaagggggttgacgaatccggggcatccagattcaccgtgctctttccatcgggaactcctctgcctgcaaggcggcagcataccctccaggcccctggctccatatcatctgtctgtttagagctctacgagagcgatggcaagaatagtgccaaggaggaaacgaagttcgcccaggttgtcctgcaagacctggacaaaaaggaaaatggacttcgtgatatcttagctgtccttacaatgaaaagagatggatcattgcacgtgacgtgtaccgaccaggagaccgggaagtgtgaggcgatctccattgagatcgcaagttag

SEQ ID NO: 190495 - DNA, 387 bp, Artificial Sequence
  derived and/or modified sequence
taggcttgtgtagccgtttataaggatggccgagccggagtggtcgctaatgacgccggagatagagtcacccccgcagtggtcgcctatagtgagaatgaagaaatagtgggtcttgctgctaagcagtctaggatccgtaatattagcaacacagtcatgaaggtgaaacaaattctcggcaggagttcctctgatcctcaagctcagaagtacattgccgaatcgaagtgtctggtgatcgagaagaatggcaaactgcggtacgagatcgatacaggggaagagactaagttcgttaatccagaagacgtcgcacgcttgatattcagtaaaatgaagggagcttattcaccctggagccaatctaactcagaggacggctag

SEQ ID NO: 190496 - DNA, 1530 bp, Artificial Sequence
  derived and/or modified sequence
atggccgccatcggcgtgcacctgggctgcaccagcgcctgcgtggccgtgtacaaggacggcagagccggcgtggtggccaacgacgccggcgacagagtgacccccgccgtggtggcctacagcgagaacgaggagatcgtgggcctggccgccaagcagagcagaatcagaaacatcagcaacaccgtgatgaaggtgaagcagatcctgggcagaagcagcagcgacccccaggcccagaagtacatcgccgagagcaagtgcctggtgatcgagaagaacggcaagctgagatacgagatcgacaccggcgaggagaccaagttcgtgaaccccgaggacgtggccagactgatcttcagcaagatgaaggagaccgcccacagcgtgctgggcagcgacgccaacgacgtggtgatcaccgtgcccttcgacttcggcgagaagcagaagaacgccctgggcgaggccgccagagccgccggcttcaacgtgctgagactgatccacgagcccagcgccgccctgctggcctacggcatcggccaggacagccccaccggcaagagcaacatcctggtgttcaagctgggcggcaccagcctgagcctgagcgtgatggaggtgaacagcggcatctacagagtgctgagcaccaacaccgacgacaacatcggcggcgcccacttcaccgagaccctggcccagtacctggccagcgagttccagagaagcttcaagcacgacgtgagaggcaacgccagagccatgatgaagctgaccaacagcgccgaggtggccaagcacagcctgagcaccctgggcagcgccaactgcttcctggacagcctgtacgagggccaggacttcgactgcaacgtgagcagagccagattcgagctgctgtgcagccccctgttcaacaagtgcatcgaggccatcagaggcctgctggaccagaacggcttcaccgccgacgacatcaacaaggtggtgctgtgcggcggcagcagcagaatccccaagctgcagcagctgatcaaggacctgttccccgccgtggagctgctgaacagcatcccccccgacgaggtgatccccatcggcgccgccatcgaggccggcatcctgatcggcaaggagaacctgctggtggaggacagcctgatgatcgagtgcagcgccagagacatcctggtgaagggcgtggacgagagcggcgccagcagattcaccgtgctgttccccagcggcacccccctgcccgccagaagacagcacaccctgcaggcccccggcagcatcagcagcgtgtgcctggagctgtacgagagcgacggcaagaacagcgccaaggaggagaccaagttcgcccaggtggtgctgcaggacctggacaagaaggagaacggcctgagagacatcctggccgtgctgaccatgaagagagacggcagcctgcacgtgacctgcaccgaccaggagaccggcaagtgcgaggccatcagcatcgagatcgccagctag

SEQ ID NO: 190497 - DNA, 387 bp, Artificial Sequence
  derived and/or modified sequence
tgagcctgcgtggccgtgtacaaggacggcagagccggcgtggtggccaacgacgccggcgacagagtgacccccgccgtggtggcctacagcgagaacgaggagatcgtgggcctggccgccaagcagagcagaatcagaaacatcagcaacaccgtgatgaaggtgaagcagatcctgggcagaagcagcagcgacccccaggcccagaagtacatcgccgagagcaagtgcctggtgatcgagaagaacggcaagctgagatacgagatcgacaccggcgaggagaccaagttcgtgaaccccgaggacgtggccagactgatcttcagcaagatgaagggcgcctacagcccctggagccagagcaacagcgaggacggctag

SEQ ID NO: 190498 - protein, 812 aa, Artificial Sequence
  derived and/or modified sequence
MSEQGDLNQAIAEEGGTEQETATPENGIVKSESLDEEEKLELQRRLEAQNQERRKSKSGAGKGKLTRSLAVCEESSARPGGESLQDQESIHLQLSSFSSLQEEDKSRKDDSEREKEKDKNKDKTSEKPKIRMLSKDCSQEYTDSTGIDLHEFLINTLKNNSRDRMILLKMEQEIIDFIADNNNHYKKFPQMSSYQRMLVHRVAAYFGLDHNVDQTGKSVIINKTSSTRIPEQRFCEHLKDEKGEESQKRFILKRDNSSIDKEDNQQNRMHPFRDDRRSKSIEEREEEYQRVRERIFAHDSVCSQESLFVENSRLLEDSNICNETYKKRQLFRGNRDGSGRTSGSRQSSSENELKWSDHQRAWSSTDSDSSNRNLKPAMTKTASFGGITVLTRGDSTSSTRSTGKLSKAGSESSSSAGSSGSLSRTHPPLQSTPLVSGVAAGSPGCVPYPENGIGGQVAPSSTSYILLPLEAATGIPPGSILLNPHTGQPFVNPDGTPAIYNPPTSQQPLRSAMVGQSQQQPPQQQPSPQPQQQVQPPQPQMAGPLVTQRDDVATQFGQMTLSRQSSGETPEPPSGPVYPSSLMPQPAQQPSYVIASTGQQLPTGGFSGSGPPISQQVLQPPPSPQGFVQQPPPAQMPVYYYPSGQYPTSTTQQYRPMAPVQYNAQRSQQMPQAAQQAGYQPVLSGQQGFQGLIGVQQPPQSQNVINNQQGTPVQSVMVSYPTMSSYQVPMTQGSQGLPQQSYQQPIMLPNQAGQGSLPATGMPVYCNVTPPTPQNNLRLIGPHCPSSTVPVMSASCRTNCASMSNAGWQVKF

SEQ ID NO: 190499 - DNA, 2439 bp, Artificial Sequence
  derived and/or modified sequence
atgagcgagcagggggacctgaatcaggctatcgctgaggaaggcggcaccgaacaggagaccgccactcccgagaatgggattgtcaaaagtgaatctctggatgaggaggagaaactggaactgcaacgcagattggaggcacagaaccaggaacggcggaaatcgaagagcggagcaggcaaaggtaaactgaccaggagcctggcagtgtgtgaggaaagctctgcccgaccaggcggagaatcacttcaggaccaggagagcatccaccttcaactgagctctttttccagcttgcaggaggaggataaatctagaaaggatgactcagagcgtgaaaaagaaaaggacaagaacaaagataaaacaagtgagaaaccaaagatcaggatgctgtctaaagattgctcccaggaatatacagattctaccggtatcgacctacatgagttcttgatcaacaccctcaaaaacaattcgcgggacaggatgattcttttgaaaatggagcaggaaataatcgacttcatagctgataacaataaccattacaagaagtttccacagatgtcatcctaccagcgtatgctggtacatcgcgtcgctgcctatttcggcctggaccataacgtcgaccagacgggcaaatctgtgattatcaacaaaacgtccagtacccgaatcccagagcagcggttttgcgagcacctgaaagacgagaagggggaggaaagtcagaaacgattcatactgaaacgggataactcttcaatcgacaaagaggataaccagcaaaatcgtatgcacccattccgggatgacagacggagtaagtccatcgaggagagggaggaagaataccaacgcgtacgcgagcgaatatttgcgcacgattctgtgtgctcacaggaatctcttttcgtagagaacagtagacttctcgaggacagcaacatttgcaacgaaacttataagaagcgtcagctgttcagaggcaacagagatggaagcggcaggacatctgggtctcggcagagttcgagcgaaaacgaactcaagtggtccgatcaccagcgggcatggtcttcaaccgactctgacagtagcaataggaacctgaaacctgcgatgacgaagaccgccagtttcggtgggatcaccgtgctcacgcgtggagatagtaccagctcgacccggagtacagggaagctgtccaaggcagggtctgaatcatctagctccgccggctcttctgggtccctgtctcggacccatccccccctgcagtcaactccactggtctctggggtcgccgcaggaagcccaggctgcgtgccgtacccagagaacggtatcggcggccaggttgcaccctcaagcacatcatatatcctgcttccattggaggccgctactggtatccccccagggtccattctcctgaacccacatacaggccagccctttgtgaatcccgacggcacccctgccatttacaacccacctacctcccagcagcctttacgtagcgccatggtgggacagtcccagcagcagccaccccaacagcaacccagcccacagccccagcagcaggtccaaccacctcagcctcagatggcaggccccctggtgacccaaagggatgatgtcgccacgcaattcggccagatgacactatctcggcaatctagtggcgaaacccccgaaccaccttcaggccctgtttatccaagctctctgatgcctcagccagcacagcagccctcctacgtaatagcttctacaggacagcagcttccaacgggcggctttagcggctccggcccccctatctcacagcaagttctgcagcccccaccttcacctcagggcttcgtgcagcagcctcccccggcccagatgcccgtctattattatccaagcggtcagtaccctacatccacaacacagcagtacaggcctatggcgccagtccagtacaacgctcagcggagccaacagatgccacaggctgcccagcaagccggctaccagcctgtcctgtcgggccaacaaggattccagggtctgatcggagtgcagcagccccctcagagccagaatgtgatcaacaatcagcagggcaccccagtccaaagcgtgatggtctcctaccctacgatgagctcctaccaggtgcccatgacacagggcagccagggcctccctcaacaaagttatcagcaacctatcatgctgcccaatcaggcgggacaaggctcactgcctgccactggcatgccagtgtattgcaacgtcaccccaccaactccgcagaacaaccttaggctgattggaccacattgcccctcatctactgtgcccgtaatgagcgcctcctgccggaccaattgtgccagcatgagcaatgctgggtggcaggtcaagttctag

SEQ ID NO: 190500 - DNA, 3433 bp, Artificial Sequence
  derived and/or modified sequence
gtgctattagatttgcaaattgctgatctcccagtgactttccctcttagatcccagttgagtatggttaccttgagaactgtggtattagccatgttagagcatgctccactggggagttctgtgcagtctatttttaatgctatttaatgaaggagcgagcgcctcactcagcaataaaagaagcatgagggaagacagagcagtgcatggttatggatactggacaaggatatttggaaaggttgacgatgtgtcacactgtgtaagggaatcgcatggagatgggcattccgaactgttaatggggacatgggactccagttgtctctgatcacttgtgtggattttcctggcgtagaacgacagaagccgctagtaagtcgccaagacctacagcaggaattctgcaccaaagggcataaaatcttgttattttaatttgcatctgggagaatgtctgagcaaggagacctgaatcaggcaatagcagaggaaggagggactgagcaggagacggccactccagagaacggcattgttaaatcagaaagtctggatgaagaggagaaactggaactgcagaggcggctggaggctcagaatcaagaaagaagaaaatccaagtcaggagcaggaaaaggtaaactgactcgcagccttgctgtctgtgaggaatcttctgccagaccaggaggtgaaagtcttcaggatcaggaatcaattcatttacagctttccagtttttccagcctgcaagaggaggataaatctaggaaagatgactctgaaagagaaaaagaaaaggataaaaacaaagataaaacctctgaaaaacccaagatcagaatgttatcaaaagattgcagccaagaatacacggattctacaggcatagacttacacgagtttctgattaacacattaaagaataattccagggacaggatgatacttttgaaaatggagcaggaaattattgatttcattgctgacaacaataatcattataaaaagttccctcagatgtcatcgtatcagaggatgcttgtccatcgagtggcagcttattttggattggatcacaatgtggatcaaacaggaaaatctgttatcatcaacaagaccagcagcaccagaataccagagcaaaggttttgtgaacatttaaaagatgaaaaaggtgaagaatcccagaagcggtttatcttgaagcgagataactctagtattgataaagaagacaatcagcaaaacagaatgcatccatttagagatgacagacgaagtaaatcaattgaagagagagaagaggaatatcagagagtgagggagagaatatttgcacacgattcagtttgctcccaggaaagcctttttgtggaaaacagtaggctcttggaagacagtaacatatgcaatgagacctataagaaaagacagctctttcggggcaacagagatggctcagggagaacatctgggagtcgacagagcagctcagaaaatgaactcaagtggtctgaccaccaaagggcctggagcagcacagactccgacagttccaaccgcaatctaaagcccgccatgaccaagacggcgagttttgggggcatcacggtgctgaccaggggtgacagcacttccagtactaggagtaccgggaagctgtccaaagcaggttccgagtcttccagcagtgcaggctcctcaggatcgctgtcccgcacccatccacctctccagagcacacccctagtctcaggtgtggcagctggctctccaggctgtgtgccttatccagagaatggaatagggggccaggttgctcccagcagcaccagctacatcctccttccacttgaagctgcaacaggcatcccgcctggaagcatccttcttaatccacacacaggccagccctttgtgaatcccgatggaactcctgcaatatacaacccacccaccagtcagcagcccctgcgaagcgccatggtggggcagtcccaacagcagccaccacagcagcagccctccccgcagccccaacagcaggtccagccaccgcagccacagatggcaggccctctggtcactcagagagatgatgtggcaacacagtttggccagatgaccctgagccggcagtcctcgggggagactcctgaacccccatcaggtcctgtctacccatcctcccttatgccacagccggcccagcagcccagctatgtaatcgcctctacaggccagcagcttcctacaggaggattctcaggctctggccctcccatctcccagcaggtcctccagccccctccctcaccacagggatttgtgcaacagcctccgcctgcacagatgcctgtatattattacccatctggtcagtaccctacctcaaccacgcaacagtaccggcccatggccccggttcagtacaacgctcagaggagtcaacagatgccacaggcagcacagcaagcaggttaccagccagtcttgtctggtcaacagggattccaaggcctaataggagtgcagcagccacctcagagtcagaacgtgataaataaccaacaaggaactccggtgcaaagcgtgatggtttcctacccaacaatgtcttcttatcaggtgccaatgacccagggttctcaaggactgccccagcagtcataccaacagccaatcatgctacctaaccaggcaggtcaagggtcactcccagccactggaatgcctgtttactgtaatgtcacaccgcccacccctcagaacaaccttaggctgattggcccacactgcccctccagcactgtcccagtgatgtcagctagctgcagaacaaactgtgcaagtatgagcaatgctggttggcaggtcaaattctgagagctctggctgtggtacatttcttcagatatttctcatggcctttgatggaagaggaacaaggtgggaaaactggctgaggacttaagtattcactcaacactcaaatgattgctgctggtattctgtaaaaaataaacaaagactaatatacacgttagctggttaatggtgcatatttctgtcatgtctgctaggtatgcctttatagcttagctagtgacatgaattcatcaaggtaagattttctcctaccactgaataccactgtgtagattataatatccctaatttggattagttttgtactttgtgttgagtttgtgatgctaaaagtatttaaaaattatatactaaatcacattgtaccaaagctgtaatggaaaagcaaagaagaattgatgaattgaaggaataatttatatacattatagagttttcttttttaatggatatatactgtattgtagtgtttaatcaaaataaaactatttgaccttatggaggaaggtcatgtttttaccaccagtttggttca

SEQ ID NO: 190501 - DNA, 2439 bp, Artificial Sequence
  derived and/or modified sequence
atgtctgagcagggcgacctgaaccaggccatcgccgaggagggcggcacagagcaggagacagccaccccagaaaatggcatcgtgaagtctgagagcctggatgaggaggagaagctggagctgcagaggcggctggaggcccagaaccaggagaggaggaagagcaagagcggggccggcaagggcaagctgaccaggagcctggccgtgtgtgaggagagcagcgcccggcctggaggagagagcctgcaggaccaggagagcatccacctgcagctgagcagcttcagcagcctgcaggaggaggacaagagcaggaaggatgattctgagcgggagaaggagaaggacaagaacaaggacaagaccagcgagaagcccaagatccgcatgctgagcaaggactgcagccaggagtacacagacagcactggaattgacctgcacgagttcctgatcaacaccctgaagaacaacagccgggacaggatgatcctgctgaagatggagcaggagatcatcgacttcatcgctgacaacaacaaccactacaagaagttcccccagatgagcagctaccagaggatgctggtgcaccgggtggccgcctacttcggcctggaccacaacgtggaccagacaggcaagagcgtcatcatcaacaagaccagcagcacccgcatccctgagcagcgcttctgtgagcacctgaaggatgagaagggggaggagagccagaagcgcttcatcctgaagagggacaacagcagcattgacaaggaggacaaccagcagaacaggatgcaccccttcagagatgaccggcgcagcaagagcattgaggagcgggaggaggagtaccagagggtgcgggagcgcatctttgcccatgacagcgtgtgcagccaggagagcctgtttgtggagaacagccggctgctggaggacagcaacatctgcaatgagacctacaagaagaggcagctgttccggggcaacagagatggcagcggccgcaccagcggcagccggcagagcagcagtgaaaatgagctgaagtggagcgaccaccagagggcctggagcagcacagacagcgacagcagcaacagaaacctgaagccagccatgaccaagacagccagctttggaggcatcaccgtgctgaccaggggggacagcaccagcagcaccaggagcacaggcaagctgagcaaggccggcagcgagagcagcagcagcgctggcagcagcggcagcctgagcaggacccacccccccctgcagagcacccccctggtgtctggagtggccgccggcagccctggctgtgtgccctacccagaaaatggaattggaggccaggtggcccccagcagcaccagctacatcctgctgcccctggaggccgccaccggcatccccccaggcagcatcctgctgaacccccacacaggccagccctttgtgaacccagatggcaccccagccatctacaacccccccaccagccagcagcccctgcggagcgccatggtgggccagagccagcagcagcccccccagcagcagcccagcccccagccccagcagcaggtgcagcccccccagccccagatggccggccccctggtgacccagagagatgatgtggccacccagtttggccagatgaccctgagccggcagagcagcggggagaccccagagccccccagcggccctgtgtaccccagcagcctgatgccccagcctgcccagcagcccagctatgtgattgccagcacaggccagcagctgcccactggaggcttcagcggcagcggcccccccatcagccagcaggtgctgcagcccccacccagcccccagggctttgtgcagcagcccccaccagcccagatgcctgtgtactactaccccagcggccagtaccccaccagcaccacccagcagtaccggcccatggcccctgtgcagtacaatgcccagaggagccagcagatgccccaggccgcccagcaggccggctaccagcctgtgctgagcggccagcagggcttccagggcctgattggagtgcagcagcccccccagagccagaatgtcatcaacaaccagcagggcacccctgtgcagagcgtgatggtgtcctaccccaccatgagcagctaccaggtgcccatgacccagggcagccagggcctgccccagcagagctaccagcagcccatcatgctgcccaaccaggccggccagggcagcctgcctgccaccggcatgcctgtgtactgcaatgtgaccccacccaccccccagaacaacctgcggctcatcggcccccactgccccagcagcacagtgcctgtgatgtctgccagctgcaggaccaactgtgcctccatgagcaatgccggctggcaggtgaagttctag

SEQ ID NO: 190502 - DNA, 2439 bp, Artificial Sequence
  derived and/or modified sequence
atgagcgagcagggcgacctgaaccaggccatcgccgaggagggcggtaccgaacaggagactgcgacgcctgaaaatggaatcgtcaagagcgagtctctcgatgaggaagagaagttagaactacagaggcgcttggaggctcaaaatcaggaaagaaggaagagcaagagcggggcggggaaggggaagttgacccggagtctggcggtatgtgaagagtcaagtgcgcggccaggaggcgagtcgctccaggaccaagaatcaattcacttacagttgtcctccttctcgagcctccaggaggaagataaatcaaggaaagacgactcagaacgcgaaaaggaaaaggacaagaataaagacaagacctcagaaaagcccaaaatacgaatgctgtctaaggactgcagccaagaatacaccgactccacgggtatcgatctgcacgagtttctcatcaacacgctgaaaaataacagccgcgataggatgatattactgaagatggagcaggaaattatagatttcatcgctgataacaataatcattacaaaaaatttccacagatgagttcatatcagcggatgttagtgcatcgggttgcggcgtactttggcctagaccacaatgttgatcaaacggggaagtctgtcatcataaataaaacaagctccacgagaatcccggagcaacggttttgcgagcatcttaaagatgagaaaggcgaagaatctcagaagagatttattcttaaacgtgacaattcatcaatcgataaggaggacaatcagcagaatcggatgcacccgtttcgcgatgatagaaggtccaagagtattgaagagagagaggaggagtatcaacgcgttcgggagagaatcttcgctcatgattccgtgtgctcacaggagtcgctgttcgtagagaactcgcggttgttggaggactctaacatctgtaacgaaacatataaaaagcgacagctgtttcgcggcaatcgggatggcagcggacgtacaagtggctcccgccagagttcgtctgagaatgagctgaaatggagtgatcatcagcgggcttggtcaagcactgattctgattctagcaatcgcaacttgaaacccgctatgacaaagacagcctctttcggcgggataaccgtcctgacccgcggcgactctacttcctccacccgctcaacaggaaaactgagcaaggccgggtctgaaagttccagctcagcgggatcaagcggctccctgtctaggacacatccacccttgcaatctacacctttggtatctggggttgcagcggggtcccctggatgcgtgccttatcccgaaaatggaatcgggggccaggttgcaccttcctcaacaagctatatcctgctgccactcgaagcagcaaccggcatacctccaggctcaattctgttgaacccccacaccgggcaaccgtttgtgaaccctgatggtactcctgctatctacaatccccctacatctcaacagcctctccgttcagccatggtggggcagagccagcaacagccaccccagcagcaaccaagcccacagccacagcagcaggtccagccacctcagccacagatggccggaccactcgtgactcagcgcgacgatgtggccactcagttcggtcagatgaccctaagtcggcagtcatccggggaaaccccggagccgccttccgggcctgtatacccatcatctctcatgccgcaaccagcccagcagccttcttatgtgatcgcctctacaggccagcaactgcccaccgggggattcagtggctcggggcctcctatttcccagcaggtgctgcagcccccgccctcaccccaggggtttgtgcaacagccgcctccagcgcagatgcccgtgtactactatccctcaggccagtatcccacgtccaccactcagcagtatcggcccatggcccccgtgcagtacaacgcccaaagatcacagcaaatgccacaggctgctcaacaggcaggctaccagccagtactttccggccagcaggggttccaaggcctgattggggtccagcagccccctcagtctcagaacgtgataaacaaccagcagggcacccccgtgcagagcgttatggttagttatccgaccatgtcctcctaccaggtacctatgacgcaggggagtcagggtcttcctcagcagtcctaccagcaacccattatgttacctaaccaagctggtcagggctccttgcctgccacaggaatgcccgtgtactgcaacgtgacacctccaaccccccagaataatctgcggctaataggcccacattgtcccagcagcacagtgcccgtgatgtccgcgtcatgccgcaccaactgtgcgagcatgtccaatgcaggttggcaagtaaagttttag

SEQ ID NO: 190503 - DNA, 2439 bp, Artificial Sequence
  derived and/or modified sequence
atgagcgagcagggggacctgaatcaggccattgctgaggaggggggtaccgagcaggaaaccgctacaccggagaacgggatcgttaaatctgaaagtctcgacgaagaagaaaagctggagctgcaacgccgtctggaagcccagaatcaagagaggcgcaaatctaagtccggcgcaggtaagggaaaactcacccggtcgctggcagtatgcgaagaatccagtgccagacctggcggtgagtcccttcaggaccaagagtccatccacctgcagctctcctccttctcttccttgcaggaagaagacaagagcagaaaggatgactccgaacgcgaaaaggagaaggacaagaacaaggacaagaccagtgagaagcctaagatcagaatgctgagcaaagactgttcccaggagtataccgacagcactggaatagatcttcatgagttcctgattaatacacttaaaaacaactctagagatagaatgatactcctcaaaatggagcaagaaattatcgattttatcgccgacaataataatcattacaagaaatttccccagatgtcatcgtaccagagaatgttggttcacagggtggccgcatattttgggctcgatcacaacgtagaccagacaggtaagtcagtgattatcaacaagacgtcttccacacgcattccggaacagcgcttctgtgagcacttgaaggacgagaaaggggaagagtcacaaaagcgatttatcctgaaacgggataactcatctattgacaaagaagataaccaacagaaccgaatgcacccttttagggatgacagacgaagcaaatccattgaggagagagaggaagagtatcaacgggtgagagagagaatctttgcacacgactctgtatgtagtcaggagtccctctttgtcgagaattctagactgctcgaggacagtaatatttgtaacgagacatacaagaagagacaactatttagaggaaaccgtgacggctccggcagaacctccgggtcacgtcaaagttcttccgaaaacgaactgaagtggagcgaccatcaacgagcctggtcctctactgacagtgacagctctaatagaaatctcaaacctgccatgaccaaaactgcttcttttggcggaataacagtgctaacgcgtggagactcaacatccagtacccgctctaccggtaagctctctaaagccggatccgaatcatcttcctctgcaggatctagtggctcgctcagcaggacacatccacctttgcagtccactccgctggtctctggcgttgccgctggttcaccaggctgcgttccctaccccgagaatgggatcggtggccaggttgcaccctcgagtacgtcttatattctgctgcccctggaggccgctaccggtatccccccagggtcaatactgctgaatccccatactggccagccattcgtcaaccctgacggaactcctgcgatatacaatccacccacctcccagcagccactgagatcagccatggtgggtcagtcccagcagcagcctcctcagcagcaaccaagtccgcagcctcaacagcaggttcaacctcctcagccgcagatggctggaccacttgtgacccagcgtgacgacgtggctacccagtttggacaaatgacgctttcaaggcaatcctccggagaaaccccagagcctccttctggccctgtgtatccgtctagtttaatgccacaacctgcccaacagccatcctatgtgattgcatcaacaggccagcagctgcccacaggaggtttctcgggatctggccctcctatctcccaacaggttcttcagccaccgccttcacctcagggttttgttcagcagcccccaccagctcagatgccagtgtactactacccatcggggcagtacccaaccagcacaacacaacagtacagacctatggcccctgttcagtataacgctcaacggagccagcagatgcctcaggcagctcagcaagctggataccaaccagtcctgagcggccaacagggcttccagggcctgatcggagtccagcaaccaccacaatcgcagaatgttatcaacaaccagcagggaacacctgtgcagagtgtgatggtgagctatcctacaatgagctcatatcaagtgcccatgactcagggcagccagggactaccgcagcagtcctaccagcagccaatcatgctgcccaaccaggcagggcagggcagcctccctgccaccgggatgcctgtctactgtaacgttacaccgccaacaccgcagaacaacctcagactaattgggccacactgccccagctcgactgtccctgtgatgtccgcatcttgtcgtacgaactgtgcaagcatgtccaacgcagggtggcaagtcaaattctag

SEQ ID NO: 190504 - DNA, 2439 bp, Artificial Sequence
  derived and/or modified sequence
atgagcgagcagggcgacctgaaccaggccatcgccgaggagggcggcaccgagcaggagaccgccacccccgagaacggcatcgtgaagagcgagagcctggacgaggaggagaagctggagctgcagagaagactggaggcccagaaccaggagagaagaaagagcaagagcggcgccggcaagggcaagctgaccagaagcctggccgtgtgcgaggagagcagcgccagacccggcggcgagagcctgcaggaccaggagagcatccacctgcagctgagcagcttcagcagcctgcaggaggaggacaagagcagaaaggacgacagcgagagagagaaggagaaggacaagaacaaggacaagaccagcgagaagcccaagatcagaatgctgagcaaggactgcagccaggagtacaccgacagcaccggcatcgacctgcacgagttcctgatcaacaccctgaagaacaacagcagagacagaatgatcctgctgaagatggagcaggagatcatcgacttcatcgccgacaacaacaaccactacaagaagttcccccagatgagcagctaccagagaatgctggtgcacagagtggccgcctacttcggcctggaccacaacgtggaccagaccggcaagagcgtgatcatcaacaagaccagcagcaccagaatccccgagcagagattctgcgagcacctgaaggacgagaagggcgaggagagccagaagagattcatcctgaagagagacaacagcagcatcgacaaggaggacaaccagcagaacagaatgcaccccttcagagacgacagaagaagcaagagcatcgaggagagagaggaggagtaccagagagtgagagagagaatcttcgcccacgacagcgtgtgcagccaggagagcctgttcgtggagaacagcagactgctggaggacagcaacatctgcaacgagacctacaagaagagacagctgttcagaggcaacagagacggcagcggcagaaccagcggcagcagacagagcagcagcgagaacgagctgaagtggagcgaccaccagagagcctggagcagcaccgacagcgacagcagcaacagaaacctgaagcccgccatgaccaagaccgccagcttcggcggcatcaccgtgctgaccagaggcgacagcaccagcagcaccagaagcaccggcaagctgagcaaggccggcagcgagagcagcagcagcgccggcagcagcggcagcctgagcagaacccacccccccctgcagagcacccccctggtgagcggcgtggccgccggcagccccggctgcgtgccctaccccgagaacggcatcggcggccaggtggcccccagcagcaccagctacatcctgctgcccctggaggccgccaccggcatcccccccggcagcatcctgctgaacccccacaccggccagcccttcgtgaaccccgacggcacccccgccatctacaacccccccaccagccagcagcccctgagaagcgccatggtgggccagagccagcagcagcccccccagcagcagcccagcccccagccccagcagcaggtgcagcccccccagccccagatggccggccccctggtgacccagagagacgacgtggccacccagttcggccagatgaccctgagcagacagagcagcggcgagacccccgagccccccagcggccccgtgtaccccagcagcctgatgccccagcccgcccagcagcccagctacgtgatcgccagcaccggccagcagctgcccaccggcggcttcagcggcagcggcccccccatcagccagcaggtgctgcagcccccccccagcccccagggcttcgtgcagcagcccccccccgcccagatgcccgtgtactactaccccagcggccagtaccccaccagcaccacccagcagtacagacccatggcccccgtgcagtacaacgcccagagaagccagcagatgccccaggccgcccagcaggccggctaccagcccgtgctgagcggccagcagggcttccagggcctgatcggcgtgcagcagcccccccagagccagaacgtgatcaacaaccagcagggcacccccgtgcagagcgtgatggtgagctaccccaccatgagcagctaccaggtgcccatgacccagggcagccagggcctgccccagcagagctaccagcagcccatcatgctgcccaaccaggccggccagggcagcctgcccgccaccggcatgcccgtgtactgcaacgtgaccccccccaccccccagaacaacctgagactgatcggcccccactgccccagcagcaccgtgcccgtgatgagcgccagctgcagaaccaactgcgccagcatgagcaacgccggctggcaggtgaagttctag

SEQ ID NO: 190505 - protein, 442 aa, Artificial Sequence [sequence omitted]

SEQ ID NO: 190506 - protein, 376 aa, Artificial Sequence
  derived and/or modified sequence
MEEFHGRTLHDDDSCQVIPVLPQVMMILIPGQTLPLQLFHPQEVSMVRNLIQKDRTFAVLAYSNVQEREAQFGTTAEIYAYREEQDFGIEIVKVKAIGRQRFKVLELRTQSDGIQQAKVQILPECVLPSTMSAVQLESLNKCQIFPSKPVSREDQCSYKWWQKYQKRKFHCANLTSWPRWLYSLYDAETLMDRIKKQLREWDENLKDDSLPSNFSYRVAACLPIDDVLRIQLLKIGSAIQRLRCELDIMNKCTSLCCKQCQETEITTKNEIFSLSLCGPMAAYVNPHGYVHETLTVYKACNLNLIGRPSTEHSWFPGYAWTVAQCKICASHIGWKFTATKKDMSPQKFWGLTRSALLPTIPDTEDEISPDKVILCL

SEQ ID NO: 190507 - DNA, 1329 bp, Artificial Sequence
  derived and/or modified sequence
atggcaggcgaaggcgaccagcaggacgctgcccacaacatgggcaatcacctcccgctccttccagctgagtccgaagaagaggatgagatggaggtggaggaccaggatagtaaggaggcaaagaaacccaacattatcaactttgataccagtctgcccacctctcacacctacctgggagccgacatggaggaattccacggtaggactcttcacgacgatgatagttgtcaggtgatcccagttttgccccaggtgatgatgatcctgatacccgggcagaccctgccactccaattatttcaccctcaagaggtgtctatggtgcggaacctgatccagaaggatcgaacatttgctgttcttgcatactctaatgttcaggagagagaagcccagttcgggacaactgctgaaatttatgcgtaccgagaggaacaggattttggaatagaaatcgtgaaggtcaaggctattggccgtcaacgattcaaagtgcttgagcttcgaacccagagcgacggaatccagcaagcaaaggttcagatcctccctgagtgcgttttaccgagcacaatgagcgcggtgcagctggaaagcctgaataagtgccagatttttcctagtaaaccagtgagtagggaggaccaatgttcttacaagtggtggcaaaagtatcagaagcgaaagttccactgtgcgaatttaacatcatggcctaggtggttgtatagcctctatgacgcagaaacattgatggacagaattaagaaacaactgagggaatgggatgagaatttgaaggatgattccttaccgtctaaccccattgacttctcataccgagttgctgcatgtctcccaatcgacgacgtacttagaatccagctcctgaagattggttctgcaatccagcgtctgagatgtgaactggatattatgaacaaatgcacctctctatgttgtaagcagtgccaggagacagagatcaccacaaaaaacgagatcttttccctgagcctgtgcggtccaatggctgcctatgtcaatccccacggatatgttcacgaaaccctgacggtgtacaaggcatgtaatctcaacttgataggcaggccgagcaccgaacactcatggtttcctggatacgcatggaccgtggcacagtgcaagatttgtgccagccacatcggatggaaattcacagctactaagaaagatatgtcaccccagaagttttggggcctcacacgctcggcccttttacccaccatccccgatactgaggacgagatctcacccgacaaagtaatcctttgtttgtag

SEQ ID NO: 190508 - DNA, 1329 bp, Artificial Sequence
  derived and/or modified sequence
atggccggggagggggaccagcaggatgctgcccacaacatgggcaaccacctgcccctgctgcctgctgagagcgaggaggaggatgagatggaggtggaggaccaggacagcaaggaggccaagaagcccaacatcatcaactttgacaccagcctgcccaccagccacacctacctgggcgctgacatggaggagttccacggccgcaccctgcatgatgatgacagctgccaggtgattcctgtgctgccccaggtgatgatgatcctgatccctggccagaccctgcccctgcagctgttccacccccaggaggtgtccatggtgaggaacctgatccagaaggacaggacctttgctgtgctggcctacagcaatgtgcaggagcgggaggcccagtttggcaccacagctgagatctatgcctaccgggaggagcaggactttggcatcgagatcgtgaaggtgaaggccatcggccggcagcgcttcaaggtgctggagctgcggacccagagtgatggcatccagcaggccaaggtgcagatcctgcctgaatgtgtgctgcccagcaccatgtctgctgtgcagctggagagcctgaacaagtgccagatcttccccagcaagcctgtgtcccgggaggaccagtgcagctacaagtggtggcagaagtaccagaagaggaagttccactgtgccaacctgacctcctggccccgctggctgtacagcctgtatgatgctgagaccctgatggaccgcatcaagaagcagctgcgggagtgggatgagaacctgaaggatgacagcctgcccagcaaccccatcgacttctcctacagagtggccgcctgcctgcccattgatgatgtgctgcgcatccagctgctgaagattggcagcgccatccagaggctgcgctgtgagctggacatcatgaacaagtgcaccagcctgtgctgcaagcagtgccaggagacagagatcaccaccaagaatgagatcttcagcctgagcctgtgtggccccatggccgcctacgtgaacccccacggctacgtgcatgagaccctgactgtgtacaaggcctgcaacctgaacctgattggccggcccagcacagagcacagctggttccctggctacgcctggacagtggcccagtgcaagatctgtgccagccacatcggctggaagttcaccgccaccaagaaggacatgagcccccagaagttctggggcctgaccaggtctgccctgctgcccaccatcccagacacagaagatgagatcagcccagacaaggtgatcctgtgcctgtag

SEQ ID NO: 190509 - DNA, 1329 bp, Artificial Sequence
  derived and/or modified sequence
atggccggcgagggcgaccagcaggacgccgcccacaacatgggcaaccaccttccactgttgccagccgagtcagaagaggaggacgaaatggaagtggaggatcaggactctaaagaggcgaagaagcctaacatcatcaatttcgacaccagtttgcccacctcacatacatatctcggggccgacatggaggagttccacgggaggactttgcacgacgacgatagctgtcaggtgatcccggttttaccacaggttatgatgatcctgatacccgggcagacactcccattgcaacttttccaccctcaagaagtttctatggtgcgcaacttaatccaaaaggatcgcaccttcgccgtgttggcctactccaatgtacaggaaagagaagctcaattcggcacaaccgcagagatttatgcttacagagaggagcaagacttcggtattgaaatcgtaaaggtcaaggccatcggacgtcagcggttcaaagtgctcgaactgcgcacacagtcagacgggatccagcaggctaaagttcagatcttgcctgagtgtgtcctcccgagcacgatgtcagccgttcagctcgagtcgctgaacaaatgccagattttcccaagcaaaccagtgagcagagaggaccagtgcagctataagtggtggcagaagtaccagaagaggaagttccactgcgccaatctgacatcatggcctcgatggctgtatagcctttatgatgcagagactctcatggatcggatcaaaaaacaattacgagagtgggatgagaatttgaaggacgactcactgcccagtaatcccatcgacttctcctatcgcgttgccgcctgcctgccgatagacgatgtgctcaggattcaactcctcaagatcggatctgccattcagcgactgcggtgcgagctagacatcatgaacaaatgtactagcttgtgctgtaaacaatgtcaagagacagagattactactaagaacgagatcttttccttgagcctgtgcggacccatggcagcgtatgtaaaccctcacggttatgtacatgaaacgctgactgtttataaggcatgcaacctcaatctcatcggtagacccagtacagagcatagctggttccctggttacgcctggacggttgctcagtgtaagatctgcgcctcacacattgggtggaagtttacagctactaagaaagatatgtctccgcagaaattttggggactcactaggtccgccctactgcccactatcccggacaccgaggatgaaattagccccgacaaggtgatcctgtgcctgtag

SEQ ID NO: 190510 - DNA, 1329 bp, Artificial Sequence
  derived and/or modified sequence
atggccggagaaggcgatcaacaggatgccgctcacaacatgggcaaccatctgccattgctgcctgcggagagcgaagaggaggacgaaatggaggtggaagatcaggactctaaggaggcgaagaaacccaatataatcaactttgatacctctctgcctacttcccacacttacctcggtgctgacatggaagaatttcacgggagaaccctgcacgacgacgactcctgtcaggtaataccagtgctgccacaggtcatgatgatcctgatcccaggacagacattaccactacagctgtttcacccacaggaggtgagcatggtccgcaacctgatccaaaaggacagaacattcgccgtgctcgcctactcaaatgtccaggagagggaagctcagtttgggaccaccgctgagatctacgcttacagggaggagcaggattttggaattgagatcgtaaaggtgaaagcaatcggtcggcaaagattcaaagtgttggaactgaggactcaatctgatgggatccagcaagcaaaagtgcagattttacctgaatgcgtgctgccctccacaatgagcgccgtgcagctggagtcgcttaacaaatgccaaatcttcccctccaagcctgtttctcgtgaagaccaatgctcttataagtggtggcagaaataccagaagagaaagttccactgcgcgaatttaacaagttggccacgctggttgtattccctttatgacgccgaaacactcatggaccgcattaagaaacagctgcgcgagtgggatgagaacctcaaggacgattctttacccagcaatcccatcgacttcagctatagggtggccgcttgtttacccatagatgacgttctgagaatccagctgctcaaaatcggcagtgcgatccagagactacggtgcgagctcgatattatgaacaagtgtacatctttgtgctgcaagcagtgccaggagacagaaatcacgactaaaaatgagatattttctctttcactgtgtgggccaatggcagcctacgtgaatccacacggttacgtccacgagacactgacagtttacaaagcttgcaacctgaacttgataggtcgacctagcacggagcacagctggttcccagggtatgcttggaccgtcgcacagtgcaaaatctgcgcaagccatataggttggaagtttactgctacaaaaaaggacatgtctccacagaagttttggggcctaacccggtccgcactcctgcccaccatccccgacactgaagacgagatctcgcccgataaggttatcctatgcctgtag

SEQ ID NO: 190511 - DNA, 2206 bp, Artificial Sequence
  derived and/or modified sequence
gcctcctttgcgggtaaacagacatggccggcgaaggagatcagcaggacgctgcgcacaacatgggcaaccacctgccgctcctgcctgcagagagtgaggaagaagatgaaatggaagttgaagaccaggatagtaaagaagccaaaaaaccaaacatcataaattttgacaccagtctgccgacatcacatacatacctaggtgctgatatggaagaatttcatggcaggactttgcacgatgacgacagctgtcaggtgattccagttcttccacaagtgatgatgatcctgattcccggacagacattacctcttcagctttttcaccctcaagaagtcagtatggtgcggaatttaattcagaaagatagaacctttgctgttcttgcatacagcaatgtacaggaaagggaagcacagtttggaacaacagcagagatatatgcctatcgagaagaacaggattttggaattgagatagtgaaagtgaaagcaattggaagacaaaggttcaaagtccttgagctaagaacacagtcagatggaatccagcaagctaaagtgcaaattcttcccgaatgtgtgttgccttcaaccatgtctgcagttcaattagaatccctcaataagtgccagatatttccttcaaaacctgtctcaagagaagaccaatgttcatataaatggtggcagaaataccagaagagaaagtttcattgtgcaaatctaacttcatggcctcgctggctgtattccttatatgatgctgagaccttaatggacagaatcaagaaacagctacgtgaatgggatgaaaatctaaaagatgattctcttccttcaaatccaatagatttttcttacagagtagctgcttgtcttcctattgatgatgtattgagaattcagctccttaaaattggcagtgctatccagcgacttcgctgtgaattagacattatgaataaatgtacttccctttgctgtaaacaatgtcaagaaacagaaataacaaccaaaaatgaaatattcagtttatccttatgtgggccgatggcagcttatgtgaatcctcatggatatgtgcatgagacacttactgtgtataaggcttgcaacttgaatctgataggccggccttctacagaacacagctggtttcctgggtatgcctggactgttgcccagtgtaagatctgtgcaagccatattggatggaagtttacggccaccaaaaaagacatgtcacctcaaaaattttggggcttaacgcgatctgctctgttgcccacgatcccagacactgaagatgaaataagtccagacaaagtaatactttgcttgtaaacagatgtgatagagataaagttatctaacaaattggttatattctaagatctgctttggaaattattgcctctgatacatacctaagtaaacataacattaatacctaagtaaacataacattacttggagggttgcagtttctaagtgaaactgtatttgaaacttttaagtatactttaggaaacaagcatgaacggcagtctagaataccagaaacatctacttgggtagcttggtgccattatcctgtggaatctgatatgtctggtagcatgtcattgatgggacatgaagacatctttggaaatgatgagattatttcctgtgttaaaaaaaaaaaaaatcttaaattcctacaatgtgaaactgaaactaataatttgatcctgatgtatgggacagcgtatctgtaccagtgctctaaataacaaaagctagggtgacaagtacatgttccttttggaaagaagcaaggcaatgtatattaattattctaaaagggctttgttcctttccattttctttaacttctctgagatactgatttgtaaattttgaaaattagttaaaatatgcagttttttgagcccacgaatagttgtcatttcctttatgtgcctgttagtaaaaagtagtattgtgtatttgctcagtatctgaactataagcccatttatactgttccatacaaaagctatttttcaaaaattaatttgaaccaaaactactactatagggaaaagatgccaaaacatgtcccctcacccagactaaacttgatactgtattattttgttcaatgtaaattgaagaaaatctgtaagtaagtaaaccttaagtgtgaaactaaa

SEQ ID NO: 190512 - DNA, 1329 bp, Artificial Sequence
  derived and/or modified sequence
atggccggcgagggcgaccagcaggacgccgcccacaacatgggcaaccacctgcccctgctgcccgccgagagcgaggaggaggacgagatggaggtggaggaccaggacagcaaggaggccaagaagcccaacatcatcaacttcgacaccagcctgcccaccagccacacctacctgggcgccgacatggaggagttccacggcagaaccctgcacgacgacgacagctgccaggtgatccccgtgctgccccaggtgatgatgatcctgatccccggccagaccctgcccctgcagctgttccacccccaggaggtgagcatggtgagaaacctgatccagaaggacagaaccttcgccgtgctggcctacagcaacgtgcaggagagagaggcccagttcggcaccaccgccgagatctacgcctacagagaggagcaggacttcggcatcgagatcgtgaaggtgaaggccatcggcagacagagattcaaggtgctggagctgagaacccagagcgacggcatccagcaggccaaggtgcagatcctgcccgagtgcgtgctgcccagcaccatgagcgccgtgcagctggagagcctgaacaagtgccagatcttccccagcaagcccgtgagcagagaggaccagtgcagctacaagtggtggcagaagtaccagaagagaaagttccactgcgccaacctgaccagctggcccagatggctgtacagcctgtacgacgccgagaccctgatggacagaatcaagaagcagctgagagagtgggacgagaacctgaaggacgacagcctgcccagcaaccccatcgacttcagctacagagtggccgcctgcctgcccatcgacgacgtgctgagaatccagctgctgaagatcggcagcgccatccagagactgagatgcgagctggacatcatgaacaagtgcaccagcctgtgctgcaagcagtgccaggagaccgagatcaccaccaagaacgagatcttcagcctgagcctgtgcggccccatggccgcctacgtgaacccccacggctacgtgcacgagaccctgaccgtgtacaaggcctgcaacctgaacctgatcggcagacccagcaccgagcacagctggttccccggctacgcctggaccgtggcccagtgcaagatctgcgccagccacatcggctggaagttcaccgccaccaagaaggacatgagcccccagaagttctggggcctgaccagaagcgccctgctgcccaccatccccgacaccgaggacgagatcagccccgacaaggtgatcctgtgcctgtag

SEQ ID NO: 190513 - protein, 163 aa, Artificial Sequence
  derived and/or modified sequence
MRIEKCYFCSGPIYPGHGMMFVRNDCKVFRFCKSKCHKNFKKKRNPRKVRWTKAFRKAAGKELTVDNSFEFEKRRNEPIKYQRELWNKTIDAMKRVEEIKQKRQAKFIMNRLKKNKELQKVQDIKEVKQNIHLIRAPLAGKGKQLEEKMVQQLQEDVDMEDAP

SEQ ID NO: 190514 - DNA, 492 bp, Artificial Sequence
  derived and/or modified sequence
atgcgcatcgaaaaatgttacttttgttccggcccaatttacccagggcacggcatgatgttcgttcgcaacgattgcaaagttttccgtttttgcaagtccaaatgtcacaagaactttaaaaagaagcgcaatcccaggaaagtgagatggaccaaggctttccgaaaagccgccggtaaggaattgactgttgacaattcctttgaattcgaaaaacggcgtaatgagcctattaagtaccagagggagctctggaacaaaactatcgacgcaatgaagcgcgtcgaggagataaaacagaaaagacaagctaagttcatcatgaatcgcctgaagaaaaacaaggaactccaaaaggtgcaggatatcaaggaagtgaaacagaatattcatctcattcgcgccccgttagcaggcaagggaaaacagctggaggagaagatggtgcagcagctgcaggaggatgtcgatatggaggatgctccatag

SEQ ID NO: 190515 - DNA, 492 bp, Artificial Sequence
  derived and/or modified sequence
atgagaattgagaagtgctacttctgcagcggccccatctacccaggccacggcatgatgtttgtgagaaatgactgcaaggtgttccgcttctgcaagagcaagtgccacaagaacttcaagaagaagaggaaccccaggaaggtgcgctggaccaaggccttcaggaaggctgctgggaaggagctgactgtggacaacagctttgaatttgagaagagaagaaatgagcccatcaagtaccagcgggagctgtggaacaagaccattgatgccatgaagagggtggaggagatcaagcagaagaggcaggccaagttcatcatgaaccggctgaagaagaacaaggagctgcagaaggtgcaggacatcaaggaggtgaagcagaacatccacctgatccgggcccccctggccggcaagggcaagcagctggaggagaagatggtgcagcagctgcaggaggatgtggacatggaggatgccccctag

SEQ ID NO: 190516 - DNA, 492 bp, Artificial Sequence
  derived and/or modified sequence
atgcggatcgagaagtgctacttctgcagcggccccatctaccccgggcatggaatgatgttcgtccgaaacgactgcaaggtattccgattctgtaagtctaagtgtcataaaaactttaaaaaaaagaggaacccgagaaaggtcagatggacaaaggcatttcgaaaagctgccggtaaagaacttacggtggacaactcttttgaattcgagaaaaggagaaacgagcctataaaatatcagagggaactatggaacaagaccatcgacgctatgaagcgcgtagaggaaattaagcagaagcgtcaggcaaaattcatcatgaatcgtctgaaaaaaaacaaagaactgcagaaggtccaagacattaaggaggtgaagcagaacattcatctaatcagagcccctctagctgggaagggcaaacagctcgaagagaagatggtacaacagctgcaggaagatgtggatatggaggacgcaccttag

SEQ ID NO: 190517 - DNA, 492 bp, Artificial Sequence
  derived and/or modified sequence
atgcggatcgagaagtgctacttctgtagcggccctatatacccaggacacggtatgatgttcgtaaggaacgattgtaaggtatttcgcttctgcaaaagtaagtgccacaagaacttcaaaaagaaacggaaccctcgaaaagtgcgctggactaaagctttccgcaaagcagccggtaaagagctaacagtagataactcgtttgagtttgaaaagcggagaaacgaaccaatcaagtaccagagagagttgtggaacaagactatcgacgcaatgaagagagtggaagagatcaagcaaaaacgacaagccaaatttatcatgaaccggttgaagaagaataaggagctgcagaaggttcaggatatcaaagaagtgaaacagaacatacacctcattagggctcctctggctggaaaggggaagcagctagaggaaaaaatggtccaacaactgcaggaggacgtggatatggaggacgccccatag

SEQ ID NO: 190518 - DNA, 2015 bp, Artificial Sequence
  derived and/or modified sequence
cacacggccgccggaggcacagtcgtgttcgcatctggtctaacagacccgcgagaacgaaggacgcttgcctttttccggtcggggaagggggaagaaggtaacttccggtgacggggttgcatcacttcctctcaagcttggcgtttgtttggtggggttacacgcgggttcaacatgcgtatcgaaaagtgttatttctgttcggggcccatctatcctggacacggcatgatgttcgtccgcaacgattgcaaggtgttcagattttgcaaatctaaatgtcataaaaactttaaaaagaagcgcaatcctcgcaaagttaggtggaccaaagcattccggaaagcagctggtaaagagcttacagtggataattcatttgaatttgaaaaacgtagaaatgaacctatcaaataccagcgagagctatggaataaaactattgatgcgatgaagagagttgaagaaatcaaacagaagcgccaagctaaatttataatgaacagattgaagaaaaataaagagctacagaaagttcaggatatcaaagaagtcaagcaaaacatccatcttatccgagcccctcttgcaggcaaagggaaacagttggaagagaaaatggtacagcagttacaagaggatgtggacatggaagatgctccttaaaaatctctgtaaccatttcttttatgtacatttgaaaatgccctttggatacttggaactgctaaattattttattttttacataaggtcacttaaatgaaaagcgattaaaagacatctttcctgcattgccatctacataatatcagatattacggatgttagattgcatctcagtgttaaatctttactgatagatgtacttaagtaaatcatgaaaattctacttgtaactatagaagtgaattgtggacgtaaaatggttgtgctatttggataatggcactaggcagcatttgtatagtaactaatggcaaaaattcatggctagtgatgtataaaataaaatattctttgcagtaaaatattccctttgttaatgttatagaaggggggatacaaaaaggaactaacaatttgtatggcagtgtcagatatttttattttagtatttcctgttttggtttatttgcatcttagaagagcataatgacattgtttgatgaagcctaattatgctggactgttttgacctggtttaacccttctgataggtagttgtggatgctggggatgagaactgaataatctttgcctggagtgacactacactctagaatttccactttggagaatactcagttccaacttgtgattcctgatagaacagactttacttttctagcccagcattgatctagaagcagaggaatcccagcgccttttaaaagttgttatgtggttttcttttaaaaagctcctgtttttggaaagtagaatttatgggtacaacgtatgttcattatttgtacataaaataaaaccatttaaaaagtaatgctgatatttattctttaaaggcactaaacaaagatatgaaatattgatgacctggaagaagaaatcttcctccacacatcccatttaagtaggagatacatttaattaaagagaaatagatacttaatacttaatgttttgtgtttttacattgtttacagttttaagtatgttaaatacattaagtaacgatcagtttgcataatggtttttttagggtagagtttaaaatcagtaattcttagccttacataattataaagtaatggctcattttttgtttcagtattagatagtaaaactaaggctgtagaccagtccctggaccaagtgttaggagacctgagttccaatgtggttttgcctgggtattcttatttgtaaataatattattgattgaagattaggggaaatgatacatgtgaggaaagacatttgtaaaatttcttgggtttttactacataccgtattcattttttaaagaaataaacattttgaaagtta

SEQ ID NO: 190519 - DNA, 492 bp, Artificial Sequence
  derived and/or modified sequence
atgagaatcgagaagtgctacttctgcagcggccccatctaccccggccacggcatgatgttcgtgagaaacgactgcaaggtgttcagattctgcaagagcaagtgccacaagaacttcaagaagaagagaaaccccagaaaggtgagatggaccaaggccttcagaaaggccgccggcaaggagctgaccgtggacaacagcttcgagttcgagaagagaagaaacgagcccatcaagtaccagagagagctgtggaacaagaccatcgacgccatgaagagagtggaggagatcaagcagaagagacaggccaagttcatcatgaacagactgaagaagaacaaggagctgcagaaggtgcaggacatcaaggaggtgaagcagaacatccacctgatcagagcccccctggccggcaagggcaagcagctggaggagaagatggtgcagcagctgcaggaggacgtggacatggaggacgccccctag

SEQ ID NO: 190520 - protein, 358 aa, Artificial Sequence
  derived and/or modified sequence
MAPQNLSTFCLLLLYLIGAVIAGRDFYKILGVPRSASIKDIKKAYRKLALQLHPDRNPDDPQAQEKFQDLGAAYEVLSDSEKRKQYDTYGEEGLKDGHQSSHGDIFSHFFGDFGFMFGGTPRQQDRNIPRGSDIIVDLEVTLEEVYAGNFVEVVRNKPVARQAPGKRKCNCRQEMRTTQLGPGRFQMTQEVVCDECPNVKLVNEERTLEVEIEPGVRDGMEYPFIGEGEPHVDGEPGDLRFRIKVVKHPIFERRGDDLYTNVTISLVESLVGFEMDITHLDGHKVHISRDKITRPGAKLWKKGEGLPNFDNNNIKGSLIITFDVDFPKEQLTEEAREGIKQLLKQGSVQKVYNGLQGY

SEQ ID NO: 190521 - DNA, 1077 bp, Artificial Sequence
  derived and/or modified sequence
atggcccctcaaaacctgagcacattttgcctactgttgctctacctgattggcgcggtgatcgctggtcgtgatttctacaagatcctgggagtgccccgcagcgcatctataaaggatattaagaaggcttatagaaaattagctctccaattacacccagatcgcaaccctgacgatccgcaggcacaagagaagttccaggatttgggagcagcctatgaggtgctgtccgattccgagaaacgcaagcagtacgacacgtatggagaagaaggcctgaaggatggccatcagagctcacacggcgatatattctcacatttcttcggtgattttgggtttatgtttgggggaactcctcggcagcaagataggaatataccacgggggtccgacataattgtggatcttgaagtgacactagaagaagtgtacgccggaaactttgtcgaagtggtgaggaacaagccagtggctagacaggccccgggtaagagaaagtgtaattgccgccaggaaatgcgtacaacacagctgggcccgggacgcttccagatgacgcaagaagttgtttgtgacgaatgccctaatgtgaaactcgtcaatgaggagcggactctcgaggtcgagatcgagcccggcgtccgagatgggatggagtaccccttcatcggggagggcgagccccacgtcgacggcgagcctggcgatctgcgctttcgcataaaggtcgtcaaacaccctatctttgaacgccgcggcgacgacctgtataccaatgttacaattagcttggtggagagtcttgtaggcttcgagatggatattactcatctggacgggcacaaagtccacatatcacgagataaaataacccgccctggcgccaagctttggaaaaaaggcgagggtctcccaaacttcgacaataacaatattaaaggcagcttgattatcacgttcgatgttgatttccccaaagagcaactgacagaagaagcgcgcgaaggcattaaacagttgctaaagcagggtagcgtgcagaaagtttacaatggcctgcaggggtactag

SEQ ID NO: 190522 - DNA, 1077 bp, Artificial Sequence
  derived and/or modified sequence
atggcccctcagaatctgagcactttttgcctgctcctgctctacttaatcggcgctgtgattgccggcagggacttttacaaaattcttggtgtgccccgctctgcttcaatcaaggatatcaaaaaggcctataggaaactggcactgcagctacatcctgacaggaaccctgacgatccacaggctcaagagaaatttcaggatttaggtgccgcatatgaggtgctttctgacagtgagaagaggaagcagtatgatacatatggtgaggaaggcctgaaagacggccatcagtcgagccacggcgacattttttctcatttcttcggagactttggcttcatgttcggtgggaccccacggcagcaggataggaatattcctaggggatcagacattatcgtcgatctggaagtgacgctggaggaggtgtatgctggtaacttcgtggaggttgtgcgcaacaagccggttgccagacaggctcccggaaaacggaaatgtaattgtcggcaagaaatgagaacgacccagctgggtcccggtcgctttcaaatgacgcaagaggtggtctgcgacgagtgtcctaatgttaaattggtgaatgaggagcgaactctcgaagtcgaaattgaaccgggagtgcgggacggtatggagtatcctttcattggcgagggggagcctcatgtggacggcgagcccggtgatctccggtttagaatcaaagtcgtgaagcaccctatattcgagcgccggggtgacgatttgtacacgaacgtgacaatcagcctagtggaaagcctggtcggctttgagatggatatcactcatttagacggtcacaaggtgcatatttctcgagacaaaatcacccgccctggtgctaaactctggaaaaaaggggagggtctcccaaatttcgacaataacaacatcaagggctccctcattatcacctttgatgtggacttccctaaagaacagcttaccgaagaggccagggaggggattaagcagttattgaagcaggggagcgttcagaaagtgtacaatggactgcagggatactag

SEQ ID NO: 190523 - DNA, 1077 bp, Artificial Sequence
  derived and/or modified sequence
atggccccccagaacctgagcaccttctgcctgctgctgctgtacctgattggagctgtgattgctggccgggacttctacaagatcctgggcgtgcccaggtctgccagcatcaaggacatcaagaaggcctacaggaagctggccctgcagctgcacccagacaggaacccagatgacccccaggcccaggagaagttccaggacctgggcgccgcctatgaggtgctgagtgacagcgagaagaggaagcagtatgacacctatggagaggagggcctgaaggatggccaccagagcagccacggggacatcttcagccacttcttcggggactttggcttcatgtttggaggcaccccccggcagcaggacaggaacatcccccggggcagtgacatcatcgtggacctggaggtgaccctggaggaggtgtatgccggcaactttgtggaggtggtgaggaacaagcctgtggcccggcaggcccctgggaagaggaagtgcaactgccggcaggagatgaggaccacccagctgggccctggccgcttccagatgacccaggaggtggtgtgtgatgaatgtcccaacgtgaagctggtgaatgaggagaggaccctggaggtggagattgagcccggggtgagagatggcatggagtaccccttcatcggggagggggagccccacgtggatggagagcccggggacctgcgcttccgcatcaaggtggtgaagcaccccatctttgaaagaagaggagatgacctgtacaccaacgtgaccatcagcctggtggagagcctggtgggctttgagatggacatcacccacctggatggccacaaggtgcacatcagccgggacaagatcaccaggcctggggccaagctgtggaagaagggggagggcctgcccaactttgacaacaacaacatcaagggcagcctcatcatcacctttgatgtggacttccccaaggagcagctgacagaggaggcccgggagggcatcaagcagctgctgaagcagggctctgtgcagaaggtgtacaacggcctgcagggctactag

SEQ ID NO: 190524 - DNA, 1077 bp, Artificial Sequence
  derived and/or modified sequence
atggccccccagaacctgagcaccttctgcctgctgctgctgtacttaatcggagctgttattgcaggtagagacttttacaaaatcttaggagttccacgatcagcttccataaaggacattaagaaagcctaccgcaaattggccctgcaactgcaccccgaccgcaaccccgacgatcctcaggcccaagagaagttccaggatcttggggccgcctacgaagtgctgagcgatagtgagaaaagaaagcagtacgacacctacggagaagaagggttaaaagacggacatcagtcttcccacggggacattttttcccattttttcggggactttgggttcatgtttggggggacaccacggcagcaggaccgaaatatacctcgcgggtccgacattatcgtggatctggaggtcacacttgaagaagtatatgcaggcaattttgtggaagttgtaaggaataaacccgtcgctcggcaggcccctggcaagagaaaatgcaattgtaggcaggagatgcgtactacacagcttggaccaggcagatttcagatgacacaagaagtcgtgtgtgatgaatgccctaacgttaaactcgtgaatgaagagagaacgctggaagtagaaattgagcccggagtccgggatggcatggagtaccctttcatcggagaaggggagccgcacgttgatggggagcctggagacctacgatttcgaattaaggtagttaagcatcctatcttcgagcgtagaggtgacgatctgtacaccaacgtgaccatttcgctggtggagtctcttgtagggtttgagatggatatcacacacctggatggacataaggtccatatcagccgtgacaaaatcacaaggcccggggcgaaactgtggaagaagggcgaaggcctcccgaacttcgacaataacaatatcaagggctcactgatcatcacattcgatgtggacttcccaaaggaacagcttacagaggaagcccgcgagggcattaaacagctgctgaagcagggaagcgtacagaaggtgtacaacggcctgcagggttactag

SEQ ID NO: 190525 - DNA, 1077 bp, Artificial Sequence
  derived and/or modified sequence
atggccccccagaacctgagcaccttctgcctgctgctgctgtacttgataggcgccgttatcgctggacgggacttctataagattctgggcgtgccgaggagtgccagcattaaggatattaaaaaagcatacagaaaactcgccctccaattacaccctgatcgcaacccagacgacccccaagctcaggaaaagtttcaggatctgggggccgcatatgaagtgctttcggattccgagaagaggaaacaatacgacacatatggtgaggagggactgaaggatgggcaccagtccagtcatggggacatctttagccatttttttggagacttcggctttatgtttgggggaacaccgcggcagcaagataggaatattcccaggggatcagatataattgtggatttggaagttacattggaagaggtgtatgcggggaattttgtggaagtggttaggaataagccagtggctcggcaagcacccgggaagcgaaagtgcaactgtcgccaagagatgcggaccacccaactcggccctgggcgattccaaatgacacaagaggtggtttgtgatgaatgtcctaatgttaaactggtcaacgaagaaaggaccctcgaggtggaaatcgaaccaggagttcgggatggtatggagtatccattcatcggcgaaggagaaccccacgtcgacggggagcccggtgacttgcgctttcgcatcaaggtcgtgaaacatccgatttttgagcggcggggagacgacttatataccaacgtgactatcagcttagtggaatctttagttgggtttgagatggatatcacacatctcgacgggcacaaggtgcacatcagccgggataaaatcactagaccaggcgctaaattgtggaagaagggggagggattacccaactttgataacaataacatcaaaggatcacttataatcaccttcgatgttgacttcccgaaggaacaactgacagaggaggcacgtgagggaatcaaacagttgcttaagcagggtagcgtgcaaaaagtgtataacggactgcaggggtactag

SEQ ID NO: 190526 - DNA, 1077 bp, Artificial Sequence
  derived and/or modified sequence
atggcccctcagaacttgtctacgttctgtttgctgctactttacttaatcggcgctgtgattgccggaagggatttttacaaaattctgggtgtgccaagaagtgcaagtatcaaagatatcaaaaaggcttataggaagcttgctctgcaattgcaccctgacagaaatccagatgatcctcaagcccaggagaaattccaggatctcggcgcagcctacgaagtgctttctgacagcgaaaagagaaagcagtacgacacctacggcgaagagggtctgaaggatggccaccagtcatctcacggggatatcttcagccacttttttggcgattttgggtttatgttcggcggaacaccccgtcagcaggatagaaatatacccagagggtcggacatcatagtcgaccttgaagtgaccttagaggaggtatacgcaggcaattttgtcgaggtcgtcaggaataaaccagtggcccgtcaggctcctgggaagaggaaatgtaactgtaggcaagagatgcgcaccacccagttaggacccggaaggttccagatgacccaggaggtagtatgtgatgagtgtcccaacgtgaagctggttaacgaagagaggacactggaggtggagatagagcccggagtgcgagacgggatggaatacccattcatcggcgaaggagaaccacatgtggacggcgagcccggtgacctgaggttccggatcaaagtcgtcaagcacccaatttttgagagaaggggcgatgacctttacacaaacgtgaccattagcctggtggagagccttgtcggattcgaaatggatataacccacttagacggtcataaggttcatatcagcagagacaagattactcgccctggagctaagttatggaagaaaggtgagggcctgcccaacttcgacaacaataatattaagggcagtctgatcataacgttcgacgtagattttcctaaagaacagctgaccgaagaagccagggaggggattaagcagcttcttaaacaggggtccgtgcagaaagtttataacggactacaaggttactag

SEQ ID NO: 190527 - DNA, 1077 bp, Artificial Sequence
  derived and/or modified sequence
atggcccctcagaacctgagcacattctgcctgctacttctctatctcattggcgcagtcatagccggtcgggacttctacaaaatcttaggcgtgccccgttctgctagcataaaggacatcaagaaggcctataggaagctcgcgcttcagcttcatccggacagaaaccctgacgatccgcaggcccaagaaaaattccaggatctgggcgcagcatatgaggtgctctctgactctgaaaagaggaagcagtacgatacatacggtgaggaggggttgaaagacggccatcaaagcagtcacggggatatcttttcacactttttcggcgactttgggtttatgtttgggggtactccacgccagcaggaccgcaatattccaaggggcagtgacattattgtggatctagaagtgactttggaagaagtgtacgcgggaaatttcgtggaggtcgtccggaacaaaccagttgctagacaggcccctggcaaacgcaaatgtaattgtcgccaggagatgcgcaccacccagttagggcctggacgattccagatgacccaggaagtagtttgcgacgagtgccctaatgtgaagcttgtcaacgaagaacgaactctggaagtggagattgagcctggagtccgggatggcatggaatatcccttcattggagagggcgagccccacgtggatggtgagcccggtgacctccgcttcaggattaaggtggttaagcatcctatattcgaacggcgaggtgacgatctctataccaacgtgacgatcagccttgtggagtctctggtgggcttcgagatggacatcacccatttggatgggcacaaagtgcacattagcagagacaaaattactcgccctggtgccaagctgtggaagaagggtgaaggtctccctaattttgacaacaacaatatcaagggatcactgattattacattcgatgtggattttcccaaggagcagctcacagaagaggctcgtgagggcatcaagcagcttctgaagcaaggttccgtgcagaaagtttataatggccttcagggctactag

SEQ ID NO: 190528 - DNA, 2398 bp, Artificial Sequence
  derived and/or modified sequence
gagacctggcggaccccgttgctagagcggcagattgcggctcaagcgtctgagaaaatctaggctggggtcgagagtccgcaacagtggcacctggagccagacccaccgctttctggtgtcgcgcctttcaacccgggggggtaggaagctttctgttgctccgcataactgtggtcagctaatagctgctgcctttccgagacagttgtcttatggagttgcttggagaacgtaaaataagaggcctaagcaatgcgtctgatgtacacctgtcgtggaataactgttcccgctcattcggccgctgtacctctgctccctcattcggagcgtagctgggtatgaatgaaattccgggcttgtagcacagagaaaacttctctcccacaattggttggtgctggggaggaagctcctgattggtggaaagtccgaggaagtgggcaagccggagggatttcgtgtacctcaggtgccctcactctgaccggccccctatcattacgtaattttctacgactcgcggtagctcaggcagagcgggttcctgcagcggcgcgaccctctgacgtctccgcttctaattggtcaagagctgcgactgcagttctgaagcctaactggttgcccgtgccgcctcggaggtgaagtgtactgcgctgattggcttccaggcgccggccgcgtgtgatgtcccgggcaacgattggctctcgcctaccgggggcttctctcaccgggactcgggactcccgggaagtggaccggcagaagagggggctagctagctgtctctgcggaccaaggagacccccgcgcccccccggtgtgaggcggcctcacagggccgggtgggctggcgagccgacgcggcggcggaggaggctgtgaggagtgtgtggaacaggacccgggacagaggaaccatggctccgcagaacctgagcaccttttgcctgttgctgctatacctcatcggggcggtgattgccggacgagatttctataagatcttgggggtgcctcgaagtgcctctataaaggatattaaaaaggcctataggaaactagccctgcagcttcatcccgaccggaaccctgatgatccacaagcccaggagaaattccaggatctgggtgctgcttatgaggttctgtcagatagtgagaaacggaaacagtacgatacttatggtgaagaaggattaaaagatggtcatcagagctcccatggagacattttttcacacttctttggggattttggtttcatgtttggaggaacccctcgtcagcaagacagaaatattccaagaggaagtgatattattgtagatctagaagtcactttggaagaagtatatgcaggaaattttgtggaagtagttagaaacaaacctgtggcaaggcaggctcctggcaaacggaagtgcaattgtcggcaagagatgcggaccacccagctgggccctgggcgcttccaaatgacccaggaggtggtctgcgacgaatgccctaatgtcaaactagtgaatgaagaacgaacgctggaagtagaaatagagcctggggtgagagacggcatggagtacccctttattggagaaggtgagcctcacgtggatggggagcctggagatttacggttccgaatcaaagttgtcaagcacccaatatttgaaaggagaggagatgatttgtacacaaatgtgacaatctcattagttgagtcactggttggctttgagatggatattactcacttggatggtcacaaggtacatatttcccgggataagatcaccaggccaggagcgaagctatggaagaaaggggaagggctccccaactttgacaacaacaatatcaagggctctttgataatcacttttgatgtggattttccaaaagaacagttaacagaggaagcgagagaaggtatcaaacagctactgaaacaagggtcagtgcagaaggtatacaatggactgcaaggatattgagagtgaataaaattggactttgtttaaaataagtgaataagcgatatttattatctgcaaggtttttttgtgtgtgtttttgtttttattttcaatatgcaagttaggcttaatttttttatctaatgatcatcatgaaatgaataagagggcttaagaatttgtccatttgcattcggaaaagaatgaccagcaaaaggtttactaatacctctccctttggggatttaatgtctggtgctgccgcctgagtttcaagaattaaagctgcaagaggactccaggagcaaaagaaacacaatatagagggttggagttgttagcaatttcattcaaaatgccaactggagaagtctgtttttaaatacattttgttgttatttttttcatga

SEQ ID NO: 190529 - DNA, 1688 bp, Artificial Sequence
  derived and/or modified sequence
ttggctctcgcctaccgggggcttctctcaccgggactcgggactcccgggaagtggaccggcagaagagggggctagctagctgtctctgcggaccaaggagacccccgcgcccccccggtgtgaggcggcctcacagggccgggtgggctggcgagccgacgcggcggcggaggaggctgtgaggagtgtgtggaacaggacccgggacagaggaaccatggctccgcagaacctgagcaccttttgcctgttgctgctatacctcatcggggcggtgattgccggacgagatttctataagatcttgggggtgcctcgaagtgcctctataaaggatattaaaaaggcctataggaaactagccctgcagcttcatcccgaccggaaccctgatgatccacaagcccaggagaaattccaggatctgggtgctgcttatgaggttctgtcagatagtgagaaacggaaacagtacgatacttatggtgaagaaggattaaaagatggtcatcagagctcccatggagacattttttcacacttctttggggattttggtttcatgtttggaggaacccctcgtcagcaagacagaaatattccaagaggaagtgatattattgtagatctagaagtcactttggaagaagtatatgcaggaaattttgtggaagtagttagaaacaaacctgtggcaaggcaggctcctggcaaacggaagtgcaattgtcggcaagagatgcggaccacccagctgggccctgggcgcttccaaatgacccaggaggtggtctgcgacgaatgccctaatgtcaaactagtgaatgaagaacgaacgctggaagtagaaatagagcctggggtgagagacggcatggagtacccctttattggagaaggtgagcctcacgtggatggggagcctggagatttacggttccgaatcaaagttgtcaagcacccaatatttgaaaggagaggagatgatttgtacacaaatgtgacaatctcattagttgagtcactggttggctttgagatggatattactcacttggatggtcacaaggtacatatttcccgggataagatcaccaggccaggagcgaagctatggaagaaaggggaagggctccccaactttgacaacaacaatatcaagggctctttgataatcacttttgatgtggattttccaaaagaacagttaacagaggaagcgagagaaggtatcaaacagctactgaaacaagggtcagtgcagaaggtatacaatggactgcaaggatattgagagtgaataaaattggactttgtttaaaataagtgaataagcgatatttattatctgcaaggtttttttgtgtgtgtttttgtttttattttcaatatgcaagttaggcttaatttttttatctaatgatcatcatgaaatgaataagagggcttaagaatttgtccatttgcattcggaaaagaatgaccagcaaaaggtttactaatacctctccctttggggatttaatgtctggtgctgccgcctgagtttcaagaattaaagctgcaagaggactccaggagcaaaagaaacacaatatagagggttggagttgttagcaatttcattcaaaatgccaactggagaagtctgtttttaaatacattttgttgttatttttttcatg

SEQ ID NO: 190530 - DNA, 1077 bp, Artificial Sequence
  derived and/or modified sequence
atggccccccagaacctgagcaccttctgcctgctgctgctgtacctgatcggcgccgtgatcgccggcagagacttctacaagatcctgggcgtgcccagaagcgccagcatcaaggacatcaagaaggcctacagaaagctggccctgcagctgcaccccgacagaaaccccgacgacccccaggcccaggagaagttccaggacctgggcgccgcctacgaggtgctgagcgacagcgagaagagaaagcagtacgacacctacggcgaggagggcctgaaggacggccaccagagcagccacggcgacatcttcagccacttcttcggcgacttcggcttcatgttcggcggcacccccagacagcaggacagaaacatccccagaggcagcgacatcatcgtggacctggaggtgaccctggaggaggtgtacgccggcaacttcgtggaggtggtgagaaacaagcccgtggccagacaggcccccggcaagagaaagtgcaactgcagacaggagatgagaaccacccagctgggccccggcagattccagatgacccaggaggtggtgtgcgacgagtgccccaacgtgaagctggtgaacgaggagagaaccctggaggtggagatcgagcccggcgtgagagacggcatggagtaccccttcatcggcgagggcgagccccacgtggacggcgagcccggcgacctgagattcagaatcaaggtggtgaagcaccccatcttcgagagaagaggcgacgacctgtacaccaacgtgaccatcagcctggtggagagcctggtgggcttcgagatggacatcacccacctggacggccacaaggtgcacatcagcagagacaagatcaccagacccggcgccaagctgtggaagaagggcgagggcctgcccaacttcgacaacaacaacatcaagggcagcctgatcatcaccttcgacgtggacttccccaaggagcagctgaccgaggaggccagagagggcatcaagcagctgctgaagcagggcagcgtgcagaaggtgtacaacggcctgcagggctactag

SEQ ID NO: 190531 - protein, 253 aa, Artificial Sequence
  derived and/or modified sequence
MDSAAAAFALDKPALGPGPPPPPPALGPGDCAQARKNFSVSHLLDLEEVAAAGRLAARPGARAEAREGAAREPSGGSSGSEAAPQDGECPSPGRGSAAKRKKKQRRNRTTFNSSQLQALERVFERTHYPDAFVREELARRVNLSEARVQVWFQNRRAKFRRNERAMLASRSASLLKSYSQEAAIEQPVAPRPTALSPDYLSWTASSPYSTVPPYSPGSSGPATPGVNMANSIASLRLKAKEFSLHHSQVPTVN

SEQ ID NO: 190532 - DNA, 1327 bp, Artificial Sequence
  derived and/or modified sequence
cgcagcgcgtgcaccagcggctccggagcgagcggccgtggctgagaaggggagggcggaaagtttgtttccccgacgtcagcgccgggcgggccgcgaggctaggaggcggcgggagctgggcagagcgcggggcggccggggctctcgctccgacccgcgcccgcgacccttcctgggacccgagcccgagacccccgccggcccccccggggccgctcgcgggcatggacagcgcggccgccgccttcgccctggacaagccggcgctgggcccggggccgccgccgcctccacccgcgctggggcccggcgactgcgcccaggcgcgcaagaacttctcggtgagccacctcctggacctggaagaggtggcggcggccgggcggctggcggcgcgccccggggccagggccgaggcgcgggagggcgcagcacgggagccgtccgggggcagcagcggcagcgaggcggcgccgcaggatggtgagtgtcccagcccggggcgcggtagcgccgccaagcggaagaagaagcagcggcggaaccgcaccacgttcaacagcagccaactgcaggcgctggagcgcgtgttcgagcgcacgcactaccccgacgcctttgtgcgcgaggagcttgcccggcgcgtcaacctcagcgaggcgcgcgttcaggtctggtttcagaaccgccgcgccaagttccgcaggaatgaaagggccatgctggccagccgctctgcctcgctgctcaagtcctacagccaggaggccgccatcgagcagcccgtggctccccggcccaccgccctgagtccagattatctctcctggacagcctcgtccccctacagcacagtgccaccctacagccctgggagctcaggccccgcaaccccaggggtcaacatggccaacagcatcgccagcctccgtctcaaggccaaggagttcagcctgcaccacagccaggtgcctacggtgaactgaagtccagtcccaccaggacccagacgcctccctgggtggacagcaatagaaaagggggcagacgcccaggaagtgaccttctcctggatgagctctcctggcccgtctgtccagcctggactcccgagcccacgaggctgttgaggcccctgcagccgggcccagctcttctgtccttggccaccagagactgcagcccacaacccttggaggggttgggccggaaggtggaagagcctgccaaggacctcatttagtttgtgtattaaaaccaaaaagcttttgtctttaagaaataaaaccatttttttaagccccaaaaaaaaaaaaaaaaaaaa

SEQ ID NO: 190533 - DNA, 762 bp, Artificial Sequence
  derived and/or modified sequence
atggattctgccgcagccgcgttcgctcttgacaaacctgccctgggacctggacctccccctcctccacccgcactgggccctggggactgtgcgcaggctaggaagaattttagcgtgtcgcatctcctagatttagaggaagtggctgctgcaggaagactggcggctcgccccggcgcccgtgcagaagccagggagggcgccgcaagggagcctagcggggggagctccggctctgaagcagctccgcaggacggcgaatgcccaagccccggccgaggcagcgccgccaaaaggaagaagaagcagagacggaatcggacaacattcaacagtagccaactccaggccctcgagcgggtgtttgagagaacccactaccctgacgcttttgttcgcgaagaactggccagacgcgtgaatctctccgaagcccgagttcaggtgtggttccagaacagaagggcaaaatttaggagaaacgagagagctatgctggcctctaggagcgcatctctccttaagagctactcccaggaagccgccatagagcaaccagttgctcctagacctactgcactgtctcctgattatctctcttggacggcatcctcaccgtactctacagttcctccatattctccaggtagcagcggaccagcgacccccggggtgaatatggcgaattctattgcaagcctgagactcaaagcaaaggaattttccttacatcattcacaggtgccgacagttaactag

SEQ ID NO: 190534 - DNA, 762 bp, Artificial Sequence
  derived and/or modified sequence
atggattctgctgctgctgcctttgccctggacaagccagccctgggccctggccccccacctcctcctccagccctgggccctggggactgtgcccaggccaggaagaacttctctgtgagccacctgctggacctggaggaggtggccgccgccggccgcctggccgcccggcctggggcccgggcagaggcccgggagggcgccgcccgggagcccagcggcggcagcagcggcagcgaggccgccccccaggatggagagtgccccagccctggccggggcagcgctgccaagaggaagaagaagcagaggaggaacagaaccaccttcaacagcagccagctgcaggccctggagcgggtgtttgagaggacccactacccagatgcctttgtgcgggaggagctggccaggagagtgaacctgtctgaggcccgggtgcaggtgtggttccagaacagaagagccaagttcagaagaaatgaaagagccatgctggccagccgcagcgccagcctgctgaagagctacagccaggaggccgccatcgagcagcctgtggccccccggcccacagccctgagcccagactacctgtcctggacagccagcagcccctacagcacagtgcccccctacagccctggcagcagcggccctgccaccccaggagtgaacatggccaacagcatcgccagcctgcggctgaaggccaaggagttcagcctgcaccacagccaggtgcccaccgtgaactag

SEQ ID NO: 190535 - DNA, 762 bp, Artificial Sequence
  derived and/or modified sequence
atggacagcgccgccgccgccttcgccctggacaagcccgccctgggacctggaccaccccccccaccacctgccctagggcctggggactgcgcccaggcacggaaaaacttttctgtgtctcacctgctggatctcgaagaagttgcagccgctgggaggctggctgcacggcccggcgccagggccgaggcccgggaaggagccgctagagagcccagcgggggatcaagcggcagcgaagctgccccacaagacggagagtgcccctcccccgggcgcggatccgccgctaaaaggaaaaaaaagcaacggagaaacaggaccacctttaactcatcccagctccaggctctggagagggttttcgaaaggacccactaccctgacgctttcgtgagggaagaactggcccgcagggttaatctgagtgaggcgcgggtgcaagtttggtttcagaaccggagggccaaatttcgccgaaacgagcgggccatgctcgctagccggtctgcctcactgctcaaaagctattcccaagaagcggccattgagcaaccagtggccccccggcccacagcactgtcgcctgattacctctcctggaccgcctcttcaccctacagcaccgtccccccttattcgcccggcagtagcggaccagctactcctggtgtaaatatggcaaattccatcgcgagtctgcgattaaaagccaaggagttctcactgcaccattctcaggtgccgacagtgaattag

SEQ ID NO: 190536 - DNA, 1233 bp, Artificial Sequence
  derived and/or modified sequence
cgcagcgcgtgcaccagcggctccggagcgagcggccgtggctgagaaggggagggcggaaagtttgtttccccgacgtcagcgccgggcgggccgcgaggctaggaggcggcgggagctgggcagagcgcggggcggccggggctctcgctccgacccgcgcccgcgacccttcctgggacccgagcccgagacccccgccggcccccccggggccgctcgcgggcatggacagcgcggccgccgccttcgccctggacaagccggcgctgggcccggggccgccgccgcctccacccgcgctggggcccggcgactgcgcccaggcgcgcaagaacttctcggtgagccacctcctggacctggaagaggtggcggcggccgggcggctggcggcgcgccccggggccagggccgaggcgcgggagggcgcagcacgggagccgtccgggggcagcagcggcagcgaggcggcgccgcaggatggtgagtgtcccagcccggggcgcggtagcgccgccaagcggaagaagaagcagcggcggaaccgcaccacgttcaacagcagccaactgcaggcgctggagcgcgtgttcgagcgcacgcactaccccgacgcctttgtgcgcgaggagcttgcccggcgcgtcaacctcagcgaggcgcgcgttcaggtctggtttcagaaccgccgcgccaagttccgcaggaatgaaagggccatgctggccagccgctctgcctcgctgctcaagtcctacagccaggaggccgccatcgagcagcccgtggctccccggcccaccgccctgagtccagattatctctcctggacagcctcgtccccctacagcacagtgccaccctacagccctgggagctcaggccccgcaaccccaggggtcaacatggccaacagcatcgccagcctccgtctcaaggccaaggagttcagcctgcaccacagccaggtgcctacggtgaactgaagtccagtcccaccaggacccagacgcctccctgggtggacagcaatagaaaagggggcagacgcccaggaagtgaccttctcctggatgagctctcctggcccgtctgtccagcctggactcccgagcccacgaggctgttgaggcccctgcagccgggcccagctcttctgtccttggccaccagagactgcagcccacaacccttggaggggttgggccggaaggtggaagagcctgccaa

SEQ ID NO: 190537 - DNA, 762 bp, Artificial Sequence
  derived and/or modified sequence
atggacagcgctgccgctgcttttgcccttgataagccagccctcggccctggaccaccaccaccaccacccgctctcggacccggagactgcgcccaggctaggaagaatttttccgtatcccatctattggatcttgaggaagtggctgctgccggacgcctggcagcgaggcctggcgcacgcgcagaggccagggaaggagccgctagagagccatctggcggatcttctggctcggaagccgctcctcaggacggtgaatgcccatctcccggaaggggctccgccgcaaagagaaagaagaagcagcgaaggaacaggaccacattcaacagctcccaactgcaagcgttggagcgggtcttcgagcggacacactatcccgatgccttcgttcgagaagagctggcaagaagagtgaatctgtccgaggccagggtgcaggtgtggtttcaaaacagacgggcaaaattcagaagaaatgaacgagcaatgctggccagtaggagtgctagccttttgaagtcatactcgcaggaagcagccatagagcaaccagtggcccctcgcccaactgcgctcagtcctgattacctaagctggaccgctagctccccatactccacggtgcccccttacagcccaggaagtagtggccctgccactccaggagtgaacatggcgaatagtattgcttccctgagactgaaggccaaggagttttccttacaccacagccaagtgcctaccgtgaactag

SEQ ID NO: 190538 - DNA, 762 bp, Artificial Sequence
  derived and/or modified sequence
atggacagcgccgccgccgccttcgccctggacaagcccgccctgggccccggcccccccccccccccccccgccctgggccccggcgactgcgcccaggccagaaagaacttcagcgtgagccacctgctggacctggaggaggtggccgccgccggcagactggccgccagacccggcgccagagccgaggccagagagggcgccgccagagagcccagcggcggcagcagcggcagcgaggccgccccccaggacggcgagtgccccagccccggcagaggcagcgccgccaagagaaagaagaagcagagaagaaacagaaccaccttcaacagcagccagctgcaggccctggagagagtgttcgagagaacccactaccccgacgccttcgtgagagaggagctggccagaagagtgaacctgagcgaggccagagtgcaggtgtggttccagaacagaagagccaagttcagaagaaacgagagagccatgctggccagcagaagcgccagcctgctgaagagctacagccaggaggccgccatcgagcagcccgtggcccccagacccaccgccctgagccccgactacctgagctggaccgccagcagcccctacagcaccgtgcccccctacagccccggcagcagcggccccgccacccccggcgtgaacatggccaacagcatcgccagcctgagactgaaggccaaggagttcagcctgcaccacagccaggtgcccaccgtgaactag

SEQ ID NO: 190539 - protein, 334 aa, Artificial Sequence
  derived and/or modified sequence
MATRQRESSITSCCSTSSCDADDEGVRGTCEDASLCKRFAVSIGYWHDPYIQHFVRLSKERKAPEINRGYFARVHGVSQLIKAFLRKTECHCQIVNLGAGMDTTFWRLKDEDLLPSKYFEVDFPMIVTRKLHSIKCKPPLSSPILELHSEDTLQMDGHILDSKRYAVIGADLRDLSELEEKLKKCNMNTQLPTLLIAECVLVYMTPEQSANLLKWAANSFERAMFINYEQVNMGDRFGQIMIENLRRRQCDLAGVETCKSLESQKERLLSNGWETASAVDMMELYNRLPRAEVSRIESLEFLDEMELLEQLMRHYCLCWATKGGNELGLKEITY

SEQ ID NO: 190540 - DNA, 1005 bp, Artificial Sequence
  derived and/or modified sequence
atggctacccgacagagggagagcagcatcactagctgctgctctaccagctcgtgcgatgctgatgacgaaggtgttaggggcacctgcgaagatgctagcttgtgcaaacgatttgccgtctccatcggttactggcacgacccttacatccagcacttcgtccggctgagcaaagaacggaaggcccctgaaatcaacagaggatactttgctcgagttcacggtgtgtctcagctgatcaaagcttttttgcgtaagactgagtgccactgccagatagtgaacctgggcgccggaatggacactacgttttggagactaaaggacgaggacctgcttccaagcaagtattttgaagttgatttccctatgatcgtgaccaggaagctacatagtatcaagtgcaagcccccactctcatctcccattctggaattgcacagcgaggacactttgcagatggatggtcatatactggatagcaaaagatacgcagtgataggggcagacttgcgggacctgagcgaactggaagagaagttaaaaaagtgcaacatgaacacacagttacctaccctgctgatagctgagtgtgtactggtctacatgacaccggaacaatctgcgaatctcttaaagtgggccgccaactcttttgaaagagcaatgttcataaattacgagcaggttaacatgggagaccgtttcgggcaaatcatgattgaaaacctaaggaggagacaatgcgacctggccggcgtggagacctgtaagtcactcgagagccagaaagaaagactgctcagcaacggctgggagaccgcctcagcggtggacatgatggagctgtataaccgtctcccccgggctgaggtatccaggattgaatctctggagttcctggacgagatggaactgttggagcagctgatgcgccattactgcttgtgttgggctactaaaggagggaatgagctcggtctgaaagagatcacctactag

SEQ ID NO: 190541 - DNA, 1005 bp, Artificial Sequence
  derived and/or modified sequence
atggccacccggcagcgggagagcagcatcaccagctgctgcagcaccagcagctgtgatgctgatgatgaaggagtgcggggcacctgtgaagatgccagcctgtgcaagagatttgctgtgtccatcggctactggcatgacccctacatccagcactttgtgcggctgagcaaggagaggaaggcccctgagatcaacagaggctactttgcccgggtgcatggagtgtcccagctgatcaaggccttcctgaggaagacagagtgccactgccagatcgtgaacctgggcgccggcatggacaccaccttctggaggctgaaggatgaggacctgctgcccagcaagtactttgaggtggacttccccatgattgtgaccaggaagctgcacagcatcaagtgcaagccacccctgagcagccccatcctggagctgcacagcgaggacaccctgcagatggatggccacatcctggacagcaagagatatgctgtgattggagctgacctgcgggacctgtctgagctggaggagaagctgaagaagtgcaacatgaacacccagctgcccaccctgctgattgctgaatgtgtgctggtgtacatgaccccagagcagagcgccaacctgctgaagtgggccgccaacagctttgagcgggccatgttcatcaactatgagcaggtgaacatgggagacagatttggccagatcatgattgagaacctgcggcggcggcagtgtgacctggccggcgtggagacctgcaagagcctggagagccagaaggagcggctgctgagcaatggctgggagacagccagcgctgtggacatgatggagctgtacaaccggctgcccagggctgaggtgagccgcatcgagagcctggagttcctggatgagatggagctgctggagcagctgatgaggcactactgcctgtgctgggccaccaagggcggcaatgagctgggcctgaaggagatcacctactag

SEQ ID NO: 190542 - DNA, 1370 bp, Artificial Sequence
  derived and/or modified sequence
agccggcgtgggcggcgtcactgagccgcgccagctgagccaggtagggccctaccctcttctgttgctttctccctgtggctcgcgccgtcccccgccgcccgtcgaccccgcttccatgtccctggcggacacagctcccaggaacctccacgcccatggccactaggcagagggaatcctctatcacctcctgctgttccacctcgagctgcgacgcagacgacgagggcgtgcgcggcacctgcgaagatgcttccctgtgcaagaggtttgcagtaagcattggctactggcatgacccttacatacagcactttgtgagactgtctaaagagaggaaagcccctgaaatcaacagaggatattttgctcgagtccatggtgtcagtcagcttataaaggcatttctacggaagacagaatgtcattgtcaaattgtcaaccttggggcaggcatggataccaccttctggagattaaaggatgaagatcttctcccaagtaaatattttgaggttgactttccaatgattgtcacgagaaagctgcacagtatcaaatgcaagcctcccctatccagccccattctagaactgcattcagaggacacacttcagatggatggacacatactggattcaaagagatatgccgttattggagcagatctccgagacctgtctgaactggaagagaagctaaagaaatgtaacatgaatacacaattgccaacactcctgatagctgaatgtgtgctggtttacatgactccagagcagtccgcaaacctcctgaagtgggcagccaacagttttgagagagccatgttcataaactacgaacaggtgaacatgggtgatcggtttgggcagatcatgattgaaaacctgcggagacgccagtgtgacctggcgggagtggagacctgcaagtcattagagtcacagaaagaacggctcctgtcgaatgggtgggaaacagcatcggccgtcgacatgatggagttgtacaacaggttacctcgagctgaagtgagcaggatagaatcacttgaattcctggatgaaatggagctgctggagcagctcatgcggcattactgcctttgctgggcaaccaaaggaggaaatgagcttgggctgaaggagataacttattaatctgtcgaaggcttatgccgagccagaagccgaagccacttgccctcctggaggagacctgcaagctccctgagcggtgggcgggcctcgtccgcaggtctcatcccacactcttgagaagccttggtcactacagtggtcgcacatgttcctcttcctgttcctgttgacatgtcgttgtttaaataaatctcacttgccaccagt

SEQ ID NO: 190543 - DNA, 1005 bp, Artificial Sequence
  derived and/or modified sequence
atggccacccggcagcgggagagcagcatcaccagctgctgcagcacgagcagttgcgatgctgatgacgagggtgttagagggacatgcgaggatgcgagcttatgcaagcgcttcgccgtttcaatcggatactggcacgatccctatatacagcattttgtccgcttatcgaaggagcgaaaagctcccgagattaatcgaggctacttcgccagagtgcatggggtttcacagctgattaaggcgtttctaaggaaaaccgagtgtcactgtcaaatcgtcaatctgggagccgggatggacacaactttctggagactaaaggatgaggacctcctgccatctaaatacttcgaagtagattttcctatgatcgtgactcggaagctgcatagtatcaagtgtaagccgccattgagcagccccatcctcgagctgcactctgaagacaccctgcagatggacggtcatatccttgactccaagcgatacgccgtgataggtgctgatctgagagacctgtcagagcttgaagaaaagctcaaaaagtgcaatatgaatacccagttgcctacactccttatcgccgaatgcgtgcttgtttatatgacacctgagcagtctgccaatctgctgaagtgggcggctaacagtttcgaacgagcaatgtttattaactatgaacaggtgaatatgggagacagatttggccagattatgatcgagaatctcaggcggcgacagtgtgatttggccggggtagaaacctgtaaatccctggagtctcagaaggaaaggctgctcagtaacggctgggagaccgcctcagccgtcgacatgatggaactttacaatcgactgcctagagccgaggtctcaaggatcgaatcccttgagtttcttgacgaaatggaactgctggagcagctgatgcgacactactgcctttgctgggccacaaaaggcggcaacgagctcggcttgaaggaaatcacatactag

SEQ ID NO: 190544 - DNA, 1005 bp, Artificial Sequence
  derived and/or modified sequence
atggctacccggcagcgagagagcagtatcacctcttgttgctctacttccagttgcgacgccgatgatgaaggggttcggggtacctgcgaagacgcctccctctgtaagcggtttgccgtatctatcgggtactggcatgatccatatatacagcactttgtgcggctgagcaaggagcggaaagctcccgagattaaccgaggatactttgccagggtccacggagttagccagctgatcaaggctttcctgaggaaaaccgaatgccactgccagatcgtcaatctcggtgccggaatggacaccacattctggaggctcaaagacgaggacctgctccccagcaagtactttgaggtggattttccgatgatcgtcacacgcaaactgcactcaattaaatgtaagcccccactcagttctccaattctggagttgcattcagaagatacactccagatggacggtcatattctggactctaaaaggtacgccgtgatcggcgcagacctgcgcgatctctctgagttggaagaaaaactcaaaaagtgcaatatgaatacgcagcttccgacgctcctgatcgccgagtgcgtgttggtctacatgacaccagagcagtcagcaaacttactgaagtgggcggctaatagcttcgagagagcaatgttcattaactatgagcaggtgaacatgggcgatcggttcggccagatcatgattgaaaacctccggagacgccagtgtgatctcgccggagtggagacctgcaaatcgctggagagccagaaagaaaggcttctgagcaacggatgggagaccgcgtccgcagtggatatgatggagctctacaatcgtttgcctagggcggaagttagccgcattgagtctctagagttcttggacgagatggagctgttagaacaactcatgcgccactactgtctgtgttgggcaactaaagggggtaatgagctcggccttaaagaaatcacttactag

SEQ ID NO: 190545 - DNA, 1005 bp, Artificial Sequence
  derived and/or modified sequence
atggccaccagacagagagagagcagcatcaccagctgctgcagcaccagcagctgcgacgccgacgacgagggcgtgagaggcacctgcgaggacgccagcctgtgcaagagattcgccgtgagcatcggctactggcacgacccctacatccagcacttcgtgagactgagcaaggagagaaaggcccccgagatcaacagaggctacttcgccagagtgcacggcgtgagccagctgatcaaggccttcctgagaaagaccgagtgccactgccagatcgtgaacctgggcgccggcatggacaccaccttctggagactgaaggacgaggacctgctgcccagcaagtacttcgaggtggacttccccatgatcgtgaccagaaagctgcacagcatcaagtgcaagccccccctgagcagccccatcctggagctgcacagcgaggacaccctgcagatggacggccacatcctggacagcaagagatacgccgtgatcggcgccgacctgagagacctgagcgagctggaggagaagctgaagaagtgcaacatgaacacccagctgcccaccctgctgatcgccgagtgcgtgctggtgtacatgacccccgagcagagcgccaacctgctgaagtgggccgccaacagcttcgagagagccatgttcatcaactacgagcaggtgaacatgggcgacagattcggccagatcatgatcgagaacctgagaagaagacagtgcgacctggccggcgtggagacctgcaagagcctggagagccagaaggagagactgctgagcaacggctgggagaccgccagcgccgtggacatgatggagctgtacaacagactgcccagagccgaggtgagcagaatcgagagcctggagttcctggacgagatggagctgctggagcagctgatgagacactactgcctgtgctgggccaccaagggcggcaacgagctgggcctgaaggagatcacctactag

SEQ ID NO: 190546 - protein, 108 aa, Artificial Sequence
  derived and/or modified sequence
MLLFCPGCGNGLIVEEGQRCHRFSCNTCPYVHNITRKVTNRKYPKLKEVDDVLGGAAAWENVDSTAESCPKCEHPRAYFMQLQTRSADEPMTTFYKCCNAQCGHRWRD

SEQ ID NO: 190547 - DNA, 327 bp, Artificial Sequence
  derived and/or modified sequence
atgctcctattctgccccggatgcgggaatggcctgattgtagaggagggtcaacggtgccaccgattcagctgtaacacctgtccctatgtccataatattaccaggaaggtaactaatcgaaagtatcccaaactgaaggaagtagatgacgtcctggggggcgccgctgcctgggagaatgttgacagtacagctgagtcctgccccaagtgtgagcaccccagagcctacttcatgcagttgcagactagaagtgctgatgagcctatgaccacattctacaaatgctgcaatgctcagtgcggacacaggtggagggattag

SEQ ID NO: 190548 - DNA, 327 bp, Artificial Sequence
  derived and/or modified sequence
atgctgctcttctgccccggctgtggaaatggcctgattgtggaggagggccagcgctgccaccgcttcagctgcaacacctgcccctacgtgcacaacatcaccaggaaggtgaccaacaggaagtaccccaagctgaaggaggtggatgatgtgctgggcggcgctgctgcctgggagaatgtggacagcacagctgagagctgccccaagtgtgagcacccccgggcctacttcatgcagctgcagaccaggtctgcagatgagcccatgaccaccttctacaagtgctgcaatgcccagtgtggccaccgctggagggactag

SEQ ID NO: 190549 - DNA, 1392 bp, Artificial Sequence
  derived and/or modified sequence
agtgggagctgccgggagttggagcctgcggagttcgagaccatgctgctgttctgccccggctgcgggaacgggctgatcgtggaggagggacaacgctgccaccgcttctcctgcaacacgtgcccctacgtgcacaacatcacccgcaaggtaacaaatcggaagtacccaaaactgaaagaagtggatgatgtgcttggtggagcagctgcctgggagaatgttgactctactgcagagtcgtgtcccaaatgcgaacatcctcgtgcttacttcatgcagcttcagacccgctctgcagatgagccgatgaccaccttctacaagtgctgcaatgctcagtgtggacaccgctggagggattagggccaggatggcccagctgccctagtgtgtgcttgccttgtccctcggggtagatgcttagctggcagtatgagttgtgtgtcctgagggtctttgctagtgtggtggaaagataaaccttttgaggtgaagagccagggggtcaggaaatatggcctatctgccaggcagggtggatgaagtcatgaatgtctgggagtttttctgtgtggggaggagacagagacccataactaaatatgctctgtgtaaagtcctattctttcatcttccactttattggcagttgacattcccttactcccaatcaacactcttaaatatttgtactgtttgtaaaacttagtacatgtccctaaatatttaactgttacttgtaaacttgtgtaatttattatttattttaatcaaaattctgaatatttcatttaaatgaaagttggaatattgccttctcagtgttttaaatagcttaagaggtagaaagcaaaccccaaatcacagtgatcccagaatagactacatacttacatttgaacaggctacgaaaatgttaatcaccgggatttcaatttctttctttattcctattcttactcccttattcatttttttgaacctcccctgatttgcttcctcgggttgctttaaatgtataagatactatttatttatttatttattttatttatttatttatttatttaagacagagtcttgttctgtcgcccaggctggagtgcagtggtacgaattcagctcactgcaacctctgccttccgggttcaagggattctcctgtctcagcctcccaagcagctgggactacaggcatgcaccaccacacctgggtaattttgcatttttagtagagatggggtttctccatgttggtcgggctggtctccaactcctgacctcagataatctgtctgcctcggcctcctaaagtgctgggattacaggcgtgagccactgtgtcccaccaatctttacatttaatatgactattttcttattgtt

SEQ ID NO: 190550 - DNA, 327 bp, Artificial Sequence
  derived and/or modified sequence
atgctgctgttctgccccggctgcggcaacggcctgatcgtggaggaggggcaacgatgtcataggttttcctgtaatacctgcccgtacgtacacaatatcaccagaaaagtgaccaatagaaagtacccgaagcttaaagaggtggacgacgtcctgggcggcgctgctgcctgggagaacgtggatagcactgcagaatcctgcccaaaatgcgaacacccccgggcttactttatgcagctgcagacacgtagcgccgatgagcctatgaccaccttttacaaatgctgtaacgctcagtgcggtcacagatggagggactag

SEQ ID NO: 190551 - DNA, 327 bp, Artificial Sequence
  derived and/or modified sequence
atgctcctgttttgccccggatgtgggaatggcttaattgttgaggaaggccaacgctgtcataggttctcgtgcaatacatgcccctatgtccacaacatcaccaggaaggtgaccaatcgtaaatatcctaagctcaaggaggtggacgatgtcctgggaggcgctgctgcctgggagaacgtggattcgaccgctgagtcttgtcccaaatgcgaacaccccagagcatacttcatgcagctccagaccaggtccgccgacgagcccatgaccacgttctataaatgttgtaatgctcagtgcggccacagatggagggactag

SEQ ID NO: 190552 - DNA, 327 bp, Artificial Sequence
  derived and/or modified sequence
atgctgctgttctgccccggctgcggcaacggcctgatcgtggaggagggccagagatgccacagattcagctgcaacacctgcccctacgtgcacaacatcaccagaaaggtgaccaacagaaagtaccccaagctgaaggaggtggacgacgtgctgggcggcgccgccgcctgggagaacgtggacagcaccgccgagagctgccccaagtgcgagcaccccagagcctacttcatgcagctgcagaccagaagcgccgacgagcccatgaccaccttctacaagtgctgcaacgcccagtgcggccacagatggagagactag

SEQ ID NO: 190553 - protein, 1251 aa, Artificial Sequence
  derived and/or modified sequence
MRRGGWRKRAENDGWETWGGYMAAKVQKLEEQFRSDAAMQKDGTSSTIFSGVAIYVNGYTDPSAEELRKLMMLHGGQYHVYYSRSKTTHIIATNLPNAKIKELKGEKVIRPEWIVESIKAGRLLSYIPYQLYTKQSSVQKGLSFNPVCRPEDPLPGPSNIAKQLNNRVNHIVKKIETENEVKVNGMNSWNEEDENNDFSFVDLEQTSPGRKQNGIPHPRGSTAIFNGHTPSSNGALKTQDCLVPMVNSVASRLSPAFSQEEDKAEKSSTDFRDCTLQQLQQSTRNTDALRNPHRTNSFSLSPLHSNTKINGAHHSTVQGPSSTKSTSSVSTFSKAAPSVPSKPSDCNFISNFYSHSRLHHISMWKCELTEFVNTLQRQSNGIFPGREKLKKMKTGRSALVVTDTGDMSVLNSPRHQSCIMHVDMDCFFVSVGIRNRPDLKGKPVAVTSNRGTGRAPLRPGANPQLEWQYYQNKILKGKAADIPDSSLWENPDSAQANGIDSVLSRAEIASCSYEARQLGIKNGMFFGHAKQLCPNLQAVPYDFHAYKEVAQTLYETLASYTHNIEAVSCDEALVDITEILAETKLTPDEFANAVRMEIKDQTKCAASVGIGSNILLARMATRKAKPDGQYHLKPEEVDDFIRGQLVTNLPGVGHSMESKLASLGIKTCGDLQYMTMAKLQKEFGPKTGQMLYRFCRGLDDRPVRTEKERKSVSAEINYGIRFTQPKEAEAFLLSLSEEIQRRLEATGMKGKRLTLKIMVRKPGAPVETAKFGGHGICDNIARTVTLDQATDNAKIIGKAMLNMFHTMKLNISDMRGVGIHVNQLVPTNLNPSTCPSRPSVQSSHFPSGSYSVRDVFQVQKAKKSTEEEHKEVFRAAVDLEISSASRTCTFLPPFPAHLPTSPDTNKAESSGKWNGLHTPVSVQSRLNLSIEVPSPSQLDQSVLEALPPDLREQVEQVCAVQQAESHGDKKKEPVNGCNTGILPQPVGTVLLQIPEPQESNSDAGINLIALPAFSQVDPEVFAALPAELQRELKAAYDQRQRQGENSTHQQSASASVPKNPLLHLKAAVKEKKRNKKKKTIGSPKRIQSPLNNKLLNSPAKTLPGACGSPQKLIDGFLKHEGPPAEKPLEELSASTSGVPGLSSLQSDPAGCVRPPAPNLAGAVEFNDVKTLLREWITTISDPMEEDILQVVKYCTDLIEEKDLEKLDLVIKYMKRLMQQSVESVWNMAFDFILDNVQVVLQQTYGSTLKVT

SEQ ID NO: 190554 - DNA, 3756 bp, Artificial Sequence
  derived and/or modified sequence
atgagaagaggcggctggagaaagagagccgagaacgacggctgggagacctggggcggctacatggccgccaaggtgcagaagctggaggagcagttcagaagcgacgccgccatgcagaaggacggcaccagcagcaccatcttcagcggcgtggccatctacgtgaacggctacaccgaccccagcgccgaggagctgagaaagctgatgatgctgcacggcggccagtaccacgtgtactacagcagaagcaagaccacccacatcatcgccaccaacctgcccaacgccaagatcaaggagctgaagggcgagaaggtgatcagacccgagtggatcgtggagagcatcaaggccggcagactgctgagctacatcccctaccagctgtacaccaagcagagcagcgtgcagaagggcctgagcttcaaccccgtgtgcagacccgaggaccccctgcccggccccagcaacatcgccaagcagctgaacaacagagtgaaccacatcgtgaagaagatcgagaccgagaacgaggtgaaggtgaacggcatgaacagctggaacgaggaggacgagaacaacgacttcagcttcgtggacctggagcagaccagccccggcagaaagcagaacggcatcccccaccccagaggcagcaccgccatcttcaacggccacacccccagcagcaacggcgccctgaagacccaggactgcctggtgcccatggtgaacagcgtggccagcagactgagccccgccttcagccaggaggaggacaaggccgagaagagcagcaccgacttcagagactgcaccctgcagcagctgcagcagagcaccagaaacaccgacgccctgagaaacccccacagaaccaacagcttcagcctgagccccctgcacagcaacaccaagatcaacggcgcccaccacagcaccgtgcagggccccagcagcaccaagagcaccagcagcgtgagcaccttcagcaaggccgcccccagcgtgcccagcaagcccagcgactgcaacttcatcagcaacttctacagccacagcagactgcaccacatcagcatgtggaagtgcgagctgaccgagttcgtgaacaccctgcagagacagagcaacggcatcttccccggcagagagaagctgaagaagatgaagaccggcagaagcgccctggtggtgaccgacaccggcgacatgagcgtgctgaacagccccagacaccagagctgcatcatgcacgtggacatggactgcttcttcgtgagcgtgggcatcagaaacagacccgacctgaagggcaagcccgtggccgtgaccagcaacagaggcaccggcagagcccccctgagacccggcgccaacccccagctggagtggcagtactaccagaacaagatcctgaagggcaaggccgccgacatccccgacagcagcctgtgggagaaccccgacagcgcccaggccaacggcatcgacagcgtgctgagcagagccgagatcgccagctgcagctacgaggccagacagctgggcatcaagaacggcatgttcttcggccacgccaagcagctgtgccccaacctgcaggccgtgccctacgacttccacgcctacaaggaggtggcccagaccctgtacgagaccctggccagctacacccacaacatcgaggccgtgagctgcgacgaggccctggtggacatcaccgagatcctggccgagaccaagctgacccccgacgagttcgccaacgccgtgagaatggagatcaaggaccagaccaagtgcgccgccagcgtgggcatcggcagcaacatcctgctggccagaatggccaccagaaaggccaagcccgacggccagtaccacctgaagcccgaggaggtggacgacttcatcagaggccagctggtgaccaacctgcccggcgtgggccacagcatggagagcaagctggccagcctgggcatcaagacctgcggcgacctgcagtacatgaccatggccaagctgcagaaggagttcggccccaagaccggccagatgctgtacagattctgcagaggcctggacgacagacccgtgagaaccgagaaggagagaaagagcgtgagcgccgagatcaactacggcatcagattcacccagcccaaggaggccgaggccttcctgctgagcctgagcgaggagatccagagaagactggaggccaccggcatgaagggcaagagactgaccctgaagatcatggtgagaaagcccggcgcccccgtggagaccgccaagttcggcggccacggcatctgcgacaacatcgccagaaccgtgaccctggaccaggccaccgacaacgccaagatcatcggcaaggccatgctgaacatgttccacaccatgaagctgaacatcagcgacatgagaggcgtgggcatccacgtgaaccagctggtgcccaccaacctgaaccccagcacctgccccagcagacccagcgtgcagagcagccacttccccagcggcagctacagcgtgagagacgtgttccaggtgcagaaggccaagaagagcaccgaggaggagcacaaggaggtgttcagagccgccgtggacctggagatcagcagcgccagcagaacctgcaccttcctgccccccttccccgcccacctgcccaccagccccgacaccaacaaggccgagagcagcggcaagtggaacggcctgcacacccccgtgagcgtgcagagcagactgaacctgagcatcgaggtgcccagccccagccagctggaccagagcgtgctggaggccctgccccccgacctgagagagcaggtggagcaggtgtgcgccgtgcagcaggccgagagccacggcgacaagaagaaggagcccgtgaacggctgcaacaccggcatcctgccccagcccgtgggcaccgtgctgctgcagatccccgagccccaggagagcaacagcgacgccggcatcaacctgatcgccctgcccgccttcagccaggtggaccccgaggtgttcgccgccctgcccgccgagctgcagagagagctgaaggccgcctacgaccagagacagagacagggcgagaacagcacccaccagcagagcgccagcgccagcgtgcccaagaaccccctgctgcacctgaaggccgccgtgaaggagaagaagagaaacaagaagaagaagaccatcggcagccccaagagaatccagagccccctgaacaacaagctgctgaacagccccgccaagaccctgcccggcgcctgcggcagcccccagaagctgatcgacggcttcctgaagcacgagggcccccccgccgagaagcccctggaggagctgagcgccagcaccagcggcgtgcccggcctgagcagcctgcagagcgaccccgccggctgcgtgagaccccccgcccccaacctggccggcgccgtggagttcaacgacgtgaagaccctgctgagagagtggatcaccaccatcagcgaccccatggaggaggacatcctgcaggtggtgaagtactgcaccgacctgatcgaggagaaggacctggagaagctggacctggtgatcaagtacatgaagagactgatgcagcagagcgtggagagcgtgtggaacatggccttcgacttcatcctggacaacgtgcaggtggtgctgcagcagacctacggcagcaccctgaaggtgacctag

SEQ ID NO: 190555 - DNA, 3756 bp, Artificial Sequence
  derived and/or modified sequence
atgagacgcggaggatggagaaaaagagcagaaaacgatggatgggagacctggggcgggtatatggcagccaaagtccagaaattagaggaacaatttcgatccgacgcagccatgcagaaagacggcacatcttcgacgatctttagtggtgtggccatttacgtcaatggatatacggatccctctgccgaggaattgcggaagcttatgatgctccatggggggcaatatcacgtatattattctagatctaaaaccacccacattattgcgacgaacttacctaatgccaaaatcaaggagcttaagggcgaaaaggtcatcagaccggaatggatagttgaatcgataaaagccggtaggctgctgtcatacatcccgtaccagctttacacaaaacaaagtagcgtacagaaggggttaagctttaatcccgtatgcaggcctgaggaccccttacctggaccatccaatattgcgaaacagctgaacaacagggtgaaccacattgtgaagaaaattgaaactgagaacgaagtgaaggttaacggcatgaattcttggaatgaggaagatgagaataatgactttagttttgttgatctggaacagacgtcccctggaaggaagcaaaacggcattcctcacccacggggatctactgccatttttaatggccacacgccctcctccaacggtgccctgaagacccaggattgtctggttcccatggtgaacagtgtcgctagccgcctcagccccgccttttctcaggaagaggacaaagctgagaagagttctactgattttcgcgactgcactctgcagcagctgcagcagtcaacaagaaacactgatgcattgcgtaatcctcacaggacaaatagtttttctctgagtccactgcacagcaatacaaaaattaatggagctcaccattccacggtgcagggtccctccagtacgaagtctacttcatctgtttcaactttcagcaaagcggcaccatccgtacctagtaaaccatcagactgtaatttcatctcaaatttttacagtcactcaaggctccaccacataagcatgtggaaatgtgagctcacggagttcgtgaacacactgcagcggcagagcaatgggatcttccccgggagggagaagctgaagaagatgaaaaccgggagaagcgccctggtggtcaccgacaccggcgatatgagtgtgctgaatagtccacgccaccagtcatgtatcatgcatgttgatatggactgcttcttcgtgagcgtggggatccgtaatcgaccggacctcaaggggaaaccggtggctgtaacctcaaataggggtacagggagggccccgctccgacccggtgctaatccgcagctggagtggcagtactaccagaacaaaattctgaaaggtaaggccgccgacatccctgattcctccctctgggagaatcctgattccgcccaggctaatggtatagacagcgtcttgagccgcgccgagatagcctcttgttcatatgaagctcgccagctgggaatcaaaaatggcatgttctttgggcatgccaagcagctatgccctaacctgcaggccgtcccctacgattttcacgcctacaaggaagtggcgcagacactttatgagactttagcatcttatacccataacatcgaggcagtcagctgcgacgaggccctggttgacattactgagatacttgcagaaaccaaactcaccccagacgagttcgctaacgccgtcaggatggaaataaaagaccagaccaagtgcgccgctagcgtggggatcggatccaacattctgctggcccgtatggcaacccgtaaagctaagcccgatggccagtaccacttgaagccggaggaagtggacgattttatcagggggcagctggttactaaccttcccggagtcgggcatagcatggagagcaagctggccagtctcggcataaagacttgtggagatcttcagtacatgacaatggctaagctgcagaaggagtttggtccgaaaaccggccagatgctataccgattctgccgtggccttgacgatagaccagtccgcacggagaaagaacggaagtcggtctcggctgagattaactacggcattaggttcacccagccaaaagaggcagaagccttcctgctgtccctcagtgaagagatccagaggaggctggaggcaacgggcatgaagggcaagcggctaacacttaagattatggtccgaaagcctggggccccagtcgaaacggccaagttcggggggcatgggatctgcgacaacatcgcccggacggtgaccctggaccaggctaccgataacgctaaaatcattggcaaagcaatgctgaatatgttccatacgatgaaattgaatatcagtgatatgcggggagtcggtattcacgtgaaccagctggtgcccaccaatctgaacccctctacatgcccttctcgcccttccgtccaatcctctcactttccaagcggatcttactccgtgagggacgtgttccaagttcagaaggctaagaaatcgactgaggaggaacataaggaggtctttcgtgcagctgtggacctggaaatcagttcagctagcaggacatgcacctttctgcctcctttccctgcacacttgcccaccagtccggacaccaacaaagccgagtcttctggcaagtggaacgggttgcacacgccagtgtccgttcaaagtaggttgaacctgagtattgaagtacccagtccctcccagttggaccaaagcgtacttgaggccctcccccccgatttgagggaacaggtggaacaggtttgcgccgtgcaacaggcagagtcccacggcgataagaaaaaggagcccgttaacggatgcaataccggaatcttgccccaacccgtgggtacagtcctgttacagatccccgagccccaagaaagcaactcggacgcagggatcaatctgattgccctgccagccttttcccaggtggatcccgaggtattcgccgctttgccagcagaactgcagcgcgagttaaaagccgcatatgaccagcgccagaggcagggagaaaattccactcaccagcagagcgcctcggcaagcgtgcccaaaaatcctctgctccatttgaaggctgctgttaaagaaaagaaaagaaacaagaaaaagaagaccattgggtcccccaagcgaatccagtccccgcttaacaacaaactgctaaactcccctgccaagacccttccgggggcatgcggctctccccagaaattgatagacggctttcttaaacatgaggggccacccgctgagaagccactagaagagctctccgcgagcacatccggggtgcctggcctgagtagcttgcaaagcgaccccgccgggtgcgttaggccaccagctcctaacctggctggggccgtggagttcaacgatgttaaaacactcctccgggagtggataaccactatttccgatcccatggaggaggatatcttgcaggtagtgaagtactgtacagacctgatagaagaaaaggacctcgaaaagctcgatctcgtgattaaatatatgaaacggctcatgcagcaatccgtggagtccgtttggaacatggctttcgattttatactcgacaacgtgcaggtagtattgcaacagacgtacggtagtactcttaaggttacatag

SEQ ID NO: 190556 - DNA, 3756 bp, Artificial Sequence
  derived and/or modified sequence
atgaggcggggcggctggaggaagagagcagaaaatgatggctgggagacctggggcggctacatggccgccaaggtgcagaagctggaggagcagttcagaagtgatgctgccatgcagaaggatggcaccagcagcaccatcttcagcggcgtggccatctacgtgaatggctacacagaccccagcgctgaggagctgaggaagctgatgatgctgcacggcggccagtaccacgtgtactacagccgcagcaagaccacccacatcatcgccaccaacctgcccaatgccaagatcaaggagctgaagggggagaaggtgatccggcctgagtggatcgtggagagcatcaaggccggccgcctgctgagctacatcccctaccagctgtacaccaagcagagctctgtgcagaagggcctgtccttcaaccctgtgtgcaggcctgaggaccccctgcccggccccagcaacatcgccaagcagctgaacaacagagtgaaccacatcgtgaagaagattgaaacagaaaatgaggtgaaggtgaatggcatgaacagctggaatgaggaggatgagaacaatgacttctcctttgtggacctggagcagaccagccctggcaggaagcagaatggcatcccccacccccggggcagcacagccatcttcaacggccacacccccagcagcaatggagccctgaagacccaggactgcctggtgcccatggtgaacagcgtggccagccggctgagccctgccttcagccaggaggaggacaaggccgagaagagcagcacagacttccgggactgcaccctgcagcagctgcagcagagcaccaggaacacagatgccctgaggaacccccacaggaccaacagcttcagcctgagccccctgcacagcaacaccaagatcaacggggcccaccacagcacagtgcagggccccagcagcaccaagagcaccagctctgtgtccaccttcagcaaggccgcccccagcgtgcccagcaagcccagcgactgcaacttcatcagcaacttctacagccacagccggctgcaccacatctccatgtggaagtgtgagctgacagaatttgtgaacaccctgcagaggcagagcaatggcatcttccctggccgggagaagctgaagaagatgaagacaggccgcagcgccctggtggtgacagacaccggggacatgtctgtgctgaacagccccaggcaccagagctgcatcatgcacgtggacatggactgcttctttgtgtctgtgggcatccggaacagaccagacctgaagggcaagcctgtggccgtgaccagcaacagaggcaccggccgggcccccctgcggcctggggccaacccccagctggagtggcagtactaccagaacaagatcctgaagggcaaggctgctgacatcccagacagcagcctgtgggagaacccagattctgcccaggccaatggaattgattctgtgctgagcagagctgagatcgccagctgcagctatgaggcccggcagctgggcatcaagaatggcatgttcttcggccacgccaagcagctgtgccccaacctgcaggccgtgccctatgacttccacgcctacaaggaggtggcccagaccctgtatgagaccctggccagctacacccacaacatcgaggccgtgtcctgtgatgaggccctggtggacatcacagagatcctggccgagaccaagctgaccccagatgaatttgccaatgctgtgaggatggagatcaaggaccagaccaagtgtgccgcctctgtgggcatcggcagcaacatcctgctggccaggatggccaccaggaaggccaagccagatggccagtaccacctgaagccagaggaggtggatgacttcatccggggccagctggtgaccaacctgcccggggtgggccacagcatggagagcaagctggccagcctgggcatcaagacctgtggggacctgcagtacatgaccatggccaagctgcagaaggagtttggccccaagacaggccagatgctgtaccgcttctgccggggcctggatgacaggcctgtgaggacagagaaggagaggaagtctgtgtctgctgagatcaactacggcatccgcttcacccagcccaaggaggccgaggccttcctgctgagcctgtctgaggagatccagaggcggctggaggccaccggcatgaagggcaagaggctgaccctgaagatcatggtgaggaagccaggggcccctgtggagacagccaagtttggaggccacggcatctgtgacaacatcgccaggacagtgaccctggaccaggccacagacaatgccaagatcatcggcaaggccatgctgaacatgttccacaccatgaagctgaacatcagtgacatgaggggcgtgggcatccacgtgaaccagctggtgcccaccaacctgaaccccagcacctgccccagccggcccagcgtgcagagcagccacttccccagcggcagctacagcgtgagagatgtgttccaggtgcagaaggccaagaagagcacagaggaggagcacaaggaggtgttccgggctgctgtggacctggagatcagcagcgccagcaggacctgcaccttcctgccccccttccctgcccacctgcccaccagcccagacaccaacaaggccgagagcagcggcaagtggaatggcctgcacacccctgtgtctgtgcagagccggctgaacctgagcattgaggtgcccagccccagccagctggaccagagcgtgctggaggccctgcccccagacctgcgggagcaggtggagcaggtgtgtgctgtgcagcaggccgagagccacggggacaagaagaaggagcctgtgaatggctgcaacacaggcatcctgccccagcctgtgggcaccgtgctgctgcagatccctgagccccaggagagcaacagtgatgctggcatcaacctgattgccctgcctgccttcagccaggtggaccctgaggtgtttgctgccctgcctgctgagctgcagcgggagctgaaggccgcctatgaccagaggcagaggcagggcgagaacagcacccaccagcagagcgccagcgcctctgtgcccaagaaccccctgctgcacctgaaggctgctgtgaaggagaagaagaggaacaagaagaagaagaccatcggcagccccaagaggatccagagccccctgaacaacaagctgctgaacagccctgccaagaccctgcccggggcctgtggcagcccccagaagctgattgatggcttcctgaagcatgagggccccccagctgagaagcccctggaggagctgagcgccagcaccagcggcgtgcccggcctgagcagcctgcagagcgaccctgctggctgtgtgcggcccccagcccccaacctggccggggctgtggagttcaatgatgtgaagaccctgctgcgggagtggatcaccaccatcagtgaccccatggaggaggacatcctgcaggtggtgaagtactgcacagacctgattgaggagaaggacctggagaagctggacctggtgatcaagtacatgaagaggctgatgcagcagagcgtggagagcgtgtggaacatggcctttgacttcatcctggacaacgtgcaggtggtgctgcagcagacctacggcagcaccctgaaggtgacctag

SEQ ID NO: 190557 - DNA, 3756 bp, Artificial Sequence
  derived and/or modified sequence
atgcggcggggcggctggcggaagcgggccgagaacgacggctgggaaacgtggggcggttatatggccgctaaagtgcagaaactggaagaacaattcaggagtgacgcggccatgcaaaaagacggcacaagcagtactatatttagcggagtagctatatacgttaacggatataccgaccctagtgcggaggaactgagaaagctgatgatgctccacggagggcaataccacgtgtactattctagatctaagaccacacacattatcgccactaatctgccaaacgcgaagatcaaagaactgaagggggaaaaagttattcggcccgagtggatcgtcgagagcattaaagccggcagactgttgtcctacatcccttaccagctgtatactaaacagtctagcgtccagaaggggctttccttcaacccagtgtgcaggccagaagatccactgccgggcccaagtaacatcgctaagcagctgaacaacagggtgaatcacattgtgaagaagatcgaaaccgagaatgaggtcaaggtaaacggaatgaatagctggaacgaggaggatgagaataacgacttttcctttgtagacctggaacagacctcacccggacgaaagcagaatggcatcccgcatcccaggggctctaccgccatattcaatggccacaccccctcaagtaacggggccctgaagacacaggactgccttgtgccgatggtgaactcagtcgcatctagattgtctccagctttcagtcaggaagaagataaagcagagaaaagctcaaccgatttcagggattgcacgttgcaacagctccagcaaagtacccgtaatacggatgcactccggaatcctcaccgcacgaatagcttctcactgagtcctctgcattctaataccaagatcaatggtgcccatcattccacagttcagggcccgtccagcaccaaatcaacatcctctgtgtcaaccttcagtaaggctgctcctagcgtcccctccaagccttctgactgtaattttatctcaaatttctattcacactcaaggctccaccacattagcatgtggaagtgcgagctgaccgaatttgtaaatacattacagaggcagagcaatgggattttccccggtcgtgagaaactcaaaaaaatgaaaactggaaggtctgctctggtcgtgaccgatactggagatatgagtgtgttgaacagcccaagacatcagtcatgcattatgcatgtggacatggattgctttttcgttagcgtgggcatccgcaacaggcccgacctcaaagggaaaccggttgctgtcaccagcaacagaggaacgggccgtgcacccctgcgccccggtgccaatcctcagcttgagtggcaatattaccagaacaaaatcctaaagggcaaggcagctgacatcccagacagttccctctgggaaaaccctgacagtgcccaagcaaatggtatagactccgtgctgtcacgagccgagattgcctcctgcagctatgaggcccgacagcttggcattaaaaacggtatgttctttggtcacgccaagcagctgtgccccaacctgcaagctgtgccttacgatttccacgcctacaaagaagtggctcagaccctctacgagaccctggcctcttacactcataatatcgaggctgtctcatgtgatgaagcgctggtagatatcacagaaatcctggcagagaccaagctgacccctgatgagttcgcgaacgctgtacgtatggagattaaagatcagaccaagtgcgccgcctccgtcggcatcgggtccaatattctccttgctagaatggccacccgcaaggctaaacctgatggacagtaccatctcaaaccagaggaggtggacgacttcatccgaggtcaactcgtcacaaacctgccgggagtgggccacagcatggagagcaaacttgcttcccttggcataaagacgtgtggcgatctccaatacatgacgatggctaagctgcaaaaggaattcggtccgaagaccggccaaatgctctatcgtttttgcagaggtctggacgataggccagtccgcaccgagaaggagcgaaaaagtgtgtctgccgaaattaattatggcattcggttcacccagcccaaagaggcagaggcctttctcctgagcttaagcgaggagattcagcggagactggaagctaccggaatgaaggggaagcgccttacactgaaaattatggtgcgaaagcctggtgcccccgtggagacggctaagtttggcgggcacgggatctgtgataatatcgcccggaccgtgacgttggatcaggccacagataacgctaaaattatcggcaaggccatgctaaatatgtttcatacgatgaagctgaatatttcagacatgcgaggagtgggcatccacgtaaatcaactcgtgccaactaaccttaatccgtctacttgtccctctcgaccctccgttcaatcaagccacttcccgagtggatcttattccgtccgggacgtctttcaggtgcagaaggccaaaaaatccacggaggaggagcacaaggaggttttccgggccgcggtcgatcttgaaatctcttccgcaagccgcacatgtacatttctccccccgttccccgctcatctgcccacttcacccgacacaaataaggcagagagctccggcaagtggaacggcctccatactccggtctccgtgcagtctcggctcaatctttctattgaagtacccagccccagccagttagaccagagcgtgctagaagcactgcctcctgacctgcgagagcaggtggagcaggtgtgcgctgtgcagcaggccgagagtcatggcgacaaaaagaaagaacccgtcaacggatgcaatacgggaattctacctcagcctgttggaaccgtactccttcaaattcccgagccacaggaaagcaactcagatgccggcattaacctgatcgctctgcccgctttcagccaggttgatccagaggttttcgctgcacttccagccgaactacagagagagctgaaggctgcttacgaccagaggcaaagacagggagagaactcgacccaccagcagagcgccagcgccagtgtccccaagaatccccttcttcacctgaaggcagctgtcaaggaaaaaaagcgcaacaaaaaaaagaagaccatcggcagtccaaaacgtatccaatctccactcaataataagcttctgaactcccctgccaagaccctccccggcgcttgtgggtccccacagaaactgatcgacggctttcttaagcatgaggggccccccgccgaaaaacccttggaagagctgagcgctagtaccagcggtgtacctggcctttccagcctccaatctgatccagcaggttgtgtgcggccgcccgcacctaacttggccggagccgtggagttcaacgatgtgaagaccttgttgcgcgaatggataaccacaatctcagaccccatggaagaagacattctgcaggtggtcaagtattgtaccgatttaattgaagagaaggacctggaaaagctagaccttgtcatcaaatacatgaagcgcctcatgcagcagtcagtggaatctgtgtggaacatggccttcgattttattctggacaatgttcaagttgtgctccaacagacttatggttccactctcaaagttacctag

SEQ ID NO: 190558 - DNA, 3756 bp, Artificial Sequence
  derived and/or modified sequence
atgagacggggtggatggcgcaaacgcgcagagaacgatggctgggagacatggggaggatatatggccgctaaggtgcagaagcttgaggaacagtttcgttctgacgctgctatgcagaaggacggcactagtagcactatcttttcaggtgttgctatatacgtgaatggatacaccgacccctccgctgaagagctccggaagctcatgatgctgcacggaggtcagtaccatgtatactactcccggtcgaaaaccacccacatcatagcaacaaacttgcctaacgccaagatcaaggaactgaaaggcgagaaggttatccgtcccgaatggattgtggagtccattaaggcaggcaggctcctatcatatatcccctatcaactgtacacaaaacagagtagcgtccagaaggggcttagtttcaatcccgtgtgccgtccagaagacccgctgccagggccttctaatattgctaaacaattgaataaccgggtcaatcatattgttaaaaagatagagaccgaaaacgaggtaaaagtgaacggtatgaattcctggaatgaggaagatgaaaataacgatttctcatttgtggatttagaacagactagtcccggacggaagcagaacggtatcccccaccccagaggcagtacagcgatttttaatggacacaccccatctagcaacggagcactgaaaacgcaggactgcctggtgccgatggtgaactccgtagcatctcgcctgagccccgcatttagccaagaagaagataaggcggagaagtcttccaccgatttccgcgactgtacacttcaacaactccaacaatccacgcgcaataccgacgcgctccgaaatcctcatcgcaccaacagttttagcctgtcccccttgcactcaaatacgaagatcaatggagcccaccacagcaccgtgcaggggccaagtagcaccaagtcgacaagctccgtatctaccttttctaaggctgcaccgagtgtaccaagtaaaccaagcgactgcaactttatctctaacttttacagtcactctcggctgcaccacatctccatgtggaaatgcgagctgaccgaatttgtgaatactcttcagaggcagtcaaacggtatcttcccaggcagggaaaagctgaaaaagatgaagaccggcaggtctgccctggttgtgacggatactggagatatgtccgttctcaattccccccgacaccagagctgcataatgcatgtggatatggattgctttttcgtttctgtgggcatccggaacagacccgatctgaagggtaaacctgttgccgtgacttcaaacagaggcacagggagagctcccctcagaccaggggctaatccccagcttgagtggcagtactatcagaacaaaatactcaaaggaaaagcagctgacatccctgactcgtctctatgggagaatcctgactctgcccaagcaaacggaattgactcagttctgtctagggctgaaatcgcatcctgcagctacgaggccaggcagctggggatcaagaatggaatgttctttggccacgcgaagcagctgtgtccgaatctgcaggcggtgccgtatgatttccatgcctataaagaagtcgcccaaaccctgtacgagaccttagcttcatatacccataacatcgaagccgtgagttgcgatgaagcactggttgacatcaccgaaattctggccgaaacaaaactgacccccgacgaattcgccaatgctgtgaggatggaaattaaagatcaaactaaatgcgccgctagtgtgggtattgggtctaatatactcctcgctaggatggcgactaggaaggccaaaccagacggccagtatcacctaaagccagaagaagtggacgattttatccggggacagcttgtgactaacctcccaggtgtaggacactcaatggagagcaagctggcttcactcggaatcaagacttgtggtgaccttcagtacatgaccatggctaaactgcagaaagaatttggacccaagaccggacagatgctgtacaggttctgccgaggactggacgatagaccagtgcggactgagaaggaaaggaagtcagtgtccgctgagattaactacggtatacggtttacacagccaaaggaggcagaagcctttcttctgagcctctctgaggagattcagcgcaggttagaagctactggcatgaagggaaagagactgacacttaagattatggtgcgtaagcccggagctccagtggaaacagctaagttcggaggtcacggtatatgtgacaacattgccaggactgtgactctggaccaagctacagataatgctaagataatcggcaaagccatgctcaacatgttccatacaatgaagctgaacatctcagacatgcggggagtgggcatccatgtcaatcagctggttccaaccaatttgaacccctcgacatgccctagcaggccttctgttcagtcgtcacacttcccctctgggtcctattccgtgagagacgtgtttcaggtgcagaaggccaaaaaatccactgaggaggagcataaggaagtgttccgggcagctgtggatcttgaaataagctccgcttcaaggacttgcacttttttgccgccttttcccgctcatctgcccacctcgcctgacactaacaaggccgagtcgtcaggcaaatggaatggcctgcacacccccgtttcagttcagtcccggctgaacctgagtattgaggtcccctcgccctcacaactggaccagtccgtgttggaagccctgcctcccgacctgagagagcaggtagaacaggtgtgcgcggtgcaacaggcggaaagtcacggagacaagaaaaaagaaccagtcaacggctgcaacacaggcatcttgcctcaacctgttggcactgtgctactgcaaattcctgagccacaggaatcaaactccgacgccggaatcaacttgattgccctgcccgctttttcccaggtcgacccggaggttttcgcggctctgccggctgaacttcaacgcgaactcaaggcagcttacgaccaacggcagcgtcaaggtgagaattccacccatcagcagagcgcgtccgcatcagtcccaaaaaaccccctgcttcatctgaaagcagccgtgaaggagaagaaacgaaacaaaaaaaagaagacaatagggtcaccgaagaggattcagtctcccctgaataacaagctgcttaattccccggcaaagaccctgccaggggcttgcggcagccctcaaaaattaatcgacggctttctcaagcatgaagggccacctgccgagaaaccccttgaggaactgagcgcgtccacctcgggagtgcctgggctctcctccctacagtccgatccagccggatgcgtaaggcctcctgccccaaacctggccggtgccgtggagtttaatgacgttaaaactttgctacgcgagtggataacaaccatctcagaccccatggaagaggacatcctgcaggtagtaaagtattgtaccgatttgatagaggaaaaagatttagagaagctggatctggtgatcaaatatatgaaaagattgatgcagcaaagcgttgagagtgtttggaatatggcattcgattttattcttgacaatgtgcaggttgtactacaacagacatacggttctacgttgaaggtcacttag

SEQ ID NO: 190559 - DNA, 4751 bp, Artificial Sequence
  derived and/or modified sequence
cggagggggaggggcggagagccaccgcggagcgcgcgcggggttggttgccgcgagcgtgggggagcgtggaccgcggcgctgctcagcggtggggctgccttcccccggccctcctccctggtccctggcgagggcactggcggcggcggggccggggtccgcaaggccggagaaggccgccgggcccgggcatggtggtctggggcaacgcggaagaagctccaccatgaggcgaggtggatggaggaagcgagctgaaaatgatggctgggaaacatggggtgggtatatggctgccaaggtccagaaattggaggaacagtttcgatcagatgctgctatgcagaaggatgggacttcatctacaatttttagtggagttgccatctatgttaatggatacacagatccttccgctgaggaattgagaaaactaatgatgttgcatggaggtcaataccatgtatattattccagatctaaaacaacacatattattgccacaaatcttcccaatgccaaaattaaagaattaaagggggaaaaagtaattcgaccagaatggattgtggaaagcatcaaagctggacgactcctctcctacattccatatcagctgtacaccaagcagtccagtgtgcagaaaggtctcagctttaatcctgtatgcagacctgaggatcctctgccaggtccaagcaatatagccaaacagctcaacaacagggtaaatcacatcgttaagaagattgaaacggaaaatgaagtcaaagtcaatggcatgaacagttggaatgaagaagatgaaaataatgattttagttttgtggatctggagcagacctctccgggaaggaaacagaatggaattccgcatcccagagggagcactgccatttttaatggacacactcctagctctaatggtgccttaaagacacaggattgcttggtgcccatggtcaacagtgttgccagcaggctttctccagccttttcccaggaggaggataaggctgagaagagcagcactgatttcagagactgcactctgcagcagttgcagcaaagcaccagaaacacagatgctttgcggaatccacacagaactaattctttctcattatcacctttgcacagtaacactaaaatcaatggtgctcaccactccactgttcaggggccttcaagcacaaaaagcacttcttcagtatctacgtttagcaaggcagcaccttcagtgccatccaaaccttcagactgcaattttatttcaaacttctattctcattcaagactgcatcacatatcaatgtggaagtgtgaattgactgagtttgtcaataccctacaaagacaaagtaatggtatctttccaggaagggaaaagttaaaaaaaatgaaaacaggcaggtctgcacttgttgtaactgacacaggagatatgtcagtattgaattctcccagacatcagagctgtataatgcatgttgatatggattgcttctttgtatcagtgggtatacgaaatagaccagatctcaaaggaaaaccagtggctgttacaagtaacagaggcacaggaagggcacctttacgtcctggcgctaacccccagctggagtggcagtattaccagaataaaatcctgaaaggcaaagcagcagatataccagattcatcattgtgggagaatccagattctgcgcaagcaaatggaattgattctgttttgtcaagggctgaaattgcatcttgtagttatgaggccaggcaacttggcattaagaacggaatgttttttgggcatgctaaacaactatgtcctaatcttcaagctgttccatacgattttcatgcatataaggaagtcgcacaaacattgtatgaaacattggcaagctacactcataacattgaagctgtcagttgtgatgaagcgctggtagacattaccgaaatccttgcagagaccaaacttactcctgatgaatttgcaaatgctgttcgtatggaaatcaaagaccagacgaaatgtgctgcctctgttggaattggttctaatattctcctggctagaatggcaactagaaaagcaaaaccagatgggcagtaccacctaaaaccagaagaagtagatgattttatcagaggccagctagtgaccaatctaccaggagttggacattcaatggaatctaagttggcatctttgggaattaaaacttgtggagacttgcagtatatgaccatggcaaaactccaaaaagaatttggtcccaaaacaggtcagatgctttataggttctgccgtggcttggatgatagaccagttcgaactgaaaaggaaagaaaatctgtttcagctgagatcaactatggaataaggtttactcagccaaaagaggcagaagcttttcttctgagtctttcagaagaaattcaaagaagactagaagccactggcatgaagggtaaacgtctaactctcaaaatcatggtacgaaagcctggggctcctgtagaaactgcaaaatttggaggccatggaatttgtgataacattgccaggactgtaactcttgaccaggcaacagataatgcaaaaataattggaaaggcgatgctaaacatgtttcatacaatgaaactaaatatatcagatatgagaggggttgggattcacgtgaatcagttggttccaactaatctgaacccttccacatgtcccagtcgcccatcagttcagtcaagccactttcctagtgggtcatactctgtccgtgatgtcttccaagttcagaaagctaagaaatccaccgaagaggagcacaaagaagtatttcgggctgctgtggatctggaaatatcatctgcttctagaacttgcactttcttgccaccttttcctgcacatctgccgaccagtcctgatactaacaaggctgagtcttcagggaaatggaatggtctacatactcctgtcagtgtgcagtcgagacttaacctgagtatagaggtcccgtcaccttcccagctggatcagtctgttttagaagcacttccacctgatctccgggaacaagtagagcaagtctgtgctgtccagcaagcagagtcacatggcgacaaaaagaaagaaccagtaaatggctgtaatacaggaattttgccacaaccagttgggacagtcttgttgcaaataccagaacctcaagaatcgaacagtgacgcaggaataaatttaatagcccttccagcattttcacaggtggaccctgaggtatttgctgcccttcctgctgaacttcagagggagctgaaagcagcgtatgatcaaagacaaaggcagggcgagaacagcactcaccagcagtcagccagcgcatctgtgccaaagaatcctttacttcatctaaaggcagcagtgaaagaaaagaaaagaaacaagaagaaaaaaaccattggttcaccaaaaaggattcagagtcctttgaataacaagctgcttaacagtcctgcaaaaactctgccaggggcctgtggcagtccccagaagttaattgatgggtttctaaaacatgaaggacctcctgcagagaaacccctggaagaactctctgcttctacttcaggtgtgccaggcctttctagtttgcagtctgacccagctggctgtgtgagacctccagcacccaatctagctggagctgttgaattcaatgatgtgaagaccttgctcagagaatggataactacaatttcagatccaatggaagaagacattctccaagttgtgaaatactgtactgatctaatagaagaaaaagatttggaaaaactggatctagttataaaatacatgaaaaggctgatgcagcaatcggtggaatcggtttggaatatggcatttgactttattcttgacaatgtccaggtggttttacaacaaacttatggaagcacattaaaagttacataaatattaccagagagcctgatgctctctgatagctgtgccataagtgcttgtgaggtatttgcaaagtgcatgatagtaatgctcggagtttttataattttaaatttcttttaaagcaagtgttttgtacatttcttttcaaaaagtgccaaatttgtcagtattgcatgtaaataattgtgttaattattttactgtagcatagattctatttacaaaatgtttgtttataaagttttatggatttttacagtgaagtgtttacagttgtttaataaagaactgtatgtatattttgtacaggctcctttttgtgaatccttaaaaactcaactctaggaagcaactactgtttattatactaaaaggctgaaaaacctccaggccagactgctaagctctgaaattcctgagaggtctcagaccgggattctacttgttccaagaaagggtaaagcttctaaaccatcttattcttgtctccaagcatgaacacaggagcatgttaagaaaatctttactacttcttccatgcggagaaatctacatattttgaattagaaacaccctcacacccacttgaagatttttttcctgggaacattatgtcccgtagatcagaggtggtgttgtctttttgcttctactggccattgagaaactttgatgataaaaaagaacggtatagatttttcaaacgtatataaaatatttttatgttatatgttatgccataactttaaaataaaaatagtttaaaattcta

SEQ ID NO: 190560 - protein, 447 aa, Artificial Sequence
  derived and/or modified sequence
MAAAQPKYPAGATARRLARGCWSALWDYETPKVIVVRNRRLGVLYRAVQLLILLYFVWYVFIVQKSYQESETGPESSIITKVKGITTSEHKVWDVEEYVKPPESIRVHNATCLSDADCVAGELDMLGNGLRTGRCVPYYQGPSKTCEVFGWCPVEDGASVSQFLGTMAPNFTILIKNSIHYPKFHFSKGNIADRTDGYLKRCTFHEASDLYCPIFKLGFIVEKAGESFTELAHKGGVIGVIINWDCDLDLPASECNPKYSFRRLDPKHVPASSGYNFRFAKYYKINGTTTRTLIKAYGIRIDVIVHGQAGKFSLIPTIINLATALTSVGVGSFLCDWILLTFMNKNKVYSHKKFDKVCTPSHPSGSWPVTLARVLGQAPPEPGHRSEDQHPSPPSGQEGQQGAECGPAFPPLRPCPISAPSEQMVDTPASEPAQASTPTDPKGLAQL

SEQ ID NO: 190561 - DNA, 1344 bp, Artificial Sequence
  derived and/or modified sequence
atggccgccgcccagcccaagtaccccgccggcgccaccgccagaagactggccagaggctgctggagcgccctgtgggactacgagacccccaaggtgatcgtggtgagaaacagaagactgggcgtgctgtacagagccgtgcagctgctgatcctgctgtacttcgtgtggtacgtgttcatcgtgcagaagagctaccaggagagcgagaccggccccgagagcagcatcatcaccaaggtgaagggcatcaccaccagcgagcacaaggtgtgggacgtggaggagtacgtgaagccccccgagagcatcagagtgcacaacgccacctgcctgagcgacgccgactgcgtggccggcgagctggacatgctgggcaacggcctgagaaccggcagatgcgtgccctactaccagggccccagcaagacctgcgaggtgttcggctggtgccccgtggaggacggcgccagcgtgagccagttcctgggcaccatggcccccaacttcaccatcctgatcaagaacagcatccactaccccaagttccacttcagcaagggcaacatcgccgacagaaccgacggctacctgaagagatgcaccttccacgaggccagcgacctgtactgccccatcttcaagctgggcttcatcgtggagaaggccggcgagagcttcaccgagctggcccacaagggcggcgtgatcggcgtgatcatcaactgggactgcgacctggacctgcccgccagcgagtgcaaccccaagtacagcttcagaagactggaccccaagcacgtgcccgccagcagcggctacaacttcagattcgccaagtactacaagatcaacggcaccaccaccagaaccctgatcaaggcctacggcatcagaatcgacgtgatcgtgcacggccaggccggcaagttcagcctgatccccaccatcatcaacctggccaccgccctgaccagcgtgggcgtgggcagcttcctgtgcgactggatcctgctgaccttcatgaacaagaacaaggtgtacagccacaagaagttcgacaaggtgtgcacccccagccaccccagcggcagctggcccgtgaccctggccagagtgctgggccaggccccccccgagcccggccacagaagcgaggaccagcaccccagcccccccagcggccaggagggccagcagggcgccgagtgcggccccgccttcccccccctgagaccctgccccatcagcgcccccagcgagcagatggtggacacccccgccagcgagcccgcccaggccagcacccccaccgaccccaagggcctggcccagctgtag

SEQ ID NO: 190562 - DNA, 1344 bp, Artificial Sequence
  derived and/or modified sequence
atggctgctgctcagccaaaataccctgctggtgcaacagcccgtagactggcccgcggatgctggagtgccctttgggattacgaaactcccaaggttattgtggttcgcaatagaaggcttggagtgctttaccgggccgtgcagctgttaatactcctgtactttgtttggtacgtgttcattgtccagaagtcttatcaggagtcagagactggacccgagagctctataatcacaaaagttaagggaattaccactagcgagcataaggtatgggacgttgaagagtatgtcaagcccccagaaagcatccgtgtgcacaatgcaacatgtctaagtgatgctgactgtgttgctggcgagctcgacatgctggggaatggtctgagaacagggaggtgcgtaccatactaccaaggtccgagtaagacgtgtgaagtgttcggctggtgtcctgttgaagacggcgctagcgtgagccaatttctcggaactatggctcccaattttactattctgattaagaacagcatccactatccgaaattccatttcagcaaagggaatattgccgatcgaaccgacggttatttgaagaggtgtacctttcacgaagcctctgacctatattgtccgatttttaagcttggctttattgttgaaaaggccggcgagtccttcactgagttggctcacaaaggtggtgtcatcggcgtaatcatcaactgggactgcgacttagatctgcccgcctcggaatgcaacccaaagtattcgttccgacgacttgatcctaaacatgttcctgcttcttctggttacaacttccgctttgccaaatactacaagatcaacggcacgactacacggaccctaatcaaggcctatggcataaggattgacgtgatcgtgcacgggcaggctggtaagttcagtttaattccaaccatcatcaacctggcaacggctttgacttccgtcggcgtgggctccttcttgtgtgactggatcctcttgacctttatgaacaagaacaaggtctactctcataagaaatttgacaaggtgtgcacaccttctcacccatctgggtcatggcctgtaaccctggctagggtcctgggacaagccccacctgaaccaggtcacagatctgaggaccagcatccgtcccctccctctggccaagaaggccaacagggagcagaatgtgggcctgcttttcctccgttacgaccttgccccatctccgcgccaagcgagcaaatggtcgatactccggcaagtgagcccgcacaggcctcaaccccgaccgaccccaaaggtctcgcacagctgtag

SEQ ID NO: 190563 - DNA, 1344 bp, Artificial Sequence
  derived and/or modified sequence
atggctgctgcccagcccaagtacccagctggggccacagcccggcggctggcccggggctgctggagcgccctgtgggactatgagacccccaaggtgattgtggtgaggaacagaaggctgggcgtgctgtacagagctgtgcagctgctgatcctgctgtactttgtgtggtacgtgttcatcgtgcagaagagctaccaggagagcgagaccggccctgagagcagcatcatcaccaaggtgaagggcatcaccaccagcgagcacaaggtgtgggatgtggaggagtatgtgaagcccccagagagcatccgggtgcacaatgccacctgcctgagtgatgctgactgtgtggccggggagctggacatgctgggcaatggcctgaggacaggccgctgtgtgccctactaccagggccccagcaagacctgtgaggtgtttggctggtgccctgtggaggatggagcctctgtgtcccagttcctgggcaccatggcccccaacttcaccatcctgatcaagaacagcatccactaccccaagttccacttcagcaagggcaacattgctgacagaacagatggctacctgaagcgctgcaccttccacgaggccagtgacctgtactgccccatcttcaagctgggcttcatcgtggagaaggccggggagagcttcacagagctggcccacaagggcggcgtcatcggggtcatcatcaactgggactgtgacctggacctgcctgccagcgagtgcaaccccaagtacagcttccggcggctggaccccaagcacgtgcctgccagcagcggctacaacttccgctttgccaagtactacaagatcaatggcaccaccaccaggaccctcatcaaggcctacggcatcagaattgatgtgattgtgcacggccaggccggcaagttcagcctcatccccaccatcatcaacctggccacagccctgacctctgtgggcgtgggcagcttcctgtgtgactggatcctgctgaccttcatgaacaagaacaaggtgtacagccacaagaagtttgacaaggtgtgcacccccagccaccccagcggctcctggcctgtgaccctggcccgggtgctgggccaggcccctcctgagcccggccacagaagtgaggaccagcaccccagccccccatctggccaggagggccagcagggcgcagaatgtggccctgccttcccccccctgcggccctgccccatcagcgcccccagcgagcagatggtggacaccccagccagcgagcccgcccaggccagcacccccacagaccccaagggcctggcccagctgtag

SEQ ID NO: 190564 - DNA, 1344 bp, Artificial Sequence
  derived and/or modified sequence
atggccgccgcccagcccaagtaccccgccggcgccaccgcccggcggttggcccgtgggtgttggtctgctctgtgggattatgagacccctaaggtgatagtggtgcgtaaccggagactaggcgtgctctacagggccgtgcagcttttaatcctgctgtactttgtgtggtatgtgttcatagtccaaaagtcttaccaagaaagcgagaccgggcccgagtcctcaatcatcacaaaagtaaaggggattaccacttctgagcacaaggtttgggacgttgaggaatacgtcaagccaccggaatccattcgggtacacaacgccacttgtctcagtgacgctgactgcgtggccggtgaattggatatgctcggcaatgggttgagaacaggcaggtgcgttccctactaccaaggcccttccaaaacctgcgaggtgttcgggtggtgccccgtggaggatggcgcttccgtctctcagttcctgggaactatggccccaaatttcactattttgattaaaaatagcatacattaccctaagttccacttcagcaaagggaatatagcggatcggacagatggatacctaaagcggtgcacatttcatgaggcatcagacttatactgccccatctttaaactggggttcatagttgagaaagccggcgaatccttcaccgaattagcacacaaaggcggtgtcataggtgtgattattaattgggattgcgatttggatttgcctgcctcagagtgcaaccctaagtactctttccgtagattggatccaaaacacgtccctgcttcctccggctataactttcggtttgcaaagtactacaagatcaatggaacgacaacccggactctgatcaaagcttatggaatccggatcgatgtgattgtgcacggccaggcgggtaagttctctcttatcccaaccataattaacctggctacagcccttaccagtgtcggcgtcggtagttttctgtgtgactggatactcctgacttttatgaataaaaacaaggtgtactcacacaagaagtttgacaaggtctgtactccgtcgcatccgtcgggatcttggccggtgacactggcacgggtactgggccaggcccctccagagccagggcacagaagtgaggaccagcacccttctccccctagcgggcaggagggacagcaaggggctgagtgcgggcccgcttttccacctctgcgtccctgcccaatttcagcacctagtgagcagatggtggatacaccagcttccgagccagcacaggcctcaacccctaccgaccctaaaggcttggctcagttatag

SEQ ID NO: 190565 - DNA, 1344 bp, Artificial Sequence
  derived and/or modified sequence
atggccgccgcccagcccaagtaccccgccggggcgaccgcccggcgcctggcccggggctgctggtccgccctctgggactacgagacgcccaaggtgatcgtggtgaggaaccggcgcctgggggtcctgtaccgcgccgtgcagctgctcatcctgctctacttcgtgtggtacgtattcatcgtgcagaaaagctaccaggagagcgagacgggccccgagagctccatcatcaccaaggtcaaggggatcaccacgtccgagcacaaagtgtgggacgtggaggagtacgtgaagccccccgagagcataagggtccacaacgccacctgcctctccgacgccgactgcgtggctggggagctggacatgctgggaaacggcctgaggactgggcgctgtgtgccctattaccaggggccctccaagacctgcgaggtgttcggctggtgcccggtggaagatggggcctctgtcagccaatttctgggtacgatggccccaaatttcaccatcctcatcaagaacagcatccactaccccaaattccacttctccaagggcaacatcgccgaccgcacagacgggtacctgaagcgctgcacgttccacgaggcctccgacctctactgccccatcttcaagctgggctttatcgtggagaaggctggggagagcttcacagagctcgcacacaagggtggtgtcatcggggtcattatcaactgggactgtgacctggacctgcctgcatcggagtgcaaccccaagtactccttccggaggcttgaccccaagcacgtgcctgcctcgtcaggctacaacttcaggtttgccaaatactacaagatcaatggcaccaccacccgcacgctcatcaaggcctacgggatccgcattgacgtcattgtgcatggacaggccgggaagttcagcctgattcccaccattattaatctggccacagctctgacttccgtcggggtgggctccttcctgtgcgactggatcttgctaacattcatgaacaaaaacaaggtctacagccataagaaatttgacaaggtgtgtacgccgagccacccctcaggtagctggcctgtgacccttgcccgtgtattgggccaggcccctcccgaacccggccaccgctccgaggaccagcaccccagccctccatcaggccaggagggccaacaaggggcagagtgtggcccagccttcccgcccctgcggccttgccccatctctgccccttctgagcagatggtggacactcctgcctccgagcctgcccaagcctccacacccacagaccccaaaggtttggctcaactctga

SEQ ID NO: 190566 - DNA, 1344 bp, Artificial Sequence
  derived and/or modified sequence
atggcagccgcacagcccaagtacccggcaggggctactgcccgtcggttggcaaggggatgctggtcagccctttgggattatgaaactcctaaggtgatcgtcgtacggaacagaagactcggtgttctctatcgtgctgtgcaactcctaattctgctatattttgtttggtatgttttcatcgtacaaaagagttaccaggaatccgaaaccgggcctgaatcctctattatcaccaaggttaagggaatcaccacttcggagcataaggtgtgggacgtcgaggaatacgttaaacccccagagtccatccgcgttcacaatgccacgtgtctgtccgatgccgattgcgtggctggggagctggatatgctggggaatgggctgcgcacaggtcggtgcgttccctactatcagggtccatcaaagacttgtgaggtcttcggttggtgtccggtcgaggatggcgcaagtgtctcccaattcttagggactatggccccaaatttcacgatcctcatcaaaaatagcatccactaccctaagtttcatttcagcaagggaaatatagctgatcgaacggatggttatctcaagaggtgcacctttcacgaggcaagcgacctctattgtcccatcttcaaactcggctttattgtagagaaggcgggagagagttttactgagttggctcacaaaggcggagtgattggagtgataatcaactgggactgtgacttggaccttccggctagcgaatgcaatcccaagtactccttccgtcggcttgatccaaaacacgtccctgcttcttccggttataactttcgatttgcgaagtattacaaaatcaatggtacaaccacaagaacgctgatcaaagcctacggcatccgaatcgacgtaattgtgcatgggcaggccggaaaattttccctcattcctacgataattaatctcgccactgcgctgacctcagttggtgtgggatcattcctgtgcgattggatcttgttgacattcatgaacaaaaataaagtgtattcccataagaagttcgataaagtctgcacccccagtcatccttccggttcatggcctgtcactcttgcacgagtgctgggacaggcccctcccgaaccaggccaccgatccgaggatcagcacccctctccgccatctggtcaggagggtcagcaaggggcagaatgtgggccagctttcccaccactcagaccctgtcccatttctgcacctagtgaacagatggtagacacgccggcaagtgagcctgcccaagcgagcacgccaaccgatcctaaaggtctcgcccagttatag

SEQ ID NO: 190567 - protein, 1800 aa, Artificial Sequence
  derived and/or modified sequence
MFNKSFGTPFGGGTGGFGTTSTFGQNTGFGTTSGGAFGTSAFGSSNNTGGLFGNSQTKPGGLFGTSSFSQPATSTSTGFGFGTSTGTANTLFGTASTGTSLFSSQNNAFAQNKPTGFGNFGTSTSSGGLFGTTNTTSNPFGSTSGSLFGPSSFTAAPTGTTIKFNPPTGTDTMVKAGVSTNISTKHQCITAMKEYESKSLEELRLEDYQANRKGPQNQVGAGTTTGLFGSSPATSSATGLFSSSTTNSGFAYGQNKTAFGTSTTGFGTNPGGLFGQQNQQTTSLFSKPFGQATTTQNTGFSFGNTSTIGQPSTNTMGLFGVTQASQPGGLFGTATNTSTGTAFGTGTGLFGQTNTGFGAVGSTLFGNNKLTTFGSSTTSAPSFGTTSGGLFGFGTNTSGNSIFGSKPAPGTLGTGLGAGFGTALGAGQASLFGNNQPKIGGPLGTGAFGAPGFNTTTATLGFGAPQAPVALTDPNASAAQQAVLQQHINSLTYSPFGDSPLFRNPMSDPKKKEERLKPTNPAAQKALTTPTHYKLTPRPATRVRPKALQTTGTAKSHLFDGLDDDEPSLANGAFMPKKSIKKLVLKNLNNSNLFSPVNRDSENLASPSEYPENGERFSFLSKPVDENHQQDGDEDSLVSHFYTNPIAKPIPQTPESAGNKHSNSNSVDDTIVALNMRAALRNGLEGSSEETSFHDESLQDDREEIENNSYHMHPAGIILTKVGYYTIPSMDDLAKITNEKGECIVSDFTIGRKGYGSIYFEGDVNLTNLNLDDIVHIRRKEVVVYLDDNQKPPVGEGLNRKAEVTLDGVWPTDKTSRCLIKSPDRLADINYEGRLEAVSRKQGAQFKEYRPETGSWVFKVSHFSKYGLQDSDEEEEEHPSKTSTKKLKTAPLPPASQTTPLQMALNGKPAPPPQSQSPEVEQLGRVVELDSDMVDITQEPVLDTMLEESMPEDQEPVSASTHIASSLGINPHVLQIMKASLLTDEEDVDMALDQRFSRLPSKADTSQEICSPRLPISASHSSKTRSLVGGLLQSKFTSGAFLSPSVSVQECRTPRAASLMNIPSTSSWSVPPPLTSVFTMPSPAPEVPLKTVGTRRQLGLVPREKSVTYGKGKLLMDMALFMGRSFRVGWGPNWTLANSGEQLNGSHELENHQIADSMEFGFLPNPVAVKPLTESPFKVHLEKLSLRQRKPDEDMKLYQTPLELKLKHSTVHVDELCPLIVPNLGVAVIHDYADWVKEASGDLPEAQIVKHWSLTWTLCEALWGHLKELDSQLNEPREYIQILERRRAFSRWLSCTATPQIEEEVSLTQKNSPVEAVFSYLTGKRISEACSLAQQSGDHRLALLLSQFVGSQSVRELLTMQLVDWHQLQADSFIQDERLRIFALLAGKPVWQLSEKKQINVCSQLDWKRSLAIHLWYLLPPTASISRALSMYEEAFQNTSDSDRYACSPLPSYLEGSGCVIAEEQNSQTPLRDVCFHLLKLYSDRHYDLNQLLEPRSITADPLDYRLSWHLWEVLRALNYTHLSAQCEGVLQASYAGQLESEGLWEWAIFVLLHIDNSGIREKAVRELLTRHCQLLETPESWAKETFLTQKLRVPAKWIHEAKAVRAHMESDKHLEALCLFKAEHWNRCHKLIIRHLASDAIINENYDYLKGFLEDLAPPERSSLIQDWETSGLVYLDYIRVIEMLRHIQQVDCSGNDLEQLHIKVTSLCSRIEQIQCYSAKDRLAQSDMAKRVANLLRVVLSLHHPPDRTSDSTPDPQRVPLRLLAPHIGRLPMPEDYAMDELRSLTQSYLRELAVGSL

SEQ ID NO: 190568 - protein, 920 aa, Artificial Sequence
  derived and/or modified sequence
MFNKSFGTPFGGGTGGFGTTSTFGQNTGFGTTSGGAFGTSAFGSSNNTGGLFGNSQTKPGGLFGTSSFSQPATSTSTGFGFGTSTGTANTLFGTASTGTSLFSSQNNAFAQNKPTGFGNFGTSTSSGGLFGTTNTTSNPFGSTSGSLFGPSSFTAAPTGTTIKFNPPTGTDTMVKAGVSTNISTKHQCITAMKEYESKSLEELRLEDYQANRKGPQNQVGAGTTTGLFGSSPATSSATGLFSSSTTNSGFAYGQNKTAFGTSTTGFGTNPGGLFGQQNQQTTSLFSKPFGQATTTQNTGFSFGNTSTIGQPSTNTMGLFGVTQASQPGGLFGTATNTSTGTAFGTGTGLFGQTNTGFGAVGSTLFGNNKLTTFGSSTTSAPSFGTTSGGLFGFGTNTSGNSIFGSKPAPGTLGTGLGAGFGTALGAGQASLFGNNQPKIGGPLGTGAFGAPGFNTTTATLGFGAPQAPVALTDPNASAAQQAVLQQHINSLTYSPFGDSPLFRNPMSDPKKKEERLKPTNPAAQKALTTPTHYKLTPRPATRVRPKALQTTGTAKSHLFDGLDDDEPSLANGAFMPKKSIKKLVLKNLNNSNLFSPVNRDSENLASPSEYPENGERFSFLSKPVDENHQQDGDEDSLVSHFYTNPIAKPIPQTPESAGNKHSNSNSVDDTIVALNMRAALRNGLEGSSEETSFHDESLQDDREEIENNSYHMHPAGIILTKVGYYTIPSMDDLAKITNEKGECIVSDFTIGRKGYGSIYFEGDVNLTNLNLDDIVHIRRKEVVVYLDDNQKPPVGEGLNRKAEVTLDGVWPTDKTSRCLIKSPDRLADINYEGRLEAVSRKQGAQFKEYRPETGSWVFKVSHFSKYGLQDSDEEEEEHPSKTSTKKLKTAPLPPASQTTPLQMALNGKPAPPPQVEKKGQ

SEQ ID NO: 190569 - DNA, 5403 bp, Artificial Sequence
  derived and/or modified sequence
atgttcaacaagagtttcggcacaccttttggaggcgggaccggtgggttcggcacaacatctacattcggccagaacacgggatttggtacaacatctggcggagcgttcggaacttcggctttcggcagttccaacaacacaggaggtctgttcggaaactcacagaccaagcccggaggtctcttcggaaccagttcgttttctcagcccgctacaagtacgagcactgggtttggctttgggaccagtactgggacagctaatactttatttggcaccgcctctaccggaacttcacttttcagctctcagaataacgcattcgcacagaacaaaccaacgggcttcggaaatttcgggacttccacatcatcaggcggcctgtttggcactacaaatacaacctcgaatcctttcggcagcacatcgggttccctgttcgggccatcgtccttcaccgcagctccaacgggcacgaccattaagttcaatcctccaacaggaacggacaccatggtaaaggcaggagttagcaccaatattagtaccaaacaccagtgcataacagccatgaaagagtatgagagcaaatcgcttgaagaactgaggctggaagactatcaggccaatcgcaagggaccacagaaccaggtgggcgctggcacgaccacaggactttttgggagctcccctgccacatccagcgccaccggactcttctcatcgagcaccactaatagcggctttgcgtacgggcaaaacaagaccgcgttcggcacttcaacaacaggctttggcactaacccaggagggctattcgggcagcaaaatcaacagactacatcgctattctccaagccgtttgggcaggcaaccacgacccagaacaccgggttttccttcggcaacacttcaacgatcggacagccttctaccaacacaatgggattgttcggcgtcacccaagcttctcagccgggcgggctcttcgggactgccacaaacacatctaccggcacagccttcggcactggaactggtctgttcggacagaccaatacaggtttcggagcagttggcagtactcttttcggcaataataaacttaccaccttcggaagcagtacaacctcggcaccgagctttggtaccaccagcgggggactctttgggtttgggactaatacatcgggtaacagtatttttggcagcaagccagcacctggaactttgggaactggtctcggggctggctttggcacagcactgggtgccggacaagcctctctgttcggcaacaaccagcctaagatcgggggcccgctgggtactggagctttcggcgctcctgggtttaacacgactactgcaaccctgggcttcggcgcaccccaagcgccagtggccctgaccgaccctaacgcaagtgctgcacagcaggctgtactccagcagcatatcaactccctcacctattcaccctttggagacagcccactcttccggaatcctatgtcggacccaaagaagaaggaagagcgactgaagccaacaaatcctgctgctcaaaaagccctgaccacgccaactcattacaaactcacacctaggccagccacccgggtcaggccgaaggccctgcagaccactggaaccgcgaaaagtcatcttttcgatggcctggacgacgatgagccctcacttgctaacggcgcttttatgccaaagaagagcatcaagaagctggtgctcaaaaatctaaacaacagcaatctcttctcacccgtgaatcgggactctgagaatctagcgtccccgtctgagtaccccgagaacggagagaggtttagttttctgtcgaaacccgtggacgagaatcatcagcaggatggagacgaggacagcctggtatctcacttttacacaaaccccatcgccaagcctatcccacaaacaccggagtcagccggtaacaagcactccaactccaacagcgtggacgacactattgtcgcgttaaatatgcgtgctgctttgaggaacggactcgagggttccagtgaagaaacaagttttcatgatgagtcactgcaagatgatcgagaggaaatcgagaataattcttatcacatgcaccctgcgggaatcatcttgacaaaggtggggtattacaccatcccatcaatggacgacctcgcgaaaatcacaaatgaaaagggcgaatgtatcgtatctgacttcacgatcggccggaagggttacgggtcgatctactttgagggcgacgtgaacttaacgaacctcaatctcgatgacatcgtccacataagacgcaaggaggtggtggtgtaccttgacgacaaccagaaaccccctgtcggggaagggctcaatcgtaaggcagaggtcactttggatggggtgtggcccaccgataagacctccaggtgcctgattaagtcccccgatcgcctcgccgatatcaattatgaaggccggctagaggccgtaagccggaagcagggcgcacagtttaaggagtataggccagagactggaagctgggtgttcaaagtgtcccatttcagtaaatacgggttgcaggatagcgacgaggaagaagaagaacatccaagcaaaaccagtactaagaaacttaaaactgccccgcttccacccgcctcccagactacacctctgcagatggcccttaacggaaagccagctccccctccacagagtcagagtccagaggtggagcagctcggaagagtagtggaactggactccgatatggtcgacattacgcaggagcccgtgctcgacacaatgctcgaggagtcaatgccagaggaccaagaaccagtgagcgcctctacacatatcgcttcttccttgggaatcaatccacatgtgctgcagattatgaaggctagtctgctgactgacgaagaagacgtcgacatggccctggatcaaaggttcagtagactccccagtaaagcagatacttctcaggagatttgttctccacgcctgcccatctctgcaagccactctagcaagactagatcactcgtcggcggactgctccagtctaagttcactagtggggcattcctgtcaccctcggtgagcgtccaggagtgcagaactccacgggccgcttcattaatgaatatacccagtacttctagttggtcagttccccccccattgaccagcgtgtttacaatgccgtcccctgcccctgaagtgcccctcaagaccgtggggacacgtcgccagctcggtctggttccacgcgagaaaagcgtcacctacggcaaaggcaaactgctgatggatatggcactgttcatgggtcggagttttagagtaggttggggccccaactggacactcgcgaactcaggcgaacagctgaatggaagtcatgagcttgagaatcatcagatcgccgacagtatggaatttgggttccttcccaaccctgtcgccgttaagcctcttactgagtctccattcaaagtgcacctagagaagctgtctctgcggcagcgtaagcccgacgaagatatgaaactgtaccagacgccactggagcttaagctgaagcacagcaccgtgcacgtggacgaactctgcccgttgatagtgccaaaccttggagttgccgtcatccacgattatgccgattgggttaaggaagcatccggggatctgccagaggctcaaatcgtcaaacattggagtctgacatggactctttgcgaggccttatggggacatctcaaagaactggacagccagttaaacgaacctcgcgagtacattcagattctggagagacggcgcgctttctcccgctggctgtcttgcaccgccaccccacagatcgaggaagaggtttctctgacacagaagaactcaccagtggaggctgtttttagctatctgaccggcaagagaatttcggaagcctgcagcttggcccagcagagtggcgatcacagattggcactcctgctctcccagtttgtcggctcgcagtccgtgcgcgagctgcttacaatgcagctggtggactggcaccaactgcaagccgactcattcatccaggacgaacgtctccgtatattcgctctgctggcaggaaagcctgtgtggcaattatcagagaagaagcaaattaatgtgtgtagccaacttgactggaagcggtccctggcaatccacctgtggtacctccttcctcctacggctagtatcagtagggcccttagcatgtacgaggaagcatttcagaacaccagcgacagtgatcgatatgcctgcagcccactgccaagttacctggaggggagtggctgcgtgatcgccgaagagcagaatagtcagacgcctttgagggacgtgtgtttccacctgctaaagctgtacagtgatcggcactacgacctgaatcagctgctcgaaccacgctctatcaccgcagatcccctggattaccgcttgagctggcacctctgggaggtcctgcgggcgttgaactacactcacctgagcgcgcagtgtgagggagtactgcaggcttcttacgctggccagctcgagagcgaagggttgtgggagtgggctattttcgtccttctgcatatcgacaattcgggaattagagagaaggcagttcgcgaattattgacacgtcattgtcagctgctcgagacccccgaaagctgggccaaagagacctttctgacccagaagctccgcgtgcccgccaagtggattcatgaggccaaagcggtgagagcacacatggaaagtgacaagcacctggaggccctgtgcctgtttaaggccgagcactggaataggtgccacaaactgattattagacatttggcctcggacgctattatcaacgagaactacgactatctgaaaggctttctggaagacttggcccctcccgaaaggtcttctcttatccaggattgggagacatcgggactcgtatatttagactatatccgagtcattgagatgctccgacacatacagcaggtggactgttcaggcaatgacctcgagcaattgcatatcaaagtaacctccctgtgcagtagaatcgaacagattcagtgttattcggccaaagaccggcttgctcaatccgatatggccaaaagagtggccaatcttcttcgcgttgtgctcagtctccaccatcctcctgatcgtacctctgattctacgcccgatccccagagagtcccccttaggctgttggcgcctcatatcggccgcttgcctatgccagaagactacgccatggacgaactgaggagcctgacacagagctatctccgagaattggctgtcggatcactttag

SEQ ID NO: 190570 - DNA, 5403 bp, Artificial Sequence
  derived and/or modified sequence
atgttcaacaagagctttggcaccccatttggaggcggcaccggcggcttcggcaccaccagcaccttcggccagaacacaggcttcggcaccaccagcggcggggccttcggcaccagcgccttcggcagcagcaacaacacaggaggcctgtttggaaacagccagaccaagccaggcggcctgtttggcaccagcagcttcagccagcctgccaccagcaccagcactggatttggatttggcaccagcactggaacagccaacaccctgtttggaacagccagcacaggcaccagcctcttcagcagccagaacaatgcctttgcccagaacaagcccactggatttggaaactttggcaccagcaccagcagcggcggcctgtttggcaccaccaacaccaccagcaaccccttcggcagcaccagcggcagcctgtttggccccagcagcttcaccgctgcccccaccggcaccaccatcaagttcaacccccccaccggcacagacaccatggtgaaggccggcgtgtccaccaacatcagcaccaagcaccagtgcatcacagccatgaaggagtatgagagcaagagcctggaggagctgcggctggaggactaccaggccaacaggaagggcccccagaaccaggtgggcgccggcaccaccaccggcctgtttggcagcagccctgccaccagcagcgccaccggcctcttcagcagcagcaccaccaacagcggctttgcctacggccagaacaagacagccttcggcaccagcaccaccggcttcggcaccaaccctgggggcctgtttggccagcagaaccagcagaccaccagcctcttcagcaagcccttcggccaggccaccaccacccagaacacaggcttctcctttggaaacaccagcaccatcggccagcccagcaccaacaccatgggcctgtttggagtgacccaggccagccagcccggcggcctgtttggaacagccaccaacaccagcactggaacagcctttggaactggaacaggcctgtttggccagaccaacacaggctttggagctgtgggcagcaccctgtttggaaacaacaagctgaccaccttcggcagcagcaccaccagcgcccccagctttggcaccaccagcggcggcctgtttggatttggcaccaacaccagcggcaacagcatcttcggcagcaagccagcccctggcaccctgggcaccggcctgggcgccggcttcggcacagccctgggcgccggccaggccagcctgtttggaaacaaccagcccaagattggaggccccctgggcactggagccttcggggcccctggcttcaacaccaccacagccaccctgggctttggagccccccaggcccctgtggccctgacagaccccaatgccagcgctgcccagcaggccgtgctgcagcagcacatcaacagcctgacctacagcccctttggagacagccccctcttcaggaaccccatgtctgaccccaagaagaaggaggagcggctgaagcccaccaacccagctgcccagaaggccctgaccacccccacccactacaagctgacccccaggcctgccaccagggtgcggcccaaggccctgcagaccactggaacagccaagagccacctgtttgatggcctggatgatgatgagcccagcctggccaatggagccttcatgcccaagaagagcatcaagaagctggtgctgaagaacctgaacaacagcaacctcttcagccctgtgaacagagattctgagaacctggccagccccagcgagtacccagaaaatggagagcgcttctccttcctgagcaagcctgtggatgagaaccaccagcaggatggagatgaggacagcctggtgagccacttctacaccaaccccatcgccaagcccatcccccagaccccagagagcgctggcaacaagcacagcaacagcaacagcgtggatgacaccatcgtggccctgaacatgagagctgccctgagaaatggcctggagggcagcagcgaggagaccagcttccatgatgagagcctgcaggatgaccgggaggagattgagaacaacagctaccacatgcaccctgctggcatcatcctgaccaaggtgggctactacaccatccccagcatggatgacctggccaagatcaccaatgagaagggggagtgcatcgtgtctgacttcaccatcggcaggaagggctacggcagcatctactttgaaggagatgtgaacctgaccaacctgaacctggatgacatcgtgcacatccggaggaaggaggtggtggtgtacctggatgacaaccagaagccccctgtgggggagggcctgaacaggaaggccgaggtgaccctggatggagtgtggcccacagacaagaccagccgctgcctgatcaagagcccagaccggctggccgacatcaactatgagggccgcctggaggccgtgtccaggaagcagggcgcccagttcaaggagtacagacctgagaccggctcctgggtgttcaaggtgagccacttcagcaaatatggcctgcaggacagtgatgaggaggaggaggagcaccccagcaagaccagcaccaagaagctgaagacagcccccctgcccccagccagccagaccacccccctgcagatggccctgaatggcaagccagcccccccaccccagagccagagccctgaggtggagcagctgggccgggtggtggagctggacagcgacatggtggacatcacccaggagcctgtgctggacaccatgctggaggagagcatgcctgaggaccaggagcctgtgtctgccagcacccacatcgccagcagcctgggcatcaacccccacgtgctgcagatcatgaaggccagcctgctgacagatgaggaggatgtggacatggccctggaccagcgcttcagccggctgcccagcaaggctgacaccagccaggagatctgcagcccccggctgcccatcagcgccagccacagcagcaagaccaggagcctggtgggcggcctgctgcagagcaagttcaccagcggggccttcctgagccccagcgtgtctgtgcaggagtgcaggaccccccgggccgccagcctgatgaacatccccagcaccagctcctggagcgtgcccccacccctgaccagcgtcttcaccatgcccagccctgcccctgaggtgcccctgaagacagtgggcacccggcggcagctgggcctggtgccccgggagaagtctgtgacctacggcaagggcaagctgctgatggacatggccctcttcatgggccgctccttccgggtgggctggggccccaactggaccctggccaacagcggggagcagctgaatggcagccatgagctggagaaccaccagattgctgacagcatggagtttggcttcctgcccaaccctgtggccgtgaagcccctgacagagagccccttcaaggtgcacctggagaagctgagcctgcggcagaggaagccagatgaggacatgaagctgtaccagacccccctggagctgaagctgaagcacagcacagtgcacgtggatgagctgtgccccctcatcgtgcccaacctgggcgtggccgtcatccatgactatgctgactgggtgaaggaggccagcggggacctgcctgaggcccagatcgtgaagcactggagcctgacctggaccctgtgtgaggccctgtggggccacctgaaggagctggacagccagctgaatgagccccgggagtacatccagatcctggagcggcggcgggccttcagccgctggctgagctgcacagccaccccccagatcgaggaggaggtgtccctgacccagaagaacagccctgtggaggccgtgttctcctacctgaccgggaagaggatcagcgaggcctgcagcctggcccagcagagcggggaccaccggctggccctgctgctgagccagtttgtgggcagccagagcgtgcgggagctgctgaccatgcagctggtggactggcaccagctgcaggccgacagcttcatccaggatgagcggctgcgcatctttgccctgctggccggcaagcctgtgtggcagctgtctgagaagaagcagatcaacgtgtgcagccagctggactggaagaggagcctggccatccacctgtggtacctgctgcccccaacagccagcatcagccgggccctgtccatgtatgaggaggccttccagaacaccagtgacagcgacagatatgcctgcagccccctgcccagctacctggagggcagcggctgtgtgattgctgaggagcagaacagccagacccccctgagagatgtgtgcttccacctgctgaagctgtacagcgacagacactatgacctgaaccagctgctggagcccaggagcatcacagctgaccccctggactaccgcctgtcctggcacctgtgggaggtgctgcgggccctgaactacacccacctgagcgcccagtgtgaaggagtgctgcaggccagctatgccggccagctggagagcgagggcctgtgggagtgggccatctttgtgctgctgcacatcgacaacagcggcatccgggagaaggctgtgcgggagctgctgaccaggcactgccagctgctggagaccccagagagctgggccaaggagaccttcctgacccagaagctgcgggtgcctgccaagtggatccacgaggccaaggctgtgcgggcccacatggagagtgacaagcacctggaggccctgtgcctcttcaaggccgagcactggaaccgctgccacaagctgatcatccgccacctggccagtgatgccatcatcaatgaaaattatgactacctgaagggcttcctggaggacctggcccctcctgagaggagcagcctcatccaggactgggagaccagcggcctggtgtacctggactacatccgggtgattgagatgctgcggcacatccagcaggtggactgcagcggaaatgacctggagcagctgcacatcaaggtgaccagcctgtgcagcagaattgagcagatccagtgctacagcgccaaggaccggctggcccagagcgacatggccaagagggtggccaacctgctgcgggtggtgctgagcctgcaccaccccccagacaggaccagtgacagcaccccagacccccagagggtgcccctgcggctgctggccccccacatcggccgcctgcccatgccagaagattatgccatggatgagctgcggagcctgacccagagctacctgcgggagctggccgtgggcagcctgtag

SEQ ID NO: 190571 - DNA, 5403 bp, Artificial Sequence
  derived and/or modified sequence
atgttcaacaagagcttcggcacccccttcggcggcggcaccggcggttttgggacgacttccaccttcggccagaacacagggttcggaactacttccgggggcgcgttcgggacctcagcatttggatcatctaacaatactggcgggctatttggtaattcgcagacaaagcccgggggtctattcggcacgtccagcttttcacagccagcaacatcaacgtccactgggttcggattcggtacttctactggaacagctaatactctgtttggaactgctagcaccggtactagtctcttttcatcccagaacaatgctttcgcacagaacaagccaacgggatttggcaatttcggaacttctacatccagtggtggccttttcgggactactaatactacatctaacccatttgggtccacttccgggtcgctgtttgggccctcctcttttactgctgctccaacaggaactaccatcaagttcaatcccccaacagggactgatactatggtcaaagctggggtttcgacgaatatatcaacaaagcatcaatgtataacagccatgaaggagtacgagagcaaatccctagaagagctgagattagaggactaccaagccaatcggaaaggtccacaaaaccaagtgggcgcaggaacaacaacggggctctttggctcatcacccgcaacatcttcagctacaggactcttcagctccagcacaactaactcaggctttgcctacggacagaacaaaactgctttcggcacatcgaccacagggttcgggaccaacccgggggggctatttgggcaacagaaccaacaaaccacctcactgttcagcaaacccttcggccaagctaccacaacccaaaatacaggcttctcttttgggaataccagcaccatcggccagcccagcaccaacacgatgggtttattcggagttacccaggcctcccagccgggcggattgttcgggaccgctactaacactagtacaggcaccgcctttggtaccgggaccggactttttggccagactaacaccggtttcggcgccgtgggatctacactgttcggcaataacaagctgaccacgtttggaagttccaccaccagcgcacctagcttcgggactacctctggtggactttttgggtttggcacgaacacttctggaaacagcatttttggaagtaagcccgcaccaggaaccctgggcacagggcttggggccggctttggcacggccctgggagccggccaggccagtctgtttggtaataatcagcctaagatcggggggcccctcggcaccggtgcctttggagctccagggtttaacaccacaacagctaccctgggttttggtgccccccaagcacctgtggccctgacggatccaaatgcttctgctgcccaacaggctgttctacagcagcacattaacagcctcacatatagccccttcggggatagcccactcttccgaaacccaatgagcgaccccaaaaagaaggaggagcgtctaaaacccactaaccctgcggcacaaaaagcactgaccacacccacacattacaagcttacaccacggcccgccactagggtcagaccgaaggcactgcagactacaggaactgccaagagccacctctttgacggcctcgacgatgacgagccttctctggctaatggagcatttatgcccaaaaaaagcatcaaaaaattggtactcaagaatctcaacaatagcaacctgttcagcccagtgaatcgagactctgagaacctggcctcaccatccgagtatcccgagaatggcgaacggttctctttcctcagcaagcctgtggatgaaaaccaccaacaggatggagatgaagacagtctggtcagccacttctatactaatcctattgccaaacctatcccacagactcccgaatcggctggtaacaaacactccaattctaattccgtggatgacaccattgtggccttaaatatgagagcagccctgcgaaacggtctcgaagggtcctcagaggaaacctccttccacgatgaatctctgcaggatgaccgcgaggaaattgaaaacaatagctaccacatgcaccccgcgggaattatactgaccaaagtcggatattacactattccttccatggacgatcttgcgaaaatcaccaatgagaaaggtgagtgtattgtcagcgattttaccatcgggcggaagggttacggctccatttactttgagggcgatgtgaacttaacaaatctgaaccttgatgacattgtgcacattaggaggaaggaagtggtagtgtatctagacgacaatcagaaaccaccagtcggggaagggcttaatcgtaaggccgaggtgacactagacggtgtctggcctactgacaagacgtccagatgtctcataaagagcccggacagactggccgatatcaactatgaaggccgcctggaggccgtgtccagaaaacagggggctcagtttaaagaatacaggccggagacaggttcttgggttttcaaagtgtctcacttttcaaagtatggacttcaagactctgacgaagaggaagaagagcatccctcaaagacatctaccaaaaagctgaaaacagccccgctcccaccagctagtcaaacaactcccctacaaatggccctgaacgggaaacccgcaccccccccccagtcccaatcacccgaggtggagcagctgggaagggtggttgaactcgactctgacatggtggatatcacgcaggaacctgtcctcgacactatgttagaagagtccatgccagaggaccaggagcctgtaagcgcttctacacatatagctagtagcctgggaattaacccacacgtgctgcagatcatgaaggcctcgctactgaccgatgaggaggatgtggatatggctctggatcaacgcttttcacggctgccatccaaagctgacacctcacaagagatctgttctcctaggctgcctatcagcgcctcccattcttcgaagactcgctccctggtgggtggccttctgcagtctaaattcacctcaggggcatttctgtcaccatccgtgtctgttcaggaatgccgcaccccccgtgcagcaagcctgatgaacattccaagtacctcttcatggtccgttccacctcctctaacctcggtgttcaccatgccttcaccagcacccgaggtacccttgaagaccgttgggacgagacgccagttaggattggtcccgagagaaaaatcagtcacctacggaaaggggaaactcttaatggatatggctctcttcatggggcgaagtttcagagttggatggggccctaactggactctcgcgaatagcggggagcaattaaatggttctcacgagctggagaaccaccagatagcagactcaatggaatttgggtttttacctaatccggtcgcagtgaagccactgaccgagagtccattcaaggtgcatctggagaagttgagtctcagacaacgcaaaccagacgaagatatgaaactgtatcaaacaccattagaacttaagttgaaacactcaacagtccacgtcgatgagctctgcccccttatcgtgcccaacctgggagtcgcggtcatccatgactatgcagattgggtgaaggaggcatccggcgacttaccagaggcccagattgttaagcactggagcctcacctggactctgtgtgaggctttgtggggccatctcaaggagcttgactcccagctgaatgagccacgagagtatatccaaattttggaaaggcgccgagccttcagcagatggttgtcctgcaccgccaccccacagattgaagaggaggtgtcgcttacacagaagaattcccctgtagaggccgtgtttagctacctgacaggtaaaagaatttctgaggcctgcagtttagcccaacagagcggtgaccaccggttagctttgctgttaagccagtttgttgggtcccagtcagtgcgggagctcctgaccatgcagttggtggattggcaccagctgcaggcagactcattcatacaggatgagcgcctgcggatatttgccctgctcgcaggcaagcctgtttggcaactgagtgagaagaaacagatcaacgtgtgctcccagctggattggaagcgcagccttgccatccacctctggtacctccttccacccaccgcatccatttcccgggcactttcgatgtacgaggaagcttttcagaataccagcgactcagataggtatgcctgctcgcctctgccctcgtatctggaaggctctgggtgcgtgatcgcagaggagcagaatagtcagacgcctcttagggatgtgtgctttcacctcctcaagttgtactctgacaggcattacgacttgaatcagttactagagccccgttccatcactgccgatcctcttgactacagactgtcatggcacctatgggaagttctgagagcattgaattatactcacctttcagcccaatgtgagggcgtgctgcaagccagctatgcaggccagctggaatctgaaggcctgtgggagtgggccatctttgtattgttacatatcgataacagcggcatcagagagaaagccgtgcgcgagttattgaccagacattgccagctcttagagacacctgagtcttgggccaaagaaaccttcctgacccagaagctgagagtgcccgccaaatggattcatgaggctaaggcagttcgggcccatatggagagcgataaacacctggaggccctctgcctgttcaaagccgaacactggaaccgttgccacaaactgattattcggcatctggcgtccgacgctattatcaatgaaaactacgattacctgaagggctttctggaggatctggcgcccccggagagaagctctcttatccaagactgggagacttcaggtctggtttacttagactacatccgtgtcattgaaatgctgcgacacatccaacaggtggactgctctggaaatgatctggagcagctccatatcaaagtaacgtctctttgctcaagaattgagcaaatccagtgctacagcgctaaagaccggctggcccagtcggatatggcaaagagagtcgcgaatctgctcagagtcgtcttaagccttcaccatcctcccgaccggacctcagactctactccagacccacagcgagtcccactgcgactcctagctccgcatattggtagacttcccatgcctgaggactatgccatggacgagctcagaagcctgacccagtcctacttgcgggagctggcggtgggatcactgtag

SEQ ID NO: 190572 - DNA, 6973 bp, Artificial Sequence
  derived and/or modified sequence
aaccgcggcggcgaggggcgggactccacggccctctcaccgctcctaccctgtgcctccccgaactccttctgcccctcctcttccctctcgccccttcccccttcagttcggtttcaaaagacgcgttgcccaatgaataacagggtcgacccagagtggcggccgcgtccaccaattcgcggacggcgagggcggagcgtccgcaacgagcctctgacgccgggcggcgtgtgacgcagtcgggccctctgcgcgctgcgcccgaagcggcggtcggtggcaggggtggtagcggcggcggcgacggtttcgtgggggccgcgcgctgctctgtgagcggcgggtggcagcaggggactcctgacacttccccttccccaccgaaccgcgctttctgaaacaaagactcattttgaagatgtttaacaaatcatttggaacaccctttgggggtggcacaggtggctttggcacaacttcaacatttggacagaatactggctttggcactactagtggaggggcatttggaacatctgcatttggttctagcaacaatactggaggcctctttggaaattcacagactaaaccaggaggattgtttggaaccagttcatttagccagccagctacctccacaagcactggctttgggtttggtacgtcaacaggaacagcaaataccttgtttggaactgcaagcacagggaccagtctcttctcatcccaaaacaatgcctttgcacaaaataaaccaactggctttggcaattttggaaccagtactagcagtggaggactctttggaaccacaaataccacctctaatccttttggcagcacatctggctccctctttgggccaagtagttttacagctgctcctactgggactactattaaatttaaccctccaactggtacagatactatggtcaaagctggagttagcactaacataagtaccaagcaccagtgtattactgctatgaaagaatatgaaagcaagtcactagaggaacttcgtttagaggattatcaggctaacaggaagggcccacagaaccaggtgggagcaggtaccacaactggcttgtttgggtcttctccagccacttccagcgcaacaggactcttcagctcctccaccactaattcaggctttgcatatggtcagaacaaaactgcctttggaactagtacaactggatttggaacaaatccaggtggtctctttggccaacagaatcagcagactaccagcctcttcagcaaaccatttggccaggctacaaccacccagaacactggcttttcctttggtaataccagcaccataggacagccaagcaccaacaccatgggattatttggagtaacccaagcctcacagcctggaggtctttttgggacagctacaaacaccagcactgggacagcatttggaacaggaacaggtctctttgggcagaccaatactggatttggtgctgttggttcgaccctgtttggcaataacaagcttactacatttggaagcagcacaaccagtgcaccttcatttggtacaaccagtggcgggctctttggttttggcacaaataccagtgggaatagtatttttggaagtaaaccagcacctgggactcttggaactgggcttggtgcaggatttggaacagctcttggtgctggacaggcatctttgtttgggaacaaccaacctaagattggagggcctcttggtacaggagcctttggggcccctggatttaatactacgacagccactttgggctttggagccccccaggccccagtagctttgacagatccaaatgcttctgctgcccagcaggctgttctccagcagcacatcaatagtctaacatactcaccttttggagactctcctctcttccggaatccgatgtcagaccctaagaagaaggaagagagattgaaaccaacaaatccagcagcccagaaggctcttactacacctactcattataaactgacaccccgccctgccactagagtccggccaaaggctttacaaacaacaggcacagccaagtcacatctctttgatgggctggatgacgatgaaccatccctagccaatggagcattcatgcccaagaagagcattaagaagttggttttgaagaaccttaataatagcaatctcttttctcctgttaatcgtgattcagaaaatctagcttcaccatctgaatatccagaaaatggagagagatttagtttcctaagcaaacctgttgatgagaatcaccagcaggatggagatgaagattcccttgtttcacatttttatactaaccctattgccaaacctattcctcaaaccccagaaagtgctggaaataaacacagcaacagcaacagtgtggatgataccattgttgcattaaacatgcgtgctgctttgcgaaatgggctggaaggaagcagtgaagaaacgtcttttcatgatgagtcacttcaggatgaccgagaagaaatagaaaataattcttaccatatgcacccagcaggtattattctcactaaggttggttactatactattccatctatggatgaccttgctaaaattaccaatgaaaaaggagagtgcattgtctctgatttcactattggtcggaaaggttatggttcaatctattttgaaggagatgtgaatttgacaaatctaaatttggatgatattgtgcatatccggaggaaagaagtagttgtctacttagatgataaccaaaaaccacctgtgggtgaagggctaaataggaaggctgaagttacattggatggagtttggccaacagataaaacatctcgttgtttaataaagagcccagatcgccttgctgatatcaactatgaaggaagattggaagcagtttcaaggaaacagggagctcaattcaaagaataccggcctgaaactggttcttgggtgtttaaggtctcccatttttctaagtatggccttcaggattctgatgaagaggaggaggagcatccgtctaaaactagtacaaagaagttgaagactgctcctttgcctcctgcaagccagactacgcccttgcagatggctcttaatggcaaacctgcacctccacctcagagccagagcccagaggtggagcagttagggagggttgtggaactggacagtgacatggtagatatcacccaggagccagttttggataccatgttagaagagagcatgcctgaggatcaggaacctgtgtctgcctcaacacatattgcatcttcactgggaattaatccacatgtcttacagatcatgaaagcatcattgcttactgatgaagaagatgtagatatggcactggatcaacgcttcagtcgcctgccttccaaagcagatacttctcaagaaatctgttctcccagactccccatttcagcatcccactcgtcgaaaactcgttcactagttggtgggttactacaatcaaaatttacaagtggagcttttctttcaccaagtgtctctgtgcaagaatgtcgtactcccagagcagcatctttaatgaatatcccatccacatcctcttggtctgtccctccacccctgacttctgtgttcacaatgcccagcccagcccctgaggttccgttgaaaacagtgggtacacgtaggcaactaggcctagtccctcgtgaaaagtctgtcacctatggcaagggaaaactcttgatggacatggccctattcatgggacgctcatttcgtgttggttggggccccaactggactcttgctaatagtggagaacagctgaatggctctcatgaactagaaaatcatcagattgccgattccatggagtttggattcctgcccaatccagtagctgttaaacccctaactgagtccccattcaaagttcacttagaaaaactcagtttgagacaaagaaagccagatgaagacatgaaattatatcagacacctctggagctcaaattaaaacacagcactgtccatgtggatgaactgtgtcctctcattgtccccaatctgggagttgctgtcattcatgactatgcagattgggttaaagaagcatcaggagacttaccagaagcacaaattgtgaagcactggagcctgacatggacactatgtgaagccctatggggccacctgaaggagcttgacagccagctaaatgaaccccgtgaatacattcaaattctggagcgaagaagagctttctcccgctggctatcctgtactgccacacctcagattgaagaggaagtctccttaacccaaaaaaacagccctgtggaggctgtattcagctacctcacaggcaaaaggatcagtgaggcctgctctctggcccagcagtcaggggatcatcgtcttgctcttcttttatctcagtttgtgggtagccagtcagtccgggagctgctcaccatgcagttggtggactggcatcagctccaagcagactccttcatccaggatgagagactgcgcatctttgctctgttggctggaaaaccggtgtggcagctctcagaaaagaagcaaataaacgtgtgctcccagttggattggaaacgctccctggctatccatctttggtatttgcttccaccaacagcctccatttctagggcgctcagcatgtatgaagaagcatttcagaatacctctgacagtgacagatatgcctgctccccacttccttcgtatctggagggttctggctgtgtgatagcggaggagcaaaactcacagacaccacttcgagatgtctgctttcaccttctaaaactctacagtgacagacattatgatctcaaccagctgctggagcctcgaagcataacagcagatcctttggactaccgcctaagctggcacttgtgggaagtgctgagggctcttaactacacccatctctcagcgcagtgtgaaggtgtgctacaggccagttacgctggccagcttgaaagtgaggggctctgggagtgggccatctttgtcctcctgcacattgacaactcaggcatacgtgagaaggctgttcgagagctgcttacccggcactgccagctgttggagacccctgaatcttgggctaaagagactttccttacccagaagctccgtgtacctgccaaatggatccacgaggccaaagctgtgcgagcacacatggaatctgacaagcacttagaggccctttgcttatttaaggctgagcactggaaccgctgccacaagctcatcatccgacacttagcttctgatgccatcattaatgagaactatgactacctgaaggggttcttggaagacctggcacctccagagcgcagcagcctaattcaggattgggaaacatctgggcttgtttacctggactatattagagtcattgaaatgctccgccatatacagcaggtggattgctcaggtaatgacctggagcagttacacatcaaagtgacttcactgtgcagtcggatagagcagattcagtgttacagtgctaaagatcgcctggctcagtcagacatggccaaacgtgtagccaacctgctgcgcgtggtgctgagtctgcatcatcctcctgatagaacctccgactcaacaccagaccctcagcgagtccctttgcgcctcttggctccccacattggccggcttcccatgcctgaggactatgccatggacgaactgcgcagccttacccagtcctatctgcgagaactggctgttgggagcctgtgagccccaggcactttgcatcacagtcacatgcccattcacaccacacagaggttccctgccttgtttggattggcactgtttgccattctctgggttggctgtggcatctaccctccctccctgctgccagaagcagcatcctccacttgttcagggcttttcttaatactgaacgtagcataagggcttctggaacccagaagaggagacagtttaccatcctcaagatcattcagtgtttttcctttaaaaaaatggtcaataaagctcctttggcagaatcccccaaagaaccagggtattctttttccatccctagccattctggatcttgtgaccctccatgccaaccagcttccctactcctaccctggcccttttatactaggactccttaggaggagtgagacaggtgataatggatccttaacagatgaactatccacagaaggaagagggatccgtctcttaagtaattggttagttaacactgaattttggaggcaaaggagggttggcctgagttaggaaacaaaatgggatctttctgacacacttagggcagaagtgaatgcctgtcacggagggattgatcttcagggctgtttttgttcctgcctttagagttccatgaacaccatacctttgctactactatgtgcaggaacccttggtcacatgtgacatgtctgtgggaagctcccagagtttggtttggtccctggttttcagtcttgctgagactctgtctggatttgcctgcagagtttggataaaaaatggcaggttgggtaaccctccctgttcatcccatgttagctccaaagcatttcccaccctccatctaccccttccagaagcaaaaacaaaccatgactgaggcaggcatggagttgggcgttaggggcaggcagagggcctttgctacactgctgacagctatagggagccccaggtaatggcatgagatagctggtgttagggctatctcaggcaatatggccacacctgggtctttatgcatgaagataatgtaaaggtttttattaaaaaatatatatatgtataaataaatgatctagatattttcctctttttctgaagctactttcttaaaaaataaataaaatgtttatagcattcctggta

SEQ ID NO: 190573 - DNA, 5402 bp, Artificial Sequence
  derived and/or modified sequence
atgttcaacaagtctttcggaaccccgtttggtggcggaacgggcggatttggtaccacatcaaccttcggacaaaatacaggcttcgggaccacttctggtggagccttcggcacatccgcattcgggtccagcaataataccggagggttgttcggaaactcccagaccaaacccggaggattatttggtacaagctcgttctcgcagccagctacctctacctcgacgggatttggtttcggcaccagtactggcactgcaaacacactgtttggcactgcttcaactgggacgagcctcttttcctctcagaacaacgcctttgcgcagaacaagcccaccggttttggcaattttggtactagcacctctagcggcggattgtttggaaccacaaatacaacaagtaaccctttcggctccacctctggctcactttttggtccatctagcttcactgcagcaccaacagggacaaccatcaagttcaaccctcctacaggaactgacaccatggtcaaggccggagtaagcaccaacataagcacaaagcatcagtgcataaccgcgatgaaggagtacgagtccaagtctttggaggaactgaggctggaggattatcaagcaaaccgtaaaggcccacaaaaccaagtcggcgcagggaccaccactgggttgttcggctcttccccggctactagcagtgccactggtctgttcagcagctccacaaccaacagtggcttcgcttacggccagaacaagacggcttttggaacctctaccacaggcttcggcacgaacccaggcggactgtttggccaacagaaccagcagaccaccagtctgttcagcaaaccatttggccaggcaacaaccactcagaataccggctttagttttggcaacactagcaccatcggtcagccctcaactaataccatgggcctgttcggggtgacacaggcaagccagccaggaggcctgtttggcaccgccacaaatacgtcaactgggactgctttcgggactggaactggactgtttggccagacaaatactgggttcggcgcagtcggttctaccctcttcggaaacaataagctgacgactttcgggtcttccaccacatccgcccctagtttcggcaccacgtccggaggtctgttcggctttggaacaaacacctcgggtaactccatcttcggatccaaacccgctcctggtactcttggcaccggcctaggagcaggcttcgggactgccctgggcgcaggacaggccagcctctttggcaataatcagcctaaaatcgggggtccactgggcacaggcgcttttggcgcaccaggtttcaacactacaaccgccacgctaggctttggagcaccacaagcacccgtcgctctgaccgacccaaacgcctcagcagcccagcaagccgtattgcagcaacacattaactctctaacctacagtccatttggtgattcccctctgttccggaatcctatgtccgatcctaagaaaaaggaagaaaggctaaagccaacaaatcctgctgcccagaaagctttgacaactccaacacattataaactcactccacgtcctgccacccgcgtgcgccctaaagctttacagactactggtacggctaaatcccacttatttgatgggttggacgacgacgagccgtctctggccaatggcgcttttatgcccaaaaaatctatcaaaaagctcgtgctgaagaacctgaataactctaatctgttctcacctgtaaaccgggatagcgaaaatctggcctctccctccgagtacccggaaaacggggaacgcttttcattcctgtcaaagcccgtcgatgaaaaccatcagcaggacggggatgaggattctttagtcagccacttttacacaaacccaattgccaagccgattccccaaacccccgaatctgccggaaataaacatagcaattcaaactctgtggatgataccatcgttgccctaaatatgagagccgctctccgaaatgggctagaggggagctcggaagagacctcatttcatgacgagagccttcaagacgaccgggaggagattgaaaataacagttaccatatgcatcctgccggaataattctgaccaaagttggctactatactattccgagtatggatgatttagcaaagattactaatgagaagggcgaatgcattgtgagcgatttcaccatcggccgtaaggggtatggatcaatatactttgagggagacgtcaaccttaccaacctgaatctggatgatattgtgcacatccgcagaaaagaggtggtggtgtacctggacgacaatcagaaacctccggtcggggaggggctcaaccgaaaggcagaggtgaccctggacggggtatggccaaccgacaaaacatccagatgcctgattaagagcccagacagactcgcagatatcaactacgaaggaagactcgaggcggtctcacgaaagcaaggagcacagtttaaggagtaccgcccagagactggctcgtgggtgtttaaggtgagtcatttctccaagtatggcctgcaggattctgacgaggaggaggaagagcatccaagcaaaacctcaaccaagaagctcaagacagctcccctcccccctgctagtcagactactcctttgcagatggccctgaatggaaagcctgctccccctcctcaatctcaatcacctgaggttgaacagttgggccgtgttgtggagctcgacagcgatatggtcgacatcacacaggagcccgtgttggataccatgttggaggaatctatgcccgaagaccaggaacccgtaagtgcttctactcatattgctagtagtctcggcataaatcctcatgtccttcagatcatgaaggcttcactgttgacagacgaggaggatgtggacatggccctagaccagcgcttctctcggttaccaagtaaggcagacacttctcaggagatctgctctccacgactgccaatctccgcgtctcatagctccaagactcggtccctggtcggaggactactacagagtaagtttaccagtggagcgttcctgtcaccatctgtgagtgtgcaagaatgtaggaccccacgcgcagcctcactaatgaatataccttcaaccagcagctggtcagtgccccctccccttacgagtgtgttcactatgcccagtccagctcctgaagttcctttaaaaactgtggggacacggcgtcagctgggcctggtgcccagggagaagtctgtgacatacggcaaaggtaaactgttgatggacatggccctgttcatggggagatcatttcgggtggggtggggccctaattggactttagccaacagtggtgagcaattaaatggaagccacgagctggagaatcatcagatcgccgactccatggaattcgggtttttgcctaatcccgtggccgtgaagcctctcactgagagcccatttaaagtccatttagaaaaactttccctgagacagaggaagccggacgaagacatgaagttgtaccagacgccgttggagcttaagttgaaacacagcaccgtccatgtcgacgagctttgccctctgatagtgccaaatctgggcgtggcagtgatccacgattatgcagattgggtgaaggaagccagcggcgatctccccgaggcccagatcgttaaacattggtccctgacctggactctttgtgaagccctgtggggccacctgaaggagttggatagtcagttaaacgagcccagagagtatattcagatcttagagcgtcgacgagcttttagtcggtggttgtcctgtacagcaacgcctcagatcgaagaagaggtgagcctgacgcagaagaactcaccggtggaggccgtgtttagttacctgaccggcaagcgaatctctgaagcctgtagtcttgcccagcagtccggcgaccaccgccttgctcttctgctgtcccagttcgtggggagccagtctgtaagggaactgctaaccatgcagcttgtcgactggcatcagctgcaggccgactcctttattcaggatgaacggctacgcatctttgccctgctagccggtaaaccagtgtggcagctgagcgagaagaaacagattaacgtgtgctctcagcttgactggaaacgctcactcgccatccatctctggtatctgctgcctcccacagcctcgatctctagagcgctcagcatgtacgaggaggcatttcagaataccagcgatagtgaccggtatgcctgctctccattaccatcttatttggagggctctggatgcgttattgcggaggagcagaattctcagaccccactccgtgacgtgtgcttccaccttcttaaattgtacagcgaccggcactatgatctcaatcagctcctggaacccagaagtatcacagccgatccattagactacagattgtcatggcacctgtgggaggtgctaagagcccttaactatacacacctttcagcacagtgtgagggcgtattacaggccagctatgccggacagctggaatctgagggcctctgggagtgggccatcttcgtgcttttgcatattgataacagtggtatccgcgagaaggccgttagggagcttctaacacggcattgccagctgctggagacaccagaatcctgggcaaaggagacttttctcacccagaaactccgtgtcccagccaaatggatacacgaagccaaggcagtgcgtgctcacatggaaagcgataagcacctggaagccctttgtctgttcaaggcagagcactggaacagatgccataagctgatcatcaggcacctcgcctcagacgccatcatcaacgaaaattacgattacttgaaaggatttctggaagaccttgcccctcctgaacggtcttctcttatccaggattgggaaacttctggcctcgtttatctggactatatccgggtgatcgaaatgctgcgccacattcagcaagtggactgcagtggcaacgacctggagcagctccacataaaggtgacatcactctgcagtcgtatcgaacagattcagtgctatagtgccaaggatcggttggcccagtcagatatggctaaacgggtggccaacctgctgagggtcgtgctcagtctccaccatccacccgaccggacatctgacagcacccctgaccctcagagggtgcccttgcgcctgcttgccccacatataggaagactccctatgccagaagattacgcaatggacgaactacgatcccttacgcagtcttaccttagggagctcgcagttggatcactgta

SEQ ID NO: 190574 - DNA, 5403 bp, Artificial Sequence
  derived and/or modified sequence
atgttcaacaagagcttcggcacccccttcggcggcggcaccggcggcttcggcaccaccagcaccttcggccagaacaccggcttcggcaccaccagcggcggcgccttcggcaccagcgccttcggcagcagcaacaacaccggcggcctgttcggcaacagccagaccaagcccggcggcctgttcggcaccagcagcttcagccagcccgccaccagcaccagcaccggcttcggcttcggcaccagcaccggcaccgccaacaccctgttcggcaccgccagcaccggcaccagcctgttcagcagccagaacaacgccttcgcccagaacaagcccaccggcttcggcaacttcggcaccagcaccagcagcggcggcctgttcggcaccaccaacaccaccagcaaccccttcggcagcaccagcggcagcctgttcggccccagcagcttcaccgccgcccccaccggcaccaccatcaagttcaacccccccaccggcaccgacaccatggtgaaggccggcgtgagcaccaacatcagcaccaagcaccagtgcatcaccgccatgaaggagtacgagagcaagagcctggaggagctgagactggaggactaccaggccaacagaaagggcccccagaaccaggtgggcgccggcaccaccaccggcctgttcggcagcagccccgccaccagcagcgccaccggcctgttcagcagcagcaccaccaacagcggcttcgcctacggccagaacaagaccgccttcggcaccagcaccaccggcttcggcaccaaccccggcggcctgttcggccagcagaaccagcagaccaccagcctgttcagcaagcccttcggccaggccaccaccacccagaacaccggcttcagcttcggcaacaccagcaccatcggccagcccagcaccaacaccatgggcctgttcggcgtgacccaggccagccagcccggcggcctgttcggcaccgccaccaacaccagcaccggcaccgccttcggcaccggcaccggcctgttcggccagaccaacaccggcttcggcgccgtgggcagcaccctgttcggcaacaacaagctgaccaccttcggcagcagcaccaccagcgcccccagcttcggcaccaccagcggcggcctgttcggcttcggcaccaacaccagcggcaacagcatcttcggcagcaagcccgcccccggcaccctgggcaccggcctgggcgccggcttcggcaccgccctgggcgccggccaggccagcctgttcggcaacaaccagcccaagatcggcggccccctgggcaccggcgccttcggcgcccccggcttcaacaccaccaccgccaccctgggcttcggcgccccccaggcccccgtggccctgaccgaccccaacgccagcgccgcccagcaggccgtgctgcagcagcacatcaacagcctgacctacagccccttcggcgacagccccctgttcagaaaccccatgagcgaccccaagaagaaggaggagagactgaagcccaccaaccccgccgcccagaaggccctgaccacccccacccactacaagctgacccccagacccgccaccagagtgagacccaaggccctgcagaccaccggcaccgccaagagccacctgttcgacggcctggacgacgacgagcccagcctggccaacggcgccttcatgcccaagaagagcatcaagaagctggtgctgaagaacctgaacaacagcaacctgttcagccccgtgaacagagacagcgagaacctggccagccccagcgagtaccccgagaacggcgagagattcagcttcctgagcaagcccgtggacgagaaccaccagcaggacggcgacgaggacagcctggtgagccacttctacaccaaccccatcgccaagcccatcccccagacccccgagagcgccggcaacaagcacagcaacagcaacagcgtggacgacaccatcgtggccctgaacatgagagccgccctgagaaacggcctggagggcagcagcgaggagaccagcttccacgacgagagcctgcaggacgacagagaggagatcgagaacaacagctaccacatgcaccccgccggcatcatcctgaccaaggtgggctactacaccatccccagcatggacgacctggccaagatcaccaacgagaagggcgagtgcatcgtgagcgacttcaccatcggcagaaagggctacggcagcatctacttcgagggcgacgtgaacctgaccaacctgaacctggacgacatcgtgcacatcagaagaaaggaggtggtggtgtacctggacgacaaccagaagccccccgtgggcgagggcctgaacagaaaggccgaggtgaccctggacggcgtgtggcccaccgacaagaccagcagatgcctgatcaagagccccgacagactggccgacatcaactacgagggcagactggaggccgtgagcagaaagcagggcgcccagttcaaggagtacagacccgagaccggcagctgggtgttcaaggtgagccacttcagcaagtacggcctgcaggacagcgacgaggaggaggaggagcaccccagcaagaccagcaccaagaagctgaagaccgcccccctgccccccgccagccagaccacccccctgcagatggccctgaacggcaagcccgccccccccccccagagccagagccccgaggtggagcagctgggcagagtggtggagctggacagcgacatggtggacatcacccaggagcccgtgctggacaccatgctggaggagagcatgcccgaggaccaggagcccgtgagcgccagcacccacatcgccagcagcctgggcatcaacccccacgtgctgcagatcatgaaggccagcctgctgaccgacgaggaggacgtggacatggccctggaccagagattcagcagactgcccagcaaggccgacaccagccaggagatctgcagccccagactgcccatcagcgccagccacagcagcaagaccagaagcctggtgggcggcctgctgcagagcaagttcaccagcggcgccttcctgagccccagcgtgagcgtgcaggagtgcagaacccccagagccgccagcctgatgaacatccccagcaccagcagctggagcgtgcccccccccctgaccagcgtgttcaccatgcccagccccgcccccgaggtgcccctgaagaccgtgggcaccagaagacagctgggcctggtgcccagagagaagagcgtgacctacggcaagggcaagctgctgatggacatggccctgttcatgggcagaagcttcagagtgggctggggccccaactggaccctggccaacagcggcgagcagctgaacggcagccacgagctggagaaccaccagatcgccgacagcatggagttcggcttcctgcccaaccccgtggccgtgaagcccctgaccgagagccccttcaaggtgcacctggagaagctgagcctgagacagagaaagcccgacgaggacatgaagctgtaccagacccccctggagctgaagctgaagcacagcaccgtgcacgtggacgagctgtgccccctgatcgtgcccaacctgggcgtggccgtgatccacgactacgccgactgggtgaaggaggccagcggcgacctgcccgaggcccagatcgtgaagcactggagcctgacctggaccctgtgcgaggccctgtggggccacctgaaggagctggacagccagctgaacgagcccagagagtacatccagatcctggagagaagaagagccttcagcagatggctgagctgcaccgccaccccccagatcgaggaggaggtgagcctgacccagaagaacagccccgtggaggccgtgttcagctacctgaccggcaagagaatcagcgaggcctgcagcctggcccagcagagcggcgaccacagactggccctgctgctgagccagttcgtgggcagccagagcgtgagagagctgctgaccatgcagctggtggactggcaccagctgcaggccgacagcttcatccaggacgagagactgagaatcttcgccctgctggccggcaagcccgtgtggcagctgagcgagaagaagcagatcaacgtgtgcagccagctggactggaagagaagcctggccatccacctgtggtacctgctgccccccaccgccagcatcagcagagccctgagcatgtacgaggaggccttccagaacaccagcgacagcgacagatacgcctgcagccccctgcccagctacctggagggcagcggctgcgtgatcgccgaggagcagaacagccagacccccctgagagacgtgtgcttccacctgctgaagctgtacagcgacagacactacgacctgaaccagctgctggagcccagaagcatcaccgccgaccccctggactacagactgagctggcacctgtgggaggtgctgagagccctgaactacacccacctgagcgcccagtgcgagggcgtgctgcaggccagctacgccggccagctggagagcgagggcctgtgggagtgggccatcttcgtgctgctgcacatcgacaacagcggcatcagagagaaggccgtgagagagctgctgaccagacactgccagctgctggagacccccgagagctgggccaaggagaccttcctgacccagaagctgagagtgcccgccaagtggatccacgaggccaaggccgtgagagcccacatggagagcgacaagcacctggaggccctgtgcctgttcaaggccgagcactggaacagatgccacaagctgatcatcagacacctggccagcgacgccatcatcaacgagaactacgactacctgaagggcttcctggaggacctggccccccccgagagaagcagcctgatccaggactgggagaccagcggcctggtgtacctggactacatcagagtgatcgagatgctgagacacatccagcaggtggactgcagcggcaacgacctggagcagctgcacatcaaggtgaccagcctgtgcagcagaatcgagcagatccagtgctacagcgccaaggacagactggcccagagcgacatggccaagagagtggccaacctgctgagagtggtgctgagcctgcaccacccccccgacagaaccagcgacagcacccccgacccccagagagtgcccctgagactgctggccccccacatcggcagactgcccatgcccgaggactacgccatggacgagctgagaagcctgacccagagctacctgagagagctggccgtgggcagcctgtag

SEQ ID NO: 190575 - protein, 215 aa, Artificial Sequence
  derived and/or modified sequence
MATAPYNYSYIFKYIIIGDMGVGKSCLLHQFTEKKFMADCPHTIGVEFGTRIIEVSGQKIKLQIWDTAGQERFRAVTRSYYRGAAGALMVYDITRRSTYNHLSSWLTDARNLTNPNTVIILIGNKADLEAQRDVTYEEAKQFAEENGLLFLEASAKTGENVEDAFLEAAKKIYQNIQDGSLDLNAAESGVQHKPSAPQGGRLTSEPQPQREGCGC

SEQ ID NO: 190576 - protein, 181 aa, Artificial Sequence
  derived and/or modified sequence
MATAPYNYSYIFKYIIIGDMGVGKSCLLHQFTEKKFMADCPHTIGVEFGTRIIEVSGQKIKLQIWDTAGQERFRAVTRSYYRGAAGALMVYDITRRSTYNHLSSWLTDARNLTNPNTVIILIGNKADLEAQRDVTYEEAKQFAEENGLLFLEASAKTGENVEDAFLEAAKKIYQNIQDGSL

SEQ ID NO: 190577 - DNA, 648 bp, Artificial Sequence
  derived and/or modified sequence
atggccactgccccctacaactattcttacatattcaagtatataattataggtgacatgggcgtggggaagtcttgcctgttgcaccagttcaccgagaagaaattcatggctgattgccctcacaccatcggtgttgagtttgggacccggatcattgaggtgagtggccagaagatcaagctgcagatttgggataccgccggtcaggagaggttccgcgcggttactaggtcctattacagaggggctgctggggctctcatggtctatgatatcaccaggcggagcacatacaaccatctctctagttggttgaccgacgctcggaacctgaccaatcctaatacagtcattatcctaataggaaataaagcagacttagaggcacaaagagacgtgacatacgaagaagccaaacagttcgctgaagaaaatggcctgttgttcctggaggccagcgcaaagactggagaaaacgtggaagacgccttcctggaggccgctaaaaagatatatcaaaatatccaagacggctccctggatttgaacgccgccgagtccggggtgcaacataaaccttccgccccacagggaggaaggctgacaagcgagccccagccccaacgcgagggttgcggctgctag

SEQ ID NO: 190578 - DNA, 546 bp, Artificial Sequence
  derived and/or modified sequence
atggccactgcgccgtacaactactcatacatcttcaaatacataatcatcggggatatgggggtcggtaaaagctgtttgcttcaccagtttactgagaaaaaattcatggccgactgtcctcataccattggggtggaatttggcacacggatcatcgaggtaagcggacagaagataaagctccagatatgggacacagccggacaggagcgctttagggccgtgactcgctcctactatcgcggcgcagccggggccttaatggtgtatgatataactcggcgctctacgtataaccatctgagtagttggctcaccgatgcacggaacctcacaaacccgaatacggtgatcatcctgatcggcaacaaggctgatctcgaggcccagagggacgtcacatatgaagaggctaagcaattcgctgaagagaatgggctcctgttcctcgaggctagcgctaagacaggagagaatgtagaagatgccttcttagaggccgccaaaaaaatataccagaacatacaggatggcagtctgtag

SEQ ID NO: 190579 - DNA, 648 bp, Artificial Sequence
  derived and/or modified sequence
atggccacagccccctacaactacagctacatcttcaagtacatcatcattggagacatgggcgtgggcaagagctgcctgctgcaccagttcacagagaagaagttcatggctgactgcccccacaccatcggcgtggagtttggcacccgcatcatcgaggtgtctggccagaagatcaagctgcagatctgggacacagctggccaggagcgcttccgggctgtgaccaggagctactacagaggagctgctggggccctgatggtgtatgacatcaccaggaggagcacctacaaccacctgagctcctggctgacagatgccaggaacctgaccaaccccaacacagtcatcatcctgattggcaacaaggctgacctggaggcccagagagatgtgacctatgaggaggccaagcagtttgctgaagaaaatggcctgctcttcctggaggccagcgccaagacaggagaaaatgtggaggatgccttcctggaggccgccaagaagatctaccagaacatccaggacggcagcctggacctgaatgctgctgagagcggcgtgcagcacaagcccagcgccccccagggcggccgcctgaccagcgagccccagccccagcgggagggctgcggctgctag

SEQ ID NO: 190580 - DNA, 546 bp, Artificial Sequence
  derived and/or modified sequence
atggccacagccccctacaactacagctacatcttcaagtacatcatcattggagacatgggcgtgggcaagagctgcctgctgcaccagttcacagagaagaagttcatggctgactgcccccacaccatcggcgtggagtttggcacccgcatcatcgaggtgtctggccagaagatcaagctgcagatctgggacacagctggccaggagcgcttccgggctgtgaccaggagctactacagaggagctgctggggccctgatggtgtatgacatcaccaggaggagcacctacaaccacctgagctcctggctgacagatgccaggaacctgaccaaccccaacacagtcatcatcctgattggcaacaaggctgacctggaggcccagagagatgtgacctatgaggaggccaagcagtttgctgaagaaaatggcctgctcttcctggaggccagcgccaagacaggagaaaatgtggaggatgccttcctggaggccgccaagaagatctaccagaacatccaggacggcagcctgtag

SEQ ID NO: 190581 - DNA, 648 bp, Artificial Sequence
  derived and/or modified sequence
atggccaccgccccctacaactacagctacatcttcaagtacatcataatcggcgacatgggggtgggcaagagctgcctcctacaccagtttacagaaaaaaaattcatggccgattgcccccataccatcggagtcgagttcggcactcggatcatcgaagtcagtgggcaaaagatcaagctccagatatgggacaccgccgggcaagaaaggtttagagctgtgacgagatcttactacagaggcgccgccggtgctctgatggtttatgatatcacacgtcgcagtacatataatcatctgtcatcttggctcacagacgccaggaatctgaccaatcccaacacagttatcatactaattggtaataaggccgacctagaggctcagagggatgtgacctatgaagaagctaaacagtttgctgaagagaatggcctcctgtttttggaggcctccgccaaaacaggagaaaatgtagaggatgctttcctggaggctgcaaagaagatctaccagaatatccaagatggctctctcgatctgaacgccgccgagtctggcgtgcagcacaaacccagcgctccccagggcggccgcttaactagcgaaccccagccacagcgggaaggctgcggatgctag

SEQ ID NO: 190582 - DNA, 546 bp, Artificial Sequence
  derived and/or modified sequence
atggccaccgccccctacaactacagctacatcttcaagtacatcatcataggtgacatgggcgtgggaaagtcatgcttgttgcatcagtttacagaaaagaagttcatggcagattgccctcacaccataggggtggaatttggaacaaggatcatagaagtcagcggacagaagattaagcttcagatatgggacactgcagggcaggaacgcttccgcgccgtaacccgctcgtattaccgtggcgctgctggcgccctgatggtttatgatattacacggagaagtacctataaccatctctcgtcatggctgacagatgcccgaaacttgactaaccccaacaccgtgatcatactgataggaaataaggccgatttggaggcacaacgagacgtcacctatgaggaagccaaacaattcgccgaggagaacggtctgctgttcctggaggcaagtgcaaagaccggcgagaatgtggaggacgcatttttggaggcagcgaagaagatttatcaaaacattcaagacggatcactgtag

SEQ ID NO: 190583 - DNA, 648 bp, Artificial Sequence
  derived and/or modified sequence
atggccactgcaccatacaactactcctacatttttaaatacattattatcggggatatgggagttggaaaatcatgcctgctgcatcagttcaccgaaaagaagtttatggccgactgtccccacaccatcggcgttgaatttggtacgcgaataatcgaggtaagtggccagaagatcaaactgcaaatctgggatacggctggccaagagcggtttagggctgtcacacgctcctactaccgcggtgcagccggtgcactgatggtttacgatatcacacggagaagtacctacaatcacttgtcctcttggctgaccgacgctagaaacctgacaaatccaaacactgttatcatcctgataggtaacaaggccgacctggaagctcagagggacgtcacctacgaggaggccaaacagttcgccgaggaaaatgggctgttattcctggaagcctcagcaaaaactggggagaacgtagaggacgccttccttgaggccgctaaaaagatttaccagaacatccaggatgggtctttggacctaaacgccgctgaatctggagtccagcacaagcctagcgcccctcaggggggaagactaacaagcgagcctcaaccccaacgagaaggatgcggttgctag

SEQ ID NO: 190584 - DNA, 546 bp, Artificial Sequence
  derived and/or modified sequence
atggcaaccgcaccatacaactattcctacattttcaaatacattatcataggcgatatgggcgttggtaaaagctgtctgctccaccagttcacagaaaaaaagttcatggctgactgtccacatactataggagtcgaatttgggacccggatcattgaagtgagtggacagaaaattaagttacagatttgggacactgctggacaagagcggttccgagctgtaacccgatcttactaccgcggagcggcaggggctctgatggtgtatgacatcacaaggcggagtacctacaatcatcttagttcatggctgacagatgcccgaaacctcactaatcctaacactgtcataatactgattggaaataaagccgatctggaggcacagcgggatgtgacctacgaagaagcaaaacagtttgctgaagaaaacggccttctctttttagaggcctcagctaagaccggggagaatgtagaagatgcattcctcgaagcagccaaaaaaatctaccaaaatattcaggatgggtccctgtag

SEQ ID NO: 190585 - DNA, 4145 bp, Artificial Sequence
  derived and/or modified sequence
atcttggaccagcccgaggaagatactgagggagcacaggagcagtcaccgctgccactgctactgccgctactgctgccggcgcgtctgcacctctcggcctgccagtgtacctgccggcgcctcggtcgaccgcccccgccccctctcccgctgcgtccgcactcctgttcctggtcctgacgcccccctcccgcccggaaagctgcccagccaccagcaaccccccagtgccaccatggcaactgcaccatacaactactcttacatctttaaatatattattattggggacatgggagtaggaaaatcttgcttgcttcatcaatttacagaaaaaaaatttatggctgattgtcctcacacaattggtgttgaatttggtacaagaataatcgaagttagtggccaaaaaataaaactgcagatttgggatacggcaggacaggagcgatttagggctgttacacggagctactacagaggagctgcgggagctcttatggtctatgatatcactagaagaagtacatataaccacttaagcagctggttgacagatgcaaggaatctcaccaatccaaatactgtaataattctcataggaaataaagcagatttggaggcacagagagatgttacatatgaagaagccaaacagtttgctgaagaaaatggcttattgttcctcgaagcgagtgcaaaaacgggagagaatgtagaagatgccttccttgaggctgccaagaaaatctatcagaacattcaggatggaagcttggatctgaatgctgctgagtctggtgtacaacacaaaccttcagccccgcagggaggccggctaaccagtgaaccccaaccccagagagaaggctgtggctgctagtgacctctttgctgtggcccctcatttgacctttcacctctgtctgttggaagcagtactttttactgcctcattgtcttctgtacatcttactgggtttaattaaaaaaaaagaaaaaactctgttgtaaaaacagtttaacacaatactaaactgctaaacaactagatgtaatcaggttatcaaaggcaagtagagtaataaatctctcctgcatggtaaatctagactttttttcccccttgtcctcgtgataagtatgtcaccaatatatgatttaaaccgagcactgatgctggacttcatgatttttaccctccctttggcaaggctttgtctcactgtacggtttaatttggtgatatcttaagcctttcttcccatccttaactgttcaagtatgtctgttgtaaccaataagtttattgctgtgaaattacttctgatggtagagaaggggttctataactgcttttgttttgttttggataaatttcctgttgtgtgggtggcatttttcttaacgagatttgcttctgtcttagcctcacacagggaaaatatccatttatcttctctctcgtgcttaattaatagctttatctttttttataccattttatccttttctctttaacagaaagtaaatatgtataaaatttgaaggaatcgaactaacaatacattctgtgtatattattttaatgaagaaaataaattgattactggcattggaacagtataaaataccagtttgtacagtatgacctatatgtgaccatgttactcccttccatttcacacaaagaaatagacacaactgcagttcacaagtagtactggctccaccccttggtgctggcagtgtttggggacattatgctggaaagagctcctagcatcagaggattaacactagcagattctgttccatctttgcactgttgcttacctgctgattttcttaactgttcttgtgcaatcgacaatgtgctaacctgcttttctctttttgtaaacgtttttgcattacaggctgcattcttgccttactgtatagaaaaagaaaaaaggctgggtttactattgcacattttaagcttttatacctttatcttcttggaatggtcagattctgaactggacagtcagaaccacaggtctgctgttaagggattttaaattgtgcatttttaaccctacagtgaaataacttaagatatccctgtgttcacagtgtgaggggctgttttatgtcatgttggcataaattgttttgtaaaagggaaagtgtttctaaaggtgtttcagcgcttgtgctgatacaaagtaagttattactttgcaccaggtggtttggccactgaattaatactgtatagcaagagaaacaatcttatttttttggacaacatgttttattaagttcttcatttctgttgattttttttattgcatttatgattcagtggctgggaattgagaatttatttgaaatagaataggtaacacctcagcgtactatagaaaatgcactcagctcaactgctgtgtttaaaatacacattttaaatccctctttacagacactaacataaaagtacatctttctgggttgtaaacatgtggtagtaccagagtattgtatagtcaatgttaaataaaagccaaaactggaatgtgcagaaagtaggctttggttaatttgtggattcatttttatttttgtctttgtttaactttttaaaaaataagatttctggagtagattggtatattctgttaaagacttacagtgatccattttgcttacactgttgcatcacaagggactcacccagggaccatgacctgctggtgtgtgtgtatatttacaaaaacaaaacaaacaaaccacccattgggatataaggtagcaatcacaaactaaagactgcggcttgttgaggtgcaataccctgactcccaaagttagttacagtgggttttattgtttttgtgactgaaggatttattcagactgctgtactcttcatttgatgtaacaaaatgctattaatctaaatatttgtaaataaagtacctgtatctagattaaattaaaattggttgcattattttctgaactataatagggtttttcttcaggtgaacaatttgacgtgtcatcagtttttattgcagcactgtccatattcattgtataaagagaggtctacgtatgtagcatataaaaccacatcactaagtaatagacccacagctttattcttgtgtttacattacccttgaaatgttttcagtcaacccttttcagtgtaagatcagcacatttggtggctgatgctgttctcctttgactgtaccgggagccagattctatcatatgcatgtgtaatcccctgtaatacactcaggtgctcacaaatagagcagattgtcatattgtaacatgcgtgtgccagacaccgggcagtacactttggaaagaatgtgaaatccttttaatttttaatccatagcttactgcttgtgcagtcacctgcctcttgaggttgctcattgcccttggacctgtgaggaggccttcagattagtaattggtgcttagtactatttatgcttaaatagatcttccagtacaatgttgaagtcttttttatggataataacgtgtttgatggagtaacttattatttttttttggttggtggtttacacgttaatagaggtagtacaatttctttggaaaggtgtcttttgaagccagctgttaagcttcatacattacctcccttctcaaattcggtaagacagtagttttggggaacttttttgcccatgtgtcttttaagtgtgattttaaaaaaatgagtggttcagttcattcccctaaacagaagaaaagaccaaataattaccttccattcctcttcatgtgggaatatagagagggttcatgtggcattttagagaaaagataatttatcctcattcaacacaggcccagaaaattgtgtcccagaaggatgtcagtaattgtgactaggccaggccttttagcattttgctaagacttgaaacaaaaaatgtaaatacaaaagaaatcaagttttgttttgaaagatgccttctagaacttactgtgtattaataaattgtcactttcattgtctttattgtaactccattgatcccgtatcttaacggttcacgtctagccaaataactgttttggaataaaaaccttggtggtga

SEQ ID NO: 190586 - DNA, 711 bp, Artificial Sequence
  derived and/or modified sequence
acatgcgcccctctcaagtgctggcagaccactgtgcatgcagacaacgcacccaaagggaagaatcaggggaacagtaacgcaaccctgccagcatgccaatgtagaaaacttgaaagaatgaacacaaaaatgtttacaaaggatatcatggcagagtgccaccatggcaactgcaccatacaactactcttacatctttaaatatattattattggggacatgggagtaggaaaatcttgcttgcttcatcaatttacagaaaaaaaatttatggctgattgtcctcacacaattggtgttgaatttggtacaagaataatcgaagttagtggccaaaaaataaaactgcagatttgggatacggcaggacaggagcgatttagggctgttacacggagctactacagaggagctgcgggagctcttatggtctatgatatcactagaagaagtacatataaccacttaagcagctggttgacagatgcaaggaatctcaccaatccaaatactgtaataattctcataggaaataaagcagatttggaggcacagagagatgttacatatgaagaagccaaacagtttgctgaagaaaatggcttattgttcctcgaagcgagtgcaaaaacgggagagaatgtagaagatgccttccttgaggctgccaagaaaatctatcagaacattcaggatggaagcttgga

SEQ ID NO: 190587 - DNA, 648 bp, Artificial Sequence
  derived and/or modified sequence
atggccaccgccccctacaactacagctacatcttcaagtacatcatcatcggcgacatgggcgtgggcaagagctgcctgctgcaccagttcaccgagaagaagttcatggccgactgcccccacaccatcggcgtggagttcggcaccagaatcatcgaggtgagcggccagaagatcaagctgcagatctgggacaccgccggccaggagagattcagagccgtgaccagaagctactacagaggcgccgccggcgccctgatggtgtacgacatcaccagaagaagcacctacaaccacctgagcagctggctgaccgacgccagaaacctgaccaaccccaacaccgtgatcatcctgatcggcaacaaggccgacctggaggcccagagagacgtgacctacgaggaggccaagcagttcgccgaggagaacggcctgctgttcctggaggccagcgccaagaccggcgagaacgtggaggacgccttcctggaggccgccaagaagatctaccagaacatccaggacggcagcctggacctgaacgccgccgagagcggcgtgcagcacaagcccagcgccccccagggcggcagactgaccagcgagccccagccccagagagagggctgcggctgctag

SEQ ID NO: 190588 - DNA, 546 bp, Artificial Sequence
  derived and/or modified sequence
atggccaccgccccctacaactacagctacatcttcaagtacatcatcatcggcgacatgggcgtgggcaagagctgcctgctgcaccagttcaccgagaagaagttcatggccgactgcccccacaccatcggcgtggagttcggcaccagaatcatcgaggtgagcggccagaagatcaagctgcagatctgggacaccgccggccaggagagattcagagccgtgaccagaagctactacagaggcgccgccggcgccctgatggtgtacgacatcaccagaagaagcacctacaaccacctgagcagctggctgaccgacgccagaaacctgaccaaccccaacaccgtgatcatcctgatcggcaacaaggccgacctggaggcccagagagacgtgacctacgaggaggccaagcagttcgccgaggagaacggcctgctgttcctggaggccagcgccaagaccggcgagaacgtggaggacgccttcctggaggccgccaagaagatctaccagaacatccaggacggcagcctgtag

SEQ ID NO: 190589 - protein, 1024 aa, Artificial Sequence
  derived and/or modified sequence
MERRSRRKSRRNGRSTAGKAAATQPAKSPGAQLWLFPSAAGLHRALLRRVEVTRQLCCSPGRLAVLERGGAGVQVHQLLAGSGGARTPKCIKLGKNMKIHSVDQGAEHMLILSSDGKPFEYDNYSMKHLRFESILQEKKIIQITCGDYHSLALSKGGELFAWGQNLHGQLGVGRKFPSTTTPQIVEHLAGVPLAQISAGEAHSMALSMSGNIYSWGKNECGQLGLGHTESKDDPSLIEGLDNQKVEFVACGGSHSALLTQDGLLFTFGAGKHGQLGHNSTQNELRPCLVAELVGYRVTQIACGRWHTLAYVSDLGKVFSFGSGKDGQLGNGGTRDQLMPLPVKVSSSEELKLESHTSEKELIMIAGGNQSILLWIKKENSYVNLKRTIPTLNEGTVKRWIADVETKRWQSTKREIQEIFSSPACLTGSFLRKRRTTEMMPVYLDLNKARNIFKELTQKDWITNMITTCLKDNLLKRLPFHSPPQEALEIFFLLPECPMMHISNNWESLVVPFAKVVCKMSDQSSLVLEEYWATLQESTFSKLVQMFKTAVICQLDYWDESAEENGNVQALLEMLKKLHRVNQVKCQLPESIFQVDELLHRLNFFVEVCRRYLWKMTVDASENVQCCVIFSHFPFIFNNLSKIKLLHTDTLLKIESKKHKAYLRSAAIEEERESEFALRPTFDLTVRRNHLIEDVLNQLSQFENEDLRKELWVSFSGEIGYDLGGVKKEFFYCLFAEMIQPEYGMFMYPEGASCMWFPVKPKFEKKRYFFFGVLCGLSLFNCNVANLPFPLALFKKLLDQMPSLEDLKELSPDLGKNLQTLLDDEGDNFEEVFYIHFNVHWDRNDTNLIPNGSSITVNQTNKRDYVSKYINYIFNDSVKAVYEEFRRGFYKMCDEDIIKLFHPEELKDVIVGNTDYDWKTFEKNARYEPGYNSSHPTIVMFWKAFHKLTLEEKKKFLVFLTGTDRLQMKDLNNMKITFCCPESWNERDPIRALTCFSVLFLPKYSTMETVEEALQEAINNNRGFG

SEQ ID NO: 190590 - DNA, 3075 bp, Artificial Sequence
  derived and/or modified sequence
atggaaagacgatcccgccgaaagagccggagaaacggcaggtccacggccggcaaagctgcggccacccagcccgccaagtctcctggggctcaactgtggctctttccttccgccgctgggttacatcgggctttactaagacgcgtggaggtgacacgccagttgtgttgttctcctggccgcttggctgtgctcgagagaggcggcgctggcgtccaggtccaccaactgttagccgggtccggcggcgcacggactcctaaatgtattaaactggggaagaatatgaaaatccacagcgttgatcagggcgcagaacacatgctgatcctctcaagcgacggcaagcccttcgagtacgacaattatagcatgaaacatttgcgcttcgaatccatcttacaagagaagaagattattcaaataacctgcggcgactatcacagcttagccctcagcaagggcggggaactttttgcctggggccagaatctgcacggtcaattgggcgttggccgcaaatttccatctaccaccactcctcagatcgtcgagcatctggcaggcgtgcctttggctcagatttccgccggagaggcccattcaatggccttgagcatgagcggaaacatttattcttggggcaaaaatgagtgcggccagttaggactcgggcatactgaaagtaaagatgatcctagcctcatcgaggggcttgataaccaaaaggtggaattcgtggcttgtggaggctcgcacagcgctttgctgactcaggacggactgctgtttaccttcggggctgggaaacacggccagcttggtcataattcaacccaaaacgaattacgtccatgtctggtggctgagctggtcggttaccgtgtgactcagattgcctgtggacggtggcatacgctggcatacgtgtccgatttaggaaaagtcttctcttttgggagcggaaaagacggacagttggggaacgggggcactagggatcaactaatgcccctgccggtcaaagtgtcatcatcagaggaattaaaactggaaagccacacctccgaaaaagaattaatcatgatcgcagggggcaatcagtccattttgctatggattaagaaagagaattcatacgtgaacctgaagcgcacgatccctaccttgaacgaaggtaccgtgaaacgctggatcgccgacgtcgagacaaagcggtggcagagtaccaaacgagagattcaggagatcttctccagcccagcatgcctgacaggctcttttttaaggaaacgtcgaacaaccgagatgatgcctgtgtacctcgatctcaataaggcccgcaatatctttaaggaactcacacagaaggattggatcacaaacatgatcacaacctgtctaaaggacaatctgcttaaacggctcccctttcactctccaccacaggaggcattagagattttcttcctcctgcctgaatgccctatgatgcacataagtaacaattgggagagtctagtcgtaccattcgcaaaggtggtgtgcaagatgtcagatcagagttcgttggtccttgaggaatactgggccacactgcaggagagtaccttcagtaaacttgtgcagatgttcaaaacagctgtgatctgtcagttagactattgggacgagagcgctgaggaaaacggcaacgtccaggcactgctcgaaatgctgaaaaaactccaccgggtgaatcaggtcaagtgtcaactaccagagagtatcttccaagtggatgagcttttgcaccggctcaatttctttgtagaagtctgtaggcggtatttgtggaagatgaccgtcgacgcgtcagagaatgtgcagtgctgtgtcatcttcagccactttccctttatcttcaataatctctctaagattaagctgcttcacacagacaccctgctgaagatcgagtcaaagaagcacaaggcatatcttaggagtgctgccattgaagaggaacgggagtctgaatttgccctgcggcctacatttgatctcacggtacggagaaaccatttgattgaggacgtcctgaaccagttgtctcagtttgaaaacgaagacctgcgcaaagagctttgggttagcttttcaggagagattggttacgaccttggaggagtgaaaaaggagttcttctattgtctattcgctgagatgatccagccagagtatggtatgttcatgtatccagaaggggcttcctgtatgtggttccctgtgaagcccaagttcgagaagaagcgctactttttctttggggtgctgtgtgggttgtctctctttaattgtaatgtcgcaaatttgccttttcccctggcactgtttaaaaagctcctagatcaaatgccctcactggaggacctcaaggagctgtccccagatctcggaaaaaacctgcagacactcctcgatgatgagggggataatttcgaggaagtgttttacattcatttcaacgtacactgggaccgcaatgatactaatttgattcccaatggatcaagcatcactgtaaatcaaaccaataaacgcgactatgtgtccaagtatattaactacattttcaacgacagcgtgaaagctgtctatgaggagtttaggagaggattctacaaaatgtgtgacgaggacattatcaagttgtttcaccccgaggaactcaaagatgtgattgttggtaatacagattatgactggaaaacttttgaaaaaaatgctcgctatgagcccgggtacaactcctctcacccaacaatcgttatgttttggaaagcatttcacaaacttacactggaagagaaaaagaagttcttagtctttcttactggcacagacaggctccagatgaaagacctgaataatatgaagatcacattttgttgccctgagagctggaatgagcgcgatccaattcgtgcccttacctgtttctccgtcctgttcttgcccaagtatagcaccatggaaaccgttgaagaggctcttcaggaagccatcaacaacaataggggattcggctag

SEQ ID NO: 190591 - DNA, 3513 bp, Artificial Sequence
  derived and/or modified sequence
tcagtagctgaggctgcggttccccgacgccacgcagctgcgcgcagctggttcccgctctgcagcgcaacgcctgaggcagtgggcgcgctcagtcccgggaccaggcgttctctcctctcgcctctgggcctgggaccccgcaaagcggcgatggagcggaggtcgcggaggaagtcgcggcgcaacgggcgctcgaccgcgggcaaggccgccgcgacccagcccgcgaagtctccgggcgcacagctctggctctttcccagcgccgcgggcctccaccgcgcgctgctccggagggtggaggtgacgcgccaactctgctgctcgccggggcgcctcgcggtcttggaacgcggcggggcgggcgtccaggttcaccagctgctcgccgggagcggcggcgcccggacgccgaaatgcattaaattaggaaaaaacatgaagatacattccgtggaccaaggagcagagcacatgctgattctctcatcagatggaaaaccatttgagtatgacaactatagcatgaaacatctaaggtttgaaagcattttacaagaaaaaaaaataattcagatcacatgtggagattaccattctcttgcactctcaaaaggtggtgagctttttgcctggggacagaacctgcatgggcagcttggagttggaaggaaatttccctcaaccaccacaccacagattgtggagcacctcgcaggagtacccttggctcagatttctgccggagaagcccacagcatggccttatccatgtctggcaacatttattcatggggaaaaaatgaatgtggacaactaggcctgggccacactgagagtaaagatgatccatcccttattgaaggactagacaatcagaaagttgaatttgtcgcttgtggtggctctcacagtgccctactcacacaggatgggctgctgtttactttcggtgctggaaaacatgggcaacttggtcataattcaacacagaatgagctaagaccctgtttggtggctgagcttgttgggtatagagtgactcagatagcatgtggaaggtggcacacacttgcctatgtttctgatttgggaaaggtcttttcctttggttctggaaaagatggacaactgggaaatggtggaacacgtgaccagctgatgccgcttccagtgaaagtatcatcaagtgaagaactcaaacttgaaagccatacctcagaaaaggagttaataatgattgctggagggaatcaaagcattttgctctggataaagaaagagaattcatatgttaatctgaagaggacaattcctactctgaatgaagggactgtaaagagatggattgctgatgtggagactaaacggtggcagagcacaaaaagggaaatccaagagatattttcatctcctgcttgtctaactggaagttttttaaggaaaagaagaactacagaaatgatgcctgtttatttggacttaaataaagcaagaaacatcttcaaggagttaacccaaaaggactggattactaacatgataaccacctgcctcaaagataatctgctcaaaagacttccatttcattctccaccccaagaagctttagaaattttcttccttctcccagaatgtcctatgatgcatatttccaacaactgggagagccttgtggttccatttgcaaaggttgtttgtaaaatgagtgaccagtcttcactggttctggaagagtattgggcaactctgcaagaatccactttcagcaaactggtccagatgtttaaaacagccgtcatatgccagttggattactgggatgaaagtgctgaggagaatggtaatgttcaagctctcctagaaatgttgaagaagctgcacagggtaaaccaggtgaaatgtcaactacctgaaagtattttccaagtagacgaactcttgcaccgtctcaatttttttgtagaagtatgcagaaggtacttgtggaaaatgactgtggacgcttcagaaaatgtacaatgctgcgtcatattcagtcactttccatttatctttaataatctgtcgaaaattaaactactacatacagacacacttttaaaaatagagagtaaaaaacataaagcttatcttaggtcggcagcaattgaggaagaaagagagtctgaattcgctttgaggcccacgtttgatctaacagtcagaaggaatcacttgattgaggatgttttgaatcagctaagtcaatttgagaatgaagacctgaggaaagagttatgggtttcatttagtggagaaattgggtatgacctcggaggagtcaagaaagagttcttctactgtctgtttgcagagatgatccagccggaatatgggatgttcatgtatcctgaaggggcttcctgcatgtggtttcctgtcaagcctaaatttgagaagaaaagatacttcttttttggggttctatgtggactttccctgttcaattgcaatgttgccaaccttcctttcccactggcactgtttaagaaacttttggaccaaatgccatcattggaagacttgaaagaactcagtcctgatttgggaaagaatttgcaaacacttctggatgatgaaggtgataactttgaggaagtattttacatccattttaatgtgcactgggacagaaacgacacaaacttaattcctaatggaagtagcataactgtcaaccagactaacaagagagactatgtttctaagtatatcaattacattttcaacgactctgtaaaggcggtttatgaagaatttcggagaggattttataaaatgtgcgacgaagacattatcaaattattccaccccgaagaactgaaggatgtgattgttggaaatacagattatgattggaaaacatttgaaaagaatgcacgttatgaaccaggatataacagttcacatcccaccatagtgatgttttggaaggctttccacaaattgactctggaagaaaagaaaaaattccttgtatttcttacaggaactgacagactacaaatgaaagatttaaataatatgaaaataacattttgctgtcctgaaagttggaatgaaagagaccctataagagcactgacatgtttcagtgtcctcttcctccctaaatattctacaatggaaacagttgaagaagcgcttcaagaagccatcaacaacaacagaggatttggctgaccagcttgcttgtccaacagccttattttgttgttgttatcgttgttgttgttgttgttgttgttgtttctctactttgttttgttttaggcttttagcagcctgaagccatggtttttcatttctgtctctagtgataagcaggaaagagggatgaagaagagggtttactggccggttagaacccgtgactgtattctctcccttggatacccctatgcctacatcatattccttacctcttttgggaaatatttttcaaaaataaaataaccgaaaaattaa

SEQ ID NO: 190592 - DNA, 3075 bp, Artificial Sequence
  derived and/or modified sequence
atggagaggaggagcaggaggaagagcagaagaaatggccgcagcacagctgggaaggctgctgccacccagcctgccaagagccctggggcccagctgtggctgttccccagcgctgctggcctgcaccgggccctgctgcggcgggtggaggtgacccggcagctgtgctgcagccctggccgcctggccgtgctggagcggggcggggccggcgtgcaggtgcaccagctgctggccggcagcggcggggcccggacccccaagtgcatcaagctgggcaagaacatgaagatccacagcgtggaccagggcgctgagcacatgctgatcctgagcagtgatggcaagccctttgaatatgacaactacagcatgaagcacctgcgctttgagagcatcctgcaggagaagaagatcatccagatcacctgtggggactaccacagcctggccctgagcaaaggaggagagctgtttgcctggggccagaacctgcacggccagctgggcgtgggcaggaagttccccagcaccaccaccccccagatcgtggagcacctggccggcgtgcccctggcccagatctctgctggggaggcccacagcatggccctgtccatgagcggcaacatctacagctggggcaagaatgaatgtggccagctgggcctgggccacacagagagcaaggatgaccccagcctgattgagggcctggacaaccagaaggtggagtttgtggcctgtggcggcagccacagcgccctgctgacccaggacggcctgctcttcacctttggagctgggaagcacggccagctgggccacaacagcacccagaatgagctgcggccctgcctggtggccgagctggtgggctacagagtgacccagatcgcctgtggccgctggcacaccctggcctacgtgtctgacctgggcaaggtgttctcctttggcagcggcaaggatggccagctgggcaatggaggcacccgggaccagctgatgcccctgcctgtgaaggtgagcagcagcgaggagctgaagctggagagccacaccagcgagaaggagctgatcatgattgctgggggcaaccagagcatcctgctgtggatcaagaaggagaacagctatgtgaacctgaagaggaccatccccaccctgaatgaaggaacagtgaagcgctggattgctgatgtggagaccaagcgctggcagagcaccaagcgggagatccaggagatcttcagcagccctgcctgcctgaccggcagcttcctgaggaagaggaggaccacagagatgatgcctgtgtacctggacctgaacaaggccaggaacatcttcaaggagctgacccagaaggactggatcaccaacatgatcaccacctgcctgaaggacaacctgctgaagaggctgcccttccacagccccccccaggaggccctggagatcttcttcctgctgcctgaatgtcccatgatgcacatcagcaacaactgggagagcctggtggtgccctttgccaaggtggtgtgcaagatgtctgaccagagcagcctggtgctggaggagtactgggccaccctgcaggagagcaccttcagcaagctggtgcagatgttcaagacagctgtgatctgccagctggactactgggatgagagcgcagaagaaaatggaaatgtgcaggccctgctggagatgctgaagaagctgcaccgggtgaaccaggtgaagtgccagctgcctgagagcatcttccaggtggatgagctgctgcaccggctgaacttctttgtggaggtgtgccgccgctacctgtggaagatgacagtggatgcctctgaaaatgtgcagtgctgcgtcatcttcagccacttccccttcatcttcaacaacctgagcaagatcaagctgctgcacacagacaccctgctgaagattgagagcaagaagcacaaggcctacctgcggtctgctgccatcgaggaggagcgggagagcgagtttgccctgcggcccacctttgacctgactgtgagaagaaaccacctgattgaagatgtgctgaaccagctgagccagtttgaaaatgaagacctgaggaaggagctgtgggtgtccttctctggagagatcggctatgacctgggcggcgtgaagaaggagttcttctactgcctgtttgctgagatgatccagccagaatatggcatgttcatgtacccagagggcgccagctgcatgtggttccctgtgaagcccaagtttgagaagaagcgctacttcttcttcggcgtgctgtgtggcctgagcctcttcaactgcaatgtggccaacctgcccttccccctggccctcttcaagaagctgctggaccagatgcccagcctggaggacctgaaggagctgagcccagacctgggcaagaacctgcagaccctgctggatgatgaaggagacaactttgaggaggtgttctacatccacttcaacgtgcactgggacagaaatgacaccaacctgatccccaacggcagcagcatcaccgtgaaccagaccaacaagagggactatgtgtccaagtacatcaactacatcttcaatgacagcgtgaaggctgtgtatgaggagttcagaagaggcttctacaagatgtgtgatgaggacatcatcaagctgttccaccctgaggagctgaaggatgtgattgtgggcaacacagattatgactggaagacctttgagaagaatgcccgctatgagcccggctacaacagcagccaccccaccatcgtgatgttctggaaggccttccacaagctgaccctggaggagaagaagaagttcctggtgttcctgaccggcacagaccggctgcagatgaaggacctgaacaacatgaagatcaccttctgctgcccagagagctggaatgaaagagaccccatccgggccctgacctgcttctctgtgctcttcctgcccaagtacagcaccatggagaccgtggaggaggccctgcaggaggccatcaacaacaacagaggatttggatag

SEQ ID NO: 190593 - DNA, 3075 bp, Artificial Sequence
  derived and/or modified sequence
atggagcggcggagccggcggaagagccggcggaacggccggagcacagctggtaaagcagccgccacacagcccgccaagtcgcctggagctcagttatggctgttccccagtgcggccggtctacacagggcattgctgcggagggtagaagtaacgcgtcagctatgctgcagccctggacgtctagccgtcctcgaaagaggaggcgccggcgtccaggtgcatcagttgcttgcaggaagcgggggcgcccgcacccccaaatgcataaagcttggaaagaatatgaaaatacattccgttgaccagggcgccgagcacatgctgatcctgtcatccgacggcaaaccctttgagtatgataactacagtatgaagcatttgcggtttgagtcgattctgcaggagaagaaaatcatacagatcacttgcggtgactatcactcgctcgccttaagtaagggcggcgaactgttcgcatgggggcaaaatttacatgggcagctcggcgttggacgaaaatttccatccaccaccactccacagatcgtggaacacttggccggcgtgccactggcacagatcagcgccggcgaggctcactccatggccctgtcaatgtctggcaacatatacagctgggggaagaacgagtgcggtcaactcggactgggtcacaccgagagcaaggacgacccatccctgatcgaggggcttgacaatcagaaggtggagttcgtggcatgcggtggatcccacagcgcacttctgactcaggatggccttctctttacttttggcgctggcaaacatggccagctgggtcataactctacccagaacgagctgcgaccctgcctcgtggccgaactggtgggttatagggttacccagatcgcctgtggccgctggcatactttggcatatgtgagcgatctggggaaggtgttcagcttcggaagtggaaaggatggccagctgggaaatgggggcacacgtgatcagctgatgcctttgccagtcaaggtctcctcttccgaagagctgaaactggaatcgcacacctctgaaaaagaattgatcatgatagcagggggcaatcagtctatactcttgtggattaagaaggagaactcatatgtaaatctgaaacggaccattccaaccctaaacgaaggaacggtcaagagatggattgctgatgtcgagaccaaacgctggcagtcaaccaagcgcgagatccaagagatcttctcttctcctgcctgcctaacggggtcttttctgcggaagaggagaaccactgagatgatgcctgtgtacctggatctcaataaggctcggaatatctttaaggagctgacccagaaggactggattaccaatatgatcaccacatgtttgaaagataatctgctaaagcggctgccattccattcgccaccacaggaggctcttgaaatattttttctattgcccgaatgccccatgatgcatatatcgaataattgggagtccctggtagtgccctttgctaaagtagtctgcaagatgtcagatcagtcctcgctggttcttgaggagtactgggctactttgcaggaatcaaccttttctaagttggtccagatgttcaaaacagcagtaatctgccagctagactactgggacgaaagtgcagaagaaaatgggaatgtgcaggccctccttgagatgttgaagaagcttcaccgcgttaatcaggtgaagtgccagttgcccgaatccatattccaggtggacgagttacttcaccgcctcaactttttcgtggaggtctgccgccgctacctctggaaaatgaccgttgacgccagcgaaaacgtgcagtgttgtgtgattttttctcacttccctttcatttttaataatttgtctaagatcaagttattacacacagacaccctgctgaagatcgagtccaagaagcataaggcctatcttcgctcagcagctatcgaggaggagcgcgagagtgaattcgctctccgcccaacatttgacctgacagtcaggaggaaccaccttatagaggacgtgttaaaccagctgagtcagttcgagaacgaagatctcagaaaagagttatgggtgagcttctctggtgagatcgggtatgatctgggaggggtgaagaaggagtttttctactgtctgttcgctgagatgatccagcctgaatatggcatgtttatgtacccagaaggtgctagctgtatgtggtttccggtcaagccaaaatttgaaaaaaaacggtatttcttctttggcgtgctgtgcggactgagcctcttcaactgcaacgtcgccaacctcccgttcccccttgcactctttaaaaagttgttagatcaaatgcctagcttggaggacttgaaggaactatctccagacctggggaagaacttgcagacattgctggatgacgaaggtgataatttcgaagaagttttttacatccacttcaatgtgcactgggacagaaacgacaccaatttgatcccgaatgggtcttccattacagtgaatcagactaacaaacgtgactatgtgagcaagtatatcaactatatattcaacgactccgtgaaagccgtgtatgaagagttcaggcgtggtttctataagatgtgtgacgaggatattataaaactttttcatccagaggagctgaaggatgtgatcgtcggcaataccgattatgactggaaaaccttcgaaaagaacgcacgatatgaacctggctacaatagttctcacccgacaatcgttatgttctggaaggcattccacaaactgactctggaagagaaaaaaaagttcttggtgttcctgacaggtacagaccgactgcagatgaaagatcttaataacatgaagatcacattctgttgtcctgagtcctggaacgagagagacccaatccgggctctgacatgcttctccgtgctgttccttccaaaatacagcaccatggaaactgtcgaggaggccttgcaggaggctattaacaataataggggtttcggatag

SEQ ID NO: 190594 - DNA, 3075 bp, Artificial Sequence
  derived and/or modified sequence
atggagaggcgctctaggcgtaagtccagaaggaacggaagatccaccgcaggcaaggctgctgccactcagcccgcaaaatctcccggagctcagctgtggctttttccgagtgctgccggactgcatcgtgccctgctgcgccgagtggaagtgaccagacagctgtgttgctccccaggtcgactggccgttctggagcggggtggggcaggcgtccaggtacatcagctcttggcaggaagcggcggagcgcgtacgcccaaatgtattaaattgggcaagaatatgaagatccactccgtggaccagggcgctgagcacatgctgatcttgtctagtgacggcaaaccatttgagtatgacaactattcaatgaagcatctgcgcttcgagtctattctgcaggagaagaaaatcatccaaataacgtgcggcgattatcatagcctggcgctgtccaaaggcggagaactattcgcttgggggcagaaccttcacggtcagctaggtgtgggcaggaaatttccgagcaccaccacacctcaaattgtggagcatcttgccggtgtccccctggcacagatcagtgcaggcgaagcccactctatggccctgtcgatgtccgggaatatttattcatggggtaaaaacgaatgcggtcagctgggcctgggtcacacagagtctaaagatgatccttctctgattgaaggactcgataatcagaaagtggagttcgtggcatgcgggggatctcacagcgctctcttgactcaggacgggctgctgtttacttttggcgcaggaaagcatggacagttgggccacaacagtacccagaacgagctccgtccgtgcctagtggccgagttagttggatatcgtgtgacccagatcgcttgcgggagatggcacacacttgcctacgtttccgatctgggaaaagtgtttagtttcggcagcgggaaagatgggcagctgggaaatgggggaacaagagaccagcttatgcccttgcccgtaaaagtgtccagtagtgaagaactgaagcttgagtcccacacaagcgagaaagagctgatcatgatcgccggtggtaatcagagcatcctcctgtggattaagaaagaaaactcatatgtgaacctcaagcgtactattcctactttgaacgagggtaccgtgaagagatggatcgcagacgtcgagaccaagagatggcaatcaacaaagcgggagatccaggagatcttctcttctccagcttgcctaacaggttcattcctgaggaaacgccgtacaacagagatgatgcctgtctatctggatctaaataaggccaggaacattttcaaagaattgacacagaaggattggatcaccaacatgattactacttgtttaaaggataacctgctgaaacgtctgccgttccactctcctccccaggaggcacttgaaatattttttctgctgccggaatgtccaatgatgcacatcagtaataattgggaatctctggtcgtgccattcgcaaaggtggtatgcaaaatgagtgatcagtcctccctcgtcctggaggaatactgggccactctgcaggagtctacgttcagtaaacttgtacaaatgttcaagactgcggttatctgccagttggattactgggacgagtccgctgaggagaatggcaacgtgcaggcgcttctcgaaatgctgaagaaactccacagggtcaatcaggttaaatgccagttgcccgaatcaatctttcaggtggatgagctgctgcaccggctcaatttctttgtagaagtatgtcgacgatacctttggaagatgaccgtggatgcctctgagaatgttcaatgctgcgtaatattttctcacttccctttcatcttcaacaatctcagcaaaataaagctgcttcatactgacacactgttgaaaatcgaatctaaaaagcacaaagcttacctaagatcagccgcaatcgaagaagagagggaatctgaattcgccttgagaccgaccttcgatctgaccgtgagacgaaatcatcttatcgaagacgtgctgaatcagctctcccaatttgagaatgaagatctgcgcaaagagctctgggttagcttctctggggagatcggctatgatttagggggtgtgaaaaaggaattcttttattgtctgtttgcagaaatgatccagcccgagtacggaatgttcatgtatccggagggcgcttcctgtatgtggtttcctgtgaagcccaagttcgaaaagaaaaggtattttttctttggcgtcctgtgtgggctgtccctgtttaactgcaacgtagctaacctccctttcccactcgctttgttcaaaaagctgctggatcaaatgccatcactcgaagatttaaaggagttgagcccggacctcggcaagaacttgcagacccttttagacgacgagggcgataattttgaggaggtgttctacattcacttcaacgtgcactgggatagaaatgataccaatctcatccctaatggcagcagtattacagtaaaccagaccaacaaacgggactacgtatcaaagtacatcaactatattttcaacgactctgttaaagcggtgtacgaggagttccgcaggggattctacaagatgtgtgacgaggacatcatcaaactgtttcatcccgaggagctgaaagatgtgattgtcgggaatacagactatgattggaaaacgtttgagaagaacgctcggtacgagccgggatataatagctcacatcctactatcgtgatgttctggaaggctttccataagctgacgctcgaagaaaaaaagaagttcttggttttcctaactggcacagatagattgcagatgaaggatctgaataatatgaaaatcactttctgttgtccggaaagttggaatgaacgggaccccattcgggctctcacctgcttttctgtgctgttcctcccgaagtacagcaccatggaaaccgtcgaagaagcactacaggaagcaataaacaacaacagggggttcggatag

SEQ ID NO: 190595 - DNA, 3075 bp, Artificial Sequence
  derived and/or modified sequence
atggagagaagaagcagaagaaagagcagaagaaacggcagaagcaccgccggcaaggccgccgccacccagcccgccaagagccccggcgcccagctgtggctgttccccagcgccgccggcctgcacagagccctgctgagaagagtggaggtgaccagacagctgtgctgcagccccggcagactggccgtgctggagagaggcggcgccggcgtgcaggtgcaccagctgctggccggcagcggcggcgccagaacccccaagtgcatcaagctgggcaagaacatgaagatccacagcgtggaccagggcgccgagcacatgctgatcctgagcagcgacggcaagcccttcgagtacgacaactacagcatgaagcacctgagattcgagagcatcctgcaggagaagaagatcatccagatcacctgcggcgactaccacagcctggccctgagcaagggcggcgagctgttcgcctggggccagaacctgcacggccagctgggcgtgggcagaaagttccccagcaccaccaccccccagatcgtggagcacctggccggcgtgcccctggcccagatcagcgccggcgaggcccacagcatggccctgagcatgagcggcaacatctacagctggggcaagaacgagtgcggccagctgggcctgggccacaccgagagcaaggacgaccccagcctgatcgagggcctggacaaccagaaggtggagttcgtggcctgcggcggcagccacagcgccctgctgacccaggacggcctgctgttcaccttcggcgccggcaagcacggccagctgggccacaacagcacccagaacgagctgagaccctgcctggtggccgagctggtgggctacagagtgacccagatcgcctgcggcagatggcacaccctggcctacgtgagcgacctgggcaaggtgttcagcttcggcagcggcaaggacggccagctgggcaacggcggcaccagagaccagctgatgcccctgcccgtgaaggtgagcagcagcgaggagctgaagctggagagccacaccagcgagaaggagctgatcatgatcgccggcggcaaccagagcatcctgctgtggatcaagaaggagaacagctacgtgaacctgaagagaaccatccccaccctgaacgagggcaccgtgaagagatggatcgccgacgtggagaccaagagatggcagagcaccaagagagagatccaggagatcttcagcagccccgcctgcctgaccggcagcttcctgagaaagagaagaaccaccgagatgatgcccgtgtacctggacctgaacaaggccagaaacatcttcaaggagctgacccagaaggactggatcaccaacatgatcaccacctgcctgaaggacaacctgctgaagagactgcccttccacagccccccccaggaggccctggagatcttcttcctgctgcccgagtgccccatgatgcacatcagcaacaactgggagagcctggtggtgcccttcgccaaggtggtgtgcaagatgagcgaccagagcagcctggtgctggaggagtactgggccaccctgcaggagagcaccttcagcaagctggtgcagatgttcaagaccgccgtgatctgccagctggactactgggacgagagcgccgaggagaacggcaacgtgcaggccctgctggagatgctgaagaagctgcacagagtgaaccaggtgaagtgccagctgcccgagagcatcttccaggtggacgagctgctgcacagactgaacttcttcgtggaggtgtgcagaagatacctgtggaagatgaccgtggacgccagcgagaacgtgcagtgctgcgtgatcttcagccacttccccttcatcttcaacaacctgagcaagatcaagctgctgcacaccgacaccctgctgaagatcgagagcaagaagcacaaggcctacctgagaagcgccgccatcgaggaggagagagagagcgagttcgccctgagacccaccttcgacctgaccgtgagaagaaaccacctgatcgaggacgtgctgaaccagctgagccagttcgagaacgaggacctgagaaaggagctgtgggtgagcttcagcggcgagatcggctacgacctgggcggcgtgaagaaggagttcttctactgcctgttcgccgagatgatccagcccgagtacggcatgttcatgtaccccgagggcgccagctgcatgtggttccccgtgaagcccaagttcgagaagaagagatacttcttcttcggcgtgctgtgcggcctgagcctgttcaactgcaacgtggccaacctgcccttccccctggccctgttcaagaagctgctggaccagatgcccagcctggaggacctgaaggagctgagccccgacctgggcaagaacctgcagaccctgctggacgacgagggcgacaacttcgaggaggtgttctacatccacttcaacgtgcactgggacagaaacgacaccaacctgatccccaacggcagcagcatcaccgtgaaccagaccaacaagagagactacgtgagcaagtacatcaactacatcttcaacgacagcgtgaaggccgtgtacgaggagttcagaagaggcttctacaagatgtgcgacgaggacatcatcaagctgttccaccccgaggagctgaaggacgtgatcgtgggcaacaccgactacgactggaagaccttcgagaagaacgccagatacgagcccggctacaacagcagccaccccaccatcgtgatgttctggaaggccttccacaagctgaccctggaggagaagaagaagttcctggtgttcctgaccggcaccgacagactgcagatgaaggacctgaacaacatgaagatcaccttctgctgccccgagagctggaacgagagagaccccatcagagccctgacctgcttcagcgtgctgttcctgcccaagtacagcaccatggagaccgtggaggaggccctgcaggaggccatcaacaacaacagaggcttcggctag

SEQ ID NO: 190596 - protein, 620 aa, Artificial Sequence
  derived and/or modified sequence
MASRLPTAWSCEPVTFEDVTLGFTPEEWGLLDLKQKSLYREVMLENYRNLVSVEYPELQLDPKLDPLPAESPLMNIEVVEVLTLNQEVAGPRNAQIQALYAEDGSLSADAPSEQVQQQGKHPGDPEAARQRFRQFRYKDMTGPRELDQLRELCHQWLQPKARSKEQILELLVLEQFLGALPVKLRTWVESQHPENCQEVVALVEGVTWMSEEEVLPAGQPAEGTTCCLEVTAQQEEKQEDAAICPVTVLPEEPVTFQDVAVDFSREEWGLLGPTQRTEYRDVMLETFGHLVSVGWETTLENKELAPNSDIPEEEPAPSLKVQESSRDCALSSTLEDTLQGGVQEVQDTVLKQMESAQEKDLPQKKHFDNRESQANSGALDTNQVSLQKIDNPESQANSGALDTNQVLLHKIPPRKRLRKRDSQVKSMKHNSRVKIHQKSCERQKAKEGNGCRKTFSRSTKQITFIRIHKGSQVCRCSECGKIFRNPRYFSVHKKIHTGERPYVCQDCGKGFVQSSSLTQHQRVHSGERPFECQECGRTFNDRSAISQHLRTHTGAKPYKCQDCGKAFRQSSHLIRHQRTHTGERPYACNKCGKAFTQSSHLIGHQRTHNRTKRKKKQPTS

SEQ ID NO: 190597 - DNA, 1863 bp, Artificial Sequence
  derived and/or modified sequence
atggccagcagactgcccaccgcctggagctgcgagcccgtgaccttcgaggacgtgaccctgggcttcacccccgaggagtggggcctgctggacctgaagcagaagagcctgtacagagaggtgatgctggagaactacagaaacctggtgagcgtggagtaccccgagctgcagctggaccccaagctggaccccctgcccgccgagagccccctgatgaacatcgaggtggtggaggtgctgaccctgaaccaggaggtggccggccccagaaacgcccagatccaggccctgtacgccgaggacggcagcctgagcgccgacgcccccagcgagcaggtgcagcagcagggcaagcaccccggcgaccccgaggccgccagacagagattcagacagttcagatacaaggacatgaccggccccagagagctggaccagctgagagagctgtgccaccagtggctgcagcccaaggccagaagcaaggagcagatcctggagctgctggtgctggagcagttcctgggcgccctgcccgtgaagctgagaacctgggtggagagccagcaccccgagaactgccaggaggtggtggccctggtggagggcgtgacctggatgagcgaggaggaggtgctgcccgccggccagcccgccgagggcaccacctgctgcctggaggtgaccgcccagcaggaggagaagcaggaggacgccgccatctgccccgtgaccgtgctgcccgaggagcccgtgaccttccaggacgtggccgtggacttcagcagagaggagtggggcctgctgggccccacccagagaaccgagtacagagacgtgatgctggagaccttcggccacctggtgagcgtgggctgggagaccaccctggagaacaaggagctggcccccaacagcgacatccccgaggaggagcccgcccccagcctgaaggtgcaggagagcagcagagactgcgccctgagcagcaccctggaggacaccctgcagggcggcgtgcaggaggtgcaggacaccgtgctgaagcagatggagagcgcccaggagaaggacctgccccagaagaagcacttcgacaacagagagagccaggccaacagcggcgccctggacaccaaccaggtgagcctgcagaagatcgacaaccccgagagccaggccaacagcggcgccctggacaccaaccaggtgctgctgcacaagatcccccccagaaagagactgagaaagagagacagccaggtgaagagcatgaagcacaacagcagagtgaagatccaccagaagagctgcgagagacagaaggccaaggagggcaacggctgcagaaagaccttcagcagaagcaccaagcagatcaccttcatcagaatccacaagggcagccaggtgtgcagatgcagcgagtgcggcaagatcttcagaaaccccagatacttcagcgtgcacaagaagatccacaccggcgagagaccctacgtgtgccaggactgcggcaagggcttcgtgcagagcagcagcctgacccagcaccagagagtgcacagcggcgagagacccttcgagtgccaggagtgcggcagaaccttcaacgacagaagcgccatcagccagcacctgagaacccacaccggcgccaagccctacaagtgccaggactgcggcaaggccttcagacagagcagccacctgatcagacaccagagaacccacaccggcgagagaccctacgcctgcaacaagtgcggcaaggccttcacccagagcagccacctgatcggccaccagagaacccacaacagaaccaagagaaagaagaagcagcccaccagctag

SEQ ID NO: 190598 - DNA, 1863 bp, Artificial Sequence
  derived and/or modified sequence
atggccagtcggctacccacagcctggtcttgtgagccggttacattcgaggatgtgacacttggctttacccctgaagagtggggcctgctggatctcaaacagaagtctctgtatagggaggtaatgttggagaattaccggaacctggtgtctgtcgaatatccagaactgcagttagatccaaaactcgacccgctgcctgctgagtccccactgatgaatattgaggttgtggaggtcctaacactgaatcaagaggtggctggtccaaggaacgcacagatccaagcattatatgccgaagatggttccttaagtgcagatgctcccagtgagcaggtgcaacagcagggaaaacaccccggagacccagaggcagcccgacagagattcaggcagtttaggtacaaagacatgacagggcctcgtgagctggaccaactacgcgaactttgtcaccagtggttacagccgaaagcgagaagtaaagagcaaattttggaacttcttgttctggaacagtttctgggagcgttgcccgttaaactgagaacatgggttgagtctcaacacccagagaattgtcaagaagtggtagccctcgtggagggggtcacgtggatgtccgaagaggaggtgctgcccgccggacagccagccgaagggacgacatgctgtttagaagtcactgcccagcaggaagagaagcaggaggatgctgctatttgcccagtaacggtattaccggaggagccagtcacatttcaggacgtggccgtggacttcagccgtgaggagtggggtctcctgggtccaacacagcgtactgagtatcgcgacgttatgctggagacattcggtcatcttgtgtcagttggctgggagactacgctggagaataaggagctggctcccaatagcgacatcccagaggaagagcctgctccttcacttaaggtgcaggagagctcaagagattgcgccctttctagcaccttggaggatacgctgcaggggggcgtgcaagaagtgcaagacaccgtgctcaagcaaatggagagtgcacaggaaaaagacttaccccagaagaagcactttgataacagagagagtcaagctaattctggtgccctagataccaaccaggtgtcactccagaagatagataatcctgaaagtcaggccaacagcggtgcactggatacaaatcaggtactgctacacaagataccaccccgcaagcgactccgtaaacgggattcgcaggtgaagagcatgaagcacaacagcagagtcaaaattcaccagaagtcgtgtgagcggcagaaggcaaaggagggcaacgggtgtcgaaagacgttctcccgcagcaccaaacaaatcactttcattcgcattcacaaagggtcacaggtctgcaggtgcagcgaatgcggtaaaatcttccgcaatccgaggtacttctctgttcataaaaaaatacacacaggtgaacgtccctatgtttgtcaggactgtggcaagggatttgtgcagagttcttcactcacacagcaccagagggtgcactctggtgagcgcccattcgaatgtcaagagtgcggccggacgttcaacgaccgcagtgctatatcacaacatttgcggactcatacaggagcaaaaccatataagtgccaagactgtgggaaagcctttcggcagtctagccacctaataaggcatcagcgcacccacaccggagagcgcccatatgcttgcaataaatgcggcaaggctttcacccaaagcagccacttaataggccaccagcgcacacacaacagaacaaaacgaaagaagaagcagcctacatcttag

SEQ ID NO: 190599 - DNA, 1863 bp, Artificial Sequence
  derived and/or modified sequence
atggccagccggctgcccacagcctggagctgtgagcctgtgacctttgaagatgtgaccctgggcttcaccccagaggagtggggcctgctggacctgaagcagaagagcctgtaccgggaggtgatgctggagaactacagaaacctggtgtctgtggagtacccagagctgcagctggaccccaagctggaccccctgcctgctgagagccccctgatgaacatcgaggtggtggaggtgctgaccctgaaccaggaggtggccggccccagaaatgcccagatccaggccctgtatgcagaagatggcagcctgtctgcagatgcccccagcgagcaggtgcagcagcagggcaagcaccctggggaccctgaggccgcccggcagcgcttccggcagttccgctacaaggacatgacaggcccccgggagctggaccagctgcgggagctgtgccaccagtggctgcagcccaaggcccggagcaaggagcagatcctggagctgctggtgctggagcagttcctgggcgccctgcctgtgaagctgcggacctgggtggagagccagcaccctgagaactgccaggaggtggtggccctggtggagggcgtgacctggatgtctgaggaggaggtgctgcctgctggccagcctgctgagggcaccacctgctgcctggaggtgacagcccagcaggaggagaagcaggaggatgctgccatctgccctgtgacagtgctgcctgaggagcctgtgaccttccaggatgtggccgtggacttcagccgggaggagtggggcctgctgggccccacccagaggacagagtacagagatgtgatgctggagaccttcggccacctggtgtctgtgggctgggagaccaccctggagaacaaggagctggcccccaacagcgacatccctgaggaggagcccgcccccagcctgaaggtgcaggagagcagccgggactgtgccctgagcagcaccctggaggacaccctgcagggcggcgtgcaggaggtgcaggacacagtgctgaagcagatggagagcgcccaggagaaggacctgccccagaagaagcactttgacaaccgggagagccaggccaacagcggggccctggacaccaaccaggtgtccctgcagaagattgacaaccctgagagccaggccaacagcggggccctggacaccaaccaggtgctgctgcacaagatcccccccaggaagaggctgaggaagagggacagccaggtgaagtccatgaagcacaacagccgggtgaagatccaccagaagagctgtgagcggcagaaggccaaggagggcaatggctgcaggaagaccttcagccgcagcaccaagcagatcaccttcatccgcatccacaagggcagccaggtgtgccgctgcagtgaatgtgggaagatcttcaggaacccccgctacttctctgtgcacaagaagatccacactggagagcggccctacgtgtgccaggactgtgggaaaggatttgtgcagagcagcagcctgacccagcaccagagggtgcacagcggggagcggccctttgagtgccaggagtgtggccgcaccttcaatgacagaagtgccatcagccagcacctgcggacccacactggagccaagccctacaagtgccaggactgtgggaaggccttccggcagagcagccacctgatccgccaccagaggacccacactggagagcggccctatgcctgcaacaagtgtgggaaggccttcacccagagcagccacctgattggccaccagaggacccacaacagaaccaagaggaagaagaagcagcccaccagctag

SEQ ID NO: 190600 - DNA, 1863 bp, Artificial Sequence
  derived and/or modified sequence
atggccagccggctgcccaccgcctggagctgcgagcccgtgacctttgaagatgtaaccctgggctttacacccgaggaatggggtctgctggacctgaagcagaaatccctttaccgggaagttatgctggagaattatagaaaccttgtctctgtggaatacccagagctccagttggatccaaagctggatcccttgccagcagagagccctctgatgaatatcgaggtggttgaggtgctaactttgaatcaggaagtagctggtcccaggaacgcccagattcaagccttgtatgcagaggacggcagccttagcgccgatgccccttcagagcaagtccagcagcaaggcaaacaccctggcgaccccgaagccgcaagacagagatttagacaattcagatacaaggatatgaccgggccacgggagctcgatcagctgagagaattgtgccatcaatggctacaacccaaagccagaagcaaggagcagatattagagcttttggtgttagagcagtttctcggcgcactgccagtgaaactgaggacatgggtggaaagccagcaccccgaaaactgtcaagaagttgttgctctcgtcgaaggcgtgacttggatgagtgaggaagaggtcctcccagccggccagcccgctgagggaactacctgctgcttggaagtgactgcgcagcaggaggagaagcaggaggatgcagccatatgtcccgtcaccgtcctacccgaggagccagtcacctttcaggacgttgctgtggactttagcagagaggaatggggcctgctgggacccacccaaaggaccgaatacagggacgtgatgttggagacatttgggcaccttgtatccgtaggatgggaaacaactctggaaaataaagagctcgctccaaacagtgatatccccgaagaggagcccgcacctagcctcaaggtgcaggagtcgtcacgggactgtgcactgagttccacgctcgaggatacgctacaaggtggggtacaggaggtgcaagacacagtacttaaacagatggaatctgctcaagagaaggacttaccgcagaagaaacacttcgacaatcgcgagagccaggccaattcaggagccctggacactaaccaggtgtcactgcaaaaaattgacaaccccgagtctcaagctaactcaggcgccttagacacgaatcaggttctgctccataagatcccgccccgcaagcgcctgaggaaaagagactcacaggtgaagagtatgaagcacaattcgcgagtcaaaattcatcagaaaagctgcgaacggcagaaggctaaggaaggtaacggctgccggaaaaccttctcccgatctactaaacagataacctttattaggatccataagggatcccaagtatgccgctgtagtgagtgtggtaagatctttagaaatccacggtatttctctgtgcacaagaagattcacacaggcgagagaccctatgtctgccaggactgtggtaaaggcttcgtccagagttcctcccttacccagcaccagagagtgcattcaggggaaagaccctttgagtgtcaggaatgtggaagaaccttcaatgacagatcagccatcagtcaacacctgagaacccacaccggagccaaaccgtataagtgtcaagattgtggaaaggcattcaggcagagctcccatctgattcgacaccaacgcacccatacaggagaacgaccatacgcatgtaacaagtgcggcaaagcctttacgcagtcttcgcacctgatagggcatcaacgtacacataatagaaccaagcgcaaaaagaaacaacccaccagctag

SEQ ID NO: 190601 - DNA, 1863 bp, Artificial Sequence
  derived and/or modified sequence
atggcctccagactgccgactgcttggtcctgcgaacctgtgacttttgaggacgtgacactcggcttcacacccgaggagtggggtcttctggacttaaaacaaaagtcactatacagagaagtgatgttagagaattacaggaacctggtgagcgttgagtaccccgagctgcagctcgaccctaaactggaccccctcccagccgaatccccactgatgaatattgaggtagtggaagtactcacgctgaatcaggaagttgcaggtccaagaaatgcccagattcaagccctgtatgctgaggatggctccctgtcagctgacgcccctagcgaacaagtacagcaacaaggtaagcaccctggcgaccccgaggctgccagacagcgcttcaggcagtttcggtacaaagacatgacaggaccgcgagagctggatcagttgagggaactgtgccaccaatggctccaacctaaagcccgtagcaaggagcagattttggaacttctggtgttggagcagtttctgggcgctctgccagtgaaactgcggacttgggtcgaatctcaacatcccgaaaactgccaggaggtggttgccctcgtggaaggcgtgacatggatgtctgaggaggaggtgctgcctgccggtcaaccagcggaagggaccacatgttgcctggaggtgacagcccagcaggaagagaaacaagaggacgctgccatctgtcccgtgaccgttctgcccgaagaacccgttacattccaggatgtcgcagtcgacttcagccgagaagagtgggggctactcggcccaacccagagaactgagtacagagacgttatgctggagactttcggacacttagtgtcagtgggatgggaaactactctcgagaacaaagagctggcccctaatagcgacataccggaagaagagcccgcaccctctcttaaggtccaagagtctagtagggattgcgcactttcgtcgactctcgaggatacactccaggggggtgttcaggaggtgcaagacacggtcttgaagcagatggagtctgcccaggagaaagatctcccccagaaaaaacacttcgacaacagagagtctcaggccaactctggagcactggacactaaccaggtgtccctgcaaaaaattgataacccggaatctcaagccaactccggtgccctggacaccaaccaggtgcttcttcataagattcctcctcgcaaacggctacggaagcgcgacagtcaggtgaagtctatgaagcataacagtagggtgaagattcaccaaaaatcatgcgagagacagaaagccaaagagggtaacggctgcaggaaaacatttagtaggtcaacaaagcagatcactttcatccggattcataagggctcacaagtatgtcggtgtagcgagtgcgggaagattttccgcaacccgaggtatttcagcgtccacaaaaagatacatacaggcgaacgcccttacgtttgtcaggactgtgggaagggctttgtccagagcagtagccttactcagcaccagcgggttcactctggagaacgccctttcgaatgtcaggagtgtggacgtaccttcaacgacagatcggctatttcccagcatctgaggacacatacaggggctaagccatacaagtgtcaggactgcggcaaggctttcaggcagagctcacatctcattcgacatcagcgaacccatactggagaacggccatacgcctgcaacaagtgtgggaaggcctttacccagagcagtcacttgattggacaccagcgtacacacaatcggacaaaacgcaagaaaaaacaacctacttcttag

SEQ ID NO: 190602 - DNA, 2740 bp, Artificial Sequence
  derived and/or modified sequence
cgcccccaccgccacccaaccaagcatcacccattccagcacttccggcctgacccctgtccagcgcctttcctttctccagcttctgctctgccccaagagtggtcgccttcgtggcagggcacgactctctcccagctcgggtcgccgcccacattagtgtggggccctgcggcctagcgtccctcaccagaggcctccccttgcctagctggaccgccgagggacatcgacgagtatcctcctcctgctgtccccggcttcgcctgccgcccctaaccggccagtcaagatggccgccgctgggtgaggcaagctggcgcgccgcgggggcgtctgggagttgtagttcgggacggcgggctgacgcacttcgccgccggccgacgggcgccattgtgcggcgcgcgccgggactctgcccacttccaccagagacacattgagaaggaggaaactatggcctccaggcttccgacggcctggtcctgtgaaccagtgacctttgaagatgtaacactgggttttaccccggaagagtggggactgctggacctcaaacagaagtccctgtacagggaagtgatgctggagaactacaggaacctggtctcagtggagtatcctgagctccagctggaccctaaattggatcctcttcctgctgagagtcccctaatgaacattgaggttgttgaggtcctcacactgaaccaggaggtggctggtccccggaatgcccagatccaggccctatatgctgaagatggaagcctgagtgcagatgcccccagtgagcaggtccaacagcagggcaagcatccaggtgaccctgaggccgcgcgccagaggttccggcagttccgttataaggacatgacaggtccccgggagctggaccagctccgagagctgtgtcaccagtggctacagcctaaggcacgctccaaggagcagatcctggagctgctggtgctggagcagttcctaggtgcactgcctgtgaagctccggacatgggtggaatcgcagcacccagagaactgccaagaggtggtggccctggtagagggtgtgacctggatgtctgaggaggaagtacttcctgcaggacaacctgccgagggcaccacctgctgcctcgaggtcactgcccagcaggaggagaagcaggaggatgcagccatctgcccagtgacagtgctccctgaggagccagtgaccttccaggatgtggctgtggacttcagccgggaggagtgggggctgctgggcccgacacagaggaccgagtaccgcgatgtgatgctggagacctttgggcacctggtctctgtggggtgggagactacactggaaaataaagagttagctccaaattctgacattcctgaggaagaaccagcccccagcctgaaagtacaagaatcctcaagggattgtgccttgtcctctacattagaagataccttgcagggtggggtccaggaagtccaagacacagtgttgaagcagatggagtctgctcaggaaaaagaccttcctcagaagaagcactttgacaaccgtgagtcccaggcaaacagtggtgctcttgacacaaaccaagtttcgctccagaaaattgacaaccctgagtcccaggcaaacagtggcgctcttgacacaaaccaagttttgctccacaaaattcctcctagaaaacgattgcgcaaacgtgactcacaagttaaaagtatgaaacataattcacgtgtaaaaattcatcagaagagctgtgaaaggcaaaaggccaaggaaggcaatggttgtaggaaaaccttcagtcggagtactaaacagattacgtttataagaattcacaaggggagccaagtttgccgatgcagtgaatgtggtaaaatattccggaacccaagatacttttctgtgcataagaaaatccataccggagagaggccctatgtgtgtcaagactgtgggaaaggatttgttcagagctcttccctcacacagcatcagagagttcattctggagagagaccatttgaatgtcaggagtgtgggaggaccttcaatgatcgctcagccatctcccagcacctgaggactcacactggcgctaagccctacaagtgtcaggactgtggaaaagccttccgccagagctcccacctcatcagacatcagaggactcacaccggggagcgcccatatgcatgcaacaaatgtggaaaggccttcacccagagctcacaccttattgggcaccagagaacccacaataggacaaagcgaaagaagaaacagcctacctcatagctctcaagccagttgaagaaaccttgccttttcagcttgaccctgcaatataacatgcacaggcctgcttgtgaatcaggactgaatgtgaaagggaagtattgagtgaggacattcccaaaaccaaaggacaactgaggagactgcccagcacataatgaataaataagaaaatgagtgaggagttattaacatcatttggaaaaaagatttcccattcacttgatattgtttgttcactcatttagtcattaaaagtgagattaataaaatctgaaaatgttatataataactttaaaaagccaggtaattaataatctgcactgatattacatccacagtaccacagtatttatgtgtatgaattaaggattaaaagataatgtggataaataaactattgatctatgtctgtgt

SEQ ID NO: 190603 - protein, 67 aa, Artificial Sequence
  derived and/or modified sequence
MDNVQPKIKHRPFCFSVKGHVKMLRLVFALVTAVCCLADGALIYRKLLFNPSGPYQKKPVHEKKEVL

SEQ ID NO: 190604 - DNA, 204 bp, Artificial Sequence
  derived and/or modified sequence
atggacaatgtccaacccaagattaagcatcggcctttctgcttctcagtgaaaggccatgttaagatgctgcgactcgtgtttgcactagttaccgctgtttgttgtctcgctgacggcgctttaatctatcgcaagctcttgtttaatcccagcggcccttaccagaaaaagcccgtgcacgagaagaaagaggtcctctag

SEQ ID NO: 190605 - DNA, 204 bp, Artificial Sequence
  derived and/or modified sequence
atggataacgtgcagcccaagatcaagcatagacctttctgcttctctgtcaagggacatgtgaaaatgcttcgactagtgttcgccttagttaccgcagtgtgttgtcttgcagacggcgccctcatctatcgtaaactactcttcaacccaagcggtccgtaccaaaaaaagcccgtgcatgaaaagaaagaagtgctctag

SEQ ID NO: 190606 - DNA, 204 bp, Artificial Sequence
  derived and/or modified sequence
atggacaacgtgcagcccaagatcaagcacagacccttctgcttcagcgtgaagggccacgtgaagatgctgagactggtgttcgccctggtgaccgccgtgtgctgcctggccgacggcgccctgatctacagaaagctgctgttcaaccccagcggcccctaccagaagaagcccgtgcacgagaagaaggaggtgctgtag

SEQ ID NO: 190607 - DNA, 204 bp, Artificial Sequence
  derived and/or modified sequence
atggacaatgtgcaaccgaaaatcaagcaccggcccttctgcttcagcgtgaagggacacgttaagatgctccgattggtgtttgccctggttactgctgtttgctgcctggccgatggggctctgatctacaggaagctgctatttaacccttccggtccctaccaaaagaaaccggtgcacgagaagaaggaagttctatag

SEQ ID NO: 190608 - DNA, 412 bp, Artificial Sequence
  derived and/or modified sequence
gcaagagagcgggaagccgagctgggcgagaagtaggggagggcggtgctccgccgcggtggcggttgctatcgcttcgcagaacctactcaggcagccagctgagaagagttgagggaaagtgctgctgctgggtctgcagacgcgatggataacgtgcagccgaaaataaaacatcgccccttctgcttcagtgtgaaaggccacgtgaagatgctgcggctggtgtttgcacttgtgacagcagtatgctgtcttgccgacggggcccttatttaccggaagcttctgttcaatcccagcggtccttaccagaaaaagcctgtgcatgaaaaaaaagaagttttgtaattttatattactttttagtttgatactaagtattaaacatatttctgtattcttccacata

SEQ ID NO: 190609 - DNA, 204 bp, Artificial Sequence
  derived and/or modified sequence
atggacaacgtgcagcccaagatcaagcaccggcccttctgcttctctgtgaagggccacgtgaagatgctgcggctggtgtttgccctggtgacagctgtgtgctgcctggctgatggagccctgatctacaggaagctgctcttcaaccccagcggcccctaccagaagaagcctgtgcatgagaagaaggaggtgctgtag

SEQ ID NO: 190610 - DNA, 204 bp, Artificial Sequence
  derived and/or modified sequence
atggacaacgtgcagcccaagatcaagcaccggcccttctgcttctcagtgaagggacatgtaaagatgctgcggctcgtcttcgctctagttacggctgtgtgctgtttggcagatggagccttgatctatagaaagctgcttttcaatcccagtggcccttaccagaagaaacctgtccacgaaaagaaggaagttctctag

SEQ ID NO: 190611 - RNA, 204 nt, Artificial Sequence
  derived and/or modified sequence
auggauaacgugcagcccaagaucaagcauagaccuuucugcuucucugucaagggacaugugaaaaugcuucgacuaguguucgccuuaguuaccgcaguguguugucuugcagacggcgcccucaucuaucguaaacuacucuucaacccaagcgguccguaccaaaaaaagcccgugcaugaaaagaaagaagugcucuag

SEQ ID NO: 190612 - protein, 384 aa, Artificial Sequence
  derived and/or modified sequence
MAGAEWKSLEECLEKHLPLPDLQEVKRVLYGKELRKLDLPREAFEAASREDFELQGYAFEAAEEQLRRPRIVHVGLVQNRIPLPANAPVAEQVSALHRRIKAIVEVAAMCGVNIICFQEAWTMPFAFCTREKLPWTEFAESAEDGPTTRFCQKLAKNHDMVVVSPILERDSEHGDVLWNTAVVISNSGAVLGKTRKNHIPRVGDFNESTYYMEGNLGHPVFQTQFGRIAVNICYGRHHPLNWLMYSINGAEIIFNPSATIGALSESLWPIEARNAAIANHCFTCAINRVGTEHFPNEFTSGDGKKAHQDFGYFYGSSYVAAPDSSRTPGLSRSRDGLLVAKLDLNLCQQVNDVWNFKMTGRYEMYARELAEAVKSNYSPTIVKE

SEQ ID NO: 190613 - protein, 316 aa, Artificial Sequence
  derived and/or modified sequence
MLGEAPAAPRLAGSEARSLWQGTQVSALHRRIKAIVEVAAMCGVNIICFQEAWTMPFAFCTREKLPWTEFAESAEDGPTTRFCQKLAKNHDMVVVSPILERDSEHGDVLWNTAVVISNSGAVLGKTRKNHIPRVGDFNESTYYMEGNLGHPVFQTQFGRIAVNICYGRHHPLNWLMYSINGAEIIFNPSATIGALSESLWPIEARNAAIANHCFTCAINRVGTEHFPNEFTSGDGKKAHQDFGYFYGSSYVAAPDSSRTPGLSRSRDGLLVAKLDLNLCQQVNDVWNFKMTGRYEMYARELAEAVKSNYSPTIVKE

SEQ ID NO: 190614 - protein, 186 aa, Artificial Sequence
  derived and/or modified sequence
MAGAEWKSLEECLEKHLPLPDLQEVKRVLYGKELRKLDLPREAFEAASREDFELQGYAFEAAEEQLRRPRIVHVGLVQNRIPLPANAPVAEQVSALHRRIKAIVEVAAMCGVNIICFQEAWILRPHHQEPRPPCCYAPSCCLIPSVFPHRSESIRSSPSLYHHLVQAPGSSPLAFVIPSSWSPVPS

SEQ ID NO: 190615 - DNA, 1155 bp, Artificial Sequence
  derived and/or modified sequence
atggccggcgccgagtggaagagcctggaggagtgcctggagaagcacctgcccctgcccgacctgcaggaggtgaagagagtgctgtacggcaaggagctgagaaagctggacctgcccagagaggccttcgaggccgccagcagagaggacttcgagctgcagggctacgccttcgaggccgccgaggagcagctgagaagacccagaatcgtgcacgtgggcctggtgcagaacagaatccccctgcccgccaacgcccccgtggccgagcaggtgagcgccctgcacagaagaatcaaggccatcgtggaggtggccgccatgtgcggcgtgaacatcatctgcttccaggaggcctggaccatgcccttcgccttctgcaccagagagaagctgccctggaccgagttcgccgagagcgccgaggacggccccaccaccagattctgccagaagctggccaagaaccacgacatggtggtggtgagccccatcctggagagagacagcgagcacggcgacgtgctgtggaacaccgccgtggtgatcagcaacagcggcgccgtgctgggcaagaccagaaagaaccacatccccagagtgggcgacttcaacgagagcacctactacatggagggcaacctgggccaccccgtgttccagacccagttcggcagaatcgccgtgaacatctgctacggcagacaccaccccctgaactggctgatgtacagcatcaacggcgccgagatcatcttcaaccccagcgccaccatcggcgccctgagcgagagcctgtggcccatcgaggccagaaacgccgccatcgccaaccactgcttcacctgcgccatcaacagagtgggcaccgagcacttccccaacgagttcaccagcggcgacggcaagaaggcccaccaggacttcggctacttctacggcagcagctacgtggccgcccccgacagcagcagaacccccggcctgagcagaagcagagacggcctgctggtggccaagctggacctgaacctgtgccagcaggtgaacgacgtgtggaacttcaagatgaccggcagatacgagatgtacgccagagagctggccgaggccgtgaagagcaactacagccccaccatcgtgaaggagtag

SEQ ID NO: 190616 - DNA, 951 bp, Artificial Sequence
  derived and/or modified sequence
atgctgggcgaggcccccgccgcccccagactggccggcagcgaggccagaagcctgtggcagggcacccaggtgagcgccctgcacagaagaatcaaggccatcgtggaggtggccgccatgtgcggcgtgaacatcatctgcttccaggaggcctggaccatgcccttcgccttctgcaccagagagaagctgccctggaccgagttcgccgagagcgccgaggacggccccaccaccagattctgccagaagctggccaagaaccacgacatggtggtggtgagccccatcctggagagagacagcgagcacggcgacgtgctgtggaacaccgccgtggtgatcagcaacagcggcgccgtgctgggcaagaccagaaagaaccacatccccagagtgggcgacttcaacgagagcacctactacatggagggcaacctgggccaccccgtgttccagacccagttcggcagaatcgccgtgaacatctgctacggcagacaccaccccctgaactggctgatgtacagcatcaacggcgccgagatcatcttcaaccccagcgccaccatcggcgccctgagcgagagcctgtggcccatcgaggccagaaacgccgccatcgccaaccactgcttcacctgcgccatcaacagagtgggcaccgagcacttccccaacgagttcaccagcggcgacggcaagaaggcccaccaggacttcggctacttctacggcagcagctacgtggccgcccccgacagcagcagaacccccggcctgagcagaagcagagacggcctgctggtggccaagctggacctgaacctgtgccagcaggtgaacgacgtgtggaacttcaagatgaccggcagatacgagatgtacgccagagagctggccgaggccgtgaagagcaactacagccccaccatcgtgaaggagtag

SEQ ID NO: 190617 - DNA, 1155 bp, Artificial Sequence
  derived and/or modified sequence
atggccggcgccgagtggaaatcccttgaagagtgtctcgagaagcatctgcctctgcctgatctgcaggaggtgaaacgggtcctctatggtaaggagctgcgtaagttggacctgcctcgcgaggccttcgaggccgctagccgcgaagacttcgaactgcagggctacgcttttgaggccgcagaggagcaactccgtcgaccaagaatcgtgcatgtaggcttggtgcaaaatcgcattcccttgcctgccaacgctccagttgctgagcaggtgagcgcgctgcatagaaggattaaagccatcgtcgaggtggctgccatgtgcggagtgaatattatttgtttccaggaggcgtggacaatgcccttcgctttttgcactcgcgagaaattgccttggacagagtttgctgagtcggccgaagatggaccaaccacccggttctgtcagaaactggccaaaaatcacgatatggtggtggtgagcccaatcttggaacgggattccgagcacggggatgtcctctggaatacagccgtagtgattagtaatagtggtgctgtgttgggcaaaactcggaagaatcacatcccccgagttggagactttaatgaatcaacatactacatggagggcaacttaggacaccctgtctttcagacccagtttggaaggattgccgtcaatatttgctacggccggcaccaccctctgaattggctgatgtacagtatcaatggtgccgagattattttcaacccttccgccaccattggggctttatctgagagcctgtggcctatcgaagcaagaaatgctgccattgcgaatcattgctttacttgtgccatcaacagagtcgggactgaacatttcccgaatgaatttacatcgggagatggcaagaaggcacatcaagatttcggttatttttacggtagctcctatgtcgccgccccagacagttctaggacgcctggcctttctagaagcagagatggactgctggtggctaagcttgacctgaatctctgccaacaggtcaatgatgtgtggaacttcaagatgactggacggtacgaaatgtatgcaagagaattggccgaagccgtgaagtctaactactcgcctactatcgttaaagagtag

SEQ ID NO: 190618 - DNA, 951 bp, Artificial Sequence
  derived and/or modified sequence
atgctgggcgaggcccctgccgctccccgtctcgcaggctctgaagccaggtctctttggcaggggacacaagtctcagccctccatcgccgcattaaagctattgttgaagtggctgcaatgtgcggtgtcaacatcatttgcttccaggaagcctggaccatgcccttcgctttctgtacacgcgagaagctgccctggacagagttcgccgaaagtgcggaggatgggcctaccactcgcttctgccagaaactcgccaagaatcatgacatggttgtggtgagtccaatcctggagcgtgattccgagcacggggacgtcctctggaataccgcggtggtcatcagtaacagtggtgccgtgctggggaagacccgcaagaatcacatccccagagttggagatttcaacgaatctacatactacatggagggcaatctgggacaccccgttttccaaactcaattcggccgaatcgccgtgaacatttgttacggacggcaccatccactgaactggctgatgtattccataaacggcgctgagattatctttaaccctagcgctaccattggggcgctctccgaatcgctgtggccaattgaggctcgcaatgctgccatcgctaatcattgtttcacctgcgcgattaatagagtaggtacagagcacttcccaaacgaatttacgtcgggtgatggtaaaaaggctcatcaggacttcggttatttttacggctcttcctatgtcgccgcaccagactcaagccgcacccctggcctgagccggagtagagacggccttctcgttgccaagctggacctgaatctctgccagcaggtgaacgacgtgtggaattttaaaatgacaggccggtatgagatgtacgcgagggaactggctgaggcagtcaagtctaattatagcccaactatagttaaagagtag

SEQ ID NO: 190619 - DNA, 1155 bp, Artificial Sequence
  derived and/or modified sequence
atggccggggctgagtggaagagcctggaggagtgcctggagaagcacctgcccctgcctgacctgcaggaggtgaagagggtgctgtatggcaaggagctgaggaagctggacctgccccgggaggcctttgaggccgccagccgggaggactttgagctgcagggctacgcctttgaagctgctgaggagcagctgcggcggcccagaattgtgcacgtgggcctggtgcagaaccgcatccccctgcctgccaatgcccctgtggccgagcaggtgtctgccctgcaccggcgcatcaaggccatcgtggaggtggccgccatgtgtggggtgaacatcatctgcttccaggaggcctggaccatgccctttgccttctgcacccgggagaagctgccctggacagaatttgctgagagcgcagaagatggccccaccacccgcttctgccagaagctggccaagaaccacgacatggtggtggtgagccccatcctggagcgggacagcgagcacggagatgtgctgtggaacacagctgtggtgatcagcaacagcggggctgtgctgggcaagaccaggaagaaccacatcccccgggtgggggacttcaatgaaagcacctactacatggagggcaacctgggccaccctgtgttccagacccagtttggaagaattgctgtgaacatctgctacggccgccaccaccccctgaactggctgatgtacagcatcaacggggctgagatcatcttcaaccccagcgccaccatcggggccctgtctgagagcctgtggcccatcgaggccagaaatgctgccatcgccaaccactgcttcacctgtgccatcaacagagtgggcacagagcacttccccaatgagttcaccagcggagatggcaagaaggcccaccaggactttggctacttctacggcagcagctatgtggccgccccagacagcagcaggaccccaggcctgagccgcagcagagatggcctgctggtggccaagctggacctgaacctgtgccagcaggtgaatgatgtgtggaacttcaagatgacaggccgctatgagatgtatgcccgggagctggccgaggccgtgaagagcaactacagccccaccatcgtgaaggagtag

SEQ ID NO: 190620 - DNA, 951 bp, Artificial Sequence
  derived and/or modified sequence
atgctgggggaggccccagctgccccccggctggccggcagcgaggcccggagcctgtggcagggcacccaggtgtctgccctgcaccggcgcatcaaggccatcgtggaggtggccgccatgtgtggggtgaacatcatctgcttccaggaggcctggaccatgccctttgccttctgcacccgggagaagctgccctggacagaatttgctgagagcgcagaagatggccccaccacccgcttctgccagaagctggccaagaaccacgacatggtggtggtgagccccatcctggagcgggacagcgagcacggagatgtgctgtggaacacagctgtggtgatcagcaacagcggggctgtgctgggcaagaccaggaagaaccacatcccccgggtgggggacttcaatgaaagcacctactacatggagggcaacctgggccaccctgtgttccagacccagtttggaagaattgctgtgaacatctgctacggccgccaccaccccctgaactggctgatgtacagcatcaacggggctgagatcatcttcaaccccagcgccaccatcggggccctgtctgagagcctgtggcccatcgaggccagaaatgctgccatcgccaaccactgcttcacctgtgccatcaacagagtgggcacagagcacttccccaatgagttcaccagcggagatggcaagaaggcccaccaggactttggctacttctacggcagcagctatgtggccgccccagacagcagcaggaccccaggcctgagccgcagcagagatggcctgctggtggccaagctggacctgaacctgtgccagcaggtgaatgatgtgtggaacttcaagatgacaggccgctatgagatgtatgcccgggagctggccgaggccgtgaagagcaactacagccccaccatcgtgaaggagtag

SEQ ID NO: 190621 - DNA, 1155 bp, Artificial Sequence
  derived and/or modified sequence
atggccggcgccgagtggaagagcctggaggagtgcctggagaagcatctcccgcttcccgatttacaggaggtcaaaagggttctatacggaaaggagttgcgcaagctggatctgccacgcgaggccttcgaggccgcttctagggaggatttcgaactgcaaggttacgcctttgaagccgccgaggagcagctgcggcgcccacgcatagttcatgtaggcctcgtacaaaataggattcccctgcccgcaaacgcgcctgtggccgagcaagtgtctgctctccaccgtagaatcaaggcgattgtggaagtggccgccatgtgtggtgtgaacatcatatgcttccaggaagcctggaccatgccctttgcattctgtacacgcgaaaagctgccctggacagaatttgccgagtctgcagaagatgggcctaccacacggttttgccagaaattagcaaagaaccacgacatggtggtggtgtcacccattctggagagggatagcgagcatggcgacgtgctgtggaatacagccgtggttatcagtaactccggcgccgtgctaggcaaaactcggaaaaatcatataccccgcgtgggcgattttaacgagtctacctactatatggagggaaacctagggcatcctgtgtttcagacacagttcggacgaattgccgtcaatatctgctatgggcgccatcaccccctgaattggttaatgtattccatcaacggagcagagatcattttcaaccccagcgctactattggggcgttgtcagaatctttatggccgattgaggccagaaatgccgcaattgctaaccactgcttcacgtgcgccatcaatcgggttggcacagaacattttccaaatgaattcacctccggcgacggaaaaaaggcgcaccaggacttcggctatttctatggttcgtcctacgtcgcagcccccgattccagcagaactcccggactgtctaggtctagagatggccttttggttgctaagttggacttgaacttgtgccaacaggtaaacgatgtgtggaacttcaagatgactggtagatacgaaatgtacgcgcgcgagttagccgaagctgtcaaatcgaattactccccgacaatcgtgaaggagtag

SEQ ID NO: 190622 - DNA, 951 bp, Artificial Sequence
  derived and/or modified sequence
atgctgggcgaggcccccgccgccccccggctggccggcagcgaggcccgctccctgtggcagggaactcaggtgtcagccttacatcgacggattaaggcaatagtcgaagtggctgctatgtgcggggtcaacatcatttgtttccaggaggcctggactatgccattcgcattctgtaccagagagaagctgccctggactgagttcgctgaatctgcagaggacgggcccaccacacggttctgccagaaattagccaaaaaccatgacatggtcgtcgtgtccccaattctggagcgcgactctgaacatggggatgttttatggaacactgccgtggttatctctaatagtggggccgtgctaggaaaaacacgaaagaaccacatccctcgagtgggagactttaatgaaagcacttactatatggagggcaatctgggccatcccgtgttccagactcagtttgggcggatcgcagtaaatatctgctacggcaggcaccacccccttaactggctgatgtatagcatcaacggggccgagatcatcttcaaccccagcgcaacgatcggagccttgagcgagtcactctggccaatcgaggcacgcaacgcagcgattgcaaatcactgttttacatgtgccattaatcgagtgggaaccgaacactttccaaatgaattcaccagcggtgacggtaagaaagcccatcaggacttcgggtacttctacggtagctcctacgtagcagctccagattcttctaggaccccaggactgtcaagatcgcgggacggcctactagttgctaagctggacctgaatctgtgccagcaggtgaacgacgtgtggaatttcaaaatgacaggcaggtacgagatgtacgcccgcgagcttgctgaagccgtcaagtcgaactacagccctaccatagttaaagagtag

SEQ ID NO: 190623 - DNA, 1155 bp, Artificial Sequence
  derived and/or modified sequence
atggctggcgctgaatggaagagcttagaggagtgtctcgagaagcacctgcctctgccggatctacaggaggtgaaaagagtgttgtatgggaaagaattgagaaaattggaccttccccgagaggcatttgaggccgcaagtagagaagactttgagctgcaggggtacgcatttgaagctgctgaagaacagcttcgacgacctcgaatcgttcacgtgggcctggtgcagaaccgcataccactgcctgcaaatgcccctgtggccgaacaggtctccgccttgcatagaagaattaaagccatcgtcgaagtagccgcaatgtgcggggtcaatatcatttgtttccaggaggcatggaccatgccatttgctttttgcacgcgggagaaactgccctggaccgagttcgccgagtccgcggaggatgggcctacaacacgcttctgtcagaagcttgccaaaaatcatgacatggttgtcgtatccccgattctcgagcgcgattcggaacacggagacgttctgtggaacactgctgtggtgatctccaattcaggagccgtgctggggaagacacgcaagaaccacattccacgggtaggagattttaatgagtcaacttactacatggaggggaacctcgggcatcccgtgttccagacacagttcggccgtattgcagtcaacatatgttatggccgacaccatcctcttaattggctcatgtatagcataaacggcgctgagattattttcaatccctcagcgactataggcgcattgtctgaatccttgtggccgattgaggccaggaatgcagccatagctaatcattgcttcacctgtgccataaaccgcgttggtaccgaacatttcccgaatgaattcactagcggcgatggcaagaaagcacatcaagactttggttatttctatggatcctcttacgtggccgcaccagacagttcacggactccaggcctgagccggtcaagagacggtctccttgtggccaaactggacttgaatctgtgtcagcaagttaacgacgtctggaatttcaagatgaccgggcgatacgagatgtatgcccgtgaactggccgaagccgtgaagtccaattattccccaactattgttaaggaatag

SEQ ID NO: 190624 - DNA, 951 bp, Artificial Sequence
  derived and/or modified sequence
atgcttggagaggctccagctgcacctcgcttagcaggcagtgaggccaggtcgctgtggcaaggcacacaggtatccgcgcttcaccgccgtattaaagctatcgtcgaggtagcagctatgtgcggtgtgaatataatttgttttcaggaggcctggacaatgccctttgccttctgtacccgcgagaaactgccatggaccgagtttgctgagagtgccgaggacggcccaactaccagattctgccagaagttagccaaaaatcacgacatggttgttgtgagcccaattctggaacgggacagcgaacatggagatgtgctgtggaacacggctgttgttatttccaactcaggggcagtgctcggtaaaacccgaaaaaatcacatacctagagtcggggatttcaacgagagcacctattacatggagggaaatctaggacatccggtgttccaaacccagtttggccgaatcgcagttaacatttgttatggccgacaccatccacttaactggttaatgtatagtattaatggcgctgagatcatctttaacccatccgctaccatcggagctttgtcagaaagcttgtggccaatcgaagcccgaaacgctgcaatcgctaaccactgttttacatgcgctataaatcgcgtgggcacagaacacttccctaacgaatttactagcggtgatggaaagaaagctcaccaggactttggttatttctatggctcgagctacgtcgccgcacctgactcatcgcgcactccagggctgtcccggtcacgcgacggccttttggtcgcaaagctggatctgaatctgtgtcagcaagttaatgacgtctggaatttcaagatgacaggcagatatgagatgtatgctagggagctggccgaggccgtgaagtccaattatagccctacaatcgtaaaagaatag

SEQ ID NO: 190625 - DNA, 2290 bp, Artificial Sequence
  derived and/or modified sequence
aaccgagaggcgaagggcaaggggcgaagggcaagcgccggatcctttcgccccctccccacgtgaggccctggaggctgattggccgtgtgctgcggaggcggcaagaggaacgtgtcctggcacgtgccgaaggagcgctaaaggccaggggcggtcccacccgcgaagccctggaaggcggattggctgcgcgaggaagtggcgtgtcctcacttgagctgtctgggagcgagagtaagagataaaggcaagggcgcctgaccgggcctgggcacctcctcccactgcgggcaaagggcaggcagttcgtgcgcggacacaagcactggcggaccgtggccatggcgggcgctgagtggaagtcgctggaggaatgcttggagaagcacctgccgctccccgacttgcaggaagtgaagcgcgttctctatggcaaggaactcaggaagcttgatctgcccagggaagctttcgaagctgcctccagagaagactttgaactgcagggatatgcctttgaagcagcggaggagcagctgagacgaccccgcattgtgcacgtggggctggttcagaacagaatccccctccccgcaaatgcccctgtggcagaacaggtctctgcccttcatagacgcataaaggctatcgtagaggtggctgcaatgtgtggagtcaacatcatctgtttccaggaagcatggactatgccctttgccttctgtacgagagagaagcttccttggacagaatttgctgagtcagcagaggatgggcccaccaccagattctgtcagaagctggcgaagaaccatgacatggtggtggtgtctcccatcctggaacgagacagcgagcatggggatgttttgtggaatacagccgtggtgatctccaattccggagcagtcctgggaaagaccaggaaaaaccacatccccagagtgggtgatttcaacgagtcaacttactacatggagggaaacctgggccaccccgtgttccagacgcagttcggaaggatcgcggtgaacatttgctacgggcggcaccaccccctcaactggcttatgtacagcatcaacggggctgagatcatcttcaacccctcggccacgataggagcactcagcgagtccctgtggcccatcgaggccagaaacgcagccattgccaatcactgcttcacctgcgccatcaatcgagtgggcaccgagcacttcccgaacgagtttacctcgggagatggaaagaaagctcaccaggactttggctacttttatggctcgagctatgtggcagcccctgacagcagccggactcctgggctgtcccgtagccgggatggactgctagttgctaagctcgacctaaacctctgccagcaggtgaatgatgtctggaacttcaagatgacgggcaggtatgagatgtacgcacgggagctcgccgaagctgtcaagtccaactacagccccaccatcgtgaaagagtagccggcttcagtgcctgccttggggtgaggaagacacctctgccccagtggattagcaagtgtggcaggcttaacatgtccaggttctccccaataacattgtccaggttggttttaaaattcccaggcagggggagagtggcatggggagtgacttcttaatgggtaaggggctgcttacttctggggtattggaaatgtttggggactaggtagaggtgaatgtactaaatgccactgaatttgtatacttcagaatgtttgttatgtaaattttacctcaactaaaaaaaaaaatgcccaggtactgcttgtgcaggtggatttgaggttaggcagatgatgctgtccatcccgtacaccagtgggaagagggtgagggctgatccagagaccctgagcctacagcaaggctgtggtgggtcggatggtctttggatgtgtcagcttagctaggccacagtcaccagtaattcaatcagacactaatctaggtatttctgtgaaggtattttgtagatgtgacagaagtccattcccaattgactaagtaagtgagattatctcagataatctgggtcagcctgacctgattagtcagaaggcctaaagaacagagctaagggtttccctgaggaagaaattctgcctgaggacagcagcccagtgcttggcgagagttcctgacagtctgcccttctgatagcctgcctcacagagtttagacatgactagccagctcctacaatcactgaagtcaattccttgcaataaatctcaatatatccccta

SEQ ID NO: 190626 - DNA, 3418 bp, Artificial Sequence
  derived and/or modified sequence
aggagacctaggtaccagactttgctttgccagtgcctctttctgtggccttgggtaagtttttcccctctctgggcctcagtttcccatttgcaaaataaaagtgtttaagactaggttccaagattttccaattctaatgctgagaggatacagaggaaaacagaaagaatgctggctgaggaaccaggagacttgccttcttgtcccagctctgccactgacctgacctctttgggcctctgcttcctcatctataaaataagataaagcaacagaagcctccagcgactaagttaaactttcctggggtcacaaggtttacaagtggctgaataggatttctacagactggttccttcacccggctgcccgccgaagtaagcgggccttactgccctaattctcaataggaccccaaagaggacgcttctttgctcctgaagggatggcaccctctggattcgcggtaacagcaaatggggctctcactcctaccatctcagtgacagtttaaagcgcaccctaccgcaggaaagtgcccatatttgcacacacgcggcagagggcagggctgaaaaggggccctagggtgcagggggcgcgccctcacccggggaccccgcattttacaatattagctccaccgaggcgcacggaaccgcaggcgagcaactgaccttcggctccagcggccccaaagccgggggtgggaacgcgcgacccaggtagcggcatggactccgagcctggcccctcgggggttaaaactccccagacataaaggctccggacgacagaggtgcagccgccgcgtgcccgtgggacactgaaactcttcccttaccttcctcggtagtcctgtgagggaggctggcccggccggctgccctacggtgcggacaggaggtcgcggtcgggaggggccctgcccggcggttgctgctggaaccagcccccgcaagggcccgcagcggccgggccgtttacctcagacccgcgccgcagcctcccggagcccgcgcccaggactccctcacgacctctccagggtcccggcccgacaccaaggggcaggtgaggggtggaacctggaggcacccgcgccagggcccctgagggaggcgggagggggacagcctcagtcctgactcgcagccgaggcgcgacgactccgcgcagtcccgcctgtggaggggcgtgcctcatcgcttgctaaccgagaggcgaagggcaaggggcgaagggcaagcgccggatcctttcgccccctccccacgtgaggccctggaggctgattggccgtgtgctgcggaggcggcaagaggaacgtgtcctggcacgtgccgaaggagcgctaaaggccaggggcggtcccacccgcgaagccctggaaggcggattggctgcgcgaggaagtggcgtgtcctcacttgagctgtctgggagcgagagtaagagataaaggcaagggcgcctgaccgggcctgggcacctcctcccactgcgggcaaagggcaggcagttcgtgcgcggacacaagcactggcggaccgtggccatggcgggcgctgagtggaagtcgctggaggaatgcttggagaagcacctgccgctccccgacttgcaggaagtgaagcgcgttctctatggcaaggaactcaggtctctgcccttcatagacgcataaaggctatcgtagaggtggctgcaatgtgtggagtcaacatcatctgtttccaggaagcatggactatgccctttgccttctgtacgagagagaagcttccttggacagaatttgctgagtcagcagaggatgggcccaccaccagattctgtcagaagctggcgaagaaccatgacatggtggtggtgtctcccatcctggaacgagacagcgagcatggggatgttttgtggaatacagccgtggtgatctccaattccggagcagtcctgggaaagaccaggaaaaaccacatccccagagtgggtgatttcaacgagtcaacttactacatggagggaaacctgggccaccccgtgttccagacgcagttcggaaggatcgcggtgaacatttgctacgggcggcaccaccccctcaactggcttatgtacagcatcaacggggctgagatcatcttcaacccctcggccacgataggagcactcagcgagtccctgtggcccatcgaggccagaaacgcagccattgccaatcactgcttcacctgcgccatcaatcgagtgggcaccgagcacttcccgaacgagtttacctcgggagatggaaagaaagctcaccaggactttggctacttttatggctcgagctatgtggcagcccctgacagcagccggactcctgggctgtcccgtagccgggatggactgctagttgctaagctcgacctaaacctctgccagcaggtgaatgatgtctggaacttcaagatgacgggcaggtatgagatgtacgcacgggagctcgccgaagctgtcaagtccaactacagccccaccatcgtgaaagagtagccggcttcagtgcctgccttggggtgaggaagacacctctgccccagtggattagcaagtgtggcaggcttaacatgtccaggttctccccaataacattgtccaggttggttttaaaattcccaggcagggggagagtggcatggggagtgacttcttaatgggtaaggggctgcttacttctggggtattggaaatgtttggggactaggtagaggtgaatgtactaaatgccactgaatttgtatacttcagaatgtttgttatgtaaattttacctcaactaaaaaaaaaaatgcccaggtactgcttgtgcaggtggatttgaggttaggcagatgatgctgtccatcccgtacaccagtgggaagagggtgagggctgatccagagaccctgagcctacagcaaggctgtggtgggtcggatggtctttggatgtgtcagcttagctaggccacagtcaccagtaattcaatcagacactaatctaggtatttctgtgaaggtattttgtagatgtgacagaagtccattcccaattgactaagtaagtgagattatctcagataatctgggtcagcctgacctgattagtcagaaggcctaaagaacagagctaagggtttccctgaggaagaaattctgcctgaggacagcagcccagtgcttggcgagagttcctgacagtctgcccttctgatagcctgcctcacagagtttagacatgactagccagctcctacaatcactgaagtcaattccttgcaataaatctcaatatatcccctactggttctgcttctctagttgaatctgactgatacagattttggtgccaaaagtggttctagaaaaatagaatcttaaagatg

SEQ ID NO: 190627 - protein, 959 aa, Artificial Sequence
  derived and/or modified sequence
MALLGKRCDVPTNGCGPDRWNSAFTRKDEIITSLVSALDSMCSALSKLNAEVACVAVHDESAFVVGTEKGRMFLNARKELQSDFLRFCRGPPWKDPEAEHPKKVQRGEGGGRSLPRSSLEHGSDVYLLRKMVEEVFDVLYSEALGRASVVPLPYERLLREPGLLAVQGLPEGLAFRRPAEYDPKALMAILEHSHRIRFKLKRPLEDGGRDSKALVELNGVSLIPKGSRDCGLHGQAPKVPPQDLPPTATSSSMASFLYSTALPNHAIRELKQEAPSCPLAPSDLGLSRPMPEPKATGAQDFSDCCGQKPTGPGGPLIQNVHASKRILFSIVHDKSEKWDAFIKETEDINTLRECVQILFNSRYAEALGLDHMVPVPYRKIACDPEAVEIVGIPDKIPFKRPCTYGVPKLKRILEERHSIHFIIKRMFDERIFTGNKFTKDTTKLEPASPPEDTSAEVSRATVLDLAGNARSDKGSMSEDCGPGTSGELGGLRPIKIEPEDLDIIQVTVPDPSPTSEEMTDSMPGHLPSEDSGYGMEMLTDKGLSEDARPEERPVEDSHGDVIRPLRKQVELLFNTRYAKAIGISEPVKVPYSKFLMHPEELFVVGLPEGISLRRPNCFGIAKLRKILEASNSIQFVIKRPELLTEGVKEPIMDSQGTASSLGFSPPALPPERDSGDPLVDESLKRQGFQENYDARLSRIDIANTLREQVQDLFNKKYGEALGIKYPVQVPYKRIKSNPGSVIIEGLPPGIPFRKPCTFGSQNLERILAVADKIKFTVTRPFQGLIPKPDEDDANRLGEKVILREQVKELFNEKYGEALGLNRPVLVPYKLIRDSPDAVEVTGLPDDIPFRNPNTYDIHRLEKILKAREHVRMVIINQLQPFAEICNDAKVPAKDSSIPKRKRKRVSEGNSVSSSSSSSSSSSSNPDSVASANQISLVQWPMYMVDYAGLNVQLPGPLNY

SEQ ID NO: 190628 - DNA, 2880 bp, Artificial Sequence
  derived and/or modified sequence
atggctttattaggtaagcgctgcgacgtccctactaacggatgtggacctgatagatggaattccgcgttcacaaggaaggatgagataattacatctctggtctccgcccttgattcaatgtgttcagctctgtcaaagctgaatgcggaagtggcctgcgttgcagtgcacgacgaatctgccttcgtagtggggacagagaaaggccgaatgtttctaaatgcacgcaaggagctgcagagtgacttcctcagattctgtcggggccctccctggaaagacccggaggcagaacacccaaaaaaagttcagcgtggcgaaggggggggaagaagtctcccaaggagcagcttggaacatgggagcgatgtctacctgctgcgaaagatggttgaagaggtcttcgatgtgctctacagtgaggcactagggcgcgcatctgtcgtgcctctgccctacgagcgactgttgagggagccaggtctgttggccgtgcagggactgccagaaggtctggccttcaggcgacctgctgaatacgatccaaaggccctcatggcaatcctggaacactcccacagaatccgcttcaaactgaaacgccctctggaggatggcggccgggactctaaggccctggttgaactgaatggtgtatctttaatccccaaaggctcccgggactgcggcctccacggacaagctccgaaagtcccaccccaggacctccctccaacggccacttccagcagcatggccagctttctctacagcaccgcgctgcccaaccacgcgattagagaactgaaacaggaggcaccctcctgtcctttggctccatcagatctgggactgtctcggccaatgccagagcctaaagccactggcgctcaggacttctctgattgctgtggacagaagccaacagggcccgggggtcccctcattcagaatgtgcatgcatctaagcggattctcttctccatcgtgcacgacaaatccgagaaatgggatgcctttattaaggagaccgaagatatcaatactctccgcgaatgcgtacagattctatttaactctcgctacgcagaggccctaggtttggatcacatggtgccagtcccatatcggaaaatcgcttgtgacccagaggcagtcgagattgtgggcatacctgataagattccctttaagagaccctgtacatatggcgttcctaagctgaaacggatcctcgaggagagacattccattcacttcattatcaagcggatgttcgacgaaaggatttttacaggcaacaaatttaccaaagataccaccaagctggagcccgccagccctcccgaggacacttccgcggaggtctcccgtgctaccgttctggacctagcagggaacgctcgcagtgacaaaggatctatgtcggaagactgtggaccgggaacaagtggggaactgggaggccttcgccccataaagatcgaacccgaagatttagacataatccaggttacggtgccagacccctcaccgacttctgaagaaatgacagacagcatgccagggcatttgcctagcgaagatagcggatacggtatggagatgctgacggacaagggtctgtcagaagacgcaaggcccgaggaacgacctgtggaggatagccacggcgatgtcatcagacccctgcgcaagcaagtggagctgttgtttaacactaggtacgctaaagcaattggcatctctgaacccgtgaaggtcccgtatagtaaatttctgatgcatcccgaggagctgttcgtagtaggactgccagagggaattagcctgaggcggcctaattgttttgggattgcaaagctgagaaagatccttgaagcaagtaattctatccagttcgtgatcaaaagacccgaactcttgacagagggtgtcaaggaacctataatggattctcaaggcaccgcctcaagcttgggcttctccccacccgcgctgccgcctgaacgcgatagtggagatccactggtggatgaatctttgaagcggcaagggtttcaagagaattacgacgccaggctttcaagaatcgacatcgccaacacactgcgcgaacaggtgcaggacttattcaacaaaaagtatggcgaagccctgggtattaaataccccgtccaggtcccctataaacgcattaaaagcaatccaggatctgtgattatagaagggctcccgcccgggataccgttccgtaaaccctgtacatttggcagtcaaaacctggaacggatcttggccgtcgcagacaagattaaattcaccgtgactaggcctttccaaggactcattccgaaacctgatgaggatgatgccaaccggttgggcgagaaagtgatactcagagaacaggtgaaggaactgtttaatgagaagtacggcgaagcattaggactgaacaggcccgttctggtaccgtataagctcatccgtgattcccctgacgccgtcgaggtcacaggccttccagatgacatccccttccgtaaccctaacacatacgatatccatagacttgaaaagattctcaaggccagagagcatgtgcgcatggttatcatcaaccagctgcagcctttcgcggagatatgtaacgacgcaaaggtgccggccaaagactcttcaatacctaaacgcaaacgtaaaagagtctcggagggcaacagtgtgtctagtagtagctcctcttcgtcctcatcctccagtaatccagacagtgttgcgtccgctaaccagatctctttggttcagtggcctatgtatatggtcgattacgctggtctgaatgtccagctaccagggcccttgaattactag

SEQ ID NO: 190629 - DNA, 3430 bp, Artificial Sequence
  derived and/or modified sequence
taaatggcagccaatggagggtggtgttgcgcggggctgggattagggccggggcgaatggctggcaatcttactgggattacagaacaaagagcctccccgcgctcccgctctccgctcctctccccgcgccgccccgccctccgccgcagcccgcgccgggggtgggggccgccgagcgccagccccccggccggccgattccccccccgcgccccctccccgcgcctccctccccgccctcgccgcgccgccgtcctcgcctccctctgcctctccttcccccattctcccggattaattaaggaggcagcggcaggaggctgagtcctggccgcgggccggggccggggcgccgctggcaggagcgcttggggatcctccaaggcgaccatggccttgctgggtaagcgctgtgacgtccccaccaacggctgcggacccgaccgctggaactccgcgttcacccgcaaagacgagatcatcaccagcctcgtgtctgccttagactccatgtgctcagcgctgtccaaactgaacgccgaggtggcctgtgtcgccgtgcacgatgagagcgcctttgtggtgggcacagagaaggggagaatgttcctgaatgcccggaaggagctacagtcagacttcctcaggttctgccgagggcccccgtggaaggatccggaggcagagcaccccaagaaggtgcagcggggcgagggtggaggccgtagcctccctcggtcctccctggaacatggctcagatgtgtaccttctgcggaagatggtagaggaggtgtttgatgttctttatagcgaggccctgggaagggccagtgtggtgccactgccctatgagaggctgctcagggagccagggctgctggccgtgcaggggctgcccgaaggcctggccttccgaaggccagccgagtatgaccccaaggccctcatggccatcctggaacacagccaccgcatccgcttcaagctcaagaggccacttgaggatggcgggcgggactcgaaggccctggtggagctgaacggtgtctccctgattcccaaggggtcacgggactgtggcctgcatggccaggcccccaaggtgccaccccaggacctgcccccaaccgccacctcctcctccatggccagcttcctgtacagcacggcgctccccaaccacgccatccgagagctcaagcaggaagcaccttcctgcccccttgcccccagcgacctgggcctgagtcggcccatgccagagcccaaggccaccggtgcccaagacttctccgactgttgtggacagaagcccactgggcctggtgggcctctcatccagaacgtccatgcctccaagcgcattctcttctccatcgtccatgacaagtcagagaagtgggacgccttcataaaggaaaccgaggacatcaacacgctccgggagtgtgtgcagatcctgtttaacagcagatatgcggaagccctgggcctggaccacatggtccccgtgccctaccggaagattgcctgtgacccggaggctgtggagatcgtgggcatcccggacaagatccccttcaagcgcccctgcacttatggagtccccaagctgaagcggatcctggaggagcgccatagtatccacttcatcattaagaggatgtttgatgagcgaattttcacagggaacaagtttaccaaagacaccacgaagctggagccagccagcccgccagaggacacctctgcagaggtctctagggccaccgtccttgaccttgctgggaatgctcggtcagacaagggcagcatgtctgaagactgtgggccaggaacctccggggagctgggcgggctgaggccgatcaaaattgagccagaggatctggacatcattcaggtcaccgtcccagacccctcgccaacctctgaggaaatgacagactcgatgcctgggcacctgccatcggaggattctggttatgggatggagatgctgacagacaaaggtctgagtgaggacgcgcggcccgaggagaggcccgtggaggacagccacggtgacgtgatccggcccctgcggaagcaggtggagctgctcttcaacacacgatacgccaaggccattggcatctcggagcccgtcaaggtgccgtactccaagtttctgatgcacccggaggagctgtttgtggtgggactgcctgaaggcatctccctccgcaggcccaactgcttcgggatcgccaagctccggaagattctggaggccagcaacagcatccagtttgtcatcaagaggcccgagctgctcactgagggagtcaaagagcccatcatggatagtcaaggaactgcctcctcacttggcttctctccccctgccctgcccccagagagggattccggggaccctctggtggacgagagcctgaagagacagggctttcaagaaaattatgacgcgaggctctcacggatcgacatcgccaacacactaagggagcaggtccaggaccttttcaataagaaatacggggaagccttgggcatcaagtacccggtccaggtcccctacaagcggatcaagagtaaccccggctccgtgatcatcgaggggctgcccccaggaatcccgttccgaaagccctgtaccttcggctcccagaacctggagaggattcttgctgtggctgacaagatcaagttcacagtcaccaggcctttccaaggactcatcccaaagcctgatgaagatgacgccaacagactcggggagaaggtgatcctgcgggagcaggtgaaggaactcttcaacgagaaatacggtgaggccctgggcctgaaccggccggtgctggtcccttataaactaatccgggacagcccagacgccgtggaggtcacgggtctgcctgatgacatccccttccggaaccccaacacgtacgacatccaccggctggagaagatcctgaaggcccgagagcatgtccgcatggtcatcattaaccagctccaaccctttgcagaaatctgcaatgatgccaaggtgccagccaaagacagcagcattcccaagcgcaagagaaagcgggtctcggaaggaaattccgtctcctcttcctcctcgtcttcctcttcctcgtcctctaacccggattcagtggcatcggccaaccagatctcactcgtgcaatggccaatgtacatggtggactatgccggcctgaacgtgcagctcccgggacctcttaattactagacctcagtactgaatcaggacctcactcagaaagactaaaggaaatgtaatttatgtacaaaatgtatattcggatatgtatcgatgccttttagtttttccaatgatttttacactatattcctgccaccaaggcctttttaaataagtaaaaaaa

SEQ ID NO: 190630 - DNA, 2880 bp, Artificial Sequence
  derived and/or modified sequence
atggccctgctgggcaagagatgtgatgtgcccaccaacggctgcggccctgaccgctggaacagcgccttcaccaggaaggatgagatcatcaccagcctggtgtctgccctggacagcatgtgcagcgccctgagcaagctgaatgctgaggtggcctgtgtggccgtgcatgatgaaagtgcctttgtggtgggcacagagaagggccgcatgttcctgaatgccaggaaggagctgcagagcgacttcctgcgcttctgccggggccccccctggaaggaccctgaggccgagcaccccaagaaggtgcagagaggagagggcggcggccgcagcctgcccaggagcagcctggagcacggcagtgatgtgtacctgctgaggaagatggtggaggaggtgtttgatgtgctgtacagcgaggccctgggccgggcctctgtggtgcccctgccctatgaaaggctgctgcgggagcccggcctgctggccgtgcagggcctgcctgagggcctggccttccggcggccagcagaatatgaccccaaggccctgatggccatcctggagcacagccaccgcatccgcttcaagctgaagaggcccctggaggatggcggccgggacagcaaggccctggtggagctgaatggagtgtccctcatccccaagggcagccgggactgtggcctgcacggccaggcccccaaggtgcccccccaggacctgcccccaacagccaccagcagctccatggccagcttcctgtacagcacagccctgcccaaccacgccatccgggagctgaagcaggaggcccccagctgccccctggcccccagcgacctgggcctgagccggcccatgcctgagcccaaggccaccggggcccaggacttcagtgactgctgcggccagaagcccaccggccctgggggccccctcatccagaatgtgcacgccagcaagaggatcctcttcagcatcgtgcatgacaagtctgagaagtgggatgccttcatcaaggagacagaggacatcaacaccctgagagaatgtgtgcagatcctcttcaacagccgctatgcagaggccctgggcctggaccacatggtgcctgtgccctacaggaagatcgcctgtgaccctgaggccgtggagatcgtgggcatcccagacaagatccccttcaagaggccctgcacctacggcgtgcccaagctgaagaggatcctggaggagcggcacagcatccacttcatcatcaagaggatgtttgatgagcgcatcttcaccggcaacaagttcaccaaggacaccaccaagctggagcccgccagccccccagaggacaccagcgctgaggtgtcccgggccaccgtgctggacctggccggaaatgcccggagtgacaagggctccatgtctgaggactgtggccctggcaccagcggggagctgggcggcctgcggcccatcaagattgagcctgaggacctggacatcatccaggtgacagtgcctgaccccagccccaccagcgaggagatgacagacagcatgcctggccacctgcccagtgaagattctggctacggcatggagatgctgacagacaagggcctgtctgaagatgcccggcctgaggagaggcctgtggaggacagccatggagatgtgatccggcccctgaggaagcaggtggagctgctcttcaacaccaggtatgccaaggccatcggcatcagcgagcctgtgaaggtgccctacagcaagttcctgatgcaccctgaggagctgtttgtggtgggcctgcctgagggcatcagcctgcggcggcccaactgcttcggcatcgccaagctgaggaagatcctggaggccagcaacagcatccagtttgtgatcaagaggcctgagctgctgacagagggcgtgaaggagcccatcatggacagccagggcacagccagcagcctgggcttcagccccccagccctgcccccagagcgggacagcggggaccccctggtggatgagagcctgaagaggcagggcttccaggagaactatgatgcccggctgagcagaattgatattgccaacaccctgcgggagcaggtgcaggacctcttcaacaagaagtatggagaggccctgggcatcaagtaccctgtgcaggtgccctacaagaggatcaagagcaaccctggcagcgtcatcatcgagggcctgcccccaggcatccccttcaggaagccctgcaccttcggcagccagaacctggagcgcatcctggccgtggccgacaagatcaagttcaccgtgacccggcccttccagggcctcatccccaagccagatgaagatgatgccaaccggctgggggagaaggtgatcctgcgggagcaggtgaaggagctgttcaatgagaagtacggggaggccctgggcctgaacagacctgtgctggtgccctacaagctgatccgggacagcccagatgctgtggaggtgacaggcctgcctgatgacatccccttcaggaaccccaacacctatgacatccaccggctggagaagatcctgaaggcccgggagcacgtgaggatggtgatcatcaaccagctgcagccctttgctgagatctgcaatgatgccaaggtgcctgccaaggacagcagcatccccaagaggaagaggaagagggtgtctgagggcaacagcgtgagcagcagcagcagcagcagcagcagcagcagcagcaacccagattctgtggccagcgccaaccagatcagcctggtgcagtggcccatgtacatggtggactatgccggcctgaatgtgcagctgcccggccccctgaactactag

SEQ ID NO: 190631 - DNA, 2880 bp, Artificial Sequence
  derived and/or modified sequence
atggccctgctgggcaagcggtgcgacgtgcccaccaacggctgcggacctgacaggtggaactccgcattcactcgcaaagacgagataatcacatctctggtgtccgctctggactctatgtgctctgctctgtccaaacttaatgctgaggtggcctgcgttgccgtgcatgacgaatctgcttttgttgtagggaccgagaaaggacggatgtttctaaacgctaggaaggagctccagtcagattttctgcggttctgtcgcggcccaccctggaaagaccccgaagccgagcacccaaagaaggtgcagaggggtgagggaggcgggcgctcactgccaaggtcctcgctggagcatgggtctgatgtttacctgttaagaaagatggttgaggaagtattcgacgtactgtattcggaggccctggggcgggcatccgtggtgcctctcccatatgaaagattgttaagagagcccgggttgttggctgtgcagggcctccccgaagggttagcattcagaaggccagccgagtatgatcccaaagcgctcatggcaatcctggaacactcccacagaatccggttcaaactgaaacgaccacttgaggacggaggcagagactcaaaggcactggtcgagctgaatggcgtgagcctgattccaaagggatcacgtgactgtggactccacggccaggcacctaaggtgcccccccaggatctgcctccaacagcaacaagttctagtatggcaagtttcctctactctactgcgttgccaaatcacgctattcgggagctaaaacaggaagccccatcttgcccacttgcgccgtccgaccttggcctgagcagaccaatgcccgaaccaaaggcgacaggagctcaggattttagcgactgctgcggacaaaaacccacagggcctgggggccccctaatccaaaatgttcatgcctccaagcggattctgttctcaatcgtgcacgacaagagcgagaagtgggatgcctttatcaaggagactgaagatatcaacactctgcgcgaatgcgttcagatactcttcaacagcaggtacgctgaggcactgggcctcgatcacatggtgcctgttccctacagaaaaatcgcttgcgaccctgaagctgtcgagatagtaggaattccggacaaaatcccctttaaacggccctgtacctatggtgtccccaaactgaagaggatactggaagagcgacactccattcatttcattattaaacgaatgtttgatgagagaattttcacaggtaacaagttcacgaaggatacaaccaaactggagcctgcctcgcctcctgaggacaccagcgcagaggtaagtcgcgcaacagttctggacctggccgggaatgcaagatccgataagggttccatgtccgaagactgcggtcccgggactagcggagaactcggcggtctgcggccgatcaagatagaaccggaggatttagatattatccaagtgactgtgcctgatccttctcctacttccgaagagatgaccgactccatgccaggccaccttccgtcagaagactcaggttacggtatggagatgctgactgacaagggactctcggaagatgcaaggcctgaggaacgacctgtcgaagattcacatggggacgtaatacgacccttgcgaaaacaagtagagctcctgttcaataccagatatgctaaggccattgggatctctgaaccagtgaaagtgccttactccaagttcttgatgcatcccgaggaactattcgtggtcgggcttcctgaaggaatttcgctgcggcgaccaaactgttttggtatcgcgaagttgaggaagatccttgaggctagtaattcaatccagttcgtcattaagcggccggagttgcttaccgagggggtgaaagagcccattatggattcccagggcaccgcgtctagcctcggttttagccccccagctctgccgcctgagagggactctggggaccctctggtcgacgaatccttaaaacgccaaggttttcaggagaattacgatgcccggctgtctcggattgacatcgccaacaccctgagagaacaggtacaagatttgttcaacaagaagtacggagaggcgttaggcatcaaataccccgtgcaggtgccctacaagagaataaaatcaaatccaggaagcgtgataattgagggtctccctccaggaatcccattccggaaaccgtgtacatttggctcacaaaatttggagcgcatccttgcagtcgcggacaaaattaagtttactgtcacccggccatttcagggtctgattccgaaacctgatgaagatgacgcaaacagacttggggagaaagtcattctgagggagcaggtcaaagagttattcaatgagaaatacggggaagcgttgggactgaacaggccagtgttggtgccatacaagctgatcagggatagccccgacgcagtcgaggtgacaggacttccagatgacatcccattcagaaacccaaatacatatgatatccaccgccttgaaaaaatcttgaaagcgagggagcacgtccgaatggttatcataaaccaactgcaaccctttgctgaaatctgcaacgacgccaaagttcccgccaaggattcatctataccgaagagaaaaagaaaacgcgtgagtgaagggaactccgtgtcttcgtcctcaagtagctcctccagttcttctagcaaccctgattccgtcgccagcgctaatcagatttctcttgtccagtggccgatgtatatggtagactacgcaggcctgaatgtgcagttgcccggcccactaaactactag

SEQ ID NO: 190632 - DNA, 2880 bp, Artificial Sequence
  derived and/or modified sequence
atggcgcttctcgggaagcggtgcgacgtccccactaacggctgcggacccgacagatggaattctgcattcaccagaaaggacgagattatcacaagcctagtgtccgcactggacagtatgtgcagcgctttgtcgaagttgaatgctgaggtcgcatgcgtggccgtgcacgatgagtcggccttcgtcgtcggaacagagaaaggacggatgtttctgaatgcaaggaaagagcttcagtcggactttctgagattttgtcgcggtcctccctggaaggatcccgaggccgaacaccccaaaaaagtgcagcggggtgaggggggaggtcggtccctcccacggagttccctagagcatggatcggacgtttacctgctcagaaagatggtagaagaggtgttcgacgtgctgtattcggaagcgttggggagggcctcagtggttccattgccatatgaaagactgcttcgcgaacctggtctgttggccgttcagggcttacctgaaggcctcgcatttaggcgacccgctgaatacgaccccaaagcactgatggccattttggaacacagtcaccggatccgtttcaagctgaagaggccacttgaggacggaggcagagattcgaaagctttggtggaactcaacggcgtcagcctgatcccaaagggtagtagggactgcggtctgcatgggcaggcacccaaggtaccacctcaggacctgcctccaaccgcgacctcatcaagcatggccagtttcctgtattctaccgccctgcccaatcacgctattcgggagctgaagcaggaagccccatcatgccctctggccccttctgaccttggattgtcccgacccatgcctgagcctaaggccaccggggcacaggacttcagcgattgctgcggtcaaaaacccacaggcccaggtggaccgctgatccagaatgtgcacgcatccaaacgaatcctattttctatcgtgcacgataagtccgaaaagtgggatgcattcattaaggagacagaagatatcaatactctgcgagagtgcgtgcaaatcctgtttaactcccgatacgcagaggcactagggctggatcacatggtccccgttccctacaggaagatcgcatgcgatcccgaagcagtggagatcgtgggaattcctgataagattcccttcaaacgaccatgtacctacggcgtgcccaaactgaaacgaatcctcgaagagcgccactctatccatttcatcatcaaacgcatgttcgacgagcggatcttcacgggtaacaaatttacgaaggataccacaaagctggaaccagcctcacctcccgaagatacttcagcggaggtcagccgagccaccgtgctagacctagccggtaacgctaggtccgataaaggtagcatgagtgaggactgcgggccaggcacaagcggagagttggggggactgcgacccatcaagattgagcctgaagatctggatattatacaggttacagtccccgaccccagccccactagcgaagagatgactgatagtatgcccggacacctgccttcggaagactccggatatggtatggagatgctcactgacaaagggctgtctgaggatgcccgtcctgaagagcggcctgttgaagattctcacggcgatgttatcaggccactgcgtaagcaagtggagttgctgtttaatacaagatatgcaaaggcaattggaatctcagaacctgttaaggtgccatacagcaagtttctgatgcaccccgaagaactgttcgtggtcggcctgccagaaggcatatctctcaggcgcccaaactgtttcggtattgccaagttacgaaagatcctggaggccagcaactcaattcagtttgtaattaagcggccagagctcctgacagaaggggtaaaagagcccatcatggactctcagggcacagcatctagcctaggcttctccccgcctgccctgcctcctgaaagggactcaggagacccacttgtggatgaaagcctgaaacggcaaggcttccaagagaactacgacgcccgtctgtcacgcatcgacatcgccaatacattgcgggaacaggttcaagatctcttcaataaaaaatacggtgaggctctcggaatcaagtatcctgtccaggtgccctacaaacgaatcaagtccaatcctggtagtgtcatcatcgagggactcccccctggtattccatttcgtaagccctgtacgtttggctcacaaaatctcgaacgcatactggcagttgccgataaaatcaaattcacagtgactagaccgttccagggcctgattccgaagccagacgaggacgatgcgaacagattaggcgaaaaggtgatcctacgtgagcaggtgaaagagctgtttaacgaaaagtacggagaggctctgggcctgaataggcccgttttagtcccctacaagttgatcagggactcccccgatgccgtagaagtcacgggccttcccgacgatattccctttcgcaatcccaatacatatgatattcacagactggagaaaattcttaaggcgcgagagcatgtgcggatggtcattatcaaccagcttcagccctttgccgagatctgtaatgacgctaaggtgcccgcaaaagattcgtcaatccccaagcgcaagagaaagagggttagtgaaggaaacagtgtgtccagttcctcttccagcagttccagctccagctccaaccccgatagtgtggccagcgcgaatcaaatctcgctcgtgcagtggccaatgtacatggttgactatgcagggttaaatgtccagctgcctgggccattaaattactag

SEQ ID NO: 190633 - DNA, 2880 bp, Artificial Sequence
  derived and/or modified sequence
atggccctgctgggcaagagatgcgacgtgcccaccaacggctgcggccccgacagatggaacagcgccttcaccagaaaggacgagatcatcaccagcctggtgagcgccctggacagcatgtgcagcgccctgagcaagctgaacgccgaggtggcctgcgtggccgtgcacgacgagagcgccttcgtggtgggcaccgagaagggcagaatgttcctgaacgccagaaaggagctgcagagcgacttcctgagattctgcagaggccccccctggaaggaccccgaggccgagcaccccaagaaggtgcagagaggcgagggcggcggcagaagcctgcccagaagcagcctggagcacggcagcgacgtgtacctgctgagaaagatggtggaggaggtgttcgacgtgctgtacagcgaggccctgggcagagccagcgtggtgcccctgccctacgagagactgctgagagagcccggcctgctggccgtgcagggcctgcccgagggcctggccttcagaagacccgccgagtacgaccccaaggccctgatggccatcctggagcacagccacagaatcagattcaagctgaagagacccctggaggacggcggcagagacagcaaggccctggtggagctgaacggcgtgagcctgatccccaagggcagcagagactgcggcctgcacggccaggcccccaaggtgcccccccaggacctgccccccaccgccaccagcagcagcatggccagcttcctgtacagcaccgccctgcccaaccacgccatcagagagctgaagcaggaggcccccagctgccccctggcccccagcgacctgggcctgagcagacccatgcccgagcccaaggccaccggcgcccaggacttcagcgactgctgcggccagaagcccaccggccccggcggccccctgatccagaacgtgcacgccagcaagagaatcctgttcagcatcgtgcacgacaagagcgagaagtgggacgccttcatcaaggagaccgaggacatcaacaccctgagagagtgcgtgcagatcctgttcaacagcagatacgccgaggccctgggcctggaccacatggtgcccgtgccctacagaaagatcgcctgcgaccccgaggccgtggagatcgtgggcatccccgacaagatccccttcaagagaccctgcacctacggcgtgcccaagctgaagagaatcctggaggagagacacagcatccacttcatcatcaagagaatgttcgacgagagaatcttcaccggcaacaagttcaccaaggacaccaccaagctggagcccgccagcccccccgaggacaccagcgccgaggtgagcagagccaccgtgctggacctggccggcaacgccagaagcgacaagggcagcatgagcgaggactgcggccccggcaccagcggcgagctgggcggcctgagacccatcaagatcgagcccgaggacctggacatcatccaggtgaccgtgcccgaccccagccccaccagcgaggagatgaccgacagcatgcccggccacctgcccagcgaggacagcggctacggcatggagatgctgaccgacaagggcctgagcgaggacgccagacccgaggagagacccgtggaggacagccacggcgacgtgatcagacccctgagaaagcaggtggagctgctgttcaacaccagatacgccaaggccatcggcatcagcgagcccgtgaaggtgccctacagcaagttcctgatgcaccccgaggagctgttcgtggtgggcctgcccgagggcatcagcctgagaagacccaactgcttcggcatcgccaagctgagaaagatcctggaggccagcaacagcatccagttcgtgatcaagagacccgagctgctgaccgagggcgtgaaggagcccatcatggacagccagggcaccgccagcagcctgggcttcagcccccccgccctgccccccgagagagacagcggcgaccccctggtggacgagagcctgaagagacagggcttccaggagaactacgacgccagactgagcagaatcgacatcgccaacaccctgagagagcaggtgcaggacctgttcaacaagaagtacggcgaggccctgggcatcaagtaccccgtgcaggtgccctacaagagaatcaagagcaaccccggcagcgtgatcatcgagggcctgccccccggcatccccttcagaaagccctgcaccttcggcagccagaacctggagagaatcctggccgtggccgacaagatcaagttcaccgtgaccagacccttccagggcctgatccccaagcccgacgaggacgacgccaacagactgggcgagaaggtgatcctgagagagcaggtgaaggagctgttcaacgagaagtacggcgaggccctgggcctgaacagacccgtgctggtgccctacaagctgatcagagacagccccgacgccgtggaggtgaccggcctgcccgacgacatccccttcagaaaccccaacacctacgacatccacagactggagaagatcctgaaggccagagagcacgtgagaatggtgatcatcaaccagctgcagcccttcgccgagatctgcaacgacgccaaggtgcccgccaaggacagcagcatccccaagagaaagagaaagagagtgagcgagggcaacagcgtgagcagcagcagcagcagcagcagcagcagcagcagcaaccccgacagcgtggccagcgccaaccagatcagcctggtgcagtggcccatgtacatggtggactacgccggcctgaacgtgcagctgcccggccccctgaactactag

SEQ ID NO: 190634 - protein, 823 aa, Artificial Sequence
  derived and/or modified sequence
MNGEQQLDADAGSGMEEVELSWEDYLEETGSTAVPYGSFKHVDTRLQNGFAPGMKLEVAVRTDPETYWVATVITTCEQLLLLRYDGYGEDRRADFWCDIRKADLYPIGWCEQNKKTLEAPEGIRDKVSDWDEFLRQTLIGACSPPVPLLEGLRNGRNPLDLIAPGSRLECQAFQDSLSTWIVTVVENIGGRLKLRYEGLESSDNYEHWLYYLDPFLHHVGWAAQQGYELQPPSAIRHLKNEAEWQEILAKVKEEEEEPLPSYLFKDKQVIGIHTFSVNMKLEAVDPWSPFGISPATVVKVFDEKYFLVEMDDLRPENHARRSFVCHADSPGIFPVQWSLKNGLHISPPPGYPSQDFDWADYLKQCGAEAAPQRCFPPLISEHEFKENMKLEAVNPILPEEVCVATITAVRGSYLWLQLEGSKKPIPECIVSVESMDIFPLGWCETNGHPLSTPRRARVYKQRKIAVVQPEKQVPSSRTVHEGLRNQELNSTESVMINGKYCCPKIYFNHRCFSGPYLNKGRIAELPQCVGPGNCVLVLREVLTLLINAAYKPSRVLRELQLDKDSVWHGCGEVLKAKYKGKSYRATVEIVKTADRVTEFCRQTCIKLECCPNLFGPRMVLDKCSENCSVLTKTKYTHYYGKKKNKRIGRPPGGHSNLACALKKASKRRKRRKNVFVHKKKRSSASVDNTPAGSPQGSGGEDEDDPDEGDDDSLSEGSTSEQQDELQEESEMSEKKSCSSSPTQSEISTSLPPDRQRRKRELRTFSFSDDENKPPSPKEIDGQALLLLTLPTVQECMDLKLGPAIKLCHHIERIKFAFYEQFAN

SEQ ID NO: 190635 - protein, 866 aa, Artificial Sequence
  derived and/or modified sequence
MNGEQQLDADAGSGMEEVELSWEDYLEETGSTAVPYGSFKHVDTRLQNGFAPGMKLEVAVRTDPETYWVATVITTCEQLLLLRYDGYGEDRRADFWCDIRKADLYPIGWCEQNKKTLEAPEGIRDKVSDWDEFLRQTLIGACSPPVPLLEGLRNGRNPLDLIAPGSRLECQAFQDSLSTWIVTVVENIGGRLKLRYEGLESSDNYEHWLYYLDPFLHHVGWAAQQGYELQPPSAIRHLKNEAEWQEILAKVKEEEEEPLPSYLFKDKQVIGIHTFSVNMKLEAVDPWSPFGISPATVVKVFDEKYFLVEMDDLRPENHARRSFVCHADSPGIFPVQWSLKNGLHISPPPGYPSQDFDWADYLKQCGAEAAPQRCFPPLISEHEFKENMKLEAVNPILPEEVCVATITAVRGSYLWLQLEGSKKPIPECIVSVESMDIFPLGWCETNGHPLSTPRRARVYKQRKIAVVQPEKQVPSSRTVHEGLRNQELNSTESVMINGKYCCPKIYFNHRCFSGPYLNKGRIAELPQCVGPGNCVLVLREVLTLLINAAYKPSRVLRELQLDKDSVWHGCGEVLKAKYKGKSYRATVEIVKTADRVTEFCRQTCIKLECCPNLFGPRMVLDKCSENCSVLTKTKYTHYYGKKKNKRIGRPPGGHSNLACALKKASKRRKRRKNVFVHKKKRSSASVDNTPAGSPQGSGGEDEDDPDEGDDDSLSEGSTSEQQDELQEESEMSEKKSCSSSPTQSEISTSLPPDRQRRKRELRTFSFSDDENKPPSPKEIRIEVAERLHLDSNPLKWSVADVVRFIRSTDCAPLARIFLDQEIDGQALLLLTLPTVQECMDLKLGPAIKLCHHIERIKFAFYEQFAN

SEQ ID NO: 190636 - protein, 121 aa, Artificial Sequence
  derived and/or modified sequence
MNGEQQLDADAGSGMEEVELSWEDYLEETGSTAVPYGSFKHVDTRLQNGFAPGMKLEVAVRTDPETYWVATVITTCEQLLLLRYDGYGEDRRADFWCDIRKADLYPIGWCEQNKKTLEAPE

SEQ ID NO: 190637 - protein, 94 aa, Artificial Sequence
  derived and/or modified sequence
MNGEQQLDADAGSGMEEVELSWEDYLEETGSTAVPYGSFKHVDTRLQNGFAPGMKLEVAVRTDPETYWVATVITTCEQLLLLRYDGYGEDRRAD

SEQ ID NO: 190638 - protein, 50 aa, Artificial Sequence
  derived and/or modified sequence
MNGEQQLDADAGSGMEEVELSWEDYLEETGSTAVPYGSFKHVDTRLQNGF

SEQ ID NO: 190639 - DNA, 2472 bp, Artificial Sequence
  derived and/or modified sequence
atgaatggcgaacaacagttggacgctgatgctggttctggtatggaggaggtagagttaagctgggaagattatcttgaagagacaggctccactgctgttccctacggatccttcaagcacgtggatacccgcctgcagaacggctttgcgcccggcatgaagctggaagtcgcagtgaggactgaccctgaaacctactgggtggcaactgtaattaccacttgcgaacagctcctccttctgcggtacgacgggtacggagaggacaggcgtgcagatttttggtgcgacattcgaaaggccgatctgtatcccatcggatggtgcgagcaaaacaagaaaaccttggaggccccagaggggattcgggataaagtgtcggattgggatgaattcctccgccaaacactgattggcgcatgcagcccccccgtcccgctgctggaaggcctgaggaacggccgtaatccactcgacttgatcgctccagggtctagactggagtgtcaagcttttcaagattctctgtcaacctggattgtgacagtggtggagaacattggcgggcgcctcaagcttcgctacgaagggttagaatcgagcgacaattacgagcattggttatactaccttgacccttttctccaccacgtggggtgggccgctcagcagggctacgagttgcagccacccagcgcaattagacacttgaagaacgaggccgaatggcaagaaatcctcgccaaagttaaggaggaagaggaggagcctcttccttcatacttgtttaaggataaacaggtcatcgggattcacaccttctccgttaatatgaaactcgaggccgtggatccctggtctccttttggcatttccccagctaccgtcgttaaggtatttgacgagaaatacttcctggttgaaatggatgacttgagacccgaaaaccatgctcgcaggagtttcgtgtgtcacgccgactcccctggaatcttcccagttcagtggtccttgaagaatgggctacacatctctcccccacccggatacccaagccaggattttgactgggccgactatttgaaacagtgtggcgcagaagccgcaccccagcggtgcttccctccactgatcagtgagcacgagtttaaggaaaacatgaagctcgaagccgtaaacccaattcttccagaagaagtgtgtgtggctacgatcacggctgttcggggcagttacctctggctgcagctcgagggatccaagaagcctatccccgagtgcatcgtctctgttgagtctatggacatcttccctctgggttggtgtgagacgaatggccaccccctgagcacaccacgacgtgcccgcgtgtataaacaacgaaaaatcgcggtggtgcaaccggaaaaacaggtacctagctctcggaccgtgcacgaaggcctaagaaatcaggaattgaacagtacggaatccgtgatgattaatgggaaatattgttgtccgaaaatttacttcaatcatcgttgcttctccggtccatatctgaacaaaggtagaatcgcagagctgccgcagtgtgtgggacccgggaattgcgtgctggtactgcgagaagtgctgacattactgatcaatgccgcctacaagcccagcagggtactccgggaactccagctggacaaggattcagtgtggcacggttgcggtgaggtcctcaaagccaagtacaaagggaagtcctaccgggctacagtagaaattgtgaagacggcagacagggtcaccgaattctgccgccagacatgcatcaagctcgagtgctgtccaaatctcttcggcccgagaatggtgcttgacaaatgttctgaaaactgcagtgtgctgaccaagacaaaatacactcattactacggaaagaagaaaaacaagcggatcggccgacctccgggaggccatagcaatctggcctgcgctctgaagaaagcctcaaagcggcggaaacgacgaaaaaacgtatttgtccataaaaagaagagatccagcgcctccgtggataacactccagctggatccccacagggatctggtggagaagatgaggacgacccggatgagggggacgatgactcactgtctgaaggtagcaccagcgagcaacaggacgaactacaagaagagtccgaaatgtcagagaagaagtcatgctcctcatctcccacgcagagcgagatttctaccagccttcccccggataggcaacgcagaaagcgcgaactgcggacatttagcttctcagatgacgaaaacaagcctccatccccgaaggaaattgatggacaggccttactcctgctgaccctgcccacagtgcaagaatgtatggacctgaaactggggcccgcaatcaaactgtgccaccatatcgaacggataaagttcgcgttctacgaacaattcgctaattag

SEQ ID NO: 190640 - DNA, 2601 bp, Artificial Sequence
  derived and/or modified sequence
atgaacggggagcagcagcttgacgcagatgctggatccggcatggaagaggtcgaactgtcttgggaagactacctggaggagaccggatctaccgctgtgccctacggatcgttcaagcacgtggataccaggctacagaacggctttgctccaggaatgaagctggaggtggccgtgcgcacggatcccgaaacttattgggtagctacagttatcaccacttgtgagcagttgctcctcctccgctatgacggttacggcgaagatcggagagctgatttctggtgcgacatcagaaaagccgacctatatccgatcggctggtgcgaacagaacaagaagacactggaagcacctgagggcatccgagacaaggtgagtgactgggatgagttccttagacagaccttaataggagcttgcagcccgcctgtcccactgctcgagggactaagaaatgggcggaaccccctggacctgatcgcccccggaagtaggctcgagtgccaagcgtttcaggactcactgtccacctggatcgtcactgttgtagaaaacatcggtggtcggttgaaactgagatacgagggcctggagtcgagtgacaattacgaacactggctctactatctcgatccatttctgcaccatgtcggctgggcagcccagcagggctatgaactgcagccacccagcgctatcagacacctcaagaatgaggctgaatggcaggagattcttgcaaaggtcaaagaagaggaagaggagcccttgccttcttacctgttcaaagataaacaggtcatcgggatccatacgttttccgtgaacatgaaactcgaagccgtggacccttggtcccccttcgggatctcacccgcaaccgttgtgaaagttttcgacgagaaatactttcttgttgaaatggatgacctgcgtccagaaaaccacgcacggcgaagtttcgtgtgtcatgcggactcccccggcatttttccagtgcagtggagcctgaagaacggcctccatattagcccacctccgggctatccatctcaggatttcgattgggccgactatctgaaacagtgtggagctgaggccgcccctcaacgttgttttccacccctcatttccgaacacgagttcaaggagaatatgaagctcgaagctgtcaaccctattctgcctgaagaggtctgcgtcgccactattaccgctgttcggggctcctatctttggctgcagttggaaggttccaagaagcctattcccgaatgcattgtttctgttgagtcaatggatatattcccgctgggatggtgtgagacgaatggacacccgttgagcacccccagacgggccagggtctacaagcagaggaaaattgccgttgtgcagccggagaaacaggtgccttcgtcgcgcacagtccacgagggcctccggaaccaggagttgaattcaaccgaatctgtgatgattaatggtaaatactgctgcccaaagatctatttcaatcatcggtgtttctctgggccctatctgaataaagggagaattgcagagctcccccagtgcgtcggaccaggcaactgtgtgttggttttaagagaagtcctgaccctcttaattaatgcggcttataagccttctagagtgctaagagagctccagctagacaaagacagtgtctggcacggctgtggcgaagtgctgaaggcgaaatacaaaggcaagagctacagagccaccgtcgagattgttaagaccgcagatcgtgttacagaattttgcaggcagacctgcataaagctggagtgttgccctaatctctttggccctagaatggttctggacaaatgctctgagaactgctccgtgcttacgaagaccaaatacacccactattacgggaagaagaagaacaagaggatcggccggccccccggggggcactcgaacttggcctgcgcactcaaaaaggcttccaagcggaggaagcggcggaaaaacgtgttcgttcacaagaagaaacggagtagcgcaagcgtggacaacacccccgctggatcacctcagggctcgggcggcgaggatgaggatgatcccgacgagggtgacgatgattccctgtctgagggctccaccagcgagcagcaagacgaactgcaggaggagagcgaaatgagcgagaagaaatcttgctcatcaagcccaacccaatctgagattagcacaagcctgcctcctgatagacaacgccggaagcgggaactaaggacattttcttttagtgatgacgaaaataaacctccaagccccaaggagatccgtatagaggtcgcagagcgactgcacctcgattcgaaccctttaaagtggtcagtggcagatgtcgtgaggttcataagatccactgactgtgctccccttgcaaggatctttctcgaccaggaaatcgatggacaagctttattgttactgaccctgcccactgttcaggagtgcatggatctgaagctcgggccagcaataaaactgtgtcaccacattgagcgcattaaattcgctttttacgaacagttcgccaactag

SEQ ID NO: 190641 - DNA, 2601 bp, Artificial Sequence
  derived and/or modified sequence
atgaacggggaacagcagcttgacgccgatgccggatcagggatggaggaggtggagctcagttgggaggactacctggaggaaaccggttccacagccgtgccgtacggcagtttcaaacatgtggacaccaggttgcagaatggattcgccccaggaatgaagctcgaagttgccgtccgcacggacccagaaacctactgggtcgccaccgttatcaccacttgtgagcagctattgttgctgcgctatgacgggtatggggaggatagaagggcagatttctggtgcgatataagaaaggccgatttgtaccctattggctggtgtgagcagaataagaaaacactggaggccccagaaggcatcagggataaggtctcagattgggacgagtttctgagacaaacattgatcggtgcatgctccccccctgtgccactgctggagggactcagaaacgggaggaacccactggacctgatcgctcccgggtctcgcctcgaatgtcaggcctttcaggattctctgagcacttggattgtgacagtggttgaaaatatcggagggagactcaaacttcggtatgagggtctcgagagtagcgacaattacgaacactggctgtactatctcgacccttttctgcatcatgtgggatgggcagcccaacagggatatgagcttcaacccccgtccgcaattagacacctgaaaaatgaggccgagtggcaggagattttggcgaaggtgaaggaagaggaggaggaacctctgccttcataccttttcaaggataaacaggtgattggcattcacactttttccgtgaacatgaagctagaggcagttgacccatggagtccctttggcatttccccagctaccgtggtgaaggttttcgatgaaaagtactttctcgtggaaatggatgacttacgtcctgaaaaccatgcccgccggtccttcgtctgccatgcagacagccccggaatatttcctgtccagtggtcactgaagaacggtctccacatcagtccgcctcctggttacccaagccaggatttcgattgggctgattatttaaaacagtgcggggcggaggcagcaccgcaacgatgcttcccacctctcatatctgagcatgaattcaaggagaacatgaagcttgaagcggtgaaccccattttgccagaggaagtctgtgtggcaacgatcacggctgttcgcggaagctatctgtggctacagctggaggggtcaaaaaagcccattcccgagtgcatcgtctccgtcgagtcaatggatattttccccctggggtggtgcgagactaacgggcaccccctctctactcctaggcgggccagagtgtacaaacagcgcaaaatcgctgtggtccagcccgagaagcaagtaccttcttcccgaacggtccacgaggggttacgcaaccaggagctcaattcaaccgagtcagtcatgattaatggtaaatactgctgtcctaagatctacttcaatcaccgatgctttagcggcccctatcttaataaggggaggatcgccgagctccctcaatgtgtgggacctggcaactgtgtgcttgtactgcgcgaggtgcttactttattgattaatgcagcctataagccaagtagagtgttgcgagaactgcagcttgacaaggactctgtgtggcacggctgtggcgaggtgttaaaagccaagtacaaagggaaaagctaccgggctaccgtggagatcgtgaaaaccgctgaccgcgtgaccgagttctgcagacagacctgcataaagctagagtgctgcccgaacctgttcggacccaggatggtgctcgacaagtgtagtgagaactgctctgtcttgacaaaaaccaagtacacacactactacggtaagaagaagaacaagcgaattgggagacctcccggaggtcacagcaatttggcttgcgctcttaaaaaggcctcaaaacggcgcaagaggcgcaagaatgtgtttgttcataaaaaaaaaagaagctcggcctccgtcgataacacaccggccggctccccacagggaagcggcggagaggacgaagacgaccctgacgagggtgacgacgacagcctgtccgaaggaagtacaagcgagcagcaagacgagctgcaggaggagagtgagatgtccgaaaagaagtcctgctcttcttcaccaacacagtccgaaattagcacctcccttcccccagatagacagagacggaagcgcgagctccggacgttcagcttttccgacgatgaaaacaaacctccttcccctaaggagatccggattgaagtagcggagaggttacacctggactcaaaccctctgaagtggagcgtggcagacgtggtaaggtttattcgttccactgactgcgccccgcttgcccgcatttttttggaccaagaaattgatgggcaggcccttttgttgctgactctaccgactgtgcaggaatgtatggatcttaaattggggccagccatcaagctgtgtcatcatatcgagaggatcaaatttgcgttctatgagcagttcgccaattag

SEQ ID NO: 190642 - DNA, 2601 bp, Artificial Sequence
  derived and/or modified sequence
atgaatggggagcagcagctagacgctgatgccggatcaggcatggaagaggtggaactgtcctgggaagattaccttgaagaaaccggttcaacagctgtaccctacggtagcttcaagcacgtcgataccaggctgcagaacggctttgcccctggcatgaagctggaggtggcagtgcgcacggatcctgaaacgtactgggtggcaactgtgattacgacctgtgagcagctcctcctccttcgttacgacggctacggcgaagatcgtcgcgccgacttctggtgtgacatccggaaggcagatctgtaccctatcggttggtgcgagcaaaacaagaagacactggaagcaccagagggaattcgtgataaagtttccgactgggacgaattcctacgccagactctcattggcgcttgtagcccccccgtgccactcctggaggggctgcggaacggaagaaaccctctggatctcatcgcacctggcagccgcctggagtgccaggcctttcaggactctcttagcacatggatcgtaacggtggtcgagaacattgggggtcggctcaaactgcgatatgagggactagagagtagtgataactacgaacattggctgtactaccttgaccccttccttcaccatgtgggatgggccgcccaacagggctacgaactgcaacctccttctgccataaggcacctgaaaaatgaggctgagtggcaggaaatcctggcaaaagttaaggaagaggaggaggaacctctcccaagctacctcttcaaagataaacaagtaattgggatccataccttttcagtgaatatgaagttggaggccgtggacccctggtctcccttcggtatctccccggcgacagtcgtgaaggtgttcgatgagaagtattttctggtcgagatggatgacctccggccagaaaaccacgctaggcgctctttcgtgtgccatgccgacagtccagggatttttccagtgcagtggagtctgaagaatgggttgcatatatcaccaccgccagggtatccctctcaggattttgactgggctgactacttgaaacagtgcggcgcggaggcagccccacagcgctgtttcccccccctaatttctgagcatgagttcaaagaaaacatgaagctggaggccgtcaacccaatcctcccggaggaggtgtgtgtggccactatcaccgctgtgcggggttcgtacctttggttacagctcgagggttctaagaaacccatcccagaatgcattgtcagtgtagaatctatggatatattcccactgggctggtgtgagaccaacggtcatcctctgtcgaccccaaggagggccagagtatacaaacaacggaagatagctgtagttcagcctgagaaacaggtccccagttctcgcacagttcatgaggggctgcggaaccaagagttaaattccacagaatcagtcatgatcaacggaaagtactgttgtcccaaaatctactttaatcaccgctgctttagcgggccctacctgaataagggtcgaatagcagaactcccacagtgcgtggggccaggaaactgtgtgctggtcttgcgcgaagtcttgacattgctcatcaatgccgcgtataaacccagtagagtactgagagagcttcagctagacaaggatagcgtgtggcacggatgcggcgaggtacttaaggctaagtacaaaggaaaaagctatcgtgccacagttgagatcgtgaaaacagctgaccgcgttactgagttctgccgccagacctgtattaagttggagtgctgcccaaacctgtttggtcctaggatggttttggataagtgtagcgagaactgcagcgtgcttacaaaaacaaaatacacccactactatggaaagaaaaaaaacaaaagaatcggcagaccccccggggggcactccaatctggcctgcgctctgaaaaaggccagtaagagaagaaaaaggcgtaagaacgttttcgtgcataaaaagaagcggagtagcgctagcgtggataatacccccgcaggcagcccccagggcagcggaggagaggatgaagatgaccctgatgagggcgatgatgatagcttaagtgaggggagcacctcagagcagcaagatgaattgcaggaagagtcagagatgagtgaaaagaaaagctgttcttccagccctacacagagtgagattagcacatctctccctcctgaccgccaaagacgaaaaagagagctgcgcaccttcagctttagcgatgacgagaacaaacctccatcccccaaggagatcagaattgaggttgccgagaggcttcaccttgacagcaatcctttgaagtggtcagtggctgatgtagtcaggtttatccgcagcacagattgtgctccattggctaggatcttcctcgatcaggaaatcgacggacaggctctattgcttctcacattacccactgttcaagaatgtatggacctcaagctgggccctgctataaagctgtgccaccatatcgagaggataaagttcgccttctatgaacagttcgctaattag

SEQ ID NO: 190643 - DNA, 366 bp, Artificial Sequence
  derived and/or modified sequence
atgaacggagaacagcagctcgacgccgacgccggatcaggtatggaagaagtggagctctcctgggaggattatctcgaagaaacggggtcaacagctgttccatatggctcattcaaacacgttgacacccgcctccagaacgggttcgcccctggcatgaagctggaagtcgccgtgaggacagaccccgagacttactgggtggctacagtgatcaccacctgcgagcaactcttgctactgcgttatgatggctacggcgaagatagacgcgctgacttttggtgtgacatacgaaaggccgatctgtaccctataggttggtgtgagcagaacaagaagactctggaggcacccgagtag

SEQ ID NO: 190644 - DNA, 285 bp, Artificial Sequence
  derived and/or modified sequence
atgaacggggaacagcagctcgatgcagacgccgggtccggtatggaggaggtggaactgagctgggaggattacctggaagagacagggagtactgctgttccctacgggtcgtttaaacacgtcgatacaagactccagaacggttttgcgcctggaatgaagctggaggtagcagtcaggaccgacccagaaacctactgggttgccactgtgatcacgacctgtgaacagctgctcctgctgcggtatgacggatatggagaggaccgccgcgccgactag

SEQ ID NO: 190645 - DNA, 153 bp, Artificial Sequence
  derived and/or modified sequence
atgaacggggaacagcagctggatgctgacgcaggttctggtatggaagaggtggaactgagttgggaagactacttggaagagaccgggagtaccgctgtgccatacggctcgtttaagcacgtggacacccgcctacaaaatggcttctag

SEQ ID NO: 190646 - DNA, 2472 bp, Artificial Sequence
  derived and/or modified sequence
atgaatggagagcagcagctggatgctgatgctggcagcggcatggaggaggtggagctgtcctgggaggactacctggaggagaccggcagcacagctgtgccctacggcagcttcaagcacgtggacacccggctgcagaatggatttgcccctggcatgaagctggaggtggccgtgaggacagatcctgagacctactgggtggccaccgtcatcaccacctgtgagcagctgctgctgctgcgctatgatggctatggagaagatagaagagctgacttctggtgtgacatcaggaaggctgacctgtaccccatcggctggtgtgagcagaacaagaagaccctggaggcccctgagggcatccgggacaaggtgtctgactgggatgagttcctgcggcagaccctgattggagcctgcagcccccctgtgcccctgctggagggcctgagaaatggaagaaaccccctggacctgattgcccctggcagccggctggagtgccaggccttccaggacagcctgagcacctggatcgtgacagtggtggagaacatcggcggccgcctgaagctgcgctatgagggcctggagagcagtgacaactatgagcactggctgtactacctggaccccttcctgcaccacgtgggctgggccgcccagcagggctatgagctgcagcccccatctgccatccgccacctgaagaatgaggccgagtggcaggagatcctggccaaggtgaaggaggaggaggaggagcccctgcccagctacctgttcaaggacaagcaggtgattggcatccacaccttctctgtgaacatgaagctggaggccgtggacccctggagccccttcggcatcagccctgccaccgtggtgaaggtgtttgatgagaagtacttcctggtggagatggatgacctgcggcctgagaaccacgcccggcgcagctttgtgtgccacgccgacagccctggcatcttccctgtgcagtggagcctgaagaatggcctgcacatcagccccccacctggctaccccagccaggactttgactgggccgactacctgaagcagtgtggggctgaggccgccccccagcgctgcttccccccactcatcagcgagcacgagttcaaggagaacatgaagctggaggccgtgaaccccatcctgcctgaggaggtgtgtgtggccaccatcacagctgtgcggggcagctacctgtggctgcagctggagggcagcaagaagcccatcccagaatgtattgtgtctgtggagagcatggacatcttccccctgggctggtgtgagaccaacggccaccccctgagcaccccccggcgggcccgggtgtacaagcagaggaagattgctgtggtgcagcctgagaagcaggtgcccagcagcaggacagtgcatgagggcctgaggaaccaggagctgaacagcacagaatctgtgatgatcaatggcaagtactgctgccccaagatctacttcaaccaccgctgcttcagcggcccctacctgaacaagggcagaattgctgagctgccccagtgtgtgggccctggcaactgtgtgctggtgctgcgggaggtgctgaccctgctgatcaatgctgcctacaagcccagccgggtgctgcgggagctgcagctggacaaggacagcgtgtggcacggctgtggggaggtgctgaaggccaagtacaagggcaagagctaccgggccaccgtggagatcgtgaagacagctgacagagtgacagagttctgccggcagacctgcatcaagctggagtgctgccccaacctgtttggccccaggatggtgctggacaagtgcagcgagaactgcagcgtgctgaccaagaccaagtacacccactactacggcaagaagaagaacaagagaattggccggcccccaggcggccacagcaacctggcctgtgccctgaagaaggccagcaagaggaggaagaggaggaagaatgtgtttgtgcacaagaagaagaggagcagcgcctctgtggacaacaccccagctggcagcccccagggcagcggcggggaggatgaagatgatcctgatgaaggagatgatgacagcctgtctgagggcagcaccagcgagcagcaggatgagctgcaggaggagagcgagatgtctgagaagaagagctgcagcagcagccccacccagagcgagatcagcaccagcctgcccccagaccggcagaggaggaagcgggagctgcggaccttctccttcagtgatgatgagaacaagccacccagccccaaggagattgatggccaggccctgctgctgctgaccctgcccaccgtgcaggagtgcatggacctgaagctgggccctgccatcaagctgtgccaccacatcgagcgcatcaagtttgccttctatgagcagtttgccaactag

SEQ ID NO: 190647 - DNA, 2601 bp, Artificial Sequence
  derived and/or modified sequence
atgaatggagagcagcagctggatgctgatgctggcagcggcatggaggaggtggagctgtcctgggaggactacctggaggagaccggcagcacagctgtgccctacggcagcttcaagcacgtggacacccggctgcagaatggatttgcccctggcatgaagctggaggtggccgtgaggacagatcctgagacctactgggtggccaccgtcatcaccacctgtgagcagctgctgctgctgcgctatgatggctatggagaagatagaagagctgacttctggtgtgacatcaggaaggctgacctgtaccccatcggctggtgtgagcagaacaagaagaccctggaggcccctgagggcatccgggacaaggtgtctgactgggatgagttcctgcggcagaccctgattggagcctgcagcccccctgtgcccctgctggagggcctgagaaatggaagaaaccccctggacctgattgcccctggcagccggctggagtgccaggccttccaggacagcctgagcacctggatcgtgacagtggtggagaacatcggcggccgcctgaagctgcgctatgagggcctggagagcagtgacaactatgagcactggctgtactacctggaccccttcctgcaccacgtgggctgggccgcccagcagggctatgagctgcagcccccatctgccatccgccacctgaagaatgaggccgagtggcaggagatcctggccaaggtgaaggaggaggaggaggagcccctgcccagctacctgttcaaggacaagcaggtgattggcatccacaccttctctgtgaacatgaagctggaggccgtggacccctggagccccttcggcatcagccctgccaccgtggtgaaggtgtttgatgagaagtacttcctggtggagatggatgacctgcggcctgagaaccacgcccggcgcagctttgtgtgccacgccgacagccctggcatcttccctgtgcagtggagcctgaagaatggcctgcacatcagccccccacctggctaccccagccaggactttgactgggccgactacctgaagcagtgtggggctgaggccgccccccagcgctgcttccccccactcatcagcgagcacgagttcaaggagaacatgaagctggaggccgtgaaccccatcctgcctgaggaggtgtgtgtggccaccatcacagctgtgcggggcagctacctgtggctgcagctggagggcagcaagaagcccatcccagaatgtattgtgtctgtggagagcatggacatcttccccctgggctggtgtgagaccaacggccaccccctgagcaccccccggcgggcccgggtgtacaagcagaggaagattgctgtggtgcagcctgagaagcaggtgcccagcagcaggacagtgcatgagggcctgaggaaccaggagctgaacagcacagaatctgtgatgatcaatggcaagtactgctgccccaagatctacttcaaccaccgctgcttcagcggcccctacctgaacaagggcagaattgctgagctgccccagtgtgtgggccctggcaactgtgtgctggtgctgcgggaggtgctgaccctgctgatcaatgctgcctacaagcccagccgggtgctgcgggagctgcagctggacaaggacagcgtgtggcacggctgtggggaggtgctgaaggccaagtacaagggcaagagctaccgggccaccgtggagatcgtgaagacagctgacagagtgacagagttctgccggcagacctgcatcaagctggagtgctgccccaacctgtttggccccaggatggtgctggacaagtgcagcgagaactgcagcgtgctgaccaagaccaagtacacccactactacggcaagaagaagaacaagagaattggccggcccccaggcggccacagcaacctggcctgtgccctgaagaaggccagcaagaggaggaagaggaggaagaatgtgtttgtgcacaagaagaagaggagcagcgcctctgtggacaacaccccagctggcagcccccagggcagcggcggggaggatgaagatgatcctgatgaaggagatgatgacagcctgtctgagggcagcaccagcgagcagcaggatgagctgcaggaggagagcgagatgtctgagaagaagagctgcagcagcagccccacccagagcgagatcagcaccagcctgcccccagaccggcagaggaggaagcgggagctgcggaccttctccttcagtgatgatgagaacaagccacccagccccaaggagatcagaattgaggtggccgagcggctgcacctggacagcaaccccctgaagtggagcgtggctgatgtggtgcgcttcatccgcagcacagactgtgcccccctggcccgcatcttcctggaccaggagattgatggccaggccctgctgctgctgaccctgcccaccgtgcaggagtgcatggacctgaagctgggccctgccatcaagctgtgccaccacatcgagcgcatcaagtttgccttctatgagcagtttgccaactag

SEQ ID NO: 190648 - DNA, 366 bp, Artificial Sequence
  derived and/or modified sequence
atgaatggagagcagcagctggatgctgatgctggcagcggcatggaggaggtggagctgtcctgggaggactacctggaggagaccggcagcacagctgtgccctacggcagcttcaagcacgtggacacccggctgcagaatggatttgcccctggcatgaagctggaggtggccgtgaggacagatcctgagacctactgggtggccaccgtcatcaccacctgtgagcagctgctgctgctgcgctatgatggctatggagaagatagaagagctgacttctggtgtgacatcaggaaggctgacctgtaccccatcggctggtgtgagcagaacaagaagaccctggaggcccctgagtag

SEQ ID NO: 190649 - DNA, 285 bp, Artificial Sequence
  derived and/or modified sequence
atgaatggagagcagcagctggatgctgatgctggcagcggcatggaggaggtggagctgtcctgggaggactacctggaggagaccggcagcacagctgtgccctacggcagcttcaagcacgtggacacccggctgcagaatggatttgcccctggcatgaagctggaggtggccgtgaggacagatcctgagacctactgggtggccaccgtcatcaccacctgtgagcagctgctgctgctgcgctatgatggctatggagaagatagaagagctgactag

SEQ ID NO: 190650 - DNA, 153 bp, Artificial Sequence
  derived and/or modified sequence
atgaatggagagcagcagctggatgctgatgctggcagcggcatggaggaggtggagctgtcctgggaggactacctggaggagaccggcagcacagctgtgccctacggcagcttcaagcacgtggacacccggctgcagaatggcttctag

SEQ ID NO: 190651 - DNA, 2472 bp, Artificial Sequence
  derived and/or modified sequence
atgaacggcgagcagcagctggacgccgacgccggcagcggcatggaggaagtggaactatcttgggaagactacctagaggaaaccggctccactgccgtaccgtacggatcttttaagcacgtggacacgcgtctccagaatggctttgctcctggcatgaaacttgaggtggcagtcagaaccgacccggaaacatactgggtcgccaccgtgattaccacatgtgaacaactgttactgctgaggtacgacggttatggagaggaccgaagagctgatttctggtgcgacattagaaaagccgatctgtaccccattggctggtgtgagcagaataagaagactctggaagccccagaaggtatcagggataaagtgagtgactgggatgagttcttaagacagacgctgatcggcgcttgtagtcctccagtgcccctgctggagggccttcgcaacggtaggaaccctctggacctgatcgcgcctggctcgcggctggaatgccaggcgtttcaggactcgctgtctacttggatagtgaccgtggtggaaaatattggaggtagacttaagttgcggtacgaaggtctggaatcctcagataattacgagcattggctctattatctggaccctttcctgcaccatgtgggctgggcagctcagcagggctatgaactgcagcccccatctgctattcgccacctaaaaaatgaggctgagtggcaagagattctcgcaaaggtgaaggaggaagaggaggaaccactgccaagttatttgtttaaggataagcaggtgatcggaattcacaccttctccgtaaacatgaaactggaagccgtggacccttggtcaccatttggaatttcacccgcaacagtggtgaaggtgttcgatgaaaaatacttcctggttgaaatggatgaccttcgccctgagaatcacgctaggagatccttcgtctgccatgccgacagccccggcatttttccggtacagtggtcactaaaaaatggcctgcacatcagtccacctcctgggtacccctcacaggacttcgattgggccgactaccttaaacagtgtggcgcagaggcggctccacagagatgtttcccccctctaatttcagaacatgagttcaaggagaacatgaaactcgaggcggtcaacccaatccttcctgaagaagtgtgcgttgcaactatcaccgcagttcgcggaagctatctttggctgcaactcgagggatctaaaaaacccattccggaatgtatcgtgagcgtcgagtcgatggacatcttccccttgggctggtgtgaaaccaacgggcacccactatctaccccacggcgtgcccgagtctacaagcagcgaaagatagccgtcgttcagcccgagaaacaagtgccttccagcaggacagtacacgaaggtctgcgcaaccaggagctgaacagtacagagtccgttatgattaacgggaaatactgttgtcctaaaatctacttcaatcacagatgcttttcaggaccatatctcaacaaaggcagaatcgccgaacttcctcagtgcgtcggccctggtaactgtgtgctcgtcttacgggaagttctaaccctgctcattaacgcagcttataagccgagccgtgtgttgcgcgaactccagctggataaggattccgtctggcatggatgcggagaagttctaaaagccaagtacaagggcaaatcttatcgagccaccgttgagattgtaaagactgctgaccgggtgacagaattctgtcgccaaacctgtataaaactggagtgctgccccaacctctttgggcctaggatggtgctggataagtgttcagagaattgctccgtgctgaccaagactaaatatactcattattatgggaaaaagaaaaataaacgtatcgggaggcccccaggcggacactctaatctcgcatgcgcacttaagaaggcctcaaagaggcgcaagaggcgtaagaacgtcttcgtgcacaagaagaagcgctcctcagcgagtgtcgacaatactccagccggctcacctcaggggtctggtggcgaagacgaagacgatcccgacgagggcgatgatgatagtctctcagaaggctctacaagtgagcaacaagatgagttgcaggaagagtctgagatgtcggagaagaaaagttgctcttcttctccgactcagtccgagatcagtacgagccttccacctgatcgacagcgtcggaaacgtgagctgaggaccttttcgttctccgacgacgagaacaagccgccatcacctaaggagatcgatggtcaggcgctgctgttactgaccctccccactgtgcaggagtgtatggacctgaagttgggccctgctatcaagctgtgtcaccacattgaacgaataaagttcgccttctatgaacaattcgcgaactag

SEQ ID NO: 190652 - DNA, 2601 bp, Artificial Sequence
  derived and/or modified sequence
atgaacggcgagcagcagctggacgccgacgccggcagcggcatggaggaagtggaattatcctgggaggattatctcgaggaaacaggatccacagcagtaccttatggatccttcaagcacgtggacacaaggctccaaaacggcttcgctccaggtatgaaactagaggtggccgttaggaccgacccagaaacttattgggtcgccactgtgattacgacatgcgaacagctcctcctgttgagatatgatgggtatggcgaagacaggcgggcagacttttggtgtgatatcaggaaggcagatctctaccccatcggctggtgtgagcaaaacaaaaaaacactcgaggctcccgaggggatcagagacaaggtcagtgattgggacgaatttctccggcaaaccttaataggggcgtgcagcccccctgtgccccttcttgaagggttgcgtaacggaagaaatcccttggacctgattgctcccgggagtagactagagtgccaggccttccaagattctctgagtacctggatcgtgacggtggttgagaacatcggaggccgcctgaagctaagatatgagggactcgagtcctccgataattatgaacattggttatactacttggacccttttctacaccatgtgggctgggccgctcagcaggggtatgaattgcaaccacctagtgctatccgccatctgaaaaacgaagccgagtggcaggagatcctagctaaggtgaaagaagaggaggaggagcctctaccatcctaccttttcaaggataagcaagtgatcggcatccatacctttagtgttaatatgaagctggaggccgtagacccctggtctcccttcggaattagccccgccactgtggtcaaagtcttcgacgagaaatatttcctcgtcgagatggacgacctgcggcccgaaaaccacgctcgccgaagttttgtgtgccacgccgattcgcccggcatcttccctgtacagtggtcactgaagaatggcctgcacatttcacctccgccaggctacccttcacaggactttgactgggctgattacttaaagcagtgcggcgccgaggccgctccgcagaggtgctttcccccgttgatctcggagcacgagttcaaggagaatatgaaactggaggctgtaaatcctatcttacccgaagaggtatgtgtcgctaccatcacagccgtcaggggaagttacctgtggctccagctcgaaggcagtaaaaagcctattcctgaatgcatcgtgtcagtggaaagcatggacattttccctttagggtggtgtgaaaccaacggtcatcccctgtccacaccacgccgagctcgggtgtataaacagcgaaaaattgcagtagttcagcccgaaaaacaggtgccatctagtagaactgtgcacgaagggcttaggaaccaggagttaaattctacagagtctgtgatgataaacggcaagtattgttgccccaagatttattttaatcatcgctgctttagcggcccctacctcaataaaggtagaattgctgagcttcctcagtgcgtggggccaggaaactgtgtactagttctgcgtgaggtcctcaccttgttaatcaacgccgcctataaaccttcaagggtcctgcgcgagctccagctcgacaaggattctgtgtggcatggctgtggggaagtgctcaaggctaagtataaaggcaaaagctatagagccaccgttgaaattgtgaagacggcagatcgggttactgaattctgccggcagacctgcatcaagctggagtgttgccctaatctttttggaccgcggatggtgttggacaagtgttctgaaaattgttccgtcctgacaaagaccaaatacacccactactatggcaagaagaagaacaagcggatcggcaggccacccgggggccactcgaatttggcttgcgcactgaagaaggcctccaagaggaggaagcgccgaaagaacgttttcgtacacaagaagaagagatcctccgcctctgtcgacaacacacccgctgggtccccccaaggatccgggggtgaagacgaggatgatcccgatgagggggatgatgattcactgagtgaagggtcgactagtgaacagcaagacgagctgcaggaggaaagtgagatgtcagagaagaaaagctgttcctctagccctacccagagcgagatcagcacgagcctgcctcctgacagacaacgtcgcaagagagaattgaggacctttagctttagtgacgacgagaataaaccaccttctcctaaggagattagaatcgaggtcgcagagcgactacacctggacagcaacccgctcaagtggtccgtcgcggatgtggtgaggtttatcagaagcactgactgtgcacccctcgccagaattttcttggatcaggagatagatggccaggcactgcttctcctgaccctccccaccgttcaggaatgtatggacctaaaactcggccctgccatcaagctgtgtcatcatattgagagaatcaaattcgccttctacgaacagttcgcaaactag

SEQ ID NO: 190653 - DNA, 2601 bp, Artificial Sequence
  derived and/or modified sequence
atgaacggcgagcagcagctggacgccgacgccggcagcggcatggaagaggtcgagctgagttgggaggattaccttgaggagactgggagcaccgctgtcccctacgggtcctttaagcacgtggacaccagactgcagaatggcttcgcgcccggaatgaagttggaggtggctgtccgaactgatccagagacttactgggtggctactgtgataacgacctgtgaacagttactgcttctgcgatacgacggctatggggaagataggcgggctgatttctggtgcgacatccgaaaggcggatttataccctattggctggtgcgaacagaataagaaaacactcgaggcccccgagggcatcagggataaggtgtccgactgggatgagtttctacggcagaccctcattggcgcttgttctccacctgtgccactgctggaaggcctgagaaatggaaggaatccactggatctgatcgccccaggcagccggctagaatgccaagcctttcaagactctttgagcacttggatcgttaccgttgtggagaacatagggggacggctgaagctgagatacgaggggcttgagtctagtgataactacgaacattggttgtactacctggacccgtttctacaccacgtaggttgggctgctcagcaaggatacgagctccaacctcctagcgctatccgccatcttaagaacgaggcagaatggcaggagatattggcgaaagtaaaggaggaggaggaagagcccttgccatcctacttgtttaaggacaaacaggtaatcggcatccacaccttctccgtgaacatgaagctggaagccgtggatccatggagcccattcgggatctcacccgctacggtggtgaaagtattcgacgagaagtacttcctcgtcgaaatggatgatctgcggcccgagaaccacgccaggaggagtttcgtctgtcacgccgacagccctgggattttccctgttcagtggagcctaaagaacgggctgcacataagccccccccctggatatcccagtcaagatttcgattgggctgactatcttaagcagtgcggggcagaggccgccccccagaggtgctttccccccctaatatcagaacacgaattcaaggaaaatatgaagctcgaggctgtaaaccccatcctgcccgaagaggtttgtgtggcgaccatcacagccgtccggggcagttacctctggcttcagctggaagggtccaaaaagcccattccagaatgtatcgtctctgttgaatctatggacattttccccctgggttggtgtgagacgaatgggcacccactgtcaacccctcgaagagccagagtgtataagcagcggaaaattgccgtggtgcagcctgagaagcaggtgccgagcagtcggactgttcacgaaggcctgcgaaatcaagaactgaacagcactgaatcagtaatgatcaacggcaagtactgctgtcctaaaatctactttaatcaccggtgcttcagtggtccatacctgaataaagggagaattgctgagcttccacagtgtgtgggcccaggtaattgtgtactggtccttcgcgaagtgctaactcttctcatcaacgccgcttataagccctcacgggtgctccgcgagttgcagctggataaagattccgtgtggcacgggtgcggcgaggttctcaaagcaaaatataagggtaagtcctacagggctaccgtcgaaattgtaaagactgctgatcgcgttacagagttctgcaggcagacatgtatcaaattggaatgctgccctaacttgtttggtcctcgtatggtgctggacaaatgttcagaaaattgttctgtactgacaaagacgaagtatactcactactacgggaagaaaaagaacaagagaatagggcgaccgcccggcggccattccaatctcgcttgtgccctcaagaaagccagtaagcggagaaagagacgcaagaatgtgtttgtgcataagaagaagagaagttccgccagtgtggacaacaccccagccgggagcccacaggggtccggaggagaggacgaggatgaccccgacgagggggatgacgacagtctgagcgaaggttcaaccagtgaacagcaggacgagttacaggaagagtctgaaatgagcgaaaagaagagctgtagcagtagccccacccagagcgaaatcagcacgtctttgccaccagatagacagcgccgtaagcgggagctaagaaccttttcattttcagatgacgagaataagcccccatcaccaaaggaaatccgcattgaggtggccgaacggctccatctggattcaaatcccctgaagtggtcagtcgccgatgttgttcggtttatccggtctaccgactgtgccccactggctcgcattttcttagatcaagaaatcgacgggcaggctcttctccttctgacactgccaactgtgcaggagtgtatggatctgaagctggggccggcgatcaagctgtgccatcatatcgagagaattaagttcgcgttttacgagcagtttgccaactag

SEQ ID NO: 190654 - DNA, 2601 bp, Artificial Sequence
  derived and/or modified sequence
atgaacggcgagcagcagctggacgccgacgccggcagcggcatggaggaagtggaactatcctgggaggactatctggaagagacagggtcgaccgccgtaccctacggatcattcaagcacgttgataccagactccaaaacggctttgccccagggatgaaactggaagtggctgtcagaactgacccggagacatactgggtggcgactgttataactacttgtgaacagctgctgcttttgagatatgacggatacggcgaggacaggagggcagacttttggtgtgacattcgcaaagccgacttgtaccccattggctggtgcgaacagaataaaaaaactttagaggctcctgaaggtattcgcgataaggtttcggactgggatgagttcctgcggcagaccctgatcggtgcatgctcacctccggtgccacttctggaaggcttgcgtaatggacgtaaccccctcgatctgattgccccaggttcccgcctggaatgtcaggcattccaggactctcttagtacgtggatagttaccgttgtcgaaaacatcggcggccgcctcaagttaaggtacgaggggttagaatcttccgataactacgaacactggctatactacctggatccttttctgcaccacgtcggatgggccgcccagcaagggtatgagttgcagcccccatccgcaatccggcatcttaaaaacgaagccgagtggcaggaaatccttgccaaggtgaaagaggaagaggaggaaccgctgccaagttatctctttaaagacaagcaagtgataggaatacacactttctccgttaacatgaagctggaggctgtagacccctggtcgcctttcggcatcagtcctgctaccgtagtcaaagtctttgatgaaaaatatttcctcgtagagatggatgatctgaggcccgaaaatcatgctcgccggagctttgtctgtcacgcagattccccaggtatcttcccagtccagtggagtctgaaaaacggtctgcacatttctccgccccccggttacccatcacaggacttcgattgggccgattatctcaagcagtgtggggcggaggccgccccccagcgctgtttccccccactcatttccgagcatgaattcaaagaaaacatgaaactggaggcagtgaacccaattttaccggaggaggtatgtgtagccactatcacagccgtgcggggatcttacctgtggctacagttagaggggtctaaaaaaccgatcccagagtgtattgtttccgttgagtccatggacatctttccgttgggctggtgtgagactaacggccaccctttatccactccacgtcgggccagagtgtacaaacagcgcaagattgccgtcgttcagccagaaaaacaggtgcctagttccaggactgtgcacgaaggtcttcggaatcaggaactaaactccactgaaagcgtgatgattaacggtaagtactgctgtcccaaaatatacttcaatcataggtgcttttccggtccttacttgaataagggacgcatcgccgaactcccacagtgcgtgggcccagggaattgtgtcctggtgctcagggaagttctgacactgctaatcaatgccgcatataagccttcccgcgtgctcagagaattacagcttgataaagacagcgtctggcacggatgcggcgaggtcctaaaggccaaatataaaggcaagagttaccgcgcaactgtcgagatcgtgaagaccgctgacagagtaacagagttttgtaggcagacatgtatcaaacttgaatgctgtcctaacctgttcgggcctcggatggtgctggataagtgtagtgagaattgcagcgtgttgaccaaaacaaaatatactcactattatggcaagaaaaagaataagaggatcggccgtcctcccggggggcactccaatctagcctgcgcgctgaagaaggcgagcaaacgtaggaaacggcgcaagaacgtgttcgtgcataagaagaagagaagttccgccagcgtcgacaacacgcccgccgggagccctcagggcagcggcggggaagatgaggatgaccccgatgagggagatgacgactccttgtcggagggctctactagtgaacagcaagacgaactgcaggaggagagtgagatgagcgagaaaaagtcatgttcatccagtcccacgcagagtgagatctctacaagtcttccccctgatagacagcgccgtaaaagagaactcagaactttcagcttttcagatgacgagaataaaccaccgtctcccaaagagatacggattgaagtggccgagcgcctgcatctggacagcaatccactgaaatggagtgtggccgacgtcgtacgatttattcgtagtacagattgcgcccctttggcacgtattttcctggaccaggagatcgacggccaggcactcctgctcctgactctccctaccgtgcaggagtgtatggacctaaagctgggccccgcaatcaaactgtgtcatcatatcgagcggatcaaattcgctttctacgagcagttcgccaactag

SEQ ID NO: 190655 - DNA, 366 bp, Artificial Sequence
  derived and/or modified sequence
atgaacggcgagcagcagctggacgccgacgccggcagcggcatggaggaggtggagctctcatgggaagactacttagaagaaaccggcagtaccgcagtgccgtacggctcctttaagcatgtggatacacggttacagaacggtttcgctcctggaatgaaattagaggtagcagtgaggaccgatcccgagacctactgggtcgccaccgtcatcacaacatgcgagcagctgctattgctcagatacgatgggtacggagaagaccgtcgtgctgacttctggtgtgacatcagaaaagccgacctctaccctataggctggtgtgagcagaacaagaagacacttgaagcaccagagtag

SEQ ID NO: 190656 - DNA, 285 bp, Artificial Sequence
  derived and/or modified sequence
atgaacggcgagcagcagctggacgccgacgccggcagcggcatggaggaggtagagctgagttgggaggattacctggaagagacaggctcaacggccgtgccttatggcagtttcaagcatgtcgataccagacttcagaatgggtttgctcccgggatgaagctggaagtcgccgtgcgcacagatcctgagacatactgggtggctactgtcataaccacatgcgagcaactcctgttgctgcggtacgacggatatggtgaggatcgaagggctgactag

SEQ ID NO: 190657 - DNA, 153 bp, Artificial Sequence
  derived and/or modified sequence
atgaacggcgagcagcagctggacgccgacgccggcagcggcatggaagaggtagaactgtcttgggaggactacctggaggagacgggctccaccgctgtcccttacggctcttttaaacacgttgacactcggttgcagaatggcttttag

SEQ ID NO: 190658 - DNA, 3365 bp, Artificial Sequence
  derived and/or modified sequence
cgcggagcgccgccgccgcctccgccggagcgcgggtggaggggggcggggagagctgccggccgccccgctccgccgaacccagcaggaaggagggcgcgagcgggcgagcgcgggcagcacgggaggaaaaagcttccgcgcgggggagcgaaaagacggaaagaaagaaagaaaacgagcgcgagagggggaaaagcgagcgatcgagcgagcgcgcgcgcgaaaactccgggcagcactttcatttggacccgtggatacccattgaacagatgcttgaaacctgcaagtaatcttcagatcctagcagaaccataggcctttcctttgttttgggaggatatagcctgcctatatgctgtggaaatgaacggggagcagcagcttgatgcagatgccggctctggtatggaagaggtagaattaagctgggaagattatctagaagaaacagggtccacagcagttccctatgggtcttttaaacatgtggacacacgtttgcaaaatggatttgctcctgggatgaagctggaggtggctgtgagaacagatcctgagacctactgggttgccaccgttatcactacctgtgagcagttgctccttctccgctatgatggctatggggaggatcggagagcagatttctggtgtgacatcaggaaggctgatctctaccccattgggtggtgtgagcagaataagaagacccttgaagccccagaaggcatcagagataaagtatctgactgggatgagtttctgcggcagaccctgataggagcatgtagtcctcctgttccgctgctagagggcctccgtaatgggaggaatcctttagatctcattgctccaggatccagactagaatgtcaagctttccaggactctttaagcacttggattgttactgtagtagaaaacattggaggaaggctgaagctacgttatgaaggacttgaaagttctgacaattatgaacattggttgtattacttggatccatttcttcatcacgttggttgggctgctcaacagggatatgagcttcagcccccttcagccattagacatctaaaaaatgaagctgagtggcaagagattttggccaaagtgaaagaggaagaggaagagccattaccatcttacttatttaaggacaaacaagttattggcattcatacattctctgtaaacatgaaattggaagctgtagacccctggtctccttttgggatctctcctgctacagttgttaaggtttttgatgagaagtactttctggtggaaatggatgacttgcgtcctgagaaccacgcacggcgatcctttgtgtgccacgccgacagtcctggcatcttccctgtgcagtggagtctgaagaatggcctacacatcagcccccctccaggctacccaagccaggactttgactgggctgactacctcaaacagtgtggtgctgaagctgctccccagaggtgcttccctccgttaatttctgaacatgaatttaaggagaacatgaagctcgaggcggtgaaccccattctccctgaagaagtgtgtgttgctaccatcactgcagtgagaggctcctacctgtggctccagctggagggttctaagaagcctatacctgaatgtattgtgagtgtggaatccatggatatatttcctttgggctggtgtgaaaccaacggccaccccctcagcactcctcgccgagcacgagtatataaacagaggaaaattgcagtggttcagccagaaaaacaagtaccatcctcgaggactgtccacgagggcctgaggaatcaggagctgaactccacagagtcagttatgattaatggaaaatattgctgtccaaagatatacttcaaccaccgttgcttctcagggccatatcttaacaaaggaagaattgctgagctgcctcaatgtgtaggacctgggaactgtgttctggtccttagagaggtcctcactttacttatcaatgcagcctacaaacccagccgtgtccttcgggagctccagctggacaaagactctgtgtggcacggatgtggggaagtcctaaaagccaaatataaaggaaagagttatcgggctactgttgagatagtgaaaacagcagatcgggtgactgaattctgccggcaaacctgtatcaaactggaatgctgtcctaacctcttcggtccacggatggttctggataagtgttctgagaactgttctgtacttacaaagaccaaatacacacactattacggaaagaagaaaaataaaagaattgggaggccacctggtgggcatagtaacttagcttgtgccctgaaaaaagccagtaagaggagaaagaggcggaaaaatgtttttgttcataagaagaaacgctcctctgcatctgttgataataccccagcgggctctccccagggaagtgggggtgaagatgaggatgacccagatgaaggggatgatgattccctaagtgaaggcagtacatccgagcagcaggatgagctacaggaagaatcagaaatgtcagaaaaaaagtcatgctcctcttctcccacccaaagtgagatatccacatcgctgcctccagatagacaaaggagaaaaagggagcttcgcaccttttcattttctgacgatgaaaataaacctccttcaccaaaggaaattgatgggcaggccctgttgctccttacccttcccactgttcaagaatgcatggacttaaaattgggccctgccatcaaactttgccatcacatagagaggatcaagtttgctttttatgagcagtttgccaactgagaaggacaaccaaagtgagctggatctttgaagcacaaatgcagcaaatccttcaccctgctttataagtggagctggaatagtcctggggctctggggcctgcaggtatcagcttgctctctttgcactttcggggaaggaggactcacagtgaggaagcaaaaactgtgcacagaagtggatcacctgctggtggaaatgtggacatctcttgttcagcagatggcagtttttaaaaaataaaggttgtgaggaaaagacttatataagaagaaaagcatttccagtggtgtggcctgaaaacaaagaataacctaggctgctggaaagcacccttttggttgttttcattctgttccctcccattgtagattgaactttgttctctgctttctttttcttggaaagagaggacttagctttaagtcagcactgatttgggactgttcctaaggcatatcagtgcttcattgtcattgtgtttttaaactttttaaaattaaaacagttcattttggggatg

SEQ ID NO: 190659 - DNA, 3613 bp, Artificial Sequence
  derived and/or modified sequence
cgcggagcgccgccgccgcctccgccggagcgcgggtggaggggggcggggagagctgccggccgccccgctccgccgaacccagcaggaaggagggcgcgagcgggcgagcgcgggcagcacgggaggaaaaagcttccgcgcgggggagcgaaaagacggaaagaaagaaagaaaacgagcgcgagagggggaaaagcgagcgatcgagcgagcgcgcgcgcgaaaactccgggcaggaaggtggacttttaaatattctccactgaagcaaatgctgcaacaatttgcatttccttcaccaatgtcgtcttgtgccttttcttgttcctactgtaaaggagatgggttagatgttcactttcatttggacccgtggatacccattgaacagatgcttgaaacctgcaagtaatcttcagatcctagcagaaccataggcctttcctttgttttgggaggatatagcctgcctatatgctgtggaaatgaacggggagcagcagcttgatgcagatgccggctctggtatggaagaggtagaattaagctgggaagattatctagaagaaacagggtccacagcagttccctatgggtcttttaaacatgtggacacacgtttgcaaaatggatttgctcctgggatgaagctggaggtggctgtgagaacagatcctgagacctactgggttgccaccgttatcactacctgtgagcagttgctccttctccgctatgatggctatggggaggatcggagagcagatttctggtgtgacatcaggaaggctgatctctaccccattgggtggtgtgagcagaataagaagacccttgaagccccagaaggcatcagagataaagtatctgactgggatgagtttctgcggcagaccctgataggagcatgtagtcctcctgttccgctgctagagggcctccgtaatgggaggaatcctttagatctcattgctccaggatccagactagaatgtcaagctttccaggactctttaagcacttggattgttactgtagtagaaaacattggaggaaggctgaagctacgttatgaaggacttgaaagttctgacaattatgaacattggttgtattacttggatccatttcttcatcacgttggttgggctgctcaacagggatatgagcttcagcccccttcagccattagacatctaaaaaatgaagctgagtggcaagagattttggccaaagtgaaagaggaagaggaagagccattaccatcttacttatttaaggacaaacaagttattggcattcatacattctctgtaaacatgaaattggaagctgtagacccctggtctccttttgggatctctcctgctacagttgttaaggtttttgatgagaagtactttctggtggaaatggatgacttgcgtcctgagaaccacgcacggcgatcctttgtgtgccacgccgacagtcctggcatcttccctgtgcagtggagtctgaagaatggcctacacatcagcccccctccaggctacccaagccaggactttgactgggctgactacctcaaacagtgtggtgctgaagctgctccccagaggtgcttccctccgttaatttctgaacatgaatttaaggagaacatgaagctcgaggcggtgaaccccattctccctgaagaagtgtgtgttgctaccatcactgcagtgagaggctcctacctgtggctccagctggagggttctaagaagcctatacctgaatgtattgtgagtgtggaatccatggatatatttcctttgggctggtgtgaaaccaacggccaccccctcagcactcctcgccgagcacgagtatataaacagaggaaaattgcagtggttcagccagaaaaacaagtaccatcctcgaggactgtccacgagggcctgaggaatcaggagctgaactccacagagtcagttatgattaatggaaaatattgctgtccaaagatatacttcaaccaccgttgcttctcagggccatatcttaacaaaggaagaattgctgagctgcctcaatgtgtaggacctgggaactgtgttctggtccttagagaggtcctcactttacttatcaatgcagcctacaaacccagccgtgtccttcgggagctccagctggacaaagactctgtgtggcacggatgtggggaagtcctaaaagccaaatataaaggaaagagttatcgggctactgttgagatagtgaaaacagcagatcgggtgactgaattctgccggcaaacctgtatcaaactggaatgctgtcctaacctcttcggtccacggatggttctggataagtgttctgagaactgttctgtacttacaaagaccaaatacacacactattacggaaagaagaaaaataaaagaattgggaggccacctggtgggcatagtaacttagcttgtgccctgaaaaaagccagtaagaggagaaagaggcggaaaaatgtttttgttcataagaagaaacgctcctctgcatctgttgataataccccagcgggctctccccagggaagtgggggtgaagatgaggatgacccagatgaaggggatgatgattccctaagtgaaggcagtacatccgagcagcaggatgagctacaggaagaatcagaaatgtcagaaaaaaagtcatgctcctcttctcccacccaaagtgagatatccacatcgctgcctccagatagacaaaggagaaaaagggagcttcgcaccttttcattttctgacgatgaaaataaacctccttcaccaaaggaaataaggatcgaagttgctgaaaggcttcacctggacagtaaccccttgaagtggagtgtggcagacgttgtgcggttcatcagatccactgactgtgctccattagcaagaatattcctagaccaggaaattgatgggcaggccctgttgctccttacccttcccactgttcaagaatgcatggacttaaaattgggccctgccatcaaactttgccatcacatagagaggatcaagtttgctttttatgagcagtttgccaactgagaaggacaaccaaagtgagctggatctttgaagcacaaatgcagcaaatccttcaccctgctttataagtggagctggaatagtcctggggctctggggcctgcaggtatcagcttgctctctttgcactttcggggaaggaggactcacagtgaggaagcaaaaactgtgcacagaagtggatcacctgctggtggaaatgtggacatctcttgttcagcagatggcagtttttaaaaaataaaggttgtgaggaaaagacttatataagaagaaaagcatttccagtggtgtggcctgaaaacaaagaataacctaggctgctggaaagcacccttttggttgttttcattctgttccctcccattgtagattgaactttgttctctgctttctttttcttggaaagagaggacttagctttaagtcagcactgatttgggactgttcctaaggcatatcagtgcttcattgtcattgtgtttttaaactttttaaaattaaaacagttcattttggggatg

SEQ ID NO: 190660 - DNA, 3694 bp, Artificial Sequence
  derived and/or modified sequence
ggcccgggcggtcgctgcgcggtggcggagcgtctagtggccgccgcaaccggtggctccgggccgccgttgtgaagtgagcgggcctctcccgcgccgcggcccgccgggcaccgccgctggaccccgcgccgacccggcagcgccccgacctgccgctcgggaggtccgcgaccgtttcgatttctgttcctaaagtccgattttggacgctgaaaaggaggctgtggaggggcgagcggcgtcctgggaagcaaggcctgctctgtgcggagcagaaacgccttgtgcgaacagaaataaattcccgcggaaaggatgaaggtggacttttaaatattctccactgaagcaaatgctgcaacaatttgcatttccttcaccaatgtcgtcttgtgccttttcttgttcctactgtaaaggagatgggttagatgttcactttcatttggacccgtggatacccattgaacagatgcttgaaacctgcaagtaatcttcagatcctagcagaaccataggcctttcctttgttttgggaggatatagcctgcctatatgctgtggaaatgaacggggagcagcagcttgatgcagatgccggctctggtatggaagaggtagaattaagctgggaagattatctagaagaaacagggtccacagcagttccctatgggtcttttaaacatgtggacacacgtttgcaaaatggatttgctcctgggatgaagctggaggtggctgtgagaacagatcctgagacctactgggttgccaccgttatcactacctgtgagcagttgctccttctccgctatgatggctatggggaggatcggagagcagatttctggtgtgacatcaggaaggctgatctctaccccattgggtggtgtgagcagaataagaagacccttgaagccccagaaggcatcagagataaagtatctgactgggatgagtttctgcggcagaccctgataggagcatgtagtcctcctgttccgctgctagagggcctccgtaatgggaggaatcctttagatctcattgctccaggatccagactagaatgtcaagctttccaggactctttaagcacttggattgttactgtagtagaaaacattggaggaaggctgaagctacgttatgaaggacttgaaagttctgacaattatgaacattggttgtattacttggatccatttcttcatcacgttggttgggctgctcaacagggatatgagcttcagcccccttcagccattagacatctaaaaaatgaagctgagtggcaagagattttggccaaagtgaaagaggaagaggaagagccattaccatcttacttatttaaggacaaacaagttattggcattcatacattctctgtaaacatgaaattggaagctgtagacccctggtctccttttgggatctctcctgctacagttgttaaggtttttgatgagaagtactttctggtggaaatggatgacttgcgtcctgagaaccacgcacggcgatcctttgtgtgccacgccgacagtcctggcatcttccctgtgcagtggagtctgaagaatggcctacacatcagcccccctccaggctacccaagccaggactttgactgggctgactacctcaaacagtgtggtgctgaagctgctccccagaggtgcttccctccgttaatttctgaacatgaatttaaggagaacatgaagctcgaggcggtgaaccccattctccctgaagaagtgtgtgttgctaccatcactgcagtgagaggctcctacctgtggctccagctggagggttctaagaagcctatacctgaatgtattgtgagtgtggaatccatggatatatttcctttgggctggtgtgaaaccaacggccaccccctcagcactcctcgccgagcacgagtatataaacagaggaaaattgcagtggttcagccagaaaaacaagtaccatcctcgaggactgtccacgagggcctgaggaatcaggagctgaactccacagagtcagttatgattaatggaaaatattgctgtccaaagatatacttcaaccaccgttgcttctcagggccatatcttaacaaaggaagaattgctgagctgcctcaatgtgtaggacctgggaactgtgttctggtccttagagaggtcctcactttacttatcaatgcagcctacaaacccagccgtgtccttcgggagctccagctggacaaagactctgtgtggcacggatgtggggaagtcctaaaagccaaatataaaggaaagagttatcgggctactgttgagatagtgaaaacagcagatcgggtgactgaattctgccggcaaacctgtatcaaactggaatgctgtcctaacctcttcggtccacggatggttctggataagtgttctgagaactgttctgtacttacaaagaccaaatacacacactattacggaaagaagaaaaataaaagaattgggaggccacctggtgggcatagtaacttagcttgtgccctgaaaaaagccagtaagaggagaaagaggcggaaaaatgtttttgttcataagaagaaacgctcctctgcatctgttgataataccccagcgggctctccccagggaagtgggggtgaagatgaggatgacccagatgaaggggatgatgattccctaagtgaaggcagtacatccgagcagcaggatgagctacaggaagaatcagaaatgtcagaaaaaaagtcatgctcctcttctcccacccaaagtgagatatccacatcgctgcctccagatagacaaaggagaaaaagggagcttcgcaccttttcattttctgacgatgaaaataaacctccttcaccaaaggaaataaggatcgaagttgctgaaaggcttcacctggacagtaaccccttgaagtggagtgtggcagacgttgtgcggttcatcagatccactgactgtgctccattagcaagaatattcctagaccaggaaattgatgggcaggccctgttgctccttacccttcccactgttcaagaatgcatggacttaaaattgggccctgccatcaaactttgccatcacatagagaggatcaagtttgctttttatgagcagtttgccaactgagaaggacaaccaaagtgagctggatctttgaagcacaaatgcagcaaatccttcaccctgctttataagtggagctggaatagtcctggggctctggggcctgcaggtatcagcttgctctctttgcactttcggggaaggaggactcacagtgaggaagcaaaaactgtgcacagaagtggatcacctgctggtggaaatgtggacatctcttgttcagcagatggcagtttttaaaaaataaaggttgtgaggaaaagacttatataagaagaaaagcatttccagtggtgtggcctgaaaacaaagaataacctaggctgctggaaagcacccttttggttgttttcattctgttccctcccattgtagattgaactttgttctctgctttctttttcttggaaagagaggacttagctttaagtcagcactgatttgggactgttcctaaggcatatcagtgcttcattgtcattgtgtttttaaactttttaaaattaaaacagttcattttggggatg

SEQ ID NO: 190661 - DNA, 4443 bp, Artificial Sequence
  derived and/or modified sequence
ggaatgagtcggagcgcggagcgccgccgccgcctccgccggagcgcgggtggaggggggcggggagagctgccggccgccccgctccgccgaacccagcaggaaggagggcgcgagcgggcgagcgcgggcagcacgggaggaaaaagcttccgcgcgggggagcgaaaagacggaaagaaagaaagaaaacgagcgcgagagggggaaaagcgagcgatcgagcgagcgcgcgcgcgaaaactccgggcagcactttcatttggacccgtggatacccattgaacagatgcttgaaacctgcaagtaatcttcagatcctagcagaaccataggcctttcctttgttttgggaggatatagcctgcctatatgctgtggaaatgaacggggagcagcagcttgatgcagatgccggctctggtatggaagaggtagaattaagctgggaagattatctagaagaaacagggtccacagcagttccctatgggtcttttaaacatgtggacacacgtttgcaaaatggatttgctcctgggatgaagctggaggtggctgtgagaacagatcctgagacctactgggttgccaccgttatcactacctgtgagcagttgctccttctccgctatgatggctatggggaggatcggagagcagatttctggtgtgacatcaggaaggctgatctctaccccattgggtggtgtgagcagaataagaagacccttgaagccccagaaggcatcagagataaagtatctgactgggatgagtttctgcggcagaccctgataggagcatgtagtcctcctgttccgctgctagagggcctccgtaatgggaggaatcctttagatctcattgctccaggatccagactagaatgtcaagctttccaggactctttaagcacttggattgttactgtagtagaaaacattggaggaaggctgaagctacgttatgaaggacttgaaagttctgacaattatgaacattggttgtattacttggatccatttcttcatcacgttggttgggctgctcaacagggatatgagcttcagcccccttcagccattagacatctaaaaaatgaagctgagtggcaagagattttggccaaagtgaaagaggaagaggaagagccattaccatcttacttatttaaggacaaacaagttattggcattcatacattctctgtaaacatgaaattggaagctgtagacccctggtctccttttgggatctctcctgctacagttgttaaggtttttgatgagaagtactttctggtggaaatggatgacttgcgtcctgagaaccacgcacggcgatcctttgtgtgccacgccgacagtcctggcatcttccctgtgcagtggagtctgaagaatggcctacacatcagcccccctccaggctacccaagccaggactttgactgggctgactacctcaaacagtgtggtgctgaagctgctccccagaggtgcttccctccgttaatttctgaacatgaatttaaggagaacatgaagctcgaggcggtgaaccccattctccctgaagaagtgtgtgttgctaccatcactgcagtgagaggctcctacctgtggctccagctggagggttctaagaagcctatacctgaatgtattgtgagtgtggaatccatggatatatttcctttgggctggtgtgaaaccaacggccaccccctcagcactcctcgccgagcacgagtatataaacagaggaaaattgcagtggttcagccagaaaaacaagtaccatcctcgaggactgtccacgagggcctgaggaatcaggagctgaactccacagagtcagttatgattaatggaaaatattgctgtccaaagatatacttcaaccaccgttgcttctcagggccatatcttaacaaaggaagaattgctgagctgcctcaatgtgtaggacctgggaactgtgttctggtccttagagaggtcctcactttacttatcaatgcagcctacaaacccagccgtgtccttcgggagctccagctggacaaagactctgtgtggcacggatgtggggaagtcctaaaagccaaatataaaggaaagagttatcgggctactgttgagatagtgaaaacagcagatcgggtgactgaattctgccggcaaacctgtatcaaactggaatgctgtcctaacctcttcggtccacggatggttctggataagtgttctgagaactgttctgtacttacaaagaccaaatacacacactattacggaaagaagaaaaataaaagaattgggaggccacctggtgggcatagtaacttagcttgtgccctgaaaaaagccagtaagaggagaaagaggcggaaaaatgtttttgttcataagaagaaacgctcctctgcatctgttgataataccccagcgggctctccccagggaagtgggggtgaagatgaggatgacccagatgaaggggatgatgattccctaagtgaaggcagtacatccgagcagcaggatgagctacaggaagaatcagaaatgtcagaaaaaaagtcatgctcctcttctcccacccaaagtgagatatccacatcgctgcctccagatagacaaaggagaaaaagggagcttcgcaccttttcattttctgacgatgaaaataaacctccttcaccaaaggaaataaggatcgaagttgctgaaaggcttcacctggacagtaaccccttgaagtggagtgtggcagacgttgtgcggttcatcagatccactgactgtgctccattagcaagaatattcctagaccaggaaattgatgggcaggccctgttgctccttacccttcccactgttcaagaatgcatggacttaaaattgggccctgccatcaaactttgccatcacatagagaggatcaagtttgctttttatgagcagtttgccaactgagaaggacaaccaaagtgagctggatctttgaagcacaaatgcagcaaatccttcaccctgctttataagtggagctggaatagtcctggggctctggggcctgcaggtatcagcttgctctctttgcactttcggggaaggaggactcacagtgaggaagcaaaaactgtgcacagaagtggatcacctgctggtggaaatgtggacatctcttgttcagcagatggcagtttttaaaaaataaaggttgtgaggaaaagacttatataagaagaaaagcatttccagtggtgtggcctgaaaacaaagaataacctaggctgctggaaagcacccttttggttgttttcattctgttccctcccattgtagattgaactttgttctctgctttctttttcttggaaagagaggacttagctttaagtcagcactgatttgggactgttcctaaggcatatcagtgcttcattgtcattgtgtttttaaactttttaaaattaaaacagttcattttggggatgattatgtggctctagggttttgaatgtatagtcacactttgatcattttaaaatcgattcttaggagttcctttgtttactacctctgttgataattgagcttacagccatgtatgaggttttttgtatgatgccatttttaagctacataaacactaaaattatgacagaatttggagggggggaaactgtttgctttcttaaaaacattatatggggcacttacaccagttccttaactgacctgatctgagaactctactgttactgttctccatcttgacccagccgaggctgcctgtgttaagtaacatcaccaagactgttagtatttctgtttaattgccctcttcctattcattctcagagggacttcagtgacttttattttgtgtttacttttctctagagttgtttgtctacctctgtttcatttctaaggtctttactttgggtgaaaatcagtaagtgttccatggacccacagcgaagcccatttgtccttctttccaggtgtctccagtgtagaagcacagcacagaaaacatgttttggagggtaacgcagagcatggagtttctgttagcagtgtcctcagtggcaggataaatactgagatgtggttaaggattctggaaacctctttgcctagccacacttagacttttttcagctaatcctttaaattgaatataatctttagtccgaggattcccatttaaacaactcagtattcttttaagtgtgtcttttagcccagctcaagttaacatgaaactccaggtgaattttcacttactattccattgctagctattatagaataatagcgtttgctgcactattctagtcatgaggagtgaggaaaaacatacataggttgtctcccttaaatggtttgctttgctgaattttttttatcctaatcacctgca

SEQ ID NO: 190662 - DNA, 850 bp, Artificial Sequence
  derived and/or modified sequence
cggagcgccgccgccgcctccgccggagcgcgggtggaggggggcggggagagctgccggccgccccgctccgccgaacccagcaggaaggagggcgcgagcgggcgagcgcgggcagcacgggaggaaaaagcttccgcgcgggggagcgaaaagacggaaagaaagaaagaaaacgagcgcgagagggggaaaagcgagcgatcgagcgagcgcgcgcgcgaaaactccgggcaggaaggtggacttttaaatattctccactgaagcaaatgctgcaacaatttgcatttccttcaccaatgtcgtcttgtgccttttcttgttcctactgtaaaggagatgggttagatgttcactttcatttggacccgtggatacccattgaacagatgcttgaaacctgcaagtaatcttcagatcctagcagaaccataggcctttcctttgttttgggaggatatagcctgcctatatgctgtggaaatgaacggggagcagcagcttgatgcagatgccggctctggtatggaagaggtagaattaagctgggaagattatctagaagaaacagggtccacagcagttccctatgggtcttttaaacatgtggacacacgtttgcaaaatggatttgctcctgggatgaagctggaggtggctgtgagaacagatcctgagacctactgggttgccaccgttatcactacctgtgagcagttgctccttctccgctatgatggctatggggaggatcggagagcagatttctggtgtgacatcaggaaggctgatctctaccccattgggtggtgtgagcagaataagaagacccttgaagccccagaag

SEQ ID NO: 190663 - DNA, 617 bp, Artificial Sequence
  derived and/or modified sequence
cgatccccgacgaggggcaggcaaacgggcgcagtgcccgcggcggcggcacgcgcgcatctgggatccggccgcttctccgctcatgccatcttgtccgagccagtcacgtgcgggcgacagcggcgcgcttcgccgggccggtactccaggtccgacccgcgaacccctctgggatccccgccgctctgtctacaacccgagcactttcatttggacccgtggatacccattgaacagatgcttgaaacctgcaagtaatcttcagatcctagcagaaccataggcctttcctttgttttgggaggatatagcctgcctatatgctgtggaaatgaacggggagcagcagcttgatgcagatgccggctctggtatggaagaggtagaattaagctgggaagattatctagaagaaacagggtccacagcagttccctatgggtcttttaaacatgtggacacacgtttgcaaaatggatttgctcctgggatgaagctggaggtggctgtgagaacagatcctgagacctactgggttgccaccgttatcactacctgtgagcagttgctccttctccgctatgatggctatggggaggatcggagagcagatt

SEQ ID NO: 190664 - DNA, 699 bp, Artificial Sequence
  derived and/or modified sequence
aaacgggcgcagtgcccgcggcggcggcacgcgcgcatctgggatccggccgcttctccgctcatgccatcttgtccgagccagtcacgtgcgggcgacagcggcgcgcttcgccgggccggtactccaggtccgacccgcgaacccctctgggatccccgccgctctgtctacaacccgagaaacgaagtctcactgtgttgtccaggctggtctcaagctcctgggctcaagcaatacttccacctcagcctcccaaaatgctgggattacagatggagtcttgctctgtcgcccaggctggagtgcagtgatgcgatctcggctcactgcaacctccacctcccctggttcaagtgattctcctgcctcagcctcccaagtagctgggactacaagcccgtgccaccatgcccagcactttcatttggacccgtggatacccattgaacagatgcttgaaacctgcaagtaatcttcagatcctagcagaaccataggcctttcctttgttttgggaggatatagcctgcctatatgctgtggaaatgaacggggagcagcagcttgatgcagatgccggctctggtatggaagaggtagaattaagctgggaagattatctagaagaaacagggtccacagcagttccctatgggtcttttaaacatgtggacacacgtttgcaaaatggatttg

SEQ ID NO: 190665 - DNA, 2472 bp, Artificial Sequence
  derived and/or modified sequence
atgaacggtgaacagcagctggatgccgatgcaggcagtggaatggaggaggttgaactgagctgggaggattacttggaggagaccgggtcgacggcagttccatatgggtccttcaagcacgttgatactcggctgcagaacggatttgctcctggaatgaaactcgaggttgccgtgcgaacagacccagaaacgtactgggttgccaccgtgataaccacgtgcgaacagttgctgctattgcggtacgacggctatggagaggatcgtagagctgacttttggtgtgacattagaaaagccgatctttatcccatcggatggtgtgaacagaataaaaaaaccctggaggccccagagggtattagagataaagtctccgattgggacgagtttttgcgtcagacacttatcggagcctgctcccctccagtcccactactggaaggcttacgaaacggaagaaatcccctcgacctgatagccccaggttcaagactggagtgccaagcttttcaggactctctgtccacttggattgttactgttgtggagaacattgggggtcgcctgaaactgcggtatgagggcctggagagctccgataactatgaacactggctctattacctggacccatttctgcaccacgttggatgggccgcacagcagggctacgagttacagcctccttccgccatccggcacctgaagaatgaggcagagtggcaggaaatattggctaaggttaaggaggaggaagaggagcctttaccctcttacctcttcaaggacaaacaagttatcggcattcacacattttccgtaaacatgaaactggaagctgtcgacccctggtcacccttcggcatcagtcctgccacagtggttaaagtatttgatgagaagtactttctggtcgaaatggacgaccttagacccgaaaaccacgctcggaggtccttcgtctgccatgccgattcacccggaatcttccccgttcaatggtcgcttaagaatggtctgcacatatcacccccaccgggatatccctcccaggacttcgactgggctgactacctcaaacaatgtggggcagaggccgcaccgcagaggtgctttccaccactcatctcagaacatgagttcaaggagaatatgaaacttgaggccgtgaaccctattctgcctgaggaagtctgtgtggccacaatcacagcagtgaggggaagctacctgtggcttcagctggagggctctaaaaagcctattcccgagtgtatcgtgtctgtggagagcatggacatttttcctcttggttggtgcgagacaaatggtcatcccttgtctacccccagaagagcccgtgtgtataaacaacgtaagatagccgtggttcaaccagaaaagcaggtcccttcatctagaaccgtgcacgaaggacttcgcaatcaagaactcaactcaacagaaagtgtgatgataaacggaaagtattgttgtcccaagatatactttaaccatcgttgtttctccggaccatatctgaataaagggaggattgccgagcttccccaatgcgtgggtcctggtaactgtgtcctggtgctccgggaagtgctcacgctgttgattaatgccgcttataaaccctccagggtattaagagaattgcagcttgataaggactccgtgtggcacggctgcggtgaggttctgaaagccaagtacaaaggaaagtcctaccgtgccaccgtcgagattgtgaagactgccgatagagttactgagttctgccgccaaacttgcatcaagctggagtgctgcccaaatctctttggccctcgaatggtgttggataagtgttctgagaactgcagtgtactcacgaagactaagtacacacattattacggcaaaaaaaagaacaaacggataggacgacccccaggagggcacagcaacctggcctgcgcactcaagaaggctagtaaaagacgcaaacgcagaaagaacgtattcgttcacaagaagaagcggtcttcagctagcgtagataacacccccgcagggtccccccaagggagtggaggtgaagatgaggatgacccagatgagggtgacgatgattcactctccgaaggatcgacctccgagcaacaagatgagctgcaagaggaatccgagatgtctgaaaagaaatcgtgctcctcctcaccaacccagtccgagatcagcacgtccctacctcctgatcgccaaagacgcaagcgagagctacggacattttccttttcggatgacgagaacaaacctccctctccaaaagaaatcgacggacaagccttactgctgctgaccttacccaccgttcaggaatgcatggacctcaaattgggcccagctatcaagctttgccaccacattgaaagaatcaaattcgcattctacgagcagttcgcaaattag

SEQ ID NO: 190666 - DNA, 2601 bp, Artificial Sequence
  derived and/or modified sequence
atgaacggcgaacaacaactggatgctgatgctggtagcggtatggaagaggtggagctatcctgggaggactacctggaggagacaggctctacggctgttccatacggcagctttaaacatgtagacaccagactccaaaacggcttcgcgccaggcatgaagcttgaggtggccgttaggacagatcccgagacatattgggtcgccaccgtcattaccacgtgtgagcaactactattgctgcgttacgacggctacggagaagaccgacgtgcagatttttggtgcgacattaggaaggcagatctttacccaatcgggtggtgtgagcaaaacaaaaagacactggaggctcctgaaggcattagggacaaagtttccgactgggatgagtttctcagacagaccctgataggcgcatgcagcccaccagtgccccttctggagggcctgaggaatggccgtaatcctcttgacctcatcgcacctggcagccgccttgagtgccaagcttttcaagatagcctaagcacgtggatcgtcacagtcgtcgagaatattggcggaaggttgaagctacgctacgagggactggaatctagcgataactatgagcattggctgtattaccttgaccccttcttacatcatgtcgggtgggcagctcagcagggctatgagctgcagcctccatcagctatcagacatctcaagaacgaagcggagtggcaggagatcttggcaaaggtcaaggaagaggaggaggagccactgccctcatacctctttaaagacaagcaggtcatcggtatccacacttttagtgtgaatatgaaactggaggcagtcgacccatggtccccgttcgggatttctcctgccaccgtggtaaaagtattcgatgaaaagtattttctcgtagagatggacgatttgagacccgagaaccacgctcggagaagctttgtctgccacgctgactctccaggaatcttccccgtgcagtggagcttgaaaaatggtttgcatatttcacctcccccagggtacccttctcaggattttgattgggctgattaccttaagcagtgcggggctgaggcagcccctcaacgatgctttcccccactgatctctgagcacgagttcaaggagaacatgaagctggaggcagttaatcccatcctccctgaagaggtttgtgtggccaccataaccgccgttcgcggaagttatctgtggctacaactggaagggagtaagaaacccatcccagagtgcattgtgagtgttgaatccatggacatctttccgttagggtggtgcgaaactaatgggcacccgctctcaacccctagacgcgcacgggtgtataaacaacgcaagatcgcagtggtgcagcctgaaaaacaggttcctagtagtcggaccgtgcacgagggcctccgcaatcaggagctgaatagtaccgagagtgttatgattaacggaaaatattgttgtcctaaaatttatttcaatcaccgctgttttagcggcccatatctcaacaagggaagaattgctgaactgccacagtgtgtcggcccaggcaattgcgtacttgtgcttcgggaggtgttgactcttctgattaatgccgcatataagccttcccgagtgttgcgagaactccagctcgacaaggatagcgtatggcatgggtgcggggaggtcctgaaggccaaatacaaaggcaaatcttatagggcaactgttgagatcgtcaaaaccgccgatagagtgacagagttctgccggcagacttgcattaaactcgagtgctgccccaacctattcggacccagaatggtgctcgataagtgcagcgagaattgttctgttctcacaaaaactaaatacacacactactacgggaaaaagaaaaacaagcgaattggtagaccaccagggggtcacagcaatctggcatgcgcgcttaagaaagcctccaaacggcgtaagcgccgtaaaaacgtgtttgtgcataagaaaaaaaggtccagtgctagtgtagataatacccccgcaggttcccctcagggaagtggtggtgaagatgaggatgacccggatgagggagacgacgatagcttatctgaggggtcaactagtgagcagcaggatgaattgcaggaagaatccgagatgtctgagaagaaatcttgttcatctagtcctacacaaagcgaaatatccaccagcctcccgccagacagacagcgacgcaaaagggagctgcggaccttcagcttcagcgacgacgaaaacaagcctccgtcgcccaaggagatccggatcgaagtggcagagcgtctgcatctggattcgaacccactcaagtggagcgtcgccgatgtggtgcgcttcatccgttcaactgactgcgccccattagctaggatattccttgatcaggaaatcgatggacaggccttgctgctcctgactttgccgaccgtgcaggagtgcatggacctgaagcttggcccagctatcaagctatgtcaccacatcgaacgcatcaagtttgctttctacgagcaattcgcaaattag

SEQ ID NO: 190667 - DNA, 2601 bp, Artificial Sequence
  derived and/or modified sequence
atgaatggagaacagcagctggacgcggatgctgggtccggcatggaagaggtggaactgtcatgggaagattacctagaagaaaccggctccaccgctgttccctatggatctttcaaacacgttgatacccgactacagaacggattcgcccctgggatgaaactggaagtcgcagttcggaccgacccagaaacctattgggtggccactgtgataacgacttgcgagcagctgcttctgctgagatacgacggttacggagaggacagaagggcggatttctggtgtgatatacggaaggctgatctgtacccaatcgggtggtgcgagcagaataagaagacccttgaggcccctgagggcatccgtgataaggttagtgattgggacgaattcttacgccaaacactgattggcgcatgcagtccgccagtcccgttgttggaaggtctccggaacggacgtaatcccttggaccttattgctcccggatcacggctagagtgccaggctttccaggactcccttagcacatggatcgtcaccgtcgtggagaacatcggcggtcggctgaaactccgatatgaaggcctcgagagttccgacaactatgagcactggctgtactatctcgacccttttctgcaccacgtaggctgggccgcacagcaagggtacgaacttcaacccccatccgccatccgccatttgaaaaacgaagccgagtggcaagaaatcttggccaaggtgaaggaggaggaagaagaaccactgccaagctatctctttaaagataagcaagttataggaatccatacattctctgtaaacatgaagctggaagcggtggacccctggtcaccattcggtatatctcctgccaccgtggtgaaagtctttgatgagaaatactttctggtggaaatggatgacctgaggcctgagaatcacgcgaggcgctcgttcgtgtgccacgcagactccccaggcatcttccctgttcagtggagcctgaaaaatggacttcatatctccccccctccgggataccctagccaggatttcgactgggccgactacctgaaacagtgtggagcggaagctgccccacagcgctgtttccccccactgatatctgaacatgaatttaaggagaacatgaagctcgaagccgtaaacccaatcttgcctgaggaggtctgcgtagctaccatcacagcggttaggggaagttatctgtggctacagcttgagggatctaaaaaacccattcccgagtgcatagtcagtgttgagtccatggatatcttccctttgggatggtgcgagaccaacggacaccccctaagcaccccgaggcgggcaagagtctataaacagcggaagattgccgtagtgcagcctgagaaacaggtcccatctagcaggacagtgcacgaaggcctccgcaaccaggaactcaatagcacagaatccgtcatgataaacggcaaatactgctgcccaaagatctattttaaccaccgctgcttttctggcccttatctcaataaggggcgtattgctgaactcccacagtgtgtcgggcctggaaactgtgtgttggttttgcgagaggtactgaccctcttgatcaatgcagcatacaaaccaagtagggtcttgcgagagctgcagctggacaaggattccgtgtggcatgggtgcggggaagtcctgaaagccaaatacaagggaaagtcctaccgggctaccgtggagatcgtgaagacggcagaccgggtgacagaattttgtaggcagacttgtataaaattggagtgctgtcctaatctctttgggcctaggatggttctcgataagtgtagcgagaattgtagcgtattgacaaaaacgaaatatacccactactacggcaaaaaaaagaacaaacggatcggtcggccaccagggggacattccaatctggcatgcgctttaaaaaaggcctccaagcgacgcaaaaggagaaaaaacgtgttcgtgcataaaaagaagcggagcagcgcctctgttgataatacaccagctggcagtccacagggctcgggcggagaagatgaagatgatcccgacgagggcgacgacgattcgctgtccgaggggagcactagtgaacagcaggacgagttgcaggaagagagcgagatgagcgaaaaaaaaagctgcagctctagtcccacccagtctgaaatcagcacttccctgcctcctgatagacagcgacggaagcgggaactgaggacattctctttttccgatgacgagaacaagcctcccagcccaaaagagattaggatcgaggttgctgaaagacttcacctggatagcaatccgctgaaatggagtgtcgccgacgtggtgcgcttcatcaggagcaccgattgcgcccctcttgctcgcatctttttagaccaggagattgatgggcaggcactgctcctgctcaccctccccactgtgcaggaatgcatggatttaaaactgggtcccgctatcaaactctgtcatcatattgagcgcattaaatttgcgttttatgaacagttcgccaattag

SEQ ID NO: 190668 - DNA, 2601 bp, Artificial Sequence
  derived and/or modified sequence
atgaatggggaacagcagctggacgcagacgcaggctccggcatggaggaggttgaactgtcttgggaggactatttggaagagaccggctcaactgcagtgccctatggatcatttaaacacgtcgacacacggttgcagaacggttttgccccaggtatgaagctcgaagtagccgtccgcacagaccccgagacatactgggtggcaaccgtcatcactacatgtgaacagctgctgctgctccgctatgacggatatggagaggatcggcgagctgacttctggtgtgacattagaaaagcagatctgtacccgattggatggtgcgagcagaacaagaagactctagaagctcccgaggggatcagggacaaggtgtccgattgggatgaatttcttagacagacgcttataggagcgtgcagcccaccggtcccgctcctggaaggcctcaggaatgggagaaatcccctagacttgattgctccgggatctaggttggagtgtcaggccttccaggacagcctcagcacttggatagttaccgtggtagaaaatattgggggaaggcttaaactgagatacgagggcttggagagttccgacaactacgaacactggctgtattacctggatcctttcctccaccatgttggctgggccgctcagcagggctacgagctgcagcccccttccgccataaggcacctgaaaaatgaagcagaatggcaagagatactggccaaagttaaagaagaagaggaggagccactacctagctatcttttcaaggataagcaagtcatcgggattcataccttctctgtgaatatgaaactggaggcagtggatccctggtcaccgtttgggatcagccccgcaaccgtggttaaggttttcgatgaaaagtacttcctagtggaaatggatgacctccgccctgagaatcatgcacgacggagtttcgtgtgtcacgctgattcccccggaatattcccagtccagtggtctctaaagaacgggttacacatcagccccccaccgggatatcccagtcaggacttcgactgggcggattatctgaagcagtgtggagccgaggccgctccccagaggtgcttccctcctctgatcagtgaacacgaattcaaggaaaatatgaaactggaggctgtgaatcccattctccctgaagaggtttgtgtggctaccatcactgccgtgaggggcagttacctgtggttgcaattggaaggtagcaagaaacccattcctgagtgcatcgtctctgtggaaagtatggatattttccccctgggatggtgcgaaacaaatggccacccactgtccactccgagacgagcgagggtatataagcaacgtaaaatagcagtagtgcagcccgagaagcaggtgccaagcagcaggaccgttcacgagggcctcagaaaccaagaattaaacagtactgagtctgtcatgataaatgggaaatactgctgtccaaaaatctactttaaccaccgctgtttttcaggaccatatctgaataaaggaaggatcgcggagctgcctcagtgcgtcgggccaggcaactgcgtcttggtcctgagggaagtgctgactttgctgattaacgcggcttataagccgtcacgtgttctgcgtgaactccagctcgataaggatagcgtatggcacggatgtggcgaggtactgaaagcgaaatataagggaaaatcctatcgggcaaccgtagaaattgtgaagactgcggaccgggtcacagaattctgtagacagacatgcattaaactcgaatgctgccctaatttgtttggcccacgaatggttctggataaatgttccgagaattgctctgttctgaccaagaccaagtacacccactactatggcaaaaagaaaaacaagcgtattggtcgccctcccggtgggcacagcaatctggcttgcgctctcaagaaagcatcaaagagacgtaagagacgcaagaatgtgttcgtgcataagaagaaacgttcttctgcctctgtggacaatactccagctggctctccacagggctccggaggagaggacgaggatgaccccgacgagggcgatgacgattctctttctgagggtagtacgtccgagcagcaggatgaactccaggaagaatctgagatgtcggaaaagaaatcctgctcatcatctccgacacagagcgagatttcaacttcccttcctcctgacaggcagcgaagaaagagagagctgcggaccttttctttctccgacgatgaaaataagccgccatctcctaaagagattcgcatagaggtagcggagcgcttgcatctggactctaacccactgaagtggtctgtggcggacgtggtgcgttttattcgaagcaccgactgcgcccctttggcgcgaatctttttggatcaggaaatagatgggcaggccctgcttttgctgacactccccaccgttcaagagtgtatggacctcaagcttggcccagcaataaaactgtgccatcatatcgaaagaattaagttcgccttctatgagcaatttgctaactag

SEQ ID NO: 190669 - DNA, 366 bp, Artificial Sequence
  derived and/or modified sequence
atgaacggggaacagcagctcgatgcggatgcgggatccggcatggaagaggttgagctgtcctgggaggactacctcgaagaaacggggtcgaccgccgttccctacggcagcttcaaacacgtggacactaggctgcagaatggttttgccccagggatgaagctcgaagtggccgtccgtactgatcccgagacatactgggtggctacagttatcacaacgtgcgagcagctgctcctgcttcgatacgacgggtatggagaagacagaagggcggatttttggtgtgacattcgaaaggcagatctctaccctattggctggtgcgagcaaaataaaaagaccctcgaggcccctgagtag

SEQ ID NO: 190670 - DNA, 285 bp, Artificial Sequence
  derived and/or modified sequence
atgaacggggaacaacagttagatgccgatgcaggatctggaatggaggaagtcgaactgagctgggaggattacctggaggaaactggaagcaccgccgtaccctatggaagtttcaagcacgttgatacaagattacagaacggattcgctcccggaatgaaacttgaggtggccgtgagaactgacccagaaacatactgggttgccaccgtgatcacaacctgcgagcaactcttgctactgcggtatgatgggtatggcgaggatcgcagggcggattag

SEQ ID NO: 190671 - DNA, 153 bp, Artificial Sequence
  derived and/or modified sequence
atgaatggggagcaacaattagacgctgatgccggaagcggcatggaggaggtggagctgtcttgggaggactacctcgaagagactggctcgacagccgtgccgtatgggagtttcaagcatgtggacacacgattacagaacggattctag

SEQ ID NO: 190672 - DNA, 2472 bp, Artificial Sequence
  derived and/or modified sequence
atgaacggcgagcagcagctggacgccgacgccggcagcggcatggaggaggtggagctgagctgggaggactacctggaggagaccggcagcaccgccgtgccctacggcagcttcaagcacgtggacaccagactgcagaacggcttcgcccccggcatgaagctggaggtggccgtgagaaccgaccccgagacctactgggtggccaccgtgatcaccacctgcgagcagctgctgctgctgagatacgacggctacggcgaggacagaagagccgacttctggtgcgacatcagaaaggccgacctgtaccccatcggctggtgcgagcagaacaagaagaccctggaggcccccgagggcatcagagacaaggtgagcgactgggacgagttcctgagacagaccctgatcggcgcctgcagcccccccgtgcccctgctggagggcctgagaaacggcagaaaccccctggacctgatcgcccccggcagcagactggagtgccaggccttccaggacagcctgagcacctggatcgtgaccgtggtggagaacatcggcggcagactgaagctgagatacgagggcctggagagcagcgacaactacgagcactggctgtactacctggaccccttcctgcaccacgtgggctgggccgcccagcagggctacgagctgcagccccccagcgccatcagacacctgaagaacgaggccgagtggcaggagatcctggccaaggtgaaggaggaggaggaggagcccctgcccagctacctgttcaaggacaagcaggtgatcggcatccacaccttcagcgtgaacatgaagctggaggccgtggacccctggagccccttcggcatcagccccgccaccgtggtgaaggtgttcgacgagaagtacttcctggtggagatggacgacctgagacccgagaaccacgccagaagaagcttcgtgtgccacgccgacagccccggcatcttccccgtgcagtggagcctgaagaacggcctgcacatcagccccccccccggctaccccagccaggacttcgactgggccgactacctgaagcagtgcggcgccgaggccgccccccagagatgcttcccccccctgatcagcgagcacgagttcaaggagaacatgaagctggaggccgtgaaccccatcctgcccgaggaggtgtgcgtggccaccatcaccgccgtgagaggcagctacctgtggctgcagctggagggcagcaagaagcccatccccgagtgcatcgtgagcgtggagagcatggacatcttccccctgggctggtgcgagaccaacggccaccccctgagcacccccagaagagccagagtgtacaagcagagaaagatcgccgtggtgcagcccgagaagcaggtgcccagcagcagaaccgtgcacgagggcctgagaaaccaggagctgaacagcaccgagagcgtgatgatcaacggcaagtactgctgccccaagatctacttcaaccacagatgcttcagcggcccctacctgaacaagggcagaatcgccgagctgccccagtgcgtgggccccggcaactgcgtgctggtgctgagagaggtgctgaccctgctgatcaacgccgcctacaagcccagcagagtgctgagagagctgcagctggacaaggacagcgtgtggcacggctgcggcgaggtgctgaaggccaagtacaagggcaagagctacagagccaccgtggagatcgtgaagaccgccgacagagtgaccgagttctgcagacagacctgcatcaagctggagtgctgccccaacctgttcggccccagaatggtgctggacaagtgcagcgagaactgcagcgtgctgaccaagaccaagtacacccactactacggcaagaagaagaacaagagaatcggcagaccccccggcggccacagcaacctggcctgcgccctgaagaaggccagcaagagaagaaagagaagaaagaacgtgttcgtgcacaagaagaagagaagcagcgccagcgtggacaacacccccgccggcagcccccagggcagcggcggcgaggacgaggacgaccccgacgagggcgacgacgacagcctgagcgagggcagcaccagcgagcagcaggacgagctgcaggaggagagcgagatgagcgagaagaagagctgcagcagcagccccacccagagcgagatcagcaccagcctgccccccgacagacagagaagaaagagagagctgagaaccttcagcttcagcgacgacgagaacaagccccccagccccaaggagatcgacggccaggccctgctgctgctgaccctgcccaccgtgcaggagtgcatggacctgaagctgggccccgccatcaagctgtgccaccacatcgagagaatcaagttcgccttctacgagcagttcgccaactag

SEQ ID NO: 190673 - DNA, 2601 bp, Artificial Sequence
  derived and/or modified sequence
atgaacggcgagcagcagctggacgccgacgccggcagcggcatggaggaggtggagctgagctgggaggactacctggaggagaccggcagcaccgccgtgccctacggcagcttcaagcacgtggacaccagactgcagaacggcttcgcccccggcatgaagctggaggtggccgtgagaaccgaccccgagacctactgggtggccaccgtgatcaccacctgcgagcagctgctgctgctgagatacgacggctacggcgaggacagaagagccgacttctggtgcgacatcagaaaggccgacctgtaccccatcggctggtgcgagcagaacaagaagaccctggaggcccccgagggcatcagagacaaggtgagcgactgggacgagttcctgagacagaccctgatcggcgcctgcagcccccccgtgcccctgctggagggcctgagaaacggcagaaaccccctggacctgatcgcccccggcagcagactggagtgccaggccttccaggacagcctgagcacctggatcgtgaccgtggtggagaacatcggcggcagactgaagctgagatacgagggcctggagagcagcgacaactacgagcactggctgtactacctggaccccttcctgcaccacgtgggctgggccgcccagcagggctacgagctgcagccccccagcgccatcagacacctgaagaacgaggccgagtggcaggagatcctggccaaggtgaaggaggaggaggaggagcccctgcccagctacctgttcaaggacaagcaggtgatcggcatccacaccttcagcgtgaacatgaagctggaggccgtggacccctggagccccttcggcatcagccccgccaccgtggtgaaggtgttcgacgagaagtacttcctggtggagatggacgacctgagacccgagaaccacgccagaagaagcttcgtgtgccacgccgacagccccggcatcttccccgtgcagtggagcctgaagaacggcctgcacatcagccccccccccggctaccccagccaggacttcgactgggccgactacctgaagcagtgcggcgccgaggccgccccccagagatgcttcccccccctgatcagcgagcacgagttcaaggagaacatgaagctggaggccgtgaaccccatcctgcccgaggaggtgtgcgtggccaccatcaccgccgtgagaggcagctacctgtggctgcagctggagggcagcaagaagcccatccccgagtgcatcgtgagcgtggagagcatggacatcttccccctgggctggtgcgagaccaacggccaccccctgagcacccccagaagagccagagtgtacaagcagagaaagatcgccgtggtgcagcccgagaagcaggtgcccagcagcagaaccgtgcacgagggcctgagaaaccaggagctgaacagcaccgagagcgtgatgatcaacggcaagtactgctgccccaagatctacttcaaccacagatgcttcagcggcccctacctgaacaagggcagaatcgccgagctgccccagtgcgtgggccccggcaactgcgtgctggtgctgagagaggtgctgaccctgctgatcaacgccgcctacaagcccagcagagtgctgagagagctgcagctggacaaggacagcgtgtggcacggctgcggcgaggtgctgaaggccaagtacaagggcaagagctacagagccaccgtggagatcgtgaagaccgccgacagagtgaccgagttctgcagacagacctgcatcaagctggagtgctgccccaacctgttcggccccagaatggtgctggacaagtgcagcgagaactgcagcgtgctgaccaagaccaagtacacccactactacggcaagaagaagaacaagagaatcggcagaccccccggcggccacagcaacctggcctgcgccctgaagaaggccagcaagagaagaaagagaagaaagaacgtgttcgtgcacaagaagaagagaagcagcgccagcgtggacaacacccccgccggcagcccccagggcagcggcggcgaggacgaggacgaccccgacgagggcgacgacgacagcctgagcgagggcagcaccagcgagcagcaggacgagctgcaggaggagagcgagatgagcgagaagaagagctgcagcagcagccccacccagagcgagatcagcaccagcctgccccccgacagacagagaagaaagagagagctgagaaccttcagcttcagcgacgacgagaacaagccccccagccccaaggagatcagaatcgaggtggccgagagactgcacctggacagcaaccccctgaagtggagcgtggccgacgtggtgagattcatcagaagcaccgactgcgcccccctggccagaatcttcctggaccaggagatcgacggccaggccctgctgctgctgaccctgcccaccgtgcaggagtgcatggacctgaagctgggccccgccatcaagctgtgccaccacatcgagagaatcaagttcgccttctacgagcagttcgccaactag

SEQ ID NO: 190674 - DNA, 366 bp, Artificial Sequence
  derived and/or modified sequence
atgaacggcgagcagcagctggacgccgacgccggcagcggcatggaggaggtggagctgagctgggaggactacctggaggagaccggcagcaccgccgtgccctacggcagcttcaagcacgtggacaccagactgcagaacggcttcgcccccggcatgaagctggaggtggccgtgagaaccgaccccgagacctactgggtggccaccgtgatcaccacctgcgagcagctgctgctgctgagatacgacggctacggcgaggacagaagagccgacttctggtgcgacatcagaaaggccgacctgtaccccatcggctggtgcgagcagaacaagaagaccctggaggcccccgagtag

SEQ ID NO: 190675 - DNA, 285 bp, Artificial Sequence
  derived and/or modified sequence
atgaacggcgagcagcagctggacgccgacgccggcagcggcatggaggaggtggagctgagctgggaggactacctggaggagaccggcagcaccgccgtgccctacggcagcttcaagcacgtggacaccagactgcagaacggcttcgcccccggcatgaagctggaggtggccgtgagaaccgaccccgagacctactgggtggccaccgtgatcaccacctgcgagcagctgctgctgctgagatacgacggctacggcgaggacagaagagccgactag

SEQ ID NO: 190676 - DNA, 153 bp, Artificial Sequence
  derived and/or modified sequence
atgaacggcgagcagcagctggacgccgacgccggcagcggcatggaggaggtggagctgagctgggaggactacctggaggagaccggcagcaccgccgtgccctacggcagcttcaagcacgtggacaccagactgcagaacggcttctag

SEQ ID NO: 190677 - protein, 2752 aa, Artificial Sequence
  derived and/or modified sequence
MYNGIGLPTPRGSGTNGYVQRNLSLVRGRRGERPDYKGEEELRRLEAALVKRPNPDILDHERKRRVELRCLELEEMMEEQGYEEQQIQEKVATFRLMLLEKDVNPGGKEETPGQRPAVTETHQLAELNEKKNERLRAAFGISDSYVDGSSFDPQRRAREAKQPAPEPPKPYSLVRESSSSRSPTPKQKKKKKKKDRGRRSESSSPRRERKKSSKKKKHRSESESKKRKHRSPTPKSKRKSKDKKRKRSRSTTPAPKSRRAHRSTSADSASSSDTSRSRSRSAAAKTHTTALAGRSPSPASGRRGEGDAPFSEPGTTSTQRPSSPETATKQPSSPYEDKDKDKKEKSATRPSPSPERSSTGPEPPAPTPLLAERHGGSPQPLATTPLSQEPVNPPSEASPTRDRSPPKSPEKLPQSSSSESSPPSPQPTKVSRHASSSPESPKPAPAPGSHREISSSPTSKNRSHGRAKRDKSHSHTPSRRMGRSRSPATAKRGRSRSRTPTKRGHSRSRSPQWRRSRSAQRWGRSRSPQRRGRSRSPQRPGWSRSRNTQRRGRSRSARRGRSHSRSPATRGRSRSRTPARRGRSRSRTPARRRSRSRTPTRRRSRSRTPARRGRSRSRTPARRRSRTRSPVRRRSRSRSPARRSGRSRSRTPARRGRSRSRTPARRGRSRSRTPARRSGRSRSRTPARRGRSRSRTPRRGRSRSRSLVRRGRSHSRTPQRRGRSGSSSERKNKSRTSQRRSRSNSSPEMKKSRISSRRSRSLSSPRSKAKSRLSLRRSLSGSSPCPKQKSQTPPRRSRSGSSQPKAKSRTPPRRSRSSSSPPPKQKSKTPSRQSHSSSSPHPKVKSGTPPRQGSITSPQANEQSVTPQRRSCFESSPDPELKSRTPSRHSCSGSSPPRVKSSTPPRQSPSRSSSPQPKVKAIISPRQRSHSGSSSPSPSRVTSRTTPRRSRSVSPCSNVESRLLPRYSHSGSSSPDTKVKPETPPRQSHSGSISPYPKVKAQTPPGPSLSGSKSPCPQEKSKDSLVQSCPGSLSLCAGVKSSTPPGESYFGVSSLQLKGQSQTSPDHRSDTSSPEVRQSHSESPSLQSKSQTSPKGGRSRSSSPVTELASRSPIRQDRGEFSASPMLKSGMSPEQSRFQSDSSSYPTVDSNSLLGQSRLETAESKEKMALPPQEDATASPPRQKDKFSPFPVQDRPESSLVFKDTLRTPPRERSGAGSSPETKEQNSALPTSSQDEELMEVVEKSEEPAGQILSHLSSELKEMSTSNFESSPEVEERPAVSLTLDQSQSQASLEAVEVPSMASSWGGPHFSPEHKELSNSPLRENSFGSPLEFRNSGPLGTEMNTGFSSEVKEDLNGPFLNQLETDPSLDMKEQSTRSSGHSSSELSPDAVEKAGMSSNQSISSPVLDAVPRTPSRERSSSASSPEMKDGLPRTPSRRSRSGSSPGLRDGSGTPSRHSLSGSSPGMKDIPRTPSRGRSECDSSPEPKALPQTPRPRSRSPSSPELNNKCLTPQRERSGSESSVDQKTVARTPLGQRSRSGSSQELDVKPSASPQERSESDSSPDSKAKTRTPLRQRSRSGSSPEVDSKSRLSPRRSRSGSSPEVKDKPRAAPRAQSGSDSSPEPKAPAPRALPRRSRSGSSSKGRGPSPEGSSSTESSPEHPPKSRTARRGSRSSPEPKTKSRTPPRRRSSRSSPELTRKARLSRRSRSASSSPETRSRTPPRHRRSPSVSSPEPAEKSRSSRRRRSASSPRTKTTSRRGRSPSPKPRGLQRSRSRSRREKTRTTRRRDRSGSSQSTSRRRQRSRSRSRVTRRRRGGSGYHSRSPARQESSRTSSRRRRGRSRTPPTSRKRSRSRTSPAPWKRSRSRASPATHRRSRSRTPLISRRRSRSRTSPVSRRRSRSRTSVTRRRSRSRASPVSRRRSRSRTPPVTRRRSRSRTPTTRRRSRSRTPPVTRRRSRSRTPPVTRRRSRSRTSPITRRRSRSRTSPVTRRRSRSRTSPVTRRRSRSRTSPVTRRRSRSRTPPAIRRRSRSRTPLLPRKRSRSRSPLAIRRRSRSRTPRTARGKRSLTRSPPAIRRRSASGSSSDRSRSATPPATRNHSGSRTPPVALNSSRMSCFSRPSMSPTPLDRCRSPGMLEPLGSSRTPMSVLQQAGGSMMDGPGPRIPDHQRTSVPENHAQSRIALALTAISLGTARPPPSMSAAGLAARMSQVPAPVPLMSLRTAPAANLASRIPAASAAAMNLASARTPAIPTAVNLADSRTPAAAAAMNLASPRTAVAPSAVNLADPRTPTAPAVNLAGARTPAALAALSLTGSGTPPTAANYPSSSRTPQAPASANLVGPRSAHATAPVNIAGSRTAAALAPASLTSARMAPALSGANLTSPRVPLSAYERVSGRTSPPLLDRARSRTPPSAPSQSRMTSERAPSPSSRMGQAPSQSLLPPAQDQPRSPVPSAFSDQSRCLIAQTTPVAGSQSLSSGAVATTTSSAGDHNGMLSVPAPGVPHSDVGEPPASTGAQQPSALAALQPAKERRSSSSSSSSSSSSSSSSSSSSSSSSSGSSSSDSEGSSLPVQPEVALKRVPSPTPAPKEAVREGRPPEPTPAKRKRRSSSSSSSSSSSSSSSSSSSSSSSSSSSSSSSSSSSSSSSSSSPSPAKPGPQALPKPASPKKPPPGERRSRSPRKPIDSLRDSRSLSYSPVERRRPSPQPSPRDQQSSSSERGSRRGQRGDSRSPSHKRRRETPSPRPMRHRSSRSP

SEQ ID NO: 190678 - DNA, 8259 bp, Artificial Sequence
  derived and/or modified sequence
atgtataacggaatcggactccctaccccccgcggtagcggaaccaatggctatgtccaacgcaatttgtctttggtgaggggacggcgaggcgagagacccgactacaaaggagaggaggaactgaggaggctggaggccgcactagttaaaaggccaaatcctgatatcttggatcacgaaagaaagagaagggtggagctcaggtgtctcgagctggaagagatgatggaggaacaggggtacgaagaacagcagatacaggaaaaggtagccaccttccgacttatgctgcttgagaaagacgttaaccctggtggcaaggaggaaactcccggtcagagaccagcggttactgagacacaccagctcgccgaactaaacgaaaagaaaaacgagcgcctgcgcgccgccttcggaatctctgatagctacgtggatggctcctctttcgaccctcagcggcgggcaagagaagccaaacagcccgctcctgagcccccaaagccctactctttggtgcgtgagtcctcctcttcaagatctccaacacccaagcagaagaagaagaagaagaagaaggatcggggccgcagatcggagagcagttcccctaggagggaaagaaagaagtcctccaaaaaaaagaagcataggtccgaatccgaaagcaaaaagcggaaacatcggtcccccacaccaaaatctaaaaggaagtcaaaggataaaaagcgcaagagatcaaggtccacaaccccagccccaaagtctcgccgagcgcacaggagtacctcagctgactccgcatcatcctctgataccagtaggagcaggagccgctccgccgcagccaagacgcataccactgcacttgcgggtcgttcaccatcgcctgctagcggtcggcggggagagggggatgctcctttcagtgagcctggcacaacgtctacacaacggcccagctccccagaaaccgccacaaagcagcctagtagtccatatgaggataaggacaaggataaaaaagaaaaaagcgccaccagaccgtctccctctcccgagagaagctccacaggtcccgaacctcccgcccccactcctctgcttgccgagagacacggggggtctcctcagccattggccaccactcccctgagccaggagcccgtgaatccacccagtgaagcaagcccaacaagggaccgctcaccacctaagagtccagaaaagttaccccagagcagctcatcagagagcagcccaccctctcctcagccaaccaaggtaagccggcatgcctcaagtagtccagaaagccccaagcccgcccccgcacctgggtcccacagggaaatatcctccagtcccacgtcgaaaaaccgctcccacggtagagctaagagggataagtcccattcccatacacccagtaggcgtatgggaagatcccgaagccctgccacagctaaaagaggaaggtcacgaagccgtacccctaccaagaggggacactctcgctctcgctcacctcagtggaggcgctcacggtcagctcagcggtggggccggtcccgctcaccccagcgtcgcggacggagtagaagtccacagaggccggggtggtcccggagcaggaacacacagcggcgtggccgttcgaggtccgcgcggagaggcaggtcccactcgcgatcacctgcaacacggggacggagcagaagtagaacacctgcaagacgaggtaggagccggagcagaacgcctgccagacgacgtagccgaagtcggactcccacgcgccggcgctccagatcacgcacgccagcacgtcgtggcaggtctcggagccgcacaccagccaggcgacgatctaggacaagaagtcctgtccggagacgctcccgttcccgaagccccgcacgaagaagtggacgtagcaggtctcgaacgcctgccagacggggccggagtagatcacgaacccccgcccgcagagggcgctccaggagccgcaccccagcgaggcgctcaggaagatctaggagtcggacccctgcgagaaggggacggtctcgcagtcggacacctcgcagagggcggagcaggtccaggtctctagtccgccgcggccgcagtcactcccgtaccccgcagagaagaggtcgctcgggtagctcctcagagcggaaaaacaagtccagaacctcccagcgacgcagccggagtaattcatcacccgagatgaagaagtctcgcatttcgtctcgccggagccgaagcttgtcttctcccagaagcaaggccaagtccaggctaagtttgcgtagaagcttgtcaggctcatcaccttgcccaaaacagaaaagccagacaccaccaagacgatctcgcagcgggtcgtcccagcctaaggctaaaagtaggacccccccacggcgcagcaggtcttcttcgtcccccccacccaagcagaaaagcaaaactccctctaggcagagtcatagtagttcctcaccccatccgaaagtaaagtcagggactcctcccagacaggggtccatcacctctccgcaggcgaatgaacagtccgtgacaccccagaggcgctcatgcttcgaatcaagtccagaccccgagctgaaatccaggactccaagtcgtcactcttgttctgggagctcgccccctagagtcaagtcctcgacccctccacggcaatccccttctcgctcttcctcccctcaacctaaggtgaaagcaatcataagcccaaggcagaggtcccatagtgggtcctctagcccgtcccccagcagagtgaccagtcgcaccactccgcgcagaagtcggagtgtgtcaccgtgctcgaacgtggaaagccgactgcttcccagatactcacacagtgggagctcctctcccgacactaaggtgaaaccggaaactccgcctcggcagagtcactcaggcagcatcagtccatatcctaaagtgaaagcccagactccccccggaccgagtctgtctggctccaaatccccatgcccacaggaaaaatccaaggattccctggtgcagtcttgccccggcagcttatccctgtgtgcaggtgtaaagagtagcacaccgccgggtgagagctacttcggagtatcttctttgcagctgaaaggtcagtcccagacttctccagaccacagatctgacacctcaagtccagaagttaggcagagccactcagagagcccctccctccagtcgaagtctcagacgtcccctaaagggggccggtcccggtccagctcgcccgttacggagctggcctcacggtcacctattcgtcaggataggggcgagttctctgctagccccatgttaaagtccggaatgtctcctgaacagtcaagattccagagcgattccagctcttatcccactgtggactccaatagcctgctgggacagtctagattggagactgccgaaagcaaggaaaagatggctttgccaccgcaggaggatgcgacagcctcccccccacgccagaaggacaagttttcccctttccccgtgcaggaccggcctgaaagctcattggtgttcaaagacactctccggacacccccaagagaaaggagtggcgcaggctcctccccggaaacaaaggaacagaacagcgccctgccaacctcttctcaggatgaggagctaatggaagtcgtcgagaagtcggaagaacctgcagggcaaatactgtcgcacctgtctagcgaactgaaggagatgagcacaagcaacttcgagtccagtcccgaagtggaagaacggcctgcggtgtccctgactctggaccagtcccagtctcaagctagcctggaggctgtggaagtcccctctatggcctcttcatgggggggtccccatttcagcccggagcacaaagagctgtctaatagcccgctgcgagaaaactcttttggttcgccccttgagtttcggaacagcgggcccctgggcacagagatgaacacagggttctcctctgaggtgaaggaggacctgaatggccccttcctgaatcagctcgaaacagatccctcccttgacatgaaagaacagtctacgagaagctcagggcattcgtcctcggagttgtctccagatgcagtggaaaaagccggaatgagcagtaatcagagtataagctccccggtccttgatgccgtacctcggactccctccagggagaggtcctcttctgctagctccccggaaatgaaggacgggctgccccggaccccttcccgtcgcagtcgatccggcagctctcccggcctgcgcgatggatctggcacacccagcagacactccctctccggatcttcccccggcatgaaggacattccccgcaccccttctaggggccgctctgaatgtgattcttcccccgaaccaaaggcgctcccacagacccctaggcctcgttcaagatcaccaagtagccctgagctgaataacaagtgtctgacgcctcagagggaacgttcaggctccgagtcatcagttgaccagaaaacagtagccaggaccccactcggtcaacgctccagaagcgggagtagtcaggagctggatgtcaagccctccgcttccccacaagaacgcagtgagtctgacagctcccccgatagcaaggcgaagacgcgtactccattgcgacaaaggtctcgctctggcagttcaccagaagttgacagtaagagccgcctgtccccaagacgatccagaagcgggagctcacccgaggttaaggacaaaccccgcgctgcacctagggcgcaatccgggagcgattcctctccagaacccaaggctccagcaccaagggctttgccacgccggtccagaagtggatcatcgagtaagggcaggggaccttctccagaagggtcaagttctacggagagttcccccgagcacccgcctaagagtcgtaccgctagacgcggctctcgatcatctccagaacctaaaaccaagagcagaacacctccccgccgcaggtcaagcagatcttccccagagctgacgcgcaaagccagattatcccgaagatcgagatccgcttccagcagccccgaaacccggagccgcactccacctaggcatcgacgtagccccagcgtgtcgtctccagagccggccgaaaaatctcgtagttccaggcggaggagaagtgccagttcaccccggactaaaactacatcacggagaggacggtcaccgtctcccaagcctcgaggcctgcagcgttcacggagtcgatctcggagggaaaaaacaaggaccactagacgccgtgacagatccggaagctcacagtccacctccaggcgccgtcaacgcagccgctctcggtctcgggtgactcggcgaagaaggggcggctccggctaccattcacgcagccccgcacgtcaggaaagcagtcgaacctccagccgcaggcgtagagggagatctcgaacaccgccaacctcaaggaaaagatccaggagccggacctccccagctccctggaagaggtcccggtctcgagcaagtcccgccacacaccggaggagccgaagcagaactcctctgatctccaggcggaggtccaggtcccgaacaagcccggtgtctaggcggaggtcccggtcgagaacttctgttacccgacggagatcacggtcaagggcgtcccctgtatcccggagacggtcgcggtctagaactccacccgtaacaaggaggcgctctcggagccgcacgccgacgaccaggaggagatccaggtctcgtacacctccagtgacccgaagacgctctagatcgcgcactcctccagtgacccgccggaggagccgcagtcgaacaagtcctatcacccggcgccgcagcagaagcaggacctcaccggtgaccaggcggagaagcaggtcacggaccagccctgtgacccgcaggcgctctcggagccggacaagtccagttacaaggaggaggagtaggtcgaggaccccacccgctatccggcggcgctcaaggagccggacccccctcttacctaggaagcgcagtcggtcacggtctcctcttgccattcgccgaagatcccgttcacgcacaccccgcaccgccaggggcaagcgctcgttgaccagatcacccccagctattcggaggcgcagcgccagcgggtcttctagtgaccgaagccgttctgcaacacctcccgcaactcgcaaccactccggttcccggaccccccccgtcgcactgaactcatcccggatgagctgcttttccaggccaagcatgtccccaacccccctggacagatgtcgctctcccggtatgttggagcctctgggctcgtctcggacccctatgagtgttctccaacaggcaggcggttccatgatggatgggcccgggcctcgtattccagatcatcagcggacaagtgtacccgagaaccatgcccagtctcgaattgcccttgcccttactgctatctctctgggaaccgctaggcccccacctagtatgagcgccgctggccttgcagctcgtatgtcccaggtacccgcccccgttccattgatgagcctgaggactgcgcctgccgctaaccttgccagtcgaattccggccgcctctgccgccgccatgaatctggcttccgctaggacccctgcgatcccaacagccgtaaacttggcagatagcagaacgccggccgccgccgctgcaatgaatctggcgtccccaagaactgcagtagcacccagcgcagttaatttggcagatcctagaacacccaccgcccctgctgtcaacctcgccggcgcacgcaccccagctgcgttggccgctctcagtctaactgggtccgggaccccgccaacggccgcaaactatccttcttctagtcgtactccacaagccccggccagcgcgaatcttgtcgggcctagaagcgcacacgccactgcccccgttaatattgctggatcccgtactgcggctgcattagcacccgctagcctcacgagtgctagaatggctcctgcgctgtctggtgccaaccttacctcccccagggtgcctctgtcagcttacgagcgcgtgtctggccggacgtctccccccctcctggaccgggcacgctcccggactcccccaagcgctccgtcccagtcgaggatgacctctgagagagcaccttcgccatcatcccggatgggtcaagccccctctcaatcccttctaccacctgcacaggatcagcctagaagccctgtgccaagtgcattttcagaccaatctaggtgcctgatcgcccaaacaacaccggtagccggttctcagagtctcagtagtggagccgtggctacaacaacttccagtgctggcgatcataacggtatgctgtcagtaccagctcccggcgttccccacagcgatgtgggggagcctccagcatccaccggtgcccagcaaccatctgctcttgcggcactgcagcccgccaaagaaaggcgctcatctagttcaagctcctcttccagcagcagcagctcctcctcaagttctagttcatccagctccagcagcagcggctcctcctcctctgatagcgagggtagctcccttcctgttcagccagaagtggctctcaagagggtcccctcacctacccccgcaccaaaagaagcagtccgggaaggacgaccacctgaacctactccagctaaacgcaaacggagatcctcctcctcctcctcaagctcttcctcaagcagttcatcttcttccagctccagctctagttccagttcttcctcttcgtcttcatcatccagcagtagtagctcatcttcctcatctagctcgcccagtccagcaaagcccgggcctcaggcactccccaaacctgcttcaccaaagaagcctcctcccggtgaacgcagatcccgatcaccccggaagccaattgattccctgcgggacagtcgctcacttagttacagccccgtggaacgccggaggccatccccgcagccgagcccaagagatcagcagagtagttcgagcgaacgtggctctcgccgagggcaacgcggggattcacgttccccctcccataagcgaaggcgggaaacaccatcaccgcgacctatgagacataggagcagccggtcaccatag

SEQ ID NO: 190679 - DNA, 7005 bp, Artificial Sequence
  derived and/or modified sequence
atgtacaatggcataggactgccaaccccgcgaggctctgggaccaatggatacgtgcaacggaatctgagcttggtgagagggaggcgaggggagaggcctgattacaagggcgaagaggagctccgtagactggaggcagccctcgtgaagagacccaacccagatatccttgaccatgagcgaaaacgcagggttgaactgcggtgtctagaattagaggaaatgatggaggagcagggctacgaagagcagcagattcaggaaaaggtggctacattccgtcttatgctcttggagaaggacgttaaccctggaggaaaggaagagacgccagggcagagacccgctgtgaccgaaacccaccagctggcagaactgaatgagaaaaagaacgagcgccttagggccgcatttgggattagcgactcatacgtggacggcagcagcttcgaccctcaacgccgggcccgggaagccaaacagcccgccccagaacccccaaagccctattccctcgttagggaaagtagtagctcccggtcccccacccctaaacaaaagaagaaaaagaagaagaaggaccgcggcaggcgcagtgagagctcaagtccaaggcgcgagcgtaagaaatcctccaaaaaaaaaaagcatcgcagtgaaagtgaaagtaaaaaacgtaagcatcgctcccctacccccaaatcaaagcgcaagtctaaagataagaagcggaagagatcccgaagcacgacccccgctcccaaaagtcgtagagcgcacaggtccactagcgcagactccgcatcatcaagcgatacatcgagatctaggtcacggtccgccgctgccaagacgcacactaccgccctggccggcaggagtccaagccccgcttctggccgaagaggtgaaggcgatgctccattttccgaaccggggacaacctcaactcagaggccatcctctcctgaaacagcaacaaaacagccaagttctccttacgaggataaagataaagacaagaaggaaaagtctgcaactcgcccctccccctcaccagagcgctcctcaacaggaccagagccacctgctcccacacccttactggcagagcgtcatggtggctctccacagcctctcgccacaacaccactgagtcaagaacctgttaacccccccagcgaggcttctccaaccagggatagatcgccgcctaagtctccggagaaactgccacaaagttccagcagcgaatccagtccaccttccccacaacctaccaaggtttcgagacatgcttccagttcccccgagagtcctaagcccgccccggcccccggcagccacagagaaattagctcctccccaacatctaaaaataggtcacatggtagggccaaacgggacaaaagtcatagtcatacaccctctaggagaatgggccgcagcaggagcccagctacggccaagagagggcgcagccgttctcgcacacctacgaagcggggtcattctcgatcaaggtcaccacagtggcgaagatctaggagcgcccaaagatggggtagaagcaggtccccccagcgcagggggagatcaaggtctccccaacggccgggttggagccggagtcggaacacacagcgcaggggccggtcaagaagcgcacgcagggggcgatcgcattccaggtcacccgcgacgcgaggccgaagtcggtcacgaacaccagccaggcggggtcgctcccgctcgcgcactcccgcgcgccgaagaagccgaagccgcacaccaacacgccggaggtccagatcccggactccagcacggaggggaaggagtcgttcacgtacaccagccagacgcagatcacggactcgttcccccgtgaggcgcaggtctagatccagatcccctgccaggcgatcaggccgcagtcgatcacggaccccagctcgtagaggccgtagcagatctcgtacccctgcacgacgcggccggtcacggagccggactcccgcacgtcgtagtggacggagtaggtcacggacgccggctcgacgaggtagaagcagatcaaggacaccaagacgagggcgcagccgcagtaggagtctggtgagaaggggtagatctcactccaggacaccacagcgtcgcggcaggagcggatcaagcagcgaaagaaagaataaatcaaggacatctcagcggcgctccagatctaactctagcccagagatgaaaaagagtcgaattagttccagaaggagcagatcactctcgtcccctcgttctaaagcgaaatcccgtctgagcttgcggcgctccctgtccggcagcagtccttgtcctaagcaaaaaagccagactcctcccaggcggtcccggtcaggaagttcccagcctaaggccaaatctaggacccccccccggcgaagccgctcaagcagctctccaccacctaaacagaaaagtaagacacctagccggcaatcccactcaagcagctccccacacccaaaggtcaaaagcgggacccccccaaggcagggttccataacttcccctcaagccaacgaacaaagcgttactccacagaggcgatcgtgtttcgagagcagccccgaccctgagctgaagagccggaccccatcccgccactcttgttccggctctagccccccgcgcgtgaagtcatccacacctccaaggcagtctcctagcaggtcctcctccccccagccaaaagttaaggcgattattagtccaagacagcgtagccattccggcagctcctcgccaagcccatcacgggtcacttcacgcactacgccacgccgttcccggtccgtgagtccttgctccaacgtagaaagtcgactcctcccaaggtacagccatagtgggagctcatctcccgacacaaaagtgaagcctgagaccccaccccggcagtctcattcaggaagcatcagtccgtaccccaaggtaaaggctcagactccccctggcccttccctcagtggttcaaagagtccctgtccccaggagaaatcaaaagattctctggtccagagctgtcccggtagtttaagcctgtgtgccggggtcaaaagttccactcccccaggggaatcatatttcggggtgagcagtcttcagttgaaaggccagagtcaaactagtcctgatcatagatctgacacctcgtcaccagaagtaaggcagtctcatagcgaaagtccttcactgcagtcaaaaagccagacatcgccaaagggcggacgatcccggagctcttcccctgtcactgagctcgccagcaggtccccaatacggcaggacagaggggagttctcagcttcccccatgctgaaatcaggcatgagtcctgagcagagcaggtttcagtcagacagtagtagctatccgaccgttgactccaattcactattggggcagtcgcggctggagaccgctgaaagcaaggaaaagatggccctgcccccacaggaggacgctactgcttcccctcccaggcagaaagacaaattttctcccttccctgttcaggaccgacccgagtcgtccctagttttcaaagatacactccgcactcccccaagagaacggagtggggctggtagctctcctgaaacaaaagagcaaaacagtgccctgcctacaagtagccaggatgaggagcttatggaggttgtcgagaaatctgaggagcctgcgggccagattctgtcacacctctccagcgagttaaaagagatgtcaacatctaacttcgaatcaagtccagaggtcgaagaacggcctgccgtttccctcacattggaccagagccagtcacaggcaagcttggaagctgtggaagtaccgtctatggctagttcgtggggggggccccacttctcccccgaacataaggagctctcgaattctccacttagagagaattccttcggctcacctttggaattccgtaactctggccccctgggcaccgaaatgaacacagggttctcatccgaggtgaaagaagacttgaatggaccatttctcaaccagctggagactgacccaagtctggacatgaaagaacagagtacacggtcgtctggccatagtagttccgaactgtccccggacgccgtcgaaaaggccggcatgtcttcaaaccaaagtatcagcagcccagttctagacgccgtgccaagaacgccctcgcgtgagcgctctagctctgcctccagcccggagatgaaagacgggctccctagaacaccttcgagacgctcaagatctgggtcctcaccaggattacgggatggctcaggcacgccttcaagacactcactgtctgggtcttctcccgggatgaaagatatcccacggacaccaagtagagggagatccgagtgcgacagcagtcccgaaccgaaggctctgccacagacacctagaccccggtctcgtagccctagctctcctgaattgaacaacaaatgtctcacaccacaacgagaaagatctgggagcgagagctcagtagatcaaaagactgtggctcgtacccctctggggcagaggtcccggagtggctcttcccaggaactcgacgtgaaaccttccgccagcccacaggagcgatctgaaagcgatagttctcctgattccaaggccaaaactcgaacaccactgcgccagagaagtcgctcggggtcctctcccgaagtcgacagcaagtccagactctcaccccgaaggagtcgctccgggtctagcccagaggtgaaggataagccccgagcagccccaagggctcagagtgggtccgattcttcacctgaacccaaagccccggcgccaagagctttaccccggcgaagtaggtcaggaagctcttccaagggtcgaggcccttctcccgagggaagcagttctaccgagtcttctcctgagcatcctcctaagtcaaggacagctaggaggggtagtcgctccagccccgaacctaaaactaaatcccgtacccccccaaggcgcagatcctccaggagtagtcccgaactaactcggaaggcacgactctcaaggcgctcgcggagtgcctcatctagtcccgagacacggtcacgcacgccaccacgacacaggagatctccaagcgtgtcctcccccgaaccggcagaaaaatcccgatcctcaaggcggaggcggagtgcctccagtcctcggacaaagacaacatctcgacgaggtcggtcccccagcccaaaaccaagggggctgcagagatcgcggtcgcgcagccgccgcgaaaaaacacgcaccaccagacgccgggatcggtccgggtctagtcaatcgacaagtcgtcggaggcagcgaagcaggtctcggtctagagtgacccgtagaaggagagggggtagcggataccatagtcgttccccggcaaggcaggagtccagccgaacatcctctcgtcgtcgacgtgggagaagcaggactccacccacctccagaaagagaagtaggtcccgcacgtcgccagctccgtggaagcggtccaggtccagggccagccctgccacccacagacgctcacgcagtaggactcctctgatctcgcgacggcgaagcaggagcagaacctctccagtttccaggagacgctcacgtagcagaaccagcgtgacacggcgccgatccagaagtagggctagccccgtgagtagacgtcgaagcaggtctaggaccccacctgtgacacgaaggcgttctaggagcagaactccaacaacccgtcggcggagtcggagcagaacgccacccgtaacccgcaggagatcccggagcagaacaccccccgtgacgagacgacgttctcgctcccggacgtcacctattactcgaagaaggtcccgatcccggaccagtccagtgacacggcgccgttcgagatcccgaacatcgcccgtcaccaggaggcggtcaagaagtcgcacttctccggtcacacgccgaagatctcgctcccggaccccacctgctcaagaccaacctagatccccggtgcccagcgcgttttctgatcagagtagatgcctgatcgcccagactacccccgttgccgggtcccagagtttgtcttccggcgctgtggctacgacaacctcttccgccggggaccataacgggatgctcagcgtacccgcgcctggggtgccacattcagatgttggtgaaccccccgcgtccacgggcgcacagcagccctccgccctcgctgcattgcagccggctaaagaaaggagatcatctagttcttctagtagttcctcctcatcttcaagttcaagctcttcgtccagctctagctcttcttcgtctggatcgagctcctccgacagcgagggctcttccctgcccgtacagcccgaggttgccctgaagcgagtacccagccctacaccagctcccaaagaagctgtgcgggaagggaggcctcctgagccaacccctgccaaacgcaagaggcgctcctcatcctcctctagcagcagctcttcctccagctcatcatccagctccagttctagctcctcttctagtagtagttcgtcatcttcttcatcttcgtcttcgtcctcctcttcctcttcatctccctccccagccaaacctggtcctcaggcccttcctaaaccggccagcccaaaaaaacctccgcccggcgaaagaaggtcgaggagcccgaggaaaccaattgacagtttgcgcgatagcaggtccctttcctactctcccgttgagcgccgaaggcccagccctcagccctctcctagggatcagcagtccagcagctctgaacgcggttcgcggcgcgggcagaggggagactcccgatccccctctcacaagagaaggagggagacaccttcaccccggcctatgagacacagaagctcacgatccccatag

SEQ ID NO: 190680 - DNA, 6036 bp, Artificial Sequence
  derived and/or modified sequence
atgaagaaatctcgcattagcagtagacggagccggtccctgtcctccccaaggtctaaggctaagagcagattgagcctgaggagatctctcagtggatcttccccctgtccaaagcagaagtcacagacaccacctaggaggtcccgttcagggtccagtcagccgaaagccaagagcaggactccgcctcgcaggtcaagaagctcctcatcccccccaccaaagcaaaagagcaagacaccttcgcggcagagccacagctcctcttcccctcacccaaaggtgaagtctggaacccccccacggcaggggagcattacgtctccacaggcgaacgagcaatcagtcaccccccaaagacgctcttgcttcgaatctagtccggatcctgagctaaaaagccgtacaccgtcaaggcactcctgttcggggagttccccgcctcgtgttaaaagtagcacaccgccaaggcaatccccttctagaagctccagccctcagccgaaggtgaaggccatcatttcaccacgccagcgcagtcactcagggtcttcctcaccgtctccctccagagtgacatcacgcacaacccctcgccgatcaagatccgtgtcaccttgcagcaacgtagagtcgaggttgcttccccgatactctcatagcgggtcaagttcacctgataccaaggtcaagcccgaaacaccgcccagacagagtcacagcgggtctatttcaccttaccccaaggtaaaagctcaaacccctcccggtcccagcttaagcggaagcaaatccccgtgcccccaggagaagagcaaggacagcttggtgcagtcctgcccaggtagcctttctctctgcgctggagttaaatcctccacgccacccggcgagtcttacttcggcgtgtcttccctgcagctcaagggacagagccagactagcccagaccataggtcagacacctctagcccagaagtaaggcagtcacactctgaatccccttctctccagtccaagagccagaccagcccaaaaggaggaaggagccgttcttcgtctccagtgacagaactggcctcaagaagccccattcgccaggacagaggtgaattctctgcctccccgatgctcaaatcgggaatgtctcctgagcagagcaggtttcagagcgactcttctagctatccaacggtggatagcaattcacttttgggacagtccagattggaaactgcggagagtaaggaaaaaatggcgttgcctccccaagaggacgcaaccgctagcccccctcgccagaaggataaatttagtcccttccctgtccaggatcggccggagagcagcctcgtgttcaaagatacactgaggacgcctcctcgcgaaagatcaggagccggctctagtcctgaaactaaagagcagaatagcgccctgccaacttccagtcaagacgaggagttgatggaagtcgtggaaaagagcgaggagcctgccggccagatccttagccatttgtcttccgagcttaaagagatgagcacctctaactttgagagctccccggaggtagaagagcggcccgccgtttccctcaccctggatcagtcacagtctcaggcctctctggaggcagtagaagtaccatctatggcctccagttggggtgggccccacttctcccctgagcataaggagttatctaactctccgctgcgagagaactcgttcggctctcccctcgaatttaggaactcaggacccctcggaacagagatgaacactggatttagttccgaggttaaggaggacctgaacggtcccttcctgaaccaactagagaccgatccaagcctagatatgaaggaacaaagcacaaggtctagcggccactcatcctcagagctgagtcccgacgcagtcgagaaggccgggatgagctcaaatcagtctattagcagcccggtcctcgacgctgtacccaggaccccatcaagagaacgcagctccagtgctagcagccctgagatgaaggacggactgccacgcaccccttcgcgtagaagcagatccgggtcatccccgggtttgcgggatggctcaggaaccccttcccgacattcccttagcgggtcctctcctggcatgaaagacataccccgcaccccatccagaggacgcagcgagtgcgactcctcacccgagccaaaggcacttccacagacgcctagacctcgcagccgttcaccgagtagtccagagctgaacaacaagtgcctgacacctcagagagaaaggtcaggaagtgagtcctcagttgaccagaaaaccgtcgccaggacacccctggggcaacgcagtcggtctggatcgagccaagagctggacgtgaagcccagcgcgtccccccaggaacgcagtgaatcagactccagccccgatagcaaggctaagacgcggactcctctacggcagagatctcgctccggcagctcgcccgaggtggattctaagagtcgactttccccccggaggagtagatctggaagttcccctgaggttaaggataagccaagagccgctcctagggcccagtcgggctcagacagctccccggagcccaaggcccccgcccctcgggccctgccgcgcagatctagatccggctccagttccaaaggaagaggcccaagccctgaaggaagtagcagcactgagtcatcaccggagcatccacctaagagtaggactgcacgccgggggagccggagctcccccgaaccaaagacgaagtctagaacgcccccccggaggagaagctccagaagttcacctgagctgactaggaaggcccgattatccagacggagtcgcagcgcttcctcttcccccgagactcgctcccgtactccaccgaggcacaggcgtagcccttcagtctctagccctgagccagcagagaaatcaaggagtagtaggcggcgacgttcagccagcagccccagaacaaagacgaccagtcgacggggacgctccccgtcaccgaaacctcggggccttcagcgctctagatcccgttcgcgacgggagaagactagaacaactagacgacgggatcggagcggatcttcccaaagtaccagtaggcgcaggcaaagatccagatctcggagtcgggtgacgcggagaaggagaggggggtccggctatcattcccggtcacctgctcgccaggaatcatcacggacaagtagtcgccggaggagaggccgttcacgcacccctcctacatccagaaaacgtagcagatctcggacctcaccagccccttggaaacggagccgaagccgtgcttcacctgcaacacaccgtcgcagcagatcgcgaacccccctcatctctcgtaggcgaagtaggtcacgcacaagccctgtgagtaggaggcggagcagaagccgtacttcagtcacacggagacgatctaggagcagggctagtccagtctcacggcgccggtctcggtcccggacgccgcctgtaacccgtcgccggtcgaggtcccgcaccccgacaactaggcgccgaagtaggagcaggacacctcctgtaacccgcagacgctcgcggtcaagaacgcctccagtgactcgacgccgatcacgctcacggacttcccccatcaccaggcgccgcagcaggtccaggacttcccccgtcaccagacgaagatctcgatccagaacctcccccgtgaccagacgacgctctaggtctcggactagcccggtaacacggcggcgtagccgctccaggacccctcctgctattagaaggcggagcagatcgcggacccccctcctgccacgcaaacgcagcaggtcgcgcagcccactggccatcagacgccgctcccggagccggactccgcgaacggcacgcggcaagaggtctctcactcggagtccaccagcaatccgccggcgttctgcatccggcagttcttcagacagaagcagatcagcaaccccaccagcgactcgaaaccacagtggctccaggaccccacctgtggcactaaattcctcccggatgtcatgcttctctaggcctagcatgtcgccaactcctctagatcgttgccggtcaccagggatgctcgagcctctcgggtctagcaggacgcctatgtcagttcttcagcaggcgggaggaagtatgatggacggaccgggccctcgcattcccgaccaccagcgtacatcagtccctgagaatcacgcacagtctagaattgcacttgccttgacagctatcagccttggtacagcacgccccccccctagcatgtccgccgccggcctggcagccaggatgagccaagtgccagccccggtacctctcatgtctcttaggactgcccctgctgctaacctcgcatcacgcatacccgctgcctcagcagcagcaatgaatttagccagcgcaaggacccccgcgatacctactgctgtgaatcttgctgattcaagaacccccgctgctgcagctgctatgaatctggcctcccccaggaccgcagtggccccgtccgctgtcaatcttgccgaccccagaacccccactgctcccgccgttaacctagcaggggcacgaactcctgctgccctggctgctctgtcgctcacaggatcagggacgcctccaacggctgctaactacccgagcagcagccgcaccccccaggctcctgcttccgcgaacctggtgggcccaagatcagctcatgctaccgcacctgtgaacatagctggctcgcgaacagccgccgcattggctccggccagcctcacctccgcccgtatggcccccgcgctgagtggggctaatctcacatcgccaagggtgcccctgagcgcctatgagcgcgtgagtggtaggacatcacctcctttactggatcgggcacgttcaaggacacctcctagtgcaccaagccagagtcgcatgacatctgaacgtgccccttcaccttcctcccgaatggggcaggctccatctcagagcctccttcctccggcccaggatcagcctcggtcacccgtgccctctgccttcagcgatcagagccggtgtcttattgcacagacaacgccggtggcaggctcccagtctctgtcatccggtgctgtcgcaacaacaacatcctccgcgggggaccacaacggaatgctgtccgttcctgcccctggagtgccacattcggacgtgggagagccccctgcaagcactggcgcccagcaacctagtgccctagccgctctgcagcccgccaaggagcggaggagtagcagcagttctagtagtagtagttcatcaagtagttccagtagctcttcctccagctcttcttcgagctccggctccagctcttcagattccgaaggctcatccttgccagtgcaacccgaagtagctcttaaaagagtaccctcacccacccctgcccctaaggaagctgtgagggagggccgtccgccggaacctacaccagccaagagaaagcggagatcctcgtctagctccagttcttcctcctcttccagctctagctcttcatcatcttcaagtagctcatcctccagcagttcctccagctcctccagcagctcttcatctagctcctctagctccagcccctccccagccaagcctgggccacaggctctcccaaaacccgcaagccccaagaagccaccacccggagagcgttccttattgccggtctcgccaagtccgcgacattccctgccccatgtggcccgaggcacgtttttaaagaggactagcgggtatttcccacccctgcacaaaagcttcggcacaccttgtggcctgcaggacaaagcgcctcctctgagggagtggcgcgtgcgccttttcacgaacggtccttgccctccttgtgtgcttctgctccccgccccgacccatgcactctgtagtagccatacacagaggctagcagtctag

SEQ ID NO: 190681 - DNA, 8259 bp, Artificial Sequence
  derived and/or modified sequence
atgtacaatggaattggcctgcccaccccccggggcagcggcaccaacggctacgtgcagaggaacctgagcctggtgcggggcagaagaggagagaggccagactacaagggggaggaggagctgcggcggctggaggccgccctggtgaagaggcccaacccagacatcctggaccacgagaggaagagaagagtggagctgcgctgcctggagctggaggagatgatggaggagcagggctatgaggagcagcagatccaggagaaggtggccaccttccggctgatgctgctggagaaggatgtgaaccctgggggcaaggaggagaccccaggccagaggcctgctgtgacagagacccaccagctggccgagctgaatgagaagaagaatgaaaggctgcgggccgccttcggcatcagtgacagctatgtggatggcagcagctttgacccccagaggcgggcccgggaggccaagcagcctgcccctgagccccccaagccctacagcctggtgcgggagagcagcagcagccgcagccccacccccaagcagaagaagaagaagaagaagaaggaccggggccgccgctctgagagcagcagcccccggcgggagaggaagaagagcagcaagaagaagaagcacaggtctgagagcgagagcaagaagaggaagcacaggagccccacccccaagagcaagaggaagagcaaggacaagaagaggaagaggagccgcagcaccaccccagcccccaagagccggcgggcccacaggagcaccagcgctgacagcgccagcagcagtgacaccagccgcagccgcagccgctctgctgctgccaagacccacaccacagccctggccggccgcagccccagccctgccagcggccggcggggggagggagatgcccccttcagcgagcccggcaccaccagcacccagaggcccagcagccctgagacagccaccaagcagcccagcagcccctatgaggacaaggacaaggacaagaaggagaagagcgccacccggcccagccccagccctgagaggagcagcactggacctgagcccccagcccccacccccctgctggccgagcggcacggcggcagcccccagcccctggccaccacccccctgagccaggagcctgtgaaccccccatctgaggccagccccacccgggacaggagcccccccaagagccctgagaagctgccccagagcagcagcagcgagagcagcccccccagcccccagcccaccaaggtgtccagacatgccagcagcagccctgagagccccaagccagccccagcccctggcagccaccgggagatcagcagcagccccaccagcaagaacagaagccacggccgggccaagagggacaagagccacagccacacccccagcaggaggatgggccgcagccgcagccctgccacagccaagaggggccgcagccgcagcaggacccccaccaagaggggccacagccgcagccgcagcccccagtggaggaggagccgcagcgcccagcgctggggccgcagccgcagcccccagaggcggggccgcagccgcagcccccagaggcctggctggagccgcagcaggaacacccagaggcggggccgcagccgcagcgcccggcggggccgcagccacagccgcagccctgccacccggggccgcagccgcagcaggaccccagcccggcggggccgcagccgcagcaggaccccagcccggcggcgcagccgcagcaggacccccacccggcggcgcagccgcagcaggaccccagcccggcggggccgcagccgcagcaggaccccagccaggagaagaagcaggaccaggagccctgtgagaagaagaagccgcagccgcagccctgcccggcgcagcggccgcagccgcagcaggaccccagcccggcggggccgcagccgcagcaggaccccagcccggcggggccgcagccgcagcaggaccccagcccggcgcagcggccgcagccgcagcaggaccccagcccggcggggccgcagccgcagcaggaccccccggcggggccgcagccgcagccgcagcctggtgagaagaggccgcagccacagcaggaccccccagaggcggggccgcagcggcagcagcagcgagaggaagaacaagagcaggaccagccagaggaggagccgcagcaacagcagccctgagatgaagaagagccgcatcagcagcagaagaagccgcagcctgagcagccccaggagcaaggccaagagccggctgagcctgcggcgcagcctgagcggcagcagcccctgccccaagcagaagagccagaccccaccaagaagaagccgcagcggcagcagccagcccaaggccaagagcaggaccccaccaagaagaagccgcagcagcagcagccccccacccaagcagaagagcaagacccccagccggcagagccacagcagcagcagcccccaccccaaggtgaagagcggcaccccaccccggcagggcagcatcaccagcccccaggccaatgagcagagcgtgaccccccagaggaggagctgctttgagagcagcccagaccctgagctgaagagcaggacccccagccgccacagctgcagcggcagcagccccccccgggtgaagagcagcaccccaccccggcagagccccagccgcagcagcagcccccagcccaaggtgaaggccatcatcagcccccggcagaggagccacagcggcagcagcagccccagccccagccgggtgaccagcaggaccaccccccggcgcagccgctctgtgagcccctgcagcaatgtggagagccggctgctgccccgctacagccacagcggcagcagcagcccagacaccaaggtgaagccagagaccccaccccggcagagccacagcggcagcatcagcccctaccccaaggtgaaggcccagaccccacctggccccagcctgagcggcagcaagagcccctgcccccaggagaagagcaaggacagcctggtgcagagctgccccggcagcctgagcctgtgtgccggcgtgaagagcagcaccccacctggagagagctactttggagtgagcagcctgcagctgaagggccagagccagaccagcccagaccacagaagtgacaccagcagccctgaggtgcggcagagccacagcgagagccccagcctgcagagcaagagccagaccagccccaagggcggccgcagccgcagcagcagccctgtgacagagctggccagccgcagccccatccggcaggacagaggagagttcagcgccagccccatgctgaagagcggcatgagccctgagcagagccgcttccagagcgacagcagcagctaccccaccgtggacagcaacagcctgctgggccagagccggctggagacagctgagagcaaggagaagatggccctgcccccccaggaggatgccacagccagccccccccggcagaaggacaagttcagccccttccctgtgcaggacaggcctgagagcagcctggtgttcaaggacaccctgcggaccccaccccgggagaggtctggggccggcagcagccctgagaccaaggagcagaacagcgccctgcccaccagcagccaggatgaggagctgatggaggtggtggagaagtctgaggagcctgctggccagatcctgagccacctgagcagcgagctgaaggagatgagcaccagcaactttgagagcagccctgaggtggaggagaggcctgctgtgtccctgaccctggaccagagccagagccaggccagcctggaggccgtggaggtgcccagcatggccagctcctggggcggcccccacttcagccctgagcacaaggagctgagcaacagccccctgcgggagaacagctttggcagccccctggagttcaggaacagcggccccctgggcacagagatgaacacaggcttcagcagcgaggtgaaggaggacctgaatggccccttcctgaaccagctggagacagaccccagcctggacatgaaggagcagagcaccaggagcagcggccacagcagcagcgagctgagcccagatgctgtggagaaggccggcatgagcagcaaccagagcatcagcagccctgtgctggatgctgtgcccaggacccccagccgggagaggagcagcagcgccagcagccctgagatgaaggatggcctgcccaggacccccagcagaagaagccgcagcggcagcagccctggcctgagagatggcagcggcacccccagccgccacagcctgagcggcagcagccctggcatgaaggacatccccaggacccccagccggggccgctcagaatgtgacagcagccctgagcccaaggccctgccccagaccccccggcccaggagccgcagccccagcagccctgagctgaacaacaagtgcctgaccccccagcgggagaggagcggcagcgagagctctgtggaccagaagacagtggcccggacccccctgggccagaggagccgcagcggcagcagccaggagctggatgtgaagcccagcgccagcccccaggagaggtctgagagtgacagcagcccagacagcaaggccaagaccaggacccccctgcggcagaggagccgcagcggcagcagccctgaggtggacagcaagagccggctgagcccccggcgcagccgcagcggcagcagccctgaggtgaaggacaagccccgggccgccccccgggcccagagcggcagtgacagcagccctgagcccaaggccccagccccccgggccctgccccggcgcagccgcagcggcagcagcagcaagggccggggccccagccctgagggcagcagcagcacagagagcagccctgagcacccccccaagagcaggacagcccggcggggcagccgcagcagccctgagcccaagaccaagagcaggaccccaccaagaagaagaagcagccgcagcagccctgagctgaccaggaaggcccggctgagcagaagaagccgcagcgccagcagcagccctgagaccaggagcaggaccccacccaggcacagaagaagccccagcgtgagcagccctgagcctgctgagaagagccgcagcagcagaagaagaagaagtgccagcagccccaggaccaagaccaccagccggcggggccgcagccccagccccaagccccggggcctgcagaggagccgcagccgcagccggcgggagaagaccaggaccaccaggagaagagacagaagtggcagcagccagagcaccagcagaagacggcagaggagccgcagccgcagccgggtgaccaggagaagaagaggaggcagcggctaccacagccgcagccctgcccggcaggagagcagcaggaccagcagcagaagaagaagaggccgcagcaggaccccacccaccagcaggaagaggagccgcagcaggaccagccctgccccctggaagaggagccgcagccgggccagccctgccacccaccggcgcagccgcagcaggacccccctcatcagcagaagaagaagccgcagcaggaccagccctgtgtccagaagaagaagccgcagcaggacctctgtgaccaggagaagaagccgcagccgggccagccctgtgtccagaagaagaagccgcagcaggaccccacctgtgaccaggagaagaagccgcagcaggacccccaccacccggcggcgcagccgcagcaggaccccacctgtgacccggcggcgcagccgcagcaggaccccacctgtgacccggcggcgcagccgcagcaggaccagccccatcacccggcggcgcagccgcagcaggaccagccctgtgacccggcggcgcagccgcagcaggaccagccctgtgacccggcggcgcagccgcagcaggaccagccctgtgacccggcggcgcagccgcagcaggaccccaccagccatcagaagaagaagccgcagcaggacccccctgctgcccaggaagaggagccgcagccgcagccccctggccatcagaagaagaagccgcagcaggacccccaggacagcccggggcaagaggagcctgaccaggagccccccagccatcagaagaagaagtgccagcggcagcagcagtgacaggagccgcagcgccaccccaccagccaccaggaaccacagcggcagcaggaccccacctgtggccctgaacagcagcaggatgagctgcttcagccggcccagcatgagccccacccccctggaccgctgccgcagccctggcatgctggagcccctgggcagcagcaggacccccatgtctgtgctgcagcaggccggcggctccatgatggatggccctggcccccgcatcccagaccaccagaggacctctgtgcctgagaaccacgcccagagcagaattgccctggccctgacagccatcagcctgggcacagcccggcccccacccagcatgtctgctgctggcctggccgccaggatgagccaggtgcctgcccctgtgcccctgatgagcctgaggacagccccagctgccaacctggccagccgcatcccagctgccagcgctgctgccatgaacctggccagcgcccggaccccagccatccccacagctgtgaacctggccgacagcaggaccccagctgctgctgctgccatgaacctggccagccccaggacagctgtggcccccagcgctgtgaacctggccgaccccaggacccccacagccccagctgtgaacctggccggggcccggaccccagctgccctggccgccctgagcctgaccggcagcggcaccccacccacagctgccaactaccccagcagcagcaggaccccccaggccccagccagcgccaacctggtgggccccaggtctgcccacgccacagcccctgtgaacattgctggcagcaggacagctgctgccctggccccagccagcctgaccagcgccaggatggccccagccctgagcggggccaacctgaccagcccccgggtgcccctgagcgcctatgaaagagtgtctggccgcaccagcccccccctgctggaccgggcccggagcaggaccccacccagcgcccccagccagagcaggatgaccagcgagcgggcccccagccccagcagcaggatgggccaggcccccagccagagcctgctgcccccagcccaggaccagcccaggagccctgtgcccagcgccttcagtgaccagagccgctgcctgattgcccagaccacccctgtggccggcagccagagcctgagcagtggagctgtggccaccaccaccagcagcgctggggaccacaacggcatgctgtctgtgcctgcccctggggtgccccacagtgatgtgggggagcccccagccagcactggagcccagcagcccagcgccctggccgccctgcagcctgccaaggagcggcgcagcagcagcagcagcagcagcagcagcagcagcagcagcagcagcagcagcagcagcagcagcagcagcagcagcggcagcagcagcagtgacagcgagggcagcagcctgcctgtgcagcctgaggtggccctgaagagggtgcccagccccaccccagcccccaaggaggccgtgcgggagggccggcccccagagcccaccccagccaagaggaagagaagaagcagcagcagcagcagcagcagcagcagcagcagcagcagcagcagcagcagcagcagcagcagcagcagcagcagcagcagcagcagcagcagcagcagcagcagcagcagcagcagcagcagccccagccctgccaagccaggcccccaggccctgcccaagccagccagccccaagaagcccccacctggagagaggaggagccgcagccccaggaagcccatcgacagcctgcgggacagccgcagcctgagctacagccctgtggagaggagaagacccagcccccagcccagcccccgggaccagcagagcagcagcagcgagcggggcagccggcggggccagagaggagacagccgcagccccagccacaagagaagaagagagacccccagcccccggcccatgaggcacaggagcagccgcagcccctag

SEQ ID NO: 190682 - DNA, 7005 bp, Artificial Sequence
  derived and/or modified sequence
atgtacaatggaattggcctgcccaccccccggggcagcggcaccaacggctacgtgcagaggaacctgagcctggtgcggggcagaagaggagagaggccagactacaagggggaggaggagctgcggcggctggaggccgccctggtgaagaggcccaacccagacatcctggaccacgagaggaagagaagagtggagctgcgctgcctggagctggaggagatgatggaggagcagggctatgaggagcagcagatccaggagaaggtggccaccttccggctgatgctgctggagaaggatgtgaaccctgggggcaaggaggagaccccaggccagaggcctgctgtgacagagacccaccagctggccgagctgaatgagaagaagaatgaaaggctgcgggccgccttcggcatcagtgacagctatgtggatggcagcagctttgacccccagaggcgggcccgggaggccaagcagcctgcccctgagccccccaagccctacagcctggtgcgggagagcagcagcagccgcagccccacccccaagcagaagaagaagaagaagaagaaggaccggggccgccgctctgagagcagcagcccccggcgggagaggaagaagagcagcaagaagaagaagcacaggtctgagagcgagagcaagaagaggaagcacaggagccccacccccaagagcaagaggaagagcaaggacaagaagaggaagaggagccgcagcaccaccccagcccccaagagccggcgggcccacaggagcaccagcgctgacagcgccagcagcagtgacaccagccgcagccgcagccgctctgctgctgccaagacccacaccacagccctggccggccgcagccccagccctgccagcggccggcggggggagggagatgcccccttcagcgagcccggcaccaccagcacccagaggcccagcagccctgagacagccaccaagcagcccagcagcccctatgaggacaaggacaaggacaagaaggagaagagcgccacccggcccagccccagccctgagaggagcagcactggacctgagcccccagcccccacccccctgctggccgagcggcacggcggcagcccccagcccctggccaccacccccctgagccaggagcctgtgaaccccccatctgaggccagccccacccgggacaggagcccccccaagagccctgagaagctgccccagagcagcagcagcgagagcagcccccccagcccccagcccaccaaggtgtccagacatgccagcagcagccctgagagccccaagccagccccagcccctggcagccaccgggagatcagcagcagccccaccagcaagaacagaagccacggccgggccaagagggacaagagccacagccacacccccagcaggaggatgggccgcagccgcagccctgccacagccaagaggggccgcagccgcagcaggacccccaccaagaggggccacagccgcagccgcagcccccagtggaggaggagccgcagcgcccagcgctggggccgcagccgcagcccccagaggcggggccgcagccgcagcccccagaggcctggctggagccgcagcaggaacacccagaggcggggccgcagccgcagcgcccggcggggccgcagccacagccgcagccctgccacccggggccgcagccgcagcaggaccccagcccggcggggccgcagccgcagcaggaccccagcccggcggcgcagccgcagcaggacccccacccggcggcgcagccgcagcaggaccccagcccggcggggccgcagccgcagcaggaccccagccaggagaagaagcaggaccaggagccctgtgagaagaagaagccgcagccgcagccctgcccggcgcagcggccgcagccgcagcaggaccccagcccggcggggccgcagccgcagcaggaccccagcccggcggggccgcagccgcagcaggaccccagcccggcgcagcggccgcagccgcagcaggaccccagcccggcggggccgcagccgcagcaggaccccccggcggggccgcagccgcagccgcagcctggtgagaagaggccgcagccacagcaggaccccccagaggcggggccgcagcggcagcagcagcgagaggaagaacaagagcaggaccagccagaggaggagccgcagcaacagcagccctgagatgaagaagagccgcatcagcagcagaagaagccgcagcctgagcagccccaggagcaaggccaagagccggctgagcctgcggcgcagcctgagcggcagcagcccctgccccaagcagaagagccagaccccaccaagaagaagccgcagcggcagcagccagcccaaggccaagagcaggaccccaccaagaagaagccgcagcagcagcagccccccacccaagcagaagagcaagacccccagccggcagagccacagcagcagcagcccccaccccaaggtgaagagcggcaccccaccccggcagggcagcatcaccagcccccaggccaatgagcagagcgtgaccccccagaggaggagctgctttgagagcagcccagaccctgagctgaagagcaggacccccagccgccacagctgcagcggcagcagccccccccgggtgaagagcagcaccccaccccggcagagccccagccgcagcagcagcccccagcccaaggtgaaggccatcatcagcccccggcagaggagccacagcggcagcagcagccccagccccagccgggtgaccagcaggaccaccccccggcgcagccgctctgtgagcccctgcagcaatgtggagagccggctgctgccccgctacagccacagcggcagcagcagcccagacaccaaggtgaagccagagaccccaccccggcagagccacagcggcagcatcagcccctaccccaaggtgaaggcccagaccccacctggccccagcctgagcggcagcaagagcccctgcccccaggagaagagcaaggacagcctggtgcagagctgccccggcagcctgagcctgtgtgccggcgtgaagagcagcaccccacctggagagagctactttggagtgagcagcctgcagctgaagggccagagccagaccagcccagaccacagaagtgacaccagcagccctgaggtgcggcagagccacagcgagagccccagcctgcagagcaagagccagaccagccccaagggcggccgcagccgcagcagcagccctgtgacagagctggccagccgcagccccatccggcaggacagaggagagttcagcgccagccccatgctgaagagcggcatgagccctgagcagagccgcttccagagcgacagcagcagctaccccaccgtggacagcaacagcctgctgggccagagccggctggagacagctgagagcaaggagaagatggccctgcccccccaggaggatgccacagccagccccccccggcagaaggacaagttcagccccttccctgtgcaggacaggcctgagagcagcctggtgttcaaggacaccctgcggaccccaccccgggagaggtctggggccggcagcagccctgagaccaaggagcagaacagcgccctgcccaccagcagccaggatgaggagctgatggaggtggtggagaagtctgaggagcctgctggccagatcctgagccacctgagcagcgagctgaaggagatgagcaccagcaactttgagagcagccctgaggtggaggagaggcctgctgtgtccctgaccctggaccagagccagagccaggccagcctggaggccgtggaggtgcccagcatggccagctcctggggcggcccccacttcagccctgagcacaaggagctgagcaacagccccctgcgggagaacagctttggcagccccctggagttcaggaacagcggccccctgggcacagagatgaacacaggcttcagcagcgaggtgaaggaggacctgaatggccccttcctgaaccagctggagacagaccccagcctggacatgaaggagcagagcaccaggagcagcggccacagcagcagcgagctgagcccagatgctgtggagaaggccggcatgagcagcaaccagagcatcagcagccctgtgctggatgctgtgcccaggacccccagccgggagaggagcagcagcgccagcagccctgagatgaaggatggcctgcccaggacccccagcagaagaagccgcagcggcagcagccctggcctgagagatggcagcggcacccccagccgccacagcctgagcggcagcagccctggcatgaaggacatccccaggacccccagccggggccgctcagaatgtgacagcagccctgagcccaaggccctgccccagaccccccggcccaggagccgcagccccagcagccctgagctgaacaacaagtgcctgaccccccagcgggagaggagcggcagcgagagctctgtggaccagaagacagtggcccggacccccctgggccagaggagccgcagcggcagcagccaggagctggatgtgaagcccagcgccagcccccaggagaggtctgagagtgacagcagcccagacagcaaggccaagaccaggacccccctgcggcagaggagccgcagcggcagcagccctgaggtggacagcaagagccggctgagcccccggcgcagccgcagcggcagcagccctgaggtgaaggacaagccccgggccgccccccgggcccagagcggcagtgacagcagccctgagcccaaggccccagccccccgggccctgccccggcgcagccgcagcggcagcagcagcaagggccggggccccagccctgagggcagcagcagcacagagagcagccctgagcacccccccaagagcaggacagcccggcggggcagccgcagcagccctgagcccaagaccaagagcaggaccccaccaagaagaagaagcagccgcagcagccctgagctgaccaggaaggcccggctgagcagaagaagccgcagcgccagcagcagccctgagaccaggagcaggaccccacccaggcacagaagaagccccagcgtgagcagccctgagcctgctgagaagagccgcagcagcagaagaagaagaagtgccagcagccccaggaccaagaccaccagccggcggggccgcagccccagccccaagccccggggcctgcagaggagccgcagccgcagccggcgggagaagaccaggaccaccaggagaagagacagaagtggcagcagccagagcaccagcagaagacggcagaggagccgcagccgcagccgggtgaccaggagaagaagaggaggcagcggctaccacagccgcagccctgcccggcaggagagcagcaggaccagcagcagaagaagaagaggccgcagcaggaccccacccaccagcaggaagaggagccgcagcaggaccagccctgccccctggaagaggagccgcagccgggccagccctgccacccaccggcgcagccgcagcaggacccccctcatcagcagaagaagaagccgcagcaggaccagccctgtgtccagaagaagaagccgcagcaggacctctgtgaccaggagaagaagccgcagccgggccagccctgtgtccagaagaagaagccgcagcaggaccccacctgtgaccaggagaagaagccgcagcaggacccccaccacccggcggcgcagccgcagcaggaccccacctgtgacccggcggcgcagccgcagcaggaccccacctgtgacccggcggcgcagccgcagcaggaccagccccatcacccggcggcgcagccgcagcaggaccagccctgtgacccggcggcgcagccgcagcaggaccagccctgtgacccggcggcgcagccgcagcaggaccagccctgtgacccggcggcgcagccgcagcaggaccccaccagcccaggaccagcccaggagccctgtgcccagcgccttcagtgaccagagccgctgcctgattgcccagaccacccctgtggccggcagccagagcctgagcagtggagctgtggccaccaccaccagcagcgctggggaccacaacggcatgctgtctgtgcctgcccctggggtgccccacagtgatgtgggggagcccccagccagcactggagcccagcagcccagcgccctggccgccctgcagcctgccaaggagcggcgcagcagcagcagcagcagcagcagcagcagcagcagcagcagcagcagcagcagcagcagcagcagcagcagcagcggcagcagcagcagtgacagcgagggcagcagcctgcctgtgcagcctgaggtggccctgaagagggtgcccagccccaccccagcccccaaggaggccgtgcgggagggccggcccccagagcccaccccagccaagaggaagagaagaagcagcagcagcagcagcagcagcagcagcagcagcagcagcagcagcagcagcagcagcagcagcagcagcagcagcagcagcagcagcagcagcagcagcagcagcagcagcagcagcagcagccccagccctgccaagccaggcccccaggccctgcccaagccagccagccccaagaagcccccacctggagagaggaggagccgcagccccaggaagcccatcgacagcctgcgggacagccgcagcctgagctacagccctgtggagaggagaagacccagcccccagcccagcccccgggaccagcagagcagcagcagcgagcggggcagccggcggggccagagaggagacagccgcagccccagccacaagagaagaagagagacccccagcccccggcccatgaggcacaggagcagccgcagcccctag

SEQ ID NO: 190683 - DNA, 6036 bp, Artificial Sequence
  derived and/or modified sequence
atgaagaagagccgcatcagcagcagaagaagccgcagcctgagcagccccaggagcaaggccaagagccggctgagcctgcggcgcagcctgagcggcagcagcccctgccccaagcagaagagccagaccccaccaagaagaagccgcagcggcagcagccagcccaaggccaagagcaggaccccaccaagaagaagccgcagcagcagcagccccccacccaagcagaagagcaagacccccagccggcagagccacagcagcagcagcccccaccccaaggtgaagagcggcaccccaccccggcagggcagcatcaccagcccccaggccaatgagcagagcgtgaccccccagaggaggagctgctttgagagcagcccagaccctgagctgaagagcaggacccccagccgccacagctgcagcggcagcagccccccccgggtgaagagcagcaccccaccccggcagagccccagccgcagcagcagcccccagcccaaggtgaaggccatcatcagcccccggcagaggagccacagcggcagcagcagccccagccccagccgggtgaccagcaggaccaccccccggcgcagccgctctgtgagcccctgcagcaatgtggagagccggctgctgccccgctacagccacagcggcagcagcagcccagacaccaaggtgaagccagagaccccaccccggcagagccacagcggcagcatcagcccctaccccaaggtgaaggcccagaccccacctggccccagcctgagcggcagcaagagcccctgcccccaggagaagagcaaggacagcctggtgcagagctgccccggcagcctgagcctgtgtgccggcgtgaagagcagcaccccacctggagagagctactttggagtgagcagcctgcagctgaagggccagagccagaccagcccagaccacagaagtgacaccagcagccctgaggtgcggcagagccacagcgagagccccagcctgcagagcaagagccagaccagccccaagggcggccgcagccgcagcagcagccctgtgacagagctggccagccgcagccccatccggcaggacagaggagagttcagcgccagccccatgctgaagagcggcatgagccctgagcagagccgcttccagagcgacagcagcagctaccccaccgtggacagcaacagcctgctgggccagagccggctggagacagctgagagcaaggagaagatggccctgcccccccaggaggatgccacagccagccccccccggcagaaggacaagttcagccccttccctgtgcaggacaggcctgagagcagcctggtgttcaaggacaccctgcggaccccaccccgggagaggtctggggccggcagcagccctgagaccaaggagcagaacagcgccctgcccaccagcagccaggatgaggagctgatggaggtggtggagaagtctgaggagcctgctggccagatcctgagccacctgagcagcgagctgaaggagatgagcaccagcaactttgagagcagccctgaggtggaggagaggcctgctgtgtccctgaccctggaccagagccagagccaggccagcctggaggccgtggaggtgcccagcatggccagctcctggggcggcccccacttcagccctgagcacaaggagctgagcaacagccccctgcgggagaacagctttggcagccccctggagttcaggaacagcggccccctgggcacagagatgaacacaggcttcagcagcgaggtgaaggaggacctgaatggccccttcctgaaccagctggagacagaccccagcctggacatgaaggagcagagcaccaggagcagcggccacagcagcagcgagctgagcccagatgctgtggagaaggccggcatgagcagcaaccagagcatcagcagccctgtgctggatgctgtgcccaggacccccagccgggagaggagcagcagcgccagcagccctgagatgaaggatggcctgcccaggacccccagcagaagaagccgcagcggcagcagccctggcctgagagatggcagcggcacccccagccgccacagcctgagcggcagcagccctggcatgaaggacatccccaggacccccagccggggccgctcagaatgtgacagcagccctgagcccaaggccctgccccagaccccccggcccaggagccgcagccccagcagccctgagctgaacaacaagtgcctgaccccccagcgggagaggagcggcagcgagagctctgtggaccagaagacagtggcccggacccccctgggccagaggagccgcagcggcagcagccaggagctggatgtgaagcccagcgccagcccccaggagaggtctgagagtgacagcagcccagacagcaaggccaagaccaggacccccctgcggcagaggagccgcagcggcagcagccctgaggtggacagcaagagccggctgagcccccggcgcagccgcagcggcagcagccctgaggtgaaggacaagccccgggccgccccccgggcccagagcggcagtgacagcagccctgagcccaaggccccagccccccgggccctgccccggcgcagccgcagcggcagcagcagcaagggccggggccccagccctgagggcagcagcagcacagagagcagccctgagcacccccccaagagcaggacagcccggcggggcagccgcagcagccctgagcccaagaccaagagcaggaccccaccaagaagaagaagcagccgcagcagccctgagctgaccaggaaggcccggctgagcagaagaagccgcagcgccagcagcagccctgagaccaggagcaggaccccacccaggcacagaagaagccccagcgtgagcagccctgagcctgctgagaagagccgcagcagcagaagaagaagaagtgccagcagccccaggaccaagaccaccagccggcggggccgcagccccagccccaagccccggggcctgcagaggagccgcagccgcagccggcgggagaagaccaggaccaccaggagaagagacagaagtggcagcagccagagcaccagcagaagacggcagaggagccgcagccgcagccgggtgaccaggagaagaagaggaggcagcggctaccacagccgcagccctgcccggcaggagagcagcaggaccagcagcagaagaagaagaggccgcagcaggaccccacccaccagcaggaagaggagccgcagcaggaccagccctgccccctggaagaggagccgcagccgggccagccctgccacccaccggcgcagccgcagcaggacccccctcatcagcagaagaagaagccgcagcaggaccagccctgtgtccagaagaagaagccgcagcaggacctctgtgaccaggagaagaagccgcagccgggccagccctgtgtccagaagaagaagccgcagcaggaccccacctgtgaccaggagaagaagccgcagcaggacccccaccacccggcggcgcagccgcagcaggaccccacctgtgacccggcggcgcagccgcagcaggaccccacctgtgacccggcggcgcagccgcagcaggaccagccccatcacccggcggcgcagccgcagcaggaccagccctgtgacccggcggcgcagccgcagcaggaccagccctgtgacccggcggcgcagccgcagcaggaccagccctgtgacccggcggcgcagccgcagcaggaccccaccagccatcagaagaagaagccgcagcaggacccccctgctgcccaggaagaggagccgcagccgcagccccctggccatcagaagaagaagccgcagcaggacccccaggacagcccggggcaagaggagcctgaccaggagccccccagccatcagaagaagaagtgccagcggcagcagcagtgacaggagccgcagcgccaccccaccagccaccaggaaccacagcggcagcaggaccccacctgtggccctgaacagcagcaggatgagctgcttcagccggcccagcatgagccccacccccctggaccgctgccgcagccctggcatgctggagcccctgggcagcagcaggacccccatgtctgtgctgcagcaggccggcggctccatgatggatggccctggcccccgcatcccagaccaccagaggacctctgtgcctgagaaccacgcccagagcagaattgccctggccctgacagccatcagcctgggcacagcccggcccccacccagcatgtctgctgctggcctggccgccaggatgagccaggtgcctgcccctgtgcccctgatgagcctgaggacagccccagctgccaacctggccagccgcatcccagctgccagcgctgctgccatgaacctggccagcgcccggaccccagccatccccacagctgtgaacctggccgacagcaggaccccagctgctgctgctgccatgaacctggccagccccaggacagctgtggcccccagcgctgtgaacctggccgaccccaggacccccacagccccagctgtgaacctggccggggcccggaccccagctgccctggccgccctgagcctgaccggcagcggcaccccacccacagctgccaactaccccagcagcagcaggaccccccaggccccagccagcgccaacctggtgggccccaggtctgcccacgccacagcccctgtgaacattgctggcagcaggacagctgctgccctggccccagccagcctgaccagcgccaggatggccccagccctgagcggggccaacctgaccagcccccgggtgcccctgagcgcctatgaaagagtgtctggccgcaccagcccccccctgctggaccgggcccggagcaggaccccacccagcgcccccagccagagcaggatgaccagcgagcgggcccccagccccagcagcaggatgggccaggcccccagccagagcctgctgcccccagcccaggaccagcccaggagccctgtgcccagcgccttcagtgaccagagccgctgcctgattgcccagaccacccctgtggccggcagccagagcctgagcagtggagctgtggccaccaccaccagcagcgctggggaccacaacggcatgctgtctgtgcctgcccctggggtgccccacagtgatgtgggggagcccccagccagcactggagcccagcagcccagcgccctggccgccctgcagcctgccaaggagcggcgcagcagcagcagcagcagcagcagcagcagcagcagcagcagcagcagcagcagcagcagcagcagcagcagcagcggcagcagcagcagtgacagcgagggcagcagcctgcctgtgcagcctgaggtggccctgaagagggtgcccagccccaccccagcccccaaggaggccgtgcgggagggccggcccccagagcccaccccagccaagaggaagagaagaagcagcagcagcagcagcagcagcagcagcagcagcagcagcagcagcagcagcagcagcagcagcagcagcagcagcagcagcagcagcagcagcagcagcagcagcagcagcagcagcagcagccccagccctgccaagccaggcccccaggccctgcccaagccagccagccccaagaagcccccacctggagagaggagcctgctgcctgtgagccccagccccaggcacagcctgccccacgtggcccggggcaccttcctgaagaggaccagcggctacttcccccccctgcacaagagctttggcaccccctgtggcctgcaggacaaggccccacccctgcgggagtggagggtgcggctcttcaccaacggcccctgccccccctgtgtgctgctgctgcctgcccccacccacgccctgtgcagcagccacacccagaggctggccgtgtag

SEQ ID NO: 190684 - DNA, 8259 bp, Artificial Sequence
  derived and/or modified sequence
atgtacaacggcatcggcctgcccaccccccggggcagcggcaccaacggatatgtccaaaggaacctgagccttgtgcgagggcgaaggggcgagcggcctgattacaaaggggaggaagagcttcgtcggctggaagcagccctggtcaagagacctaacccagatattttagaccacgagcgaaaacggcgggtcgaactccggtgtttggaattggaggagatgatggaagaacaggggtacgaggagcagcagatacaggagaaagttgctacattccgattaatgttactggaaaaagatgtcaaccccggaggcaaggaagaaacacccggtcaacgcccagccgtcaccgagacacatcaattggctgaattgaacgagaaaaagaacgaacgcctaagagcagccttcgggattagcgactcttatgtcgatggcagctcttttgacccacaaagacgcgcgcgggaagctaagcagcctgctcccgagccaccaaagccttattccttggtccgggaaagctcgtcctcgcggtcacccaccccaaagcagaaaaagaaaaagaagaagaaggacaggggtagaagatctgagtcatcctctcctaggagggagcgtaagaagagtagcaagaagaaaaagcaccgctccgaaagcgagtcaaagaaacgcaagcaccgttcaccaaccccaaagtccaaaaggaaatctaaggataaaaagcggaagcgctcacggtccacaactccagccccaaagagccgccgcgcacatagaagcacatcggcggattccgcgtcaagcagcgacacctctcgctccaggtctcgctccgctgccgcaaagacccatacgacagccctggcgggccgcagcccatctcctgcgagcggaagacgcggcgagggggacgcccccttttccgagcctggcaccactagcacgcagagaccgtcctcgccggagaccgcaaccaaacagccatcttctccttatgaagataaagacaaggataaaaaggagaagtctgccacgcgtccctcgccatctcccgagaggtcaagcacaggccccgagccccccgctccgaccccactgctggctgagaggcatggaggaagcccgcagcccctcgccaccactccattgtcacaagaaccggtgaaccccccctctgaggcaagccccacacgggataggagcccacccaagtcacccgagaagctcccccaaagcagctcctctgagtccagccccccttcaccccaacccactaaggtttctaggcatgctagcagcagtccggagagccccaagcctgcccctgcccccggatcacatagagagataagctctagtccaactagcaagaaccgctctcacggccgggccaagcgcgataagtctcacagtcacacaccttctcgcagaatggggcggtccaggtctcccgccaccgctaaaagaggcaggagcaggagtaggacccctactaagagggggcatagcaggagtcggagcccacagtggaggcgcagccgctcagctcagcgctggggaagaagccgctcgccacagcggcgcggacggtcacgttcaccccagcggccaggatggtctagatcccgcaatacacaaagacgcggcaggtcacgaagtgcacggagggggcggtctcactcccgctctccggccacccgggggcggtccaggtcgcgcaccccggctcggcggggccggagtcggagccgtactccggctcgaaggaggagccggtcccggacaccaaccagaagaaggtctcggtctaggactcccgcccggagggggcgaagccgttctaggacaccagcgcggaggcgttctcgaaccagatccccggtccgccgtaggtcgcgatccaggtcacccgccagacgctcaggccggagccggtcgcgcacaccggcaaggaggggcaggtctcgtagccgcacgcctgcccgccgaggaaggtcgcgcagccggaccccagcgcgccgtagtggacgaagtcgaagcaggactcctgccagaaggggccgcagccggtcacgcactccccgccgtggccgctcacgaagccgtagtcttgtgagacgggggagatcgcactcacgaacaccccagaggcgcggacggagcggcagcagcagcgagcgcaagaacaagagtaggaccagtcagcgaaggtcccgtagtaacagctctcctgaaatgaaaaagagcagaatttctagtaggcggtcccgtagtttgtcttcaccccggagcaaggccaaatctcggctgtcgctgcgcaggagcctgtcagggagttcaccttgtcccaagcaaaagagccagacaccacctcggcgttcccgctctggcagcagtcagccgaaggctaagagtaggacaccgcctcgcaggtccaggtctagctcctctcccccaccgaagcagaagtccaagacaccgtccagacagagtcactcatcgagctcaccacacccaaaggtgaaatcgggtacaccccctagacagggctctattacatccccacaggcaaacgagcagagcgtgacgccgcagcgtcgctcatgctttgagtcatccccagatccagagctgaaaagccgaaccccaagccggcacagctgttccgggtctagtccccctagagtgaaaagctccacacctccgagacagtcaccatcgcgatcttcgtcgccacaacccaaagtgaaggcgatcatctctccaagacagcgcagtcactctgggtctagctcgcccagcccttctagagttacctctcgcaccacacccaggcgatcccgctctgttagcccatgctctaacgtggaatcccggttattgcctaggtactcccacagcgggtcaagctccccggacactaaggtcaagcccgaaacaccgccacgacaatctcattctggatcaatctctccttacccaaaagtcaaggctcagactccccccggacctagcttgtcgggcagtaaaagcccatgtccacaggagaagagcaaggacagccttgttcagtcatgtccagggtctctgagcctgtgtgctggcgttaagtctagtactcccccaggggagagttacttcggagttagcagtctacagcttaaaggccagtcacagacctcgcccgaccatcgttccgatacgtcctcacccgaagtcagacagtcccattcagagagtcctagtctgcaatccaagagtcagacctcccccaagggagggcgatcccggtccagctcgcccgtgactgagctggccagcagatctcccattcgccaagacagaggcgaatttagtgcatcaccgatgttgaaatccgggatgtcgcctgagcagagccgtttccagtctgactcctcgtcctaccctacggtggactcaaatagtttgttgggtcagtcaaggcttgagaccgccgagagtaaggagaagatggcgctccctccccaggaggacgcgacagcatccccaccaaggcaaaaggacaaattcagtcccttcccagtacaggaccggcccgaatcctcccttgtctttaaggatactctgcgaacgcctccccgggagaggagtggcgctgggagctcccctgaaacgaaagagcaaaattccgctctcccaacctccagtcaagacgaagaactgatggaggtggtcgagaagtccgaggaaccagctggccaaatcctgagtcacctgagttccgagttaaaggagatgagtacatctaattttgaatccagtcctgaagtcgaggagaggcctgctgtatctctcacactggatcagagccagagtcaggcctctctggaagctgtggaggtgccatctatggcttcatcttgggggggcccacatttcagtccagagcacaaggagctatctaatagcccattacgcgagaatagttttgggagccctctcgaattcagaaattccggtcccttaggcacagaaatgaatactgggtttagcagtgaggtgaaagaggatctgaacgggccgtttctgaaccagctggaaaccgacccttctttggatatgaaggaacaaagcacacggagctctggacatagctcgtccgaactttctccggacgcagtggagaaagccggtatgtcaagtaatcagtccatctcgagccctgtgctggacgctgtccccagaaccccgtcgagagaacgctcttcttccgcatctagtccagaaatgaaggacggtctcccccgtacgcccagccgaaggagcagatccgggtcatcaccaggtctacgggacggaagcggaacaccctcccgacacagtctatccggctcaagccccgggatgaaagatattccaaggactcccagccgggggagaagtgagtgcgactcatctcctgaacccaaagctctgccccagaccccgaggcctagatcgcggtctccaagctcaccagaactaaacaacaagtgtctgacaccccagcgtgaacgctctggatcggagtcctccgtagatcagaagactgttgcccgaactcccttggggcagcgaagcaggagcgggtctagtcaagaactggatgttaagccatcggctagtcctcaggagcgctccgagtcagattcttctcccgactccaaagcaaaaacaaggacaccgctgcggcagagatctaggtcgggctccagtccggaagtagacagtaagagtcggctctccccgaggaggagcaggagtgggagttctcccgaggtgaaggacaagcccagggccgcgccgcgggcccaatcgggcagtgatagttctcccgagcctaaagcacctgccccacgtgctctaccaagacgcagtagaagtggctcttcctcaaaaggacgcggccctagcccagagggcagtagtagcacggagtccagtccagagcatcctcccaagagtcgtactgcacgacggggatccagatcttccccagagccaaagaccaagagcagaaccccccctaggcgcaggtcctcacggagttcccctgaattaactcgcaaagcccgtctgtctaggcgctccaggtctgccagctcttcacccgaaacaaggagtcgtactcctccgcggcacaggagaagcccctccgtctcgtcacccgagccagccgagaaatcccgctctagcagacggcgtagaagcgcctcctccccgaggacaaaaacaacttcccgccgagggcggagcccttctccaaaacctcgaggattacagcgcagtaggagtcgatcccggagagagaaaacccggaccactcgccgtcgagataggagcggaagttcccagtctacttctcgccgaaggcagcggtctcggtccaggtctcgagtgacacggcgtcgccgtgggggttcaggttaccactccaggtcccctgcccgccaagagtcctccagaacctcgtctagaagacgccgggggagaagtaggactcctccaactagccgcaagcgaagcagatcgcgcacctcccctgctccctggaagcgatctcggagccgggcctcccccgccacccatcggcgtagtcggtcgcggacacccctgatctccaggaggcggtctcggtcccgcactagtccagtctcccggagacgcagccgttctagaactagcgtgacccggcggcgaagtcggtcacgtgcaagcccagtgagcagaaggaggtcccgaagtcggaccccccctgttacgcgcagacggtcccgtagtcgcaccccaactacccggcggaggagtcggtcccgcacccctcctgtgacgcggcgcaggagccgatcacggactccacctgtgacgaggcgtagatcacgcagcagaacgtcccctatcacccgcaggagatcaagaagccgaacaagccctgtgacccgtaggaggtcccgttcccgaaccagcccggtcacacggcggcgctcgcgatcccgtacttctcccgtcacaagaagaagaagcaggtcacggacgccgcccgctattaggagacgctcaaggtcgcgaactccactgctcccacgtaagcgaagccgctccaggtcacccctggccatccggcgccgtagcagatccagaacccctcgtaccgccaggggcaagaggagtctaactagatcaccccctgcgatccgccgccgctcagctagtggaagtagctcggatcggagcaggtccgctacccctcctgctacccgcaaccactccggttccaggacccccccagtggccctcaatagttctcggatgagctgcttctctcgacctagcatgtcccctaccccgttagatagatgccggtcacctgggatgctagagccattgggatcatccagaacccctatgtcagtgctgcagcaggctggaggctctatgatggatggccctggcccgagaatccccgaccaccagaggacatcagtgccagaaaaccacgctcagtccagaatcgccctggccttgaccgctatcagcctaggaaccgccagacctccgccaagtatgtcagccgcgggcctggccgccaggatgtcccaggttcccgcccctgtgccgctcatgagcctccggactgcacccgccgctaatctggccagccggattcccgccgccagcgccgctgctatgaacctggcttccgcccggactcccgccattccaaccgcagtcaacctcgccgactccaggacgcctgcagcggcagccgccatgaacctagccagccccaggaccgccgtagcacctagcgcggtgaacttggccgaccctcggaccccaactgcgccggcggtcaatctggcgggggccaggacgcccgccgccttagccgctctgtcactcaccgggtctggaaccccccccaccgctgccaactacccttccagctctcgcactcctcaggctcccgccagtgccaaccttgtaggcccccggtccgcacacgccacagcaccagttaatattgctggatcgagaaccgccgcagccctggcaccagcctccctgacgagcgccaggatggctcccgccctgagcggagctaaccttactagcccacgggtcccactttctgcatatgagagagtctccggccggaccagcccccccctgctggaccgggcgaggtctcgtacaccaccctcagcccctagtcaaagcaggatgacaagtgagcgcgcaccaagccctagctcacgcatgggccaggcaccttcccagtcactacttccaccggctcaagatcaacctcggagccccgtccccagcgcattctccgaccagagtcggtgtcttattgcacagaccacacctgtggccgggtcccagtccctaagtagcggcgccgtggctaccactacaagttccgccggtgatcacaacgggatgctgagcgtacctgctcccggcgtcccgcactccgatgtgggcgagccgcctgcatccacaggggcccagcaacccagcgccctggcagccttgcagcccgccaaagaaaggcggtcttccagttcttcttcctcttctagcagtagcagctccagtagttcttctagcagctcttcctcctctagctctggttcgtcttcctccgattccgaagggagcagcctcccggtccaaccggaagtggcccttaaaagagtacccagcccgacacctgcaccaaaggaggcagtgagggagggtcgcccccccgagcccactcctgccaagcggaaaaggcgctcctcgagctccagctcaagtagttccagtagctcaagctcgtcatcaagttctagctcatccagtagctcgtcgtcttcttccagctccagcagttcttcgagctcctcctcctcctcctccagtccaagccccgcaaagccaggcccgcaagctctgcctaagccggccagcccaaaaaaacctccacctggagagcgtcgctctcgctccccccggaaacccatcgacagcctcagagactcaagatccctgtcctatagccccgtggaacgccgaagacccagtccgcagccaagtccacgggatcaacagtcatcaagtagcgaaagaggaagcagaagggggcagagaggcgactctcggtccccatcgcacaaaaggagacgcgagaccccttcaccgaggcctatgcgtcacaggtccagccggagcccctag

SEQ ID NO: 190685 - DNA, 7005 bp, Artificial Sequence
  derived and/or modified sequence
atgtacaacggcatcggcctgcccaccccccggggcagcggcaccaatggatacgttcagcggaacttgagcctggtgaggggacgccgaggggagcgaccggactataaaggcgaagaagagctgcgaaggttggaggctgcattagttaagcgccccaaccccgacatcctggaccatgagcgcaagcgccgggtcgagctccgatgtctggagctggaagagatgatggaagagcaaggttatgaggaacaacagattcaagagaaggtggcgaccttccggctgatgctactcgagaaggacgtgaaccctggcggaaaggaggagacccctggtcaacgcccggctgtgaccgagactcaccagctagctgagttgaacgaaaagaagaatgaacgtctgagagcagcctttggaatctccgattcctatgtcgatggctcttcttttgacccccagcgacgagccagagaagctaagcagccggcccctgagcctcccaaaccttacagcttggtgcgggaaagctcttcgtctcgatcaccgactcctaagcaaaagaagaagaagaagaaaaaagatagaggtcgcagaagcgagagctccagcccgcggcgggaaaggaaaaaatccagcaaaaaaaagaaacataggagcgagtcagagtccaaaaagcgcaagcataggagccctacacctaagagtaagcggaaaagcaaagacaagaaaaggaagagatcacgcagcaccacccccgcacccaaatctagaagggcccatcgctccacctccgcagatagcgcatccagcagcgacacgagccgttcgcgtagtcgctcagccgcagctaaaactcacacaactgcgctggccggccgttcacctagcccagcaagcggccggcgcggggagggggacgcacctttctccgaacctggtacaacctcaacacagaggccatcctctcccgaaacggctacgaagcaaccatcatcgccttacgaagataaggataaggacaagaaagagaagagtgcgaccaggcccagtccttcacctgagcgaagctctacagggccggagccccccgcccccacccccctcttagcagaacgccatgggggtagtcctcagccgcttgctacaacgcctctctctcaggagccagtcaaccctccttctgaagcatctcctacgcgcgaccgttctccccctaagtctcccgagaagctgccccagtcaagttcgtcggaatcatcgccccctagtccccagcccacaaaggtcagcagacacgcctctagttctcctgaatcaccaaagcccgcccccgctccaggatcccatcgagaaatttcaagcagtcccaccagtaagaaccgctctcacggaagggccaagagggacaaaagtcattcacacacaccatcgcggcgcatgggtcggtcccgtagccctgccacagccaagcggggtagaagtagatcccggacgcccaccaagcgagggcattcacgcagtaggtccccacagtggagacggtcaaggtcagcccaacgctggggcaggtctaggagtcctcagagaagaggaagatcaaggagcccacagcggcctgggtggtcaagaagtaggaatacacaaagaagaggacgatcaaggtctgctcgtcgtgggcggagtcattccagatctcccgctaccagaggacggagccggtctagaactcccgcgcgaagaggtcgatccagatctaggacgcccgcacgacgccgttcacgaagccgtacgccgacaagacggcgcagtaggtcccggacgcccgctcgaaggggacgctcccgatcacgaacccccgcaaggaggcgctccaggaccagatcccctgtacgcagaaggtcccgcagtcgcagtccggctcgcaggtctgggcgaagccggagtcgaacccccgccagacgcggccggtcgcgctcccggacccccgctcgtaggggcaggtctaggtcccgtacccctgccaggaggagcggccgcagccgaagcaggactccagcacgcagagggcgctctcgttcacgaacacccagacggggacgtagcaggagtaggtcacttgttcgtcggggaagaagtcacagtcggacaccccagagacgtgggagatccgggtcgagtagcgagaggaagaacaaaagcaggacttctcagagacgctcacgtagcaacagctctccagaaatgaaaaaatcacggatttcctcaaggcgttcgagatccctgtccagcccgcggtcaaaggctaaatctaggctgagtctgagaaggtctctttcaggctcctccccttgccccaaacagaagagccaaaccccaccaaggaggagtcgttccggcagtagccagcccaaggcaaagagcagaacacctccccggaggtccagatcttcatctagtcccccacccaagcagaagtccaagacaccttctaggcagagtcactcctcgtcgagtcctcatcccaaagttaagtccggaacgccaccaaggcagggctctatcactagtccccaggcaaatgagcaaagtgtgactccacagaggcgtagttgttttgagtcctcccctgatcctgagcttaagtcacgcacacccagcagacattcctgctccggcagcagccctccccgtgttaagtcaagtaccccgccacggcagagcccaagtcggtcttctagccctcagcctaaggtgaaggccattatctcacctagacagaggtcacacagtgggtctagctcccctagcccatcacgtgtgacctctagaactaccccacgcagatctagatctgtgtcaccgtgtagtaatgtggaatctcgactgctgccccggtattctcactcagggtccagctcacctgatacaaaagtcaagccagaaacacctccccgccagtcccactccggatccatcagcccttacccaaaggtgaaggcacagacaccaccaggaccatcactgtctgggagcaagagtccatgtccccaggaaaagagcaaagacagtctagtgcaatcttgccccggtagcctcagcttatgcgctggagtcaagtcatctactccacccggggaatcttactttggtgtctcttccctccagttgaaaggacagagccagacctcaccagatcatcgctcagatacatcttccccagaagtgaggcagtcccactctgaaagtcctagcctgcaaagcaaaagtcaaacatccccgaaaggcggacgctcccggtctagttccccagtgacagagttagcctcgaggtcacctataaggcaagataggggagagttcagcgcttcccccatgctgaaaagcggtatgagcccggagcagagtcgcttccaaagtgactctagtagctatccgaccgtagatagcaacagcctcttggggcaatctcgtttggagacagccgagagcaaggagaagatggccctgccacctcaggaggacgctacggcctctccgccccgccagaaggacaaattctcaccattccccgtacaggaccggccagagtcttctttggtgtttaaggataccctgcgcacgccacccagggagagatccggggcaggctcatcccctgagaccaaagagcagaatagcgccctgcccactagttcacaagacgaagagctgatggaagttgtggaaaagtctgaggaacctgccggccaaatccttagccatctgagcagtgagctgaaggagatgtccactagcaattttgagagctctcccgaggtggaggagcgtccggccgtttctttgacactggaccagtcccagtcccaggccagcctggaggctgtggaggtaccctctatggcttcctcatggggcgggccccacttcagcccggagcataaggagttgagtaactcccctctccgtgagaatagcttcggtagtcctcttgagtttaggaattccggacccttgggaaccgagatgaacacaggcttctcgtctgaggtaaaagaggaccttaatggcccattcctgaaccagctcgagaccgacccatctctggacatgaaagaacagtcgacgaggagctcaggacacagctcttccgaattatcgccggatgctgtcgagaaggccgggatgagttcaaatcagagcatctcctcccctgtgcttgacgctgtgccgcgcactccttcacgggaacgttcctccagcgcctcctcccctgagatgaaagatggccttccaagaaccccaagcaggaggtcacggagcggctccagtcccggcttgagagacgggagcggaactccatcccggcattccctgtctggcagcagtcccgggatgaaggatatccctaggacaccaagcagaggaagaagtgagtgtgatagcagtccagaacccaaagcactgccacaaacacccagaccaagatctaggtcgccttcttcccctgaattgaacaataaatgcctgacaccacaacgggaacgatcaggaagcgaaagctctgtcgaccagaaaaccgtggctcgcactcccttgggtcagcgctccagatcggggagcagccaggagctagacgtgaaacccagtgcctctccccaagagcggagcgagagtgactccagccctgacagtaaggcgaaaacccgaactcccctccggcaacggagcaggtctgggagttcccctgaagtggactcaaagagtcgcttaagtcctcgtcgaagcaggagcggctccagtcccgaggttaaggacaagccgcgggcggcgccacgtgctcaatcaggatccgacagttcgcccgagccaaaagcacctgcccctagagccttgccccgtagatctcgtagcggatctagcagcaaggggaggggcccctccccggagggaagctcgagcaccgagtcgagtcccgaacaccctccaaaatctagaactgcccgccgggggtcccgcagctctccggaaccaaagactaaatctaggaccccccctaggcggaggagcagcaggagcagccccgagctgactcggaaggcaaggctgtctaggcggagccgttctgcctcttcctctcccgagacccgaagtaggacgccccctcggcataggcggagtcccagtgtgtcctctcctgaaccggccgagaaatcacgctcttcccgcagaagacgtagcgccagttccccccgtacgaaaaccacttcgcgaagggggcggtctcccagtcccaaacctcgaggactgcagaggtcacgatctaggtcccggcgggagaagactagaaccactcggagacgtgatagaagtggcagtagtcaaagcacatcgcgccggcgccagcgcagcaggtcccggtccagagttactcgtcgtcgcaggggtggctccggatatcacagtcggtcccctgcacgccaagagtcctccagaacctcctcccggcggagaagaggccgatcccggacccctccaaccagcagaaagagaagcaggagccggacctcacccgccccatggaagaggtctagaagcagagcctcccccgcaactcaccgcagatcccggtccagaactcctctaatttcccggaggcggtcccgttctaggaccagtcctgttagccggcggcgctctcgcagcagaaccagtgtaacccgccgtcggagcagatcaagggcatcaccagtctcccggcgaagatctcgatctcgcacccccccggtaacccgccgtcgttcaagatccaggacgcccaccacaaggcgccgctctagaagtagaactccaccggttacccgacgccgcagcagaagtcggacaccacccgtgactaggcgcagatcacgctctcgaacctcccctattacacgacgccggtcgcggagcagaacatctcccgtaacacgccggcgtagtcgatctcgaacttcacccgttacacgcaggagatcacgatcacgcacttcccccgtgaccagacgcaggagtcgttcacgtacccctcctgcccaggatcaaccacggtctcctgttcctagtgccttttctgaccaatctcggtgtctgatcgcccagaccacaccggtcgcggggtcccaatctttgtcgagcggtgccgttgccacaaccaccagctccgctggagatcacaatggcatgctgagtgtccccgccccaggggtaccgcactctgacgtgggcgaaccacccgcatccacaggagctcagcagccatctgcactggccgccctccaacctgcgaaggaaaggcgctctagttcgtcatcttcatccagctcctcttcatccagtagttcctcgtcttcctccagctcatcatctagttcaggctctagcagcagcgactcggaggggtccagtctgcccgtgcagcctgaagttgcactgaagcgtgtgccctccccgactcccgcccccaaggaagctgtgcgagagggacgaccccctgagcccacacctgccaagcgaaaacggaggagttcgtccagcagcagctcttcaagttcatcctcatcctcttcttcttcgtcatcttcttcatcaagcagctcctcatcctcttcctccagttcctcatcatcatcatcttcttcctctagcagccctagtccagcaaagcctggacctcaagccttacctaaacctgccagccccaagaagcccccccctggggagaggagatcccgcagtcctaggaaaccaatcgactctctgcgcgacagtcgctccctgagctacagccctgtcgagagaagaagacctagcccccagccctctcctcgggaccagcagtctagcagctccgagcgtggatcccgacgcggtcaaagaggtgactcaaggtctccgtctcataagagacggcgtgagacaccttctccgagacccatgcgacatcgctctagcagatcaccatag

SEQ ID NO: 190686 - DNA, 6036 bp, Artificial Sequence
  derived and/or modified sequence
atgaagaagagccggatcagcagccggcggagccggagcctgagcagcccacgctctaaggcaaagtctagactgagtttgcggcgttccctctcagggtccagcccatgccccaaacaaaagtcccaaactcctcctaggagaagtcgcagcgggtcctctcaaccaaaggcaaagtcgaggaccccgccacgcagaagccgcagctcttcaagccccccgccaaagcaaaaatccaaaactccatcccgacagagccactcatcttcaagtccacatcccaaagtcaagtctggtacaccgcctaggcagggctcaattacctctccacaggccaatgagcagtccgttacgccacagcgccggtcctgctttgaaagctcccccgatcccgagctgaagagcagaaccccctctcgtcacagttgttcaggctcttcgcccccaagagtgaaatcttctacaccgccgcgacagagtcctagccggtcctcttctccccaacctaaagtcaaagcgatcatctccccacgacagcggtctcacagcgggtcgagcagcccgtcccctagtcgggtcactagtcgcaccacacctaggcggagcaggagcgtgagcccgtgttcaaatgtcgagagcaggctgctccccagatactctcactccgggtcttcaagccctgacacgaaagtgaaaccagaaacaccccctcggcagtcacacagcggaagtatatcaccctatcccaaggttaaggcgcagaccccaccaggcccctccctctccggctccaagtcaccatgcccgcaagagaagtcaaaggactcactcgtgcagtcttgtccgggctctctgagtctgtgtgcaggggtcaaatcttctaccccaccaggagagagctattttggtgtgagctcactgcaactgaaaggccagagccagacgtcaccagatcatcggagcgacaccagttcacccgaagttcggcagtcccactccgagagccctagcctgcagagcaagtcacagacctcacctaagggtggccggagtcgatcatcctctcctgtcaccgaattggcctcgaggagccccataaggcaggatcggggcgagttctccgcttccccaatgctgaaatcggggatgtctcccgagcagagcaggttccaaagtgacagctcatcgtatcctacggtggattcaaacagcctactggggcaatcccggttagaaaccgccgagtccaaggagaagatggctttgcccccacaagaggatgccacagcaagcccgcccaggcagaaggataagttctctccatttcccgtgcaagacagaccggagtcatcccttgtgtttaaagacacactgcgcaccccaccgcgagaaagatccggtgccggtagctcacccgaaactaaggaacagaattccgcgttacccactagctcccaggacgaggaactcatggaagtggtcgaaaaatcagaggaaccagccggacaaatcctttctcatctgtcctcagagctgaaggaaatgtcaacaagtaacttcgaaagctcgcccgaagtggaggaacggccagccgtatctttaacactcgaccagtcccaaagtcaggcctcccttgaagctgtggaagttccttccatggcatcatcgtggggcgggccacacttctctccagagcacaaagaattatcgaactctccgctaagggaaaattcctttgggtcccctctcgagtttcgtaattcagggcccctgggaacagaaatgaacacgggcttctcctctgaggtcaaggaggacctaaacggcccatttctgaaccagctggagacagacccctctctagatatgaaggagcagtctacaagatcgtctggacacagcagcagtgagctcagccccgatgccgttgaaaaagctggcatgtctagtaatcaaagcatctcgagcccagtccttgacgcggtcccccgcacaccaagtagggaacgctcaagtagcgcctcatcccctgaaatgaaagatggccttcccaggacgccctctcgccggagccgctcaggcagctcccccgggctcagggatggcagtggaaccccctctcgccattctctgagtggatcttcccctggcatgaaggacatcccccgcacaccatccagaggcagatcagaatgcgatagctcccccgaacccaaggctctacctcagactcccaggccccggtccaggtccccctcatcgcctgaactcaacaataagtgtcttaccccccaaagggaacggtccggctctgagagttctgttgaccaaaagaccgtggcacgcactcccctcggacagagatctcgctccggcagtagccaggagttagacgttaaaccatccgctagcccccaggagcgatcggaaagtgactcatcacccgactccaaggcaaagactagaactcccttaaggcaacgcagcaggtctggtagtagccccgaggtggattctaaaagcagactgtcgcctagacggagccgctcggggagttcccccgaggttaaggataaacctcgagcagctccccgcgcccaatctggcagcgactcaagtccagagccaaaagctcctgctcctagagcactcccacggcgatcaaggtctgggtccagctcaaaggggcgtggtccgagtcccgaaggctcatcgtcaaccgaatccagtcccgagcatcctcccaaaagccggacggctagacgggggtcccggagtagtcctgagccaaaaaccaagtcaagaactccgccgcgtcggcgctctagccggtcctccccagaactgactcgcaaggcacggctgtcaaggcgctcacgttctgcctcctcctcgcccgaaaccaggtccagaacgccccctcgccataggcgaagtccttcagtgtcctcccctgagcccgctgaaaaatcaaggtccagccgtagacgtcgatccgcctcatctcctaggacaaaaacaacaagcagacgaggccggagcccatctccaaaacctcgcgggctgcagcgatcaagatccaggagccgccgcgaaaagacaaggactaccaggagaagagatcgttctgggagctctcagtcaacttcacgcaggcgacagagatcccgttctagatctagagtcacaagaagaaggaggggaggatccggataccactcccgcagtcctgctaggcaggagagcagtaggacttcatccagacgccggcgtggcaggtctcgaaccccccctacctctaggaagcgaagtaggagtcgaacttcgcctgccccttggaaacgaagtcgaagccgcgctagcccagcaacgcaccgccgctccaggagtcggacccctctcatctccagacgccgttcacgtagtaggactagtcccgtttccaggcgccgttcaagatctcgtaccagtgtaactcggcgcaggagccgttcaagagccagccccgtgtcccgcagacgcagcagatcacggacccctcccgttactcggcgacgcagccgtagccgaacacctacaacccgccggcggagtagatctcgcacgccaccggtgacacgcagaagaagccggtcccgtacccctccagttacacgtagacgcagcaggtcgcggacaagccctataaccagacggcggtcccgtagtcgaacttccccagtgacgagacggcggtcacgtagccgaaccagccccgtgaccaggagacgatcccgctctagaacctcgcccgtcacacggagacgcagcaggtctaggacaccacccgctatacgaaggaggtcacggtcgcggacacccctgctgccgcgtaagcggtcccgatcaagatctcctcttgctatccggcgtagaagtcgctccaggacaccccgaaccgccaggggaaagcggtcacttactaggtctcccccggctatacggcggcggagtgcctccgggtcttcctctgatcgaagtcgttctgcgactccgcccgcgaccagaaatcacagtgggagcagaacccctcccgtagctctgaattcaagcaggatgtcttgctttagtaggcctagtatgtccccaacgccactggataggtgcaggagtcccggaatgttggagcctctgggctccagtagaactcctatgagtgtgcttcagcaggcaggggggagcatgatggacggtcctggcccgagaatccccgaccaccagcggacctctgtgccagagaaccacgcacagtctagaatcgctctggccctcactgcaatctctctgggcacagcacgtccacctccaagcatgtctgccgctggtctcgccgcacggatgagtcaggtcccggcgcccgtgccgctgatgagtctgcgcactgcccctgcagccaatctggcatctcggatccccgctgctagcgctgccgccatgaacctagcctcagcccgaactcctgccattccaacggccgtgaatctggccgacagcaggaccccagcggcagcggccgctatgaacctggctagtccaagaaccgctgttgccccttcagccgtcaatctcgctgatccgcgcaccccaacagccccagctgtaaatctggccggagctcggacccctgccgccctggcagccctgtccttaacgggaagtgggacgccaccaaccgccgccaactatccaagctcaagtcgaaccccgcaagcccccgctagtgccaacctggtgggcccaaggtccgctcacgccactgccccagtgaatatcgccgggagtcgaactgcagctgctctggccccagcgtctctgacttccgccagaatggcacccgcgttatcgggagcaaacctgacaagtccaagggtgcctctcagcgcatatgagcgggtgagtggccgtacgagccccccactactcgaccgagccagaagccggacaccgccctccgcccccagccaatcaaggatgacgtccgagcgggctccgagccccagctccaggatgggccaagctccctctcagagtcttctgcctccggcgcaggatcagccccgatcccccgtgccaagcgccttttccgaccagtctagatgtctgatcgctcaaaccactcctgtcgctgggtcacagagcttgagctcaggagctgttgccacaaccacctcgtctgccggtgaccacaatgggatgcttagcgtacccgccccaggcgtgccgcacagtgacgtcggtgagcccccggctagcacaggcgcccaacaacctagcgcactcgccgcattgcagccagccaaagagcggcggtcctccagcagcagcagctcaagcagttcctcttcatcctcatccagcagcagtagttcatcatcatcatcctccggctcttcttcaagcgattccgagggcagttcgctgcccgtgcagcctgaggtggccctgaaaagggttccgagccctactccagctccgaaggaggctgtccgggaggggcggccacccgaacccacccctgccaaaaggaaacgtaggtcaagttcgtcgtcctcgtccagctcaagcagctcaagttcaagttcatcttcctctagcagttcttctagcagctctagcagctcatctagcagctcatcatccagcagctcgagttcttcaagcccgtccccagctaagcctggaccacaggctctgccaaagccggcttcacctaagaaaccccccccaggagagcgcagtttgctgcccgtctctccttcaccgcgacattctttaccccatgtggctagagggacatttctgaaaaggacctcagggtatttccctccccttcataagtctttcggtactccttgcgggctacaggataaggcccctccactccgcgaatggagggtgcgtctctttaccaacggaccatgtcctccctgtgtactgctgttaccagcccctacacacgcactttgcagctctcatactcaaagattagctgtgtag

SEQ ID NO: 190687 - DNA, 8258 bp, Artificial Sequence
  derived and/or modified sequence
atgtacaacggcatcgggctaccaaccccacgcggttcaggaactaatggctacgtacagaggaacctctctctcgtgcgcggaaggagaggggagcgccctgactataagggagaggaggagctgaggcgcctggaggcagccctggttaaacggcctaatccggacatattggatcatgaaagaaagcgacgtgtcgagctgcgttgtttggagctcgaagagatgatggaggagcaaggttatgaagagcaacagatacaggagaaagttgctactttcagactgatgctgttggaaaaagacgtcaacccaggaggaaaggaggagacccccggacagcgtccagcagtgactgagacacatcagctagcagagctgaacgaaaagaaaaatgagcgattgcgagccgcttttggaattagtgattcctatgtggatggcagttcatttgacccgcagcgcagggccagagaagcaaagcagccggcacccgagccccctaaaccctattctttagtgcgtgaaagcagcagcagcaggagccccactcctaagcagaagaagaaaaagaaaaagaaagaccgcggaaggagaagcgagagtagctcacctagaagagagaggaagaagagctctaagaaaaaaaagcatagatctgagtctgagtccaagaagaggaaacaccgcagccctactcccaagtctaagcgcaagagcaaggataagaaaaggaagagatccaggtctaccactccagcacccaagtcccgccgagcacaccgcagcactagtgcagacagcgcctcttcctcggatacctcacggtcaaggtcccgcagtgctgcggctaagacccacacaacggccctggcaggacgaagccccagccctgctagcggcagacggggagaaggcgatgcaccattctcggagcccggaaccacatctacccagcgtccgtcctccccggaaactgccactaaacaaccgtccagcccatacgaggataaggataaggataagaaagagaagagcgccaccagacctagcccctcccctgagagaagcagtactggccctgaacccccagcaccaacccctctgctggctgagcgccacggcggaagtcctcagcctctggctaccactccactatcgcaggagcccgtgaatcccccttccgaggcttcaccgactagagaccgctctcctccaaagtctccagagaaattgcctcaatcctcgtcctctgagagctcacctccgtctccccagcctactaaagtctccagacatgcttctagcagtccagaatcacccaagccagctcccgcaccaggatcacaccgcgagatttcttcctcgcccacgtcgaaaaaccggtcccatggcagggccaagagagacaagagtcactcccatactccatccagacgcatgggccgatctaggtctcctgcgactgcaaagcgcggacggagccggtccagaacccccactaagagggggcatagtaggtcccggagtccacaatggcgtaggtcaagatcagcacagcggtggggccgatcaagatctccacagcggaggggtagatcacgcagcccacagcgccctggttggtcccgcagcaggaacactcaacggaggggacggtcacggtctgccaggagggggagatcccactcccggagccctgccacccgcggacgcagtagaagtcggacacccgcacggcgtggaagatcaagatcaagaactccagcccgacgccgaagccggtctaggacccccactcgaagaaggtcacgctcacgcactcccgcacgcagagggcgaagcaggagtagaactcctgctcgcagacgcagccgcacaagatctcccgttagaagacgctccaggtctcgaagtcccgctagacggtcaggcaggtccaggtctcgaacacccgcacgcagggggagatcaaggtcccgcactcctgctcggaggggtagatctcgcagtcgcacccccgcacgtaggtctggcagatcccgcagccgcacccccgcaaggcggggaaggagcagaagtcggactccccgacgaggcagaagcaggtcaaggagccttgtgcggagagggagaagccacagccggaccccacaaaggcggggacgtagcggaagctccagcgaaagaaagaacaaaagcagaacgagccagcggcgttcacggtctaacagttctcccgagatgaagaaaagccgcatttccagccggaggagtcgtagcctgtcgagcccgagatctaaggctaaatcgcgcctgtcactgaggcggagtttgtccgggagcagcccatgccccaagcagaagtcgcaaacccctccacgtcgcagcaggagtggctctagccagcccaaagccaagtcccgcactccccctagacggagtcggtcgtcctcctcgccgccacctaagcagaagtctaagaccccctcaaggcagtcacacagctcaagcagcccacaccctaaagtaaaatccgggaccccgccacggcagggcagtattacgtcaccccaggccaatgaacaatctgtaactcctcaacgacggtcctgttttgagtcctcacccgaccctgagctgaaatccaggaccccaagtaggcactcatgctctggttcttcgccccctagagtcaaatcttctaccccacctagacagagtccaagcagatcttcatcccctcaacctaaagtgaaagcaataataagtcccagacagcgaagtcacagtggtagctccagtccgagtccaagcagggttacttcaagaacaacacccaggcggagccgaagtgtcagtccgtgctccaatgttgagagccgactgctgcccaggtactctcactcgggctcatctagcccagacacaaaggttaagcccgagactccacctcgacagtcacacagcggctctatatctccgtaccctaaggtgaaggcccagacaccccctggcccttcacttagcggttctaaaagcccatgtccccaggagaagagcaaagacagcttggtccaatcgtgccccggatctctgtctctatgcgctggagtgaaatccagcactccgccaggagaatcgtactttggagtgagctcgctccaactgaaaggccagtctcagactagcccagaccatcggagcgatacatcgagccctgaagttaggcagtctcacagtgaatcaccgtctctgcaaagtaagtcccagacgagccccaaaggaggccgatctagaagttcttccccagttacagaacttgcgtcacggagcccaattaggcaagaccgcggtgagttcagcgcctcacctatgctgaaatcaggaatgtcacccgagcagtcacgctttcagagcgacagtagttcctaccctaccgtagattctaacagtctcttaggccagagcaggctggagaccgctgagtcaaaagaaaaaatggctctgcctccccaagaggacgccaccgcaagcccccctcggcagaaggacaagtttagtccctttcccgttcaggatcgcccagaatcctctctggtgtttaaagatacactccggaccccacccagggagcggtctggcgctgggtcgtcacccgagaccaaggagcagaacagcgccttacccacttcaagccaggatgaggaattgatggaggtggtggagaaatcggaagaaccagccggacaaatcctgtcccacctatcaagtgaactgaaagagatgagtaccagtaattttgagagctccccggaagtagaagagagacccgctgtgtctctcactttggatcagagccaatcccaggcaagcctggaggccgtcgaggtgcccagcatggccagctcttggggcggaccacatttcagtcccgagcacaaagaactgtccaactctccgcttagggagaactccttcggcagccccctcgaatttcgcaactctggcccattgggaacggagatgaatacagggttctcctccgaagttaaagaggatctcaacggaccctttctgaaccagctggagacagatccatcactggatatgaaggaacagtctaccagatcctctgggcactctagttcggagttgtcccccgatgcggttgaaaaagctggcatgtcttctaaccagtcaattagtagtcctgttctggatgctgttccccgaactccttcgcgagaaagaagttctagcgctagcagtcctgagatgaaagacggcctgcctagaacaccctctagacgttcgcggagcggctcaagcccagggttgcgcgacgggagtggcacaccaagccggcacagccttagcggatccagccctggaatgaaagatattcctagaaccccaagtaggggacggtcagagtgtgattcttctcccgaacctaaggctcttccccagacaccacgcccaaggagccggagcccatcttctccagagttaaacaataagtgtctgactcctcaaagggagcgatctggtagcgagtccagcgtggaccaaaagactgtagcccgaaccccattgggacagagaagtagatcagggtcatctcaggagttggatgtgaaaccgtcggcatccccacaggaacgctctgagtccgactcctccccggactcaaaagccaagacccggacccccctgaggcagcggagccgtagcgggagtagcccagaagtcgatagtaagtcacgtctgagtccgcgaaggtctagaagcgggagctctccagaagttaaagataagcccagagctgcacctagagcacaaagcggaagcgactcttcccccgagcctaaagctccggcaccccgtgccttgcccaggcgttctagaagcggcagtagctctaagggaaggggacccagtccggaggggtcttcctccactgaatcgtcgccggaacaccctcctaagtcacgcacagccagacgcggatcgaggagctccccagagccaaaaaccaagagccggactccaccgaggcggaggagttctagatcttctcccgagttgacgaggaaagcccgattatcgcgtcgctccaggagtgcctcatccagtcccgagacaagaagcaggaccccgccacgtcaccgacgttcgccttcagtgagcagccccgagccagccgaaaaatcaaggagctcacggaggaggaggtctgcatcctccccacgtaccaaaaccacctccagaagggggagaagtccaagccctaagcctagaggcttacaaagatctagaagccgatcaaggagggagaagaccaggacaaccagacggagggataggtcggggagcagccagtctacatctcggagacgtcagcggtccagaagtcgctccagggtcacccgcagaagacgaggcggaagtgggtaccactcaaggtctccagctagacaggagagctcccggacttcaagccggaggcgacggggtcggtctcgaacccccccaaccagtcgtaagcggtccaggtcaagaacatcacccgctccgtggaaacggtcaagatccagggcgtccccagcaacccatcggaggagcagatcccgcacaccattgatctccaggcggaggtcccgcagcaggactagtcccgtcagcaggcggcgtagccgtagcaggaccagtgtgactaggcgcaggagcagatctagagctagtcccgtgtcccgcagacggtctaggagcaggacgcctcccgttacaagaagaaggagccggtctagaacccctaccacccgaaggcgatctaggagcaggaccccccctgtgacgcgcagaaggtccagaagcaggacaccaccggtcaccagaagaaggtcacgatcccggacatctcccattacacgaagaaggtctcgtagtcggactagccctgttacacggagacgatctcgaagtcggaccagccctgtgaccagacgccgtagtcgttccaggacgtcaccggttactaggcgccgatcacgaagtcgcacaccacctgccatcagacggcgatccagaagccggaccccacttctgcctcgaaagcgatctcgcagcagaagcccactggctatcagacgccgatctagaagcaggacaccgcgaacagccaggggaaagaggtccctgactcgctccccccctgcaattagaaggaggagcgcctcaggatccagctccgatagatccagatctgctacacctccagccacgcgtaaccactccggctcgcgtacacctcccgttgccttgaattctagccggatgtcttgtttcagccggccttctatgtcaccaacacctcttgatcgatgtcgcagccccggtatgctagagccactgggatcctccagaacaccaatgtctgtgctgcagcaggccggtggttcaatgatggacggcccaggaccccgaattcctgaccatcaacggacctccgttcccgagaatcacgctcagtccaggattgcgttagccttgacagccatcagtcttggaacagcaaggccccctccttcaatgtctgccgctggccttgcagccaggatgagccaagtaccggctcctgttccactgatgtcactcagaacagcacccgcagccaatttagcaagcagaattcctgcagcctccgccgctgctatgaatttggcttccgccaggacgcctgccatacctactgctgtcaatctggccgatagccgaaccccagccgctgccgctgcaatgaatttggctagtcctcgcacagcagtggcgccttcagccgtgaacctggcagaccctaggactccgacagcacctgcggtcaatctggcaggtgccagaaccccagcagccctcgccgcacttagtcttaccggaagcggcacaccccctacagccgctaattatccttcctcaagccggacaccacaggcccctgctagtgcgaaccttgtgggacctaggtcagcccatgctaccgcccctgtgaacattgctggctctaggaccgccgctgctcttgcccctgcttccctgaccagcgctcgcatggcgccagcacttagcggtgcgaatttgacatcccccagggttcccctgagcgcctacgaacgcgtttcaggccgtacgagccctcctctattggaccgtgccagatcaaggactcctccgtcagccccatctcagagcaggatgacaagcgaacgcgcaccttctccatcatcccgcatgggtcaggctccgtcccagtcactgctgccccctgcacaggatcaacccaggtcccccgtcccctctgcttttagcgaccagtcgcggtgcctgatagcacagactacacccgtggcaggatctcagagcctcagcagcggcgctgtggctactaccacatcgtccgcaggtgaccataacggcatgctgtctgtgccagcacccggtgtcccccacagcgatgtcggggaaccacctgctagcacaggtgcccagcagccctctgcccttgcagccctccagcccgctaaggaacgtaggagttcatcttcttcttcaagctcttcctccagctcctccagctcttcctcctctagcagttcttcttcatccagtgggagtagtagctccgacagcgaaggtagctctttgcccgtgcaacctgaggtagcgctaaaacgtgtcccttctccaactcccgctccaaaggaggcagttcgagaaggtaggccaccagagcccaccccagcgaaaagaaagcgcaggtccagctcaagctcttcgtcatccagctcaagttcttcatcatcctcaagctctagctcgtcaagctcctcaagtagctcttctagttcatcatccagttcctcctctagcagcagctctagctctccctctcccgcaaagcctgggccacaggcactacctaagcccgcttctcccaaaaaacctccgccaggtgaacgccgatcccgaagccctagaaagcctatcgactctctgagggactctagaagcttgtcctatagccccgtggaaagacgacgtcctagtccacagccatctccccgagatcagcagtcctcctcaagcgaacgaggttccaggcgagggcaacgcggagactctcggagtccttcacacaagcggagacgagaaacaccttcccccaggccaatgaggcataggtcttctcggagcccata

SEQ ID NO: 190688 - DNA, 7004 bp, Artificial Sequence
  derived and/or modified sequence
atgtataacggcataggcctaccgaccccccgaggtagcggtaccaatggctacgtacaacggaatctttctttggtcagaggtcggaggggggagcgcccagattataaaggggaggaagaacttaggcgattggaagcggcactagtgaagcgacccaaccctgatatactggatcatgaacggaagcggagagtagagctgagatgccttgaattagaggaaatgatggaggagcagggctatgaggagcagcaaatacaagaaaaggtcgcaaccttccgtctgatgctgctggagaaagacgtcaatccaggcggaaaagaggagacacctggccagcgccctgctgtgactgagacacaccaactcgccgaattgaacgagaagaagaacgagcgactacgagctgcttttggcatcagcgactcttacgtggacggctcttcatttgaccctcagcgcagggcccgtgaggccaagcagcccgcaccagagccccctaagccttattcactagtccgcgagtcttcctcttcacgatcacctacgccaaagcaaaagaaaaaaaagaagaaaaaggaccgcggtagaagaagcgagtcttccagcccgagacgggagcgaaaaaagagcagtaaaaaaaagaagcaccggtctgagagtgagtccaaaaagagaaaacaccggagtcctactccgaagtctaaaaggaaaagcaaagacaagaagcgtaaacgatccaggtctactacccccgctcctaagagtcgtagagcgcacagaagtacctctgccgactctgcgtcgtcctcagacacatctcggtcaaggtcaagaagcgctgccgctaagacacacactaccgccctcgccggacgctcacccagtcctgcgtcagggcgacgcggagaaggggacgcgccttttagtgagccgggaactacaagcacacagcgcccttccagtccagagacggctacaaagcagcccagtagcccatatgaagacaaggacaaggacaagaaagaaaaaagtgccaccaggccatcgcctagccccgaacgcagttctaccggacccgaacctcccgcacccacccccctgcttgccgaaaggcatggcggatccccccaacctctagccactacaccgctaagccaggagcctgttaatccaccttccgaagcttcccccacaagagaccggtcccctcctaagagtccagaaaagcttcctcaatcctcttccagtgagagctctcctccttccccccagcccacgaaggtgagcagacacgccagctctagccctgagtctccgaagcccgcacctgccccaggttctcatcgcgaaatttcaagttcgcccacctctaagaaccggagccatggcagagctaaacgcgacaagtcgcacagtcatacccctagcaggcgcatgggtcgcagtagaagcccagctactgctaagcggggtcggagcaggagcaggacacccacaaaacggggtcatagtcgctctcgtagtccgcaatggaggaggagcagaagtgctcagaggtgggggcgatcccgcagcccccagaggagagggaggagccggtctccccagagaccagggtggagccggtccaggaacacacaaagaagggggaggtccaggtcagccagacgcggtaggtcacatagtcgtagcccagccacgaggggcagatctaggagccggacgcccgctcgacggggaagatcaaggtccagaacccccgctcggaggcgttcgaggtctagaacccctactagacgtcgtagtcgcagccggacgccagccagacggggtcgctcaagaagtcggacccccgcacgccgaagatcacggacaagatctcctgttcgaagaagatctcggtctcggtcgcctgcccgtagatctgggaggagccgctcccggaccccggctcggcgtggcaggtcccgtagccgcactccagccaggaggggcaggagtagatccaggactcctgccaggcgttctgggagaagccggagtagaacacctgcccgacgtgggaggtcccgaagcaggacccccaggagaggcagaagccgcagcagatcgcttgtgaggaggggccgtagccactctcggaccccccaaagaagggggaggtctggatctagtagcgagcggaagaataagtcccgcacctcgcaacggagaagccggtcaaactcctctcctgaaatgaagaaaagtcgcatcagcagtaggcgcagccgcagtttgagttcccctcgcagtaaagcgaaatcccgcctctccctgcggaggagtctcagcggatctagcccatgccctaaacagaaaagtcagacgcctccccgacgctcccggagcgggtcatcacagccaaaggctaagtccagaacccctcctcgcagaagccgaagctcgagctcaccaccacctaaacagaagagtaaaactccatcaaggcagtcccattcatcatcatccccacatcctaaagtgaagagcggaacccctccgcgacagggatcaatcacttctccacaggcaaacgagcagagtgtcacgccccagaggaggtcatgctttgagagctcacccgaccctgagcttaaatccagaactcctagcaggcacagctgctcaggctcatctcctcccagggtgaaatcttcaaccccgcctaggcaatctccttccaggagcagttccccgcaaccaaaggtgaaagctatcatctcccccagacagaggtcccacagcggctcatcgtcaccatcgccatccagagtcactagtcggacgactccccgtcgtagccgatcagtctcaccctgcagcaacgtggagagtagactgctgccacggtactcacatagtggcagcagctctccagacacaaaggtgaaaccagagactcctcctagacagagtcactcggggtctataagcccatatcctaaagttaaagcccaaaccccaccgggaccatcactcagcggttctaagagcccgtgcccccaagaaaagagtaaggatagtcttgtccagtcatgtcctggatcactgtccctctgcgccggtgttaagagctctactcccccaggagaaagctattttggtgtgagctcactccagctcaagggtcagtcgcagacctcgcccgaccatcgaagcgatactagtagccccgaggtgaggcagagccacagtgaaagccccagcttacagagcaaatctcaaacttcccctaagggcggacggagtcggagttcaagtcctgtgacagagcttgccagtagaagtccgattaggcaggaccggggagaatttagcgctagccccatgcttaagagcggaatgagcccagagcagtcgaggtttcagtccgactcttcttcctacccgacggtagattccaattctctgttgggacagtcccggctcgagacagcagagagcaaggaaaaaatggctctaccccctcaagaagacgccaccgcctccccccctaggcaaaaagataagttctctccttttcctgtgcaggacagaccagaaagcagtctggtgttcaaagataccttaaggacacccccaagagagagatcaggcgctggaagcagtcctgaaactaaggagcagaatagtgccctccctacctccagccaagatgaggaacttatggaagtcgttgaaaagtccgaagagccggctggacaaattctgagtcacttatcatctgaacttaaggagatgtctacgagcaattttgagagctctccagaggtggaagaaaggccagcagtttccctcaccttagaccagagccagtcgcaagcaagccttgaagccgtcgaagtgcctagtatggcgtcatcatggggcggaccacactttagcccagagcacaaggaactgtcaaattcaccgttacgggagaattcttttggctccccacttgagtttaggaactcgggacccttgggaacagagatgaatacggggttctcaagtgaggtaaaagaggatctcaatggccctttcctgaatcagctcgagaccgatccctctctagacatgaaagaacaatcaactcgctcttcaggacactcttcttcagaactctctcccgatgcggtcgaaaaagcgggtatgtctagtaatcagtccatcagtagtcctgtgcttgatgctgtcccccgaacacccagccgagagcgttcttcgtccgcctcaagtccagaaatgaaggatggacttcctaggaccccttcccgtcggtctaggtcaggctctagtcctggcctgagagacggtagcggaacaccatctaggcatagcctgagtgggtcttcacccggaatgaaggacattcctaggacacccagtagaggaagaagcgagtgcgactcctcccccgaacccaaagctctgccccagactccccgaccgcgatcaaggagtcccagctcccctgagctgaacaacaagtgtttgacccctcaacgcgaacgctccgggagtgagagttccgttgaccaaaagacagtagcccgaactccccttggtcagcgttcacggagcggatcgagccaggagctcgacgtaaagcccagcgcctcgccacaggagaggagcgagtcagactcttctcctgatagcaaggctaagacccggacacctctgagacaacgcagccgcagcggatccagcccggaagttgactccaaatcccggctgtccccgagacgatcgcgctctggtagctcaccagaagttaaagataagccaagagcagctcctagagcgcaatccggctcggacagtagtccagagcctaaggcaccagcacctcgggctctgcctcgcagatcaaggtccggctcttccagcaaaggcaggggaccgtccccggagggttcttcatcaactgagtccagccctgaacatccccctaaaagccgcactgcccgtaggggtagtcggagctcacctgaaccaaaaacaaaatctagaacgcccccaagaagacgttctagccgctcctcccctgagttaactcgcaaagcaaggcttagcagacgatctcgctccgcttcaagctcccccgagacaaggtctcggacccctcctcggcacagacgttcaccgtccgtgtcctctccagaacccgcagagaagtctagaagcagcaggcgtcgtaggagcgccagctcacccagaactaaaacaactagccgcagaggcaggtccccatctccaaagcccagagggttacagcgctctcgatctagaagtcggcgagagaagacgaggaccacaaggaggagagaccgcagcggatcctcacagagtacctcgcgtaggagacagcggtcccgctcaagatctcgtgtgaccagacgaagaaggggtggatctggataccattcaagatcccctgcccgacaggagtcgtcaaggacatccagcagacggagaagaggtagatctcgaacaccccctaccagtcgtaagcggtctcgttcaagaacatcccccgcaccctggaaacggagccgcagtcgggcttcccctgccacacatagaagatcccgatccaggactcccctaatcagccgcaggaggtccagatctaggacaagccctgttagtaggagacgatccaggtctaggacgtcggtaactcgaaggagatcacgcagccgcgcatcaccagtaagcagaaggcgcagcaggtcccgcacaccgcctgtgacgaggcgaagaagccgcagccgaacacctacaacgcgccgacgcagtcgcagtcgcaccccccctgtgacgcgccgacgctctcgctcccgcaccccccctgtgacacggaggaggtctcggagcagaacatcccctattacacgacgccgatctaggagccgcaccagtcccgtcactagaagaagatccaggtcaagaacgagcccggttaccaggcgacggagccgttctagaacaagcccagtcacaagaaggcgatccagatctcgaacccctcccgcacaggatcaacccagatctcccgtgcccagcgccttttccgaccagtcgcggtgtcttatcgcgcagacaactccagttgcgggatcgcaatcattgagttcaggagccgtggctaccaccacctcatctgctggtgaccacaatggtatgctatccgttcccgcaccaggagttccccactccgatgtaggagaacctcctgccagtactggagctcagcagccgagtgccctagctgccctacaaccagcaaaagaaagacggtcttcatcctcgagcagttcttctagctcttcctcatcttcctcttctagttcctcatcgagctccagtagctctggatcaagttcctctgactccgagggatccagtctccctgtgcagcctgaggtcgcattaaaaagagtgcctagccctacgcccgcacctaaggaggcagttagggaaggtagacctcccgagcctacaccggcaaagcgaaagcggaggtccagctcctccagcagcagctcttcgagctcttcaagtagtagcagctcctcatcctcaagttcgtcctcttctagctcctccagttctagctcttcgagttcatccagctcaagtagtagcagtccctcacccgcaaagcccggtccgcaggccttgccaaaacccgcttccccaaaaaaaccccctccaggggaacgtcgcagcaggtcgcctagaaagcctattgactctctgagggatagtcgctcacttagctatagtcccgtggagaggcgacggccatcaccccagcccagcccgcgagatcagcagtcgtctagtagcgaaagaggatccagacgcggacagaggggcgactcgcgcagccccagtcacaaaagaagaagggagactccctctcccagacctatgcgccaccgatccagtcggtcgcccta

SEQ ID NO: 190689 - DNA, 6035 bp, Artificial Sequence
  derived and/or modified sequence
atgaagaaatcacgcatttcatcccggaggagtcgctcgctgtcaagtcccagaagcaaggccaagagcagactcagtcttcgtaggtctctgagtggatctagcccgtgccctaagcagaagagccagactcccccaaggaggtccagatccggttcatcccagcccaaggcgaaatctagaacaccccctagaagaagccgctcttccagttcgccaccacccaaacaaaaatccaagacacccagccgacagtcacactcctcttccagcccacatccaaaggtgaagtccggcacacctcctcgacagggctccatcacgtctccacaggccaatgagcagtccgttaccccacagaggcgttcttgctttgagtctagcccagatcccgaactaaagtcccgcacccctagccgccattcttgcagcgggtcttcaccacccagggtaaagagcagcaccccaccacgtcaaagtccttcacggtcttctagtccccagccaaaagtgaaggccattatcagccccagacagcgatcacatagcggcagttctagcccgagcccaagtagggtgaccagccggacgactccaaggcggtcccgatccgtttccccctgctcaaatgtggaaagccgccttctgccaaggtattcacattcgggtagtagcagcccagacactaaggtgaagccagagactcctcccagacagagccacagcggtagcatcagcccttaccccaaagtgaaagcccagacgccccctggaccgtctctttcaggcagtaagtctccctgcccccaagaaaagagcaaggacagcctggttcagagctgtccaggctctttatctctttgtgctggtgtaaagagcagtacccccccaggagaaagttatttcggagtttcatctttgcaacttaagggacagtcacagacttcacctgatcaccggagtgacacatccagtcccgaggtcagacaatcccatagcgagagcccttccttgcagtctaaatctcaaacttctcccaagggtggcagatctagaagctcaagtcctgttactgaactggcaagcaggagcccaatcaggcaagatagaggcgaattctctgcctctcccatgttaaagtccgggatgtcaccggagcaatctcgtttccagagcgacagtagcagctacccaactgtagatagcaattcactgttggggcagagcaggctcgagacagctgagtcaaaggaaaagatggcattacccccacaagaggatgccaccgcctccccaccccgacagaaggataaattctccccttttcctgtgcaggaccgccctgagtcatccctggtgtttaaagacacccttcggactcccccacgggagagaagcggggctggctcatcacccgaaacgaaggaacagaactccgccctcccaacctcaagccaagatgaggagttgatggaggtggtggagaagtctgaagagcctgccggacagatcctttctcacttgtctagcgagctaaaggaaatgtctacctccaatttcgagagctcccctgaagtggaggaacgcccagcggtcagtctcactctggaccagagccagtcccaggctagtttagaggccgtagaagtgccatcaatggcctctagttgggggggaccacatttctcccctgagcacaaggaattgtctaacagccctctgagggagaatagtttcgggtctccactggagttcagaaactctgggccattaggcacagaaatgaacaccggttttagctctgaggtgaaagaggacctaaatggacctttcctgaatcagctggaaacagatccctctctagacatgaaggagcaatccacccgaagctccgggcatagttcctcggagctttcccctgacgcagtggagaaagccggaatgagtagcaatcagtctatatcaagtcccgtactcgatgccgtaccaagaacaccttcaagggaacgatcaagctctgccagctcaccagagatgaaggacggtctgccaaggaccccttctcggcgatcccggagcgggagttcacctggactgcgggatgggtcagggacaccgagccgtcattccctgtcaggaagtagcccaggaatgaaagatatcccacggaccccatctcgagggagatccgagtgtgacagctccccagagccgaaagctctgccccaaacaccaagacccaggagtagatccccatcctcaccagagttgaacaacaaatgcttgaccccgcaacgtgaacgttctgggtcagagagttctgtggaccagaaaaccgttgcgcgaacgcctttaggccagcggagtaggagcgggagctcacaagaactggatgttaaaccctctgctagcccccaggaaagatcggagtccgactctagccccgactctaaggccaagacacgaacaccccttcgacagcggtcccgctctggaagctcaccagaagtggactccaagtccaggttaagcccacgacggtcccgctcagggagcagtcccgaggtgaaagacaagcctcgcgctgccccacgagcccaatctggcagtgatagttcaccggaacctaaagcccctgcgcctcgcgctctgccaaggcggagcaggtctgggtcctcctcaaaaggtagggggccttcaccagaggggagtagctccacagaaagttcccccgagcatcctccaaagagtcggaccgcccgtagggggagcagaagctcccccgagcctaagactaaatctagaacgcccccacgaagacgctccagcaggagctcccccgagctcaccaggaaagcgaggctttccaggagaagccgctccgcgtccagttcccccgaaaccaggtctaggactcccccacggcatcgacggtcgcccagcgtctcaagtcccgagcctgccgaaaagtccagatcctccaggcgccgaagatccgcatctagccctcgaaccaagaccacgagtcgtcggggtcgaagcccaagtccaaagccgagaggcctgcagagatctcggtcccggagccggagggagaaaacacggaccacacgacggcgagaccggtccgggtcaagccagtccacgagtaggcggaggcagaggagtaggtcccgttctagagttacaaggaggcgtcgaggaggcagtggctaccactcccgatctcccgctcggcaggagtcgtccaggacctcatcacgtcggagaagggggaggagccggactcctcctacaagtagaaagaggagcaggagccggacatcccccgcaccatggaaaagaagcaggtctagagcctccccagcgacacataggagatctcgatctcgcacgcccctgatttcccggcgacggtcccgcagccgcacatcccccgtttctcgacggaggtcgaggtctcggacaagcgttactcggcgaagaagtcgatctcgggctagcccagtgtccagacggaggtcaaggtccaggactcccccagttacaaggcgcagaagcagaagtcgcacccctaccacaaggagacgcagtcgcagccgaactcctcctgtcacccgcaggcggtcccggagccgcaccccgccagtcacccggaggagatcacggagccgaacgagtcccatcacccgacgcagaagcaggtcacgcacatctccagtcaccaggcggagaagccgatccagaacatctcccgttacacgacgccgttcccgatccagaacatccccagtcacaaggcgcagaagtcgttcccgcacacctcctgctatcagaagaaggtcaaggtcgcgcacgcctctgctgccccgaaaaaggtccagatcaagatcacctctggcgattcggcgtagaagtagatcgaggacacccaggactgcgagaggcaagcgctcactgaccagatcccctcccgcaatccgcagaaggagcgcgagcggctcaagctcagataggtcccgcagcgctactccgccagccacacggaaccactcaggttcccgaactccaccagtagcccttaactcttcgcgaatgtcatgcttctctcgaccatctatgtctccaacccccctggataggtgtcgaagtcctggcatgctggagcctctgggctcaagcaggactccaatgagtgtgctgcagcaggcaggaggttcgatgatggacggacccggaccacgtatccccgaccaccagcgcacatccgttcccgagaaccatgcccagtccaggattgccctcgctctcacagccatctccctgggcactgcaaggccacctccctccatgtccgccgctggcttagccgctagaatgtctcaggtgcccgcaccggttcctctcatgtctttgcgtacagcgccagccgcaaatctggcaagccgaatccccgcagccagcgccgctgcaatgaatctcgcttctgccagaacacccgctatcccaactgctgtcaatctcgcagatagccgtacccccgctgccgctgccgcaatgaacctggcctcacccagaacggcagtagcaccaagcgctgtgaacctagctgacccacggacaccaacggcccctgccgttaacttagccggagccaggactccagctgcactggccgcactctctctgactggatccggtactccacctacagccgctaattaccctagtagtagtagaaccccccaagcccctgcatctgctaatttagtcggtccgagatctgcccatgccacagccccagtcaacatcgctggctctagaacagccgcagccttagcccctgcaagtcttacctccgccaggatggctcccgcactgagcggagcaaaccttacatctccacgtgtacctctgtccgcctatgaaagggtgtcaggtaggacaagcccgccactgctagaccgggctcgctcacggacacccccatccgccccatctcaatcacgcatgacctccgaaagagcaccaagccctagctctagaatgggccaggcaccctcccaaagcctgcttccaccagcccaggatcagccacgttcccctgtgccctctgcttttagtgatcagagtcggtgtctgatcgctcaaactacccccgtggccggatcccagtcactctcttcaggggcagtggcaactaccacctcatctgctggcgaccataatgggatgttgtccgtccccgctcctggtgtcccacatagcgacgtgggggaacccccagccagtaccggcgcacagcaaccatccgccttggccgcactacaacccgctaaagagcgcagaagtagcagctcgagctctagttccagctcgagcagctcatcctcttcctccagttctagctcttctagcagtagcggcagcagcagttccgactcagaggggtcatccctgcctgtccaaccagaagtcgctctgaaacgggtgccatcccctacacccgcaccaaaggaggctgtgcgcgaaggacgacccccagagcctacacctgccaagcgcaaacggagaagtagcagtagctctagctctagttcgagctctagctcatcctcctcatcttcatctagtagttcatcctcctcaagctcatcttcttcctcttctagttcaagctccagctcctcaagcagttcgccgtcaccggctaaacctggaccgcaggccctgccaaaaccagcttcgcctaagaagcccccacctggggaaagaagcttacttcccgtatctcctagccccagacattctttaccccatgttgctcgtggaacatttctcaaacgcacttcaggttatttcccaccgcttcataagtccttcgggactccgtgcggcctacaagacaaggcaccaccactgagggagtggagggtgcggcttttcactaacgggccatgccccccttgtgtgctccttctgccagctccaacacacgccctgtgctcgagccacacccagaggctcgctgtcta

SEQ ID NO: 190690 - DNA, 9351 bp, Artificial Sequence
  derived and/or modified sequence
agaatgctctgcatcgacagcgggagacgagacgcgctcgggcgtcgctttgctgccgctaggccctgtgctcctccccgcagcggaaggcctacgaatacgcggtgtcttacgtcgcttcctccgttcttcgttgcactggccaacgggacgcttagtctttcggcaacggggtgaaaccttccttgtgcctgaaaaaacggtacttcgcggtgtggcttcggcgcctgcgcaaaaggccgcggggcgcactccagttcccggcaggccccgcgacgcgcgtttgcgtgctgacgcacgcagttagtcgtgctgacgtgcagcgcggcccaggcggggtgcgagtggcgcagttggagcccgttgcggcccctgaggaagcgaggaggcgtcggcgtcggctgaggcgggcggaccggcgaggcgaggcggcggccccaggcccgagggactcgggagctcgagcagcggcggcggcaagacctctccccctcggaggcggcgggcggaggcggcgggagcggtggtgccccccccgggcacggggccatgtacaacgggatcgggctgccgacgccccggggcagcggcaccaacggctacgtccagcgcaacctgtccctggtgcggggccgccggggtgagcggcctgactacaagggagaggaggaactgcggcgcctggaggctgccctggtgaagcggcctaatcctgacatcctggaccacgagcgcaagcggcgcgtcgagctgcgatgcctcgagctggaggagatgatggaagagcaggggtacgaggaacagcaaattcaggaaaaagtggcgacctttcgactcatgttgctggagaaggatgtgaaccctgggggcaaggaggagaccccagggcagaggccagcggtcacggagactcaccagttggcagaattaaatgagaagaagaatgaaagactccgtgctgcctttggcatcagtgattcttacgtagatggcagctcttttgatcctcagcgtcgtgcccgagaagctaaacaaccagctcctgagcctcccaaaccttacagccttgttcgggagtctagcagttctcgctcaccaaccccaaagcagaagaagaagaaaaagaagaaagatagaggacgcaggtcagagagcagctctcctcgacgggagagaaagaaaagctcaaagaagaagaagcacaggtcagaatctgagtccaagaaacgtaagcataggtctcccactccaaagagcaaacgtaaatctaaggacaaaaagcgaaagcggtctcgaagtacaacaccagcccccaagagccgccgggcccaccgttcaacttctgctgactctgcttcctcctccgatacttcccgcagtcggtctcgaagtgctgcagctaaaactcatacaactgccttggctgggcgaagtccttcccctgcttcagggcgacgcggggagggagatgcgcctttcagtgaaccaggtactaccagcacacaacggcctagtagcccggagactgctacgaaacagcctagcagcccttatgaagacaaagataaagacaagaaggagaaatctgcaactcgacctagcccctctccggaaaggagcagcacaggcccagaaccacctgctcccactccgctccttgctgagcgacatggcggctccccacaaccccttgcaaccacccccttaagccaggagccagtgaaccccccatctgaggcctctccaactcgggaccgttcaccacctaagtctcccgagaaacttccccagtcttcttcctcagagagcagcccaccatcccctcaacctaccaaagtttctcggcatgccagctcttccccagaaagtcctaaacctgctccagctccagggtcccaccgagagatttcttcttctcccacatctaagaatcgctcacatggccgagcaaaacgggataaatcacattctcataccccctcccgtaggatggggaggtcccgtagccctgccaccgctaagagagggcgatctcggtctcgaacccctaccaagagaggtcattctcgatcccgatctccccagtggcgtaggtccaggtctgcacagaggtggggaagatctagaagcccccagcgacgtggccgctctaggtctcctcagcgaccaggctggtctaggagcagaaatacccagagaagaggcaggtctaggtcagcaaggcgagggaggtcccactctagatccccagccactaggggtagatctcgttctagaacaccagcccgccggggcaggtcccgctctagaacacctgccaggcggagatcacgatccagaactcccaccaggcgtaggtctcggtctagaacaccagcccggaggggcaggtctcggtctagaacacctgctaggcgcagatctaggacccgatcaccagtacgacgcaggtctcgtagtagatcaccagccaggagaagtggcaggtcacgctctagaaccccagctagacgtggccgctcacgctccagaaccccagccagacgtggccgctcacgctctagaaccccagctagacgcagtggtcgctcacgctccagaacaccagccaggagagggaggtctcggtctaggacaccaagacgaggaagatcccgcagtagaagcttagttagacgtggaagatctcactctagaacacctcaaagaagaggcagatctggctcatcttcagagcggaaaaacaaatccagaacatctcaaagaagaagcaggtccaattcaagcccagaaatgaagaaatctcgcatttcttcaaggcggagcaggtctctctcttcaccacggtccaaagcaaaatctcgcttgtctttgaggcgcagcctttcagggtcttccccatgccctaaacaaaagtcacagacaccacccaggcgcagtcgctctggatcctcccaacctaaagctaaatctagaacgccacccagacgcagtcgctccagttcttctccgccacctaaacagaaatctaagacaccatcaagacaaagtcattccagttcatctcctcatcctaaagtgaaatctggaacaccaccgaggcaagggtccataacaagtccccaggccaatgagcaatctgtaacgccacagagacggagctgttttgaatcatcacctgaccctgagttgaaatctaggaccccttctagacatagctgctcagggtcctctcctcctagagtgaaatctagcacacctcccagacagagcccatctaggtcatcatctccacaacccaaagtgaaggcaataatatcaccaagacaaagaagccattctggctcctcttctccaagtcctagtagggtgacgtcgagaacaactccacggcgaagcagatcagtatctccctgctccaatgtggaatccagattgttgccaagatacagtcattctgggtcctcctcaccagataccaaagtgaaacctgaaacaccgccaagacaaagtcactcagggtctatttcaccataccccaaagtaaaggcccaaactccaccggggccaagtctttctggatcaaagtcaccatgtccccaagagaagtctaaagactcactagttcaaagttgccctggatccctctctctctgtgcaggagtaaaatctagcacaccaccaggcgagagctattttggtgtctcatctctgcaactgaaaggacaatctcaaacttcaccagaccacagatctgatacttcaagtccagaagtgagacagagtcattcagaatcaccatctctgcagagcaaatctcaaacatcacctaagggaggtcggtccaggtcttcatctccagtcactgagctggcatccagatctccaataagacaagatagaggtgagttctcagcgagtcctatgttgaaatctggaatgtctcctgagcagagcaggttccagtctgactcttcttcatatcctacagtggactcgaattctctcttggggcagagtagattggagactgctgaatcaaaagagaaaatggccttaccccctcaggaggatgctactgcatcacctcctagacagaaagacaaatttagtccctttccagtacaggataggcctgagtcttcactggtattcaaagacacacttagaaccccgccaagggaaagaagtggtgctgggtcatctccagaaacaaaagagcaaaatagtgcattgcctacgtcaagccaagatgaagagttaatggaggtggtagagaagtctgaagaacccgcaggccaaatcctgtctcatttgtcttcagaacttaaagaaatgtccacaagtaactttgaatcatctcctgaagtagaagaaaggcctgctgtgtctttgactcttgatcagagccagtcacaggcttctttggaagcagtagaagtcccttcaatggcctcatcttggggtgggccacatttttctccagaacataaagaactgtctaactccccactcagggagaacagctttggatcacctttagaatttagaaactcaggcccacttggtacagaaatgaatactggattttcttctgaggttaaagaagatttgaatggaccgtttcttaatcagctggaaacagatccatctctagacatgaaagaacaatcgacaagatcctctggacacagcagttctgagttatccccagatgcagtggaaaaggcagggatgtcttcaaatcagagcatctcttcacctgtgcttgatgctgtacccagaacaccctcgagagaaagaagtagttctgcatcttctcctgaaatgaaagatggtttacccagaactccatcaaggagaagcaggtctgggtcttctccaggacttagagatgggtctgggactccctcgaggcacagcctgtctgggtcctctcctggaatgaaagatatacctagaacgccatctagagggagaagcgaatgtgattcttccccagaaccgaaagctttgcctcagactcctaggccgaggagtcgttctccatcatccccagagctcaacaacaagtgtcttaccccccagagagaaagaagcgggtcagaatcatcagttgatcagaaaactgtggctcggactcccctggggcagagaagtcgttcgggatcctctcaagaacttgatgtgaaacccagtgcatcccctcaggaaagaagtgagtcagactcttctccagattctaaagccaagacaagaaccccacttcggcagaggagtcggtctggatcatctccagaggttgacagcaaatctcgactatcccctcggcgcagtaggtctggttcctcccctgaagtgaaagataagccaagagcagcacccagggcacagagtggttctgattcctctcctgaacctaaagctccagcccctcgggcccttcccagacgaagcagatcaggttcatcaagcaaaggcagaggcccttctcctgaaggaagcagcagtaccgagtcctctcctgaacatccgcccaaatccagaactgctcgcagaggttccaggtcatcaccagagcccaagaccaagtctcgtacaccacctcgacgtcgcagctctcgatcatctccggagctaacaaggaaggccagactgtcccgtagaagccgctctgcctcatcctcaccagaaactcgctctagaactcccccaaggcaccggagaagtccctcagtgtcttccccggagccagccgaaaaatcgaggtcttcacgccgacggcgctcagcttcatctccacgcactaagacaacctcaaggagaggccgctctccttcgccaaagcctcgtggactccagaggtcccgttcccgctcaaggagagagaaaacaagaacaacccgacgtcgagataggtctggatcttctcagtcaacctctcggcgaagacagcggagccggtcaaggtcgcgggttactcggcggcggaggggaggctctggttatcactcaaggtcacctgcccggcaggaaagttcccggacctcctctcgacgccgaagaggccgctctcggacacccccaaccagtcggaagcgttctcgctcacgcacatcaccagccccgtggaaacgctctagatctcgagcctctccagccactcaccggcgatccaggtccagaacccccctgataagccgacgtaggtccagatctcgaacttcaccagtcagccggagacggtcaaggtccaggacttcagtgactcgacgaagatcccggtcaagagcatccccagtgagcagaaggcgatccagatccagaacgccaccagtaacccgccgtcgttcaaggtctagaacgccaacaacacgccgccgctcccgttctagaactccaccagtgactcgcagaaggtccagatccaggactccaccagtaaccaggaggcgatctcgaagcagaacttcgcctatcactcgcagaagatcaagatccagaacatctccggtcacccgaaggagatctcgatctcgcacatctccagtaactcgaagaaggtcccgctctcgaacctcaccagtgacacgccgccgctctaggtcccggacacctccagctattcggcgccgctctagatctcgaacgccactgttaccacgcaaacgttctcgaagtcgctcaccacttgctatccgccgccgctccagatcccgtactccacgaacagctcggggtaaacggtccttaacaagatctcctccagccatccgcaggcgttctgcatctggaagtagttctgatcgttcacgatctgctactcctccagcaacaagaaatcattctggttcacggacacctccagtagcactcaacagttccagaatgagctgcttcagtcgtcctagcatgtccccaacacctcttgatcgctgcagatcacctggaatgcttgaaccccttggcagctctagaacacccatgtctgtcctgcagcaagccggcggctccatgatggatggtccaggtccccgaatacctgaccaccagagaacatctgtgccagaaaatcatgctcagtccaggattgcacttgccctgacagctatcagtcttggcaccgctcggcctcctccgtccatgtctgctgctggccttgctgcaagaatgtcccaggttccagccccggtgcctctcatgagtctcagaaccgcaccagcagccaaccttgccagcaggattcctgcagcctctgcggcagccatgaacctagccagcgccaggacacctgccattccaacagcagtgaacctggctgactctcgaacgccagctgcagcagcggccatgaacttggccagccccagaacagcggtggcaccttcggctgtgaacctggctgaccctcgcactcccacagccccagctgtgaacctagcaggggccagaaccccagctgccttggcagctctgagtctcacaggctctggcacaccaccaactgctgcaaactatccctccagctccagaacaccacaggctccagcctctgcaaacctggtgggtcctcggtctgcacatgccacagctcctgtgaatattgccggctccagaaccgccgcagccttggcccccgcgagcctcaccagtgctaggatggctccagcattgtctggtgcaaacctcaccagccccagggtgcccctttctgcctacgagcgtgtcagtggcagaacctcaccaccgctccttgaccgagctaggtccagaacaccaccgtctgccccaagccaatctaggatgacctctgaacgggctccctccccttcctctagaatgggccaggctccttcacagtctcttctccctccagcacaggatcagccgaggtctcctgtgccttctgctttttcagaccaatcccgttgtttgattgcccagaccacccctgtagcagggtctcagtccctttcctctggggcagtggcaacgaccacgtcctctgctggtgatcacaatggcatgctctctgtccctgcccctggggtgccccactctgatgtgggggagccacctgcctctactggggcccagcagccttctgcattagccgccctgcagccagcaaaggagcggcggagttcctcctcgtcgtcgtcgtcctctagctcctcctcttcttcatcatcgtcgtcgtcgtcctcctcctcctctggctccagttctagtgactcagagggctctagccttcctgtgcaacctgaggtggcactgaagagggtccccagccccaccccagccccaaaggaggctgttcgagagggacgtcctccggagccaaccccagccaaacggaagaggcgctctagcagttccagttccagctcctcctcttcatcttcctcctcctcctcctcctcctcttcttcctcctcctcttcctcttcttcttcttcctcctcatcttcctcctcctcgtcgtcttcctccccttcccctgctaagcctggccctcaggccttgcccaaacctgcaagccccaagaagccaccccctggcgagcggaggtcccgcagcccccggaagccaatagactccctcagggactctcggtccctcagctactcgcctgtggagcgtcgccgtccctcgccccagccctcaccacgggaccagcagagcagcagcagtgagcggggttcccggagaggccagcgtggggacagccgctcccccagccacaagcgcaggagggagacacctagccctcggcccatgagacaccgctcctccaggtctccataaattgtctttgggggattccaccacacccaatgctctggagccacaaggagtgtcccttcttccccagcagagccgtgggagggtccttgtctgctctcctttgaaccttggcagcccttggatggagggctccctttccctccccttttttttttctttgttcctgtgaaatgttaatctccgtgagttcttcctggttcatgtgttctggggggtttggggtgggagggaatgcagatgggagttgggggaggggaggatacagttcaggataccccagcctggagtcagggccagggaggcatggccccacttgtatccagaagttcccaggggtgattgtgatggtggttgggactggaggttgtataaggtgttcttggaaggaaggggcaggagttggaattagttggtccctactgtcccccatgaggttgtgaacccctccccccaacttttcatgtttcttaaaggcattttggttttttaaaatctgtacagcaagagcaactttttctgtcaaataaaaatgagaaatgcagg

SEQ ID NO: 190691 - DNA, 8097 bp, Artificial Sequence
  derived and/or modified sequence
agaatgctctgcatcgacagcgggagacgagacgcgctcgggcgtcgctttgctgccgctaggccctgtgctcctccccgcagcggaaggcctacgaatacgcggtgtcttacgtcgcttcctccgttcttcgttgcactggccaacgggacgcttagtctttcggcaacggggtgaaaccttccttgtgcctgaaaaaacggtacttcgcggtgtggcttcggcgcctgcgcaaaaggccgcggggcgcactccagttcccggcaggccccgcgacgcgcgtttgcgtgctgacgcacgcagttagtcgtgctgacgtgcagcgcggcccaggcggggtgcgagtggcgcagttggagcccgttgcggcccctgaggaagcgaggaggcgtcggcgtcggctgaggcgggcggaccggcgaggcgaggcggcggccccaggcccgagggactcgggagctcgagcagcggcggcggcaagacctctccccctcggaggcggcgggcggaggcggcgggagcggtggtgccccccccgggcacggggccatgtacaacgggatcgggctgccgacgccccggggcagcggcaccaacggctacgtccagcgcaacctgtccctggtgcggggccgccggggtgagcggcctgactacaagggagaggaggaactgcggcgcctggaggctgccctggtgaagcggcctaatcctgacatcctggaccacgagcgcaagcggcgcgtcgagctgcgatgcctcgagctggaggagatgatggaagagcaggggtacgaggaacagcaaattcaggaaaaagtggcgacctttcgactcatgttgctggagaaggatgtgaaccctgggggcaaggaggagaccccagggcagaggccagcggtcacggagactcaccagttggcagaattaaatgagaagaagaatgaaagactccgtgctgcctttggcatcagtgattcttacgtagatggcagctcttttgatcctcagcgtcgtgcccgagaagctaaacaaccagctcctgagcctcccaaaccttacagccttgttcgggagtctagcagttctcgctcaccaaccccaaagcagaagaagaagaaaaagaagaaagatagaggacgcaggtcagagagcagctctcctcgacgggagagaaagaaaagctcaaagaagaagaagcacaggtcagaatctgagtccaagaaacgtaagcataggtctcccactccaaagagcaaacgtaaatctaaggacaaaaagcgaaagcggtctcgaagtacaacaccagcccccaagagccgccgggcccaccgttcaacttctgctgactctgcttcctcctccgatacttcccgcagtcggtctcgaagtgctgcagctaaaactcatacaactgccttggctgggcgaagtccttcccctgcttcagggcgacgcggggagggagatgcgcctttcagtgaaccaggtactaccagcacacaacggcctagtagcccggagactgctacgaaacagcctagcagcccttatgaagacaaagataaagacaagaaggagaaatctgcaactcgacctagcccctctccggaaaggagcagcacaggcccagaaccacctgctcccactccgctccttgctgagcgacatggcggctccccacaaccccttgcaaccacccccttaagccaggagccagtgaaccccccatctgaggcctctccaactcgggaccgttcaccacctaagtctcccgagaaacttccccagtcttcttcctcagagagcagcccaccatcccctcaacctaccaaagtttctcggcatgccagctcttccccagaaagtcctaaacctgctccagctccagggtcccaccgagagatttcttcttctcccacatctaagaatcgctcacatggccgagcaaaacgggataaatcacattctcataccccctcccgtaggatggggaggtcccgtagccctgccaccgctaagagagggcgatctcggtctcgaacccctaccaagagaggtcattctcgatcccgatctccccagtggcgtaggtccaggtctgcacagaggtggggaagatctagaagcccccagcgacgtggccgctctaggtctcctcagcgaccaggctggtctaggagcagaaatacccagagaagaggcaggtctaggtcagcaaggcgagggaggtcccactctagatccccagccactaggggtagatctcgttctagaacaccagcccgccggggcaggtcccgctctagaacacctgccaggcggagatcacgatccagaactcccaccaggcgtaggtctcggtctagaacaccagcccggaggggcaggtctcggtctagaacacctgctaggcgcagatctaggacccgatcaccagtacgacgcaggtctcgtagtagatcaccagccaggagaagtggcaggtcacgctctagaaccccagctagacgtggccgctcacgctccagaaccccagccagacgtggccgctcacgctctagaaccccagctagacgcagtggtcgctcacgctccagaacaccagccaggagagggaggtctcggtctaggacaccaagacgaggaagatcccgcagtagaagcttagttagacgtggaagatctcactctagaacacctcaaagaagaggcagatctggctcatcttcagagcggaaaaacaaatccagaacatctcaaagaagaagcaggtccaattcaagcccagaaatgaagaaatctcgcatttcttcaaggcggagcaggtctctctcttcaccacggtccaaagcaaaatctcgcttgtctttgaggcgcagcctttcagggtcttccccatgccctaaacaaaagtcacagacaccacccaggcgcagtcgctctggatcctcccaacctaaagctaaatctagaacgccacccagacgcagtcgctccagttcttctccgccacctaaacagaaatctaagacaccatcaagacaaagtcattccagttcatctcctcatcctaaagtgaaatctggaacaccaccgaggcaagggtccataacaagtccccaggccaatgagcaatctgtaacgccacagagacggagctgttttgaatcatcacctgaccctgagttgaaatctaggaccccttctagacatagctgctcagggtcctctcctcctagagtgaaatctagcacacctcccagacagagcccatctaggtcatcatctccacaacccaaagtgaaggcaataatatcaccaagacaaagaagccattctggctcctcttctccaagtcctagtagggtgacgtcgagaacaactccacggcgaagcagatcagtatctccctgctccaatgtggaatccagattgttgccaagatacagtcattctgggtcctcctcaccagataccaaagtgaaacctgaaacaccgccaagacaaagtcactcagggtctatttcaccataccccaaagtaaaggcccaaactccaccggggccaagtctttctggatcaaagtcaccatgtccccaagagaagtctaaagactcactagttcaaagttgccctggatccctctctctctgtgcaggagtaaaatctagcacaccaccaggcgagagctattttggtgtctcatctctgcaactgaaaggacaatctcaaacttcaccagaccacagatctgatacttcaagtccagaagtgagacagagtcattcagaatcaccatctctgcagagcaaatctcaaacatcacctaagggaggtcggtccaggtcttcatctccagtcactgagctggcatccagatctccaataagacaagatagaggtgagttctcagcgagtcctatgttgaaatctggaatgtctcctgagcagagcaggttccagtctgactcttcttcatatcctacagtggactcgaattctctcttggggcagagtagattggagactgctgaatcaaaagagaaaatggccttaccccctcaggaggatgctactgcatcacctcctagacagaaagacaaatttagtccctttccagtacaggataggcctgagtcttcactggtattcaaagacacacttagaaccccgccaagggaaagaagtggtgctgggtcatctccagaaacaaaagagcaaaatagtgcattgcctacgtcaagccaagatgaagagttaatggaggtggtagagaagtctgaagaacccgcaggccaaatcctgtctcatttgtcttcagaacttaaagaaatgtccacaagtaactttgaatcatctcctgaagtagaagaaaggcctgctgtgtctttgactcttgatcagagccagtcacaggcttctttggaagcagtagaagtcccttcaatggcctcatcttggggtgggccacatttttctccagaacataaagaactgtctaactccccactcagggagaacagctttggatcacctttagaatttagaaactcaggcccacttggtacagaaatgaatactggattttcttctgaggttaaagaagatttgaatggaccgtttcttaatcagctggaaacagatccatctctagacatgaaagaacaatcgacaagatcctctggacacagcagttctgagttatccccagatgcagtggaaaaggcagggatgtcttcaaatcagagcatctcttcacctgtgcttgatgctgtacccagaacaccctcgagagaaagaagtagttctgcatcttctcctgaaatgaaagatggtttacccagaactccatcaaggagaagcaggtctgggtcttctccaggacttagagatgggtctgggactccctcgaggcacagcctgtctgggtcctctcctggaatgaaagatatacctagaacgccatctagagggagaagcgaatgtgattcttccccagaaccgaaagctttgcctcagactcctaggccgaggagtcgttctccatcatccccagagctcaacaacaagtgtcttaccccccagagagaaagaagcgggtcagaatcatcagttgatcagaaaactgtggctcggactcccctggggcagagaagtcgttcgggatcctctcaagaacttgatgtgaaacccagtgcatcccctcaggaaagaagtgagtcagactcttctccagattctaaagccaagacaagaaccccacttcggcagaggagtcggtctggatcatctccagaggttgacagcaaatctcgactatcccctcggcgcagtaggtctggttcctcccctgaagtgaaagataagccaagagcagcacccagggcacagagtggttctgattcctctcctgaacctaaagctccagcccctcgggcccttcccagacgaagcagatcaggttcatcaagcaaaggcagaggcccttctcctgaaggaagcagcagtaccgagtcctctcctgaacatccgcccaaatccagaactgctcgcagaggttccaggtcatcaccagagcccaagaccaagtctcgtacaccacctcgacgtcgcagctctcgatcatctccggagctaacaaggaaggccagactgtcccgtagaagccgctctgcctcatcctcaccagaaactcgctctagaactcccccaaggcaccggagaagtccctcagtgtcttccccggagccagccgaaaaatcgaggtcttcacgccgacggcgctcagcttcatctccacgcactaagacaacctcaaggagaggccgctctccttcgccaaagcctcgtggactccagaggtcccgttcccgctcaaggagagagaaaacaagaacaacccgacgtcgagataggtctggatcttctcagtcaacctctcggcgaagacagcggagccggtcaaggtcgcgggttactcggcggcggaggggaggctctggttatcactcaaggtcacctgcccggcaggaaagttcccggacctcctctcgacgccgaagaggccgctctcggacacccccaaccagtcggaagcgttctcgctcacgcacatcaccagccccgtggaaacgctctagatctcgagcctctccagccactcaccggcgatccaggtccagaacccccctgataagccgacgtaggtccagatctcgaacttcaccagtcagccggagacggtcaaggtccaggacttcagtgactcgacgaagatcccggtcaagagcatccccagtgagcagaaggcgatccagatccagaacgccaccagtaacccgccgtcgttcaaggtctagaacgccaacaacacgccgccgctcccgttctagaactccaccagtgactcgcagaaggtccagatccaggactccaccagtaaccaggaggcgatctcgaagcagaacttcgcctatcactcgcagaagatcaagatccagaacatctccggtcacccgaaggagatctcgatctcgcacatctccagtaactcgaagaaggtcccgctctcgaacctcaccagtgacacgccgccgctctaggtcccggacacctccagcacaggatcagccgaggtctcctgtgccttctgctttttcagaccaatcccgttgtttgattgcccagaccacccctgtagcagggtctcagtccctttcctctggggcagtggcaacgaccacgtcctctgctggtgatcacaatggcatgctctctgtccctgcccctggggtgccccactctgatgtgggggagccacctgcctctactggggcccagcagccttctgcattagccgccctgcagccagcaaaggagcggcggagttcctcctcgtcgtcgtcgtcctctagctcctcctcttcttcatcatcgtcgtcgtcgtcctcctcctcctctggctccagttctagtgactcagagggctctagccttcctgtgcaacctgaggtggcactgaagagggtccccagccccaccccagccccaaaggaggctgttcgagagggacgtcctccggagccaaccccagccaaacggaagaggcgctctagcagttccagttccagctcctcctcttcatcttcctcctcctcctcctcctcctcttcttcctcctcctcttcctcttcttcttcttcctcctcatcttcctcctcctcgtcgtcttcctccccttcccctgctaagcctggccctcaggccttgcccaaacctgcaagccccaagaagccaccccctggcgagcggaggtcccgcagcccccggaagccaatagactccctcagggactctcggtccctcagctactcgcctgtggagcgtcgccgtccctcgccccagccctcaccacgggaccagcagagcagcagcagtgagcggggttcccggagaggccagcgtggggacagccgctcccccagccacaagcgcaggagggagacacctagccctcggcccatgagacaccgctcctccaggtctccataaattgtctttgggggattccaccacacccaatgctctggagccacaaggagtgtcccttcttccccagcagagccgtgggagggtccttgtctgctctcctttgaaccttggcagcccttggatggagggctccctttccctccccttttttttttctttgttcctgtgaaatgttaatctccgtgagttcttcctggttcatgtgttctggggggtttggggtgggagggaatgcagatgggagttgggggaggggaggatacagttcaggataccccagcctggagtcagggccagggaggcatggccccacttgtatccagaagttcccaggggtgattgtgatggtggttgggactggaggttgtataaggtgttcttggaaggaaggggcaggagttggaattagttggtccctactgtcccccatgaggttgtgaacccctccccccaacttttcatgtttcttaaaggcattttggttttttaaaatctgtacagcaagagcaactttttctgtcaaataaaaatgagaaatgcagg

SEQ ID NO: 190692 - DNA, 8697 bp, Artificial Sequence
  derived and/or modified sequence
cgtcggcgtcggctgaggcgggcggaccggcgaggcgaggcggcggccccaggcccgagggactcgggagctcgagcagcggcggcggcaagacctctccccctcggaggcggcgggcggaggcggcgggtgagagggtacgaggaacagcaaattcaggaaaaagtggcgacctttcgactcatgttgctggagaaggatgtgaaccctgggggcaaggaggagaccccagggcagaggccagcggtcacggagactcaccagttggcagaattaaatgagaagaagaatgaaagactccgtgctgcctttggcatcagtgattcttacgtagatggcagctcttttgatcctcagcgtcgtgcccgagaagctaaacaaccagctcctgagcctcccaaaccttacagccttgttcgggagtctagcagttctcgctcaccaaccccaaagcagaagaagaagaaaaagaagaaagatagaggacgcaggtcagagagcagctctcctcgacgggagagaaagaaaagctcaaagaagaagaagcacaggtcagaatctgagtccaagaaacgtaagcataggtctcccactccaaagagcaaacgtaaatctaaggacaaaaagcgaaagcggtctcgaagtacaacaccagcccccaagagccgccgggcccaccgttcaacttctgctgactctgcttcctcctccgatacttcccgcagtcggtctcgaagtgctgcagctaaaactcatacaactgccttggctgggcgaagtccttcccctgcttcagggcgacgcggggagggagatgcgcctttcagtgaaccaggtactaccagcacacaacggcctagtagcccggagactgctacgaaacagcctagcagcccttatgaagacaaagataaagacaagaaggagaaatctgcaactcgacctagcccctctccggaaaggagcagcacaggcccagaaccacctgctcccactccgctccttgctgagcgacatggcggctccccacaaccccttgcaaccacccccttaagccaggagccagtgaaccccccatctgaggcctctccaactcgggaccgttcaccacctaagtctcccgagaaacttccccagtcttcttcctcagagagcagcccaccatcccctcaacctaccaaagtttctcggcatgccagctcttccccagaaagtcctaaacctgctccagctccagggtcccaccgagagatttcttcttctcccacatctaagaatcgctcacatggccgagcaaaacgggataaatcacattctcataccccctcccgtaggatggggaggtcccgtagccctgccaccgctaagagagggcgatctcggtctcgaacccctaccaagagaggtcattctcgatcccgatctccccagtggcgtaggtccaggtctgcacagaggtggggaagatctagaagcccccagcgacgtggccgctctaggtctcctcagcgaccaggctggtctaggagcagaaatacccagagaagaggcaggtctaggtcagcaaggcgagggaggtcccactctagatccccagccactaggggtagatctcgttctagaacaccagcccgccggggcaggtcccgctctagaacacctgccaggcggagatcacgatccagaactcccaccaggcgtaggtctcggtctagaacaccagcccggaggggcaggtctcggtctagaacacctgctaggcgcagatctaggacccgatcaccagtacgacgcaggtctcgtagtagatcaccagccaggagaagtggcaggtcacgctctagaaccccagctagacgtggccgctcacgctccagaaccccagccagacgtggccgctcacgctctagaaccccagctagacgcagtggtcgctcacgctccagaacaccagccaggagagggaggtctcggtctaggacaccaagacgaggaagatcccgcagtagaagcttagttagacgtggaagatctcactctagaacacctcaaagaagaggcagatctggctcatcttcagagcggaaaaacaaatccagaacatctcaaagaagaagcaggtccaattcaagcccagaaatgaagaaatctcgcatttcttcaaggcggagcaggtctctctcttcaccacggtccaaagcaaaatctcgcttgtctttgaggcgcagcctttcagggtcttccccatgccctaaacaaaagtcacagacaccacccaggcgcagtcgctctggatcctcccaacctaaagctaaatctagaacgccacccagacgcagtcgctccagttcttctccgccacctaaacagaaatctaagacaccatcaagacaaagtcattccagttcatctcctcatcctaaagtgaaatctggaacaccaccgaggcaagggtccataacaagtccccaggccaatgagcaatctgtaacgccacagagacggagctgttttgaatcatcacctgaccctgagttgaaatctaggaccccttctagacatagctgctcagggtcctctcctcctagagtgaaatctagcacacctcccagacagagcccatctaggtcatcatctccacaacccaaagtgaaggcaataatatcaccaagacaaagaagccattctggctcctcttctccaagtcctagtagggtgacgtcgagaacaactccacggcgaagcagatcagtatctccctgctccaatgtggaatccagattgttgccaagatacagtcattctgggtcctcctcaccagataccaaagtgaaacctgaaacaccgccaagacaaagtcactcagggtctatttcaccataccccaaagtaaaggcccaaactccaccggggccaagtctttctggatcaaagtcaccatgtccccaagagaagtctaaagactcactagttcaaagttgccctggatccctctctctctgtgcaggagtaaaatctagcacaccaccaggcgagagctattttggtgtctcatctctgcaactgaaaggacaatctcaaacttcaccagaccacagatctgatacttcaagtccagaagtgagacagagtcattcagaatcaccatctctgcagagcaaatctcaaacatcacctaagggaggtcggtccaggtcttcatctccagtcactgagctggcatccagatctccaataagacaagatagaggtgagttctcagcgagtcctatgttgaaatctggaatgtctcctgagcagagcaggttccagtctgactcttcttcatatcctacagtggactcgaattctctcttggggcagagtagattggagactgctgaatcaaaagagaaaatggccttaccccctcaggaggatgctactgcatcacctcctagacagaaagacaaatttagtccctttccagtacaggataggcctgagtcttcactggtattcaaagacacacttagaaccccgccaagggaaagaagtggtgctgggtcatctccagaaacaaaagagcaaaatagtgcattgcctacgtcaagccaagatgaagagttaatggaggtggtagagaagtctgaagaacccgcaggccaaatcctgtctcatttgtcttcagaacttaaagaaatgtccacaagtaactttgaatcatctcctgaagtagaagaaaggcctgctgtgtctttgactcttgatcagagccagtcacaggcttctttggaagcagtagaagtcccttcaatggcctcatcttggggtgggccacatttttctccagaacataaagaactgtctaactccccactcagggagaacagctttggatcacctttagaatttagaaactcaggcccacttggtacagaaatgaatactggattttcttctgaggttaaagaagatttgaatggaccgtttcttaatcagctggaaacagatccatctctagacatgaaagaacaatcgacaagatcctctggacacagcagttctgagttatccccagatgcagtggaaaaggcagggatgtcttcaaatcagagcatctcttcacctgtgcttgatgctgtacccagaacaccctcgagagaaagaagtagttctgcatcttctcctgaaatgaaagatggtttacccagaactccatcaaggagaagcaggtctgggtcttctccaggacttagagatgggtctgggactccctcgaggcacagcctgtctgggtcctctcctggaatgaaagatatacctagaacgccatctagagggagaagcgaatgtgattcttccccagaaccgaaagctttgcctcagactcctaggccgaggagtcgttctccatcatccccagagctcaacaacaagtgtcttaccccccagagagaaagaagcgggtcagaatcatcagttgatcagaaaactgtggctcggactcccctggggcagagaagtcgttcgggatcctctcaagaacttgatgtgaaacccagtgcatcccctcaggaaagaagtgagtcagactcttctccagattctaaagccaagacaagaaccccacttcggcagaggagtcggtctggatcatctccagaggttgacagcaaatctcgactatcccctcggcgcagtaggtctggttcctcccctgaagtgaaagataagccaagagcagcacccagggcacagagtggttctgattcctctcctgaacctaaagctccagcccctcgggcccttcccagacgaagcagatcaggttcatcaagcaaaggcagaggcccttctcctgaaggaagcagcagtaccgagtcctctcctgaacatccgcccaaatccagaactgctcgcagaggttccaggtcatcaccagagcccaagaccaagtctcgtacaccacctcgacgtcgcagctctcgatcatctccggagctaacaaggaaggccagactgtcccgtagaagccgctctgcctcatcctcaccagaaactcgctctagaactcccccaaggcaccggagaagtccctcagtgtcttccccggagccagccgaaaaatcgaggtcttcacgccgacggcgctcagcttcatctccacgcactaagacaacctcaaggagaggccgctctccttcgccaaagcctcgtggactccagaggtcccgttcccgctcaaggagagagaaaacaagaacaacccgacgtcgagataggtctggatcttctcagtcaacctctcggcgaagacagcggagccggtcaaggtcgcgggttactcggcggcggaggggaggctctggttatcactcaaggtcacctgcccggcaggaaagttcccggacctcctctcgacgccgaagaggccgctctcggacacccccaaccagtcggaagcgttctcgctcacgcacatcaccagccccgtggaaacgctctagatctcgagcctctccagccactcaccggcgatccaggtccagaacccccctgataagccgacgtaggtccagatctcgaacttcaccagtcagccggagacggtcaaggtccaggacttcagtgactcgacgaagatcccggtcaagagcatccccagtgagcagaaggcgatccagatccagaacgccaccagtaacccgccgtcgttcaaggtctagaacgccaacaacacgccgccgctcccgttctagaactccaccagtgactcgcagaaggtccagatccaggactccaccagtaaccaggaggcgatctcgaagcagaacttcgcctatcactcgcagaagatcaagatccagaacatctccggtcacccgaaggagatctcgatctcgcacatctccagtaactcgaagaaggtcccgctctcgaacctcaccagtgacacgccgccgctctaggtcccggacacctccagctattcggcgccgctctagatctcgaacgccactgttaccacgcaaacgttctcgaagtcgctcaccacttgctatccgccgccgctccagatcccgtactccacgaacagctcggggtaaacggtccttaacaagatctcctccagccatccgcaggcgttctgcatctggaagtagttctgatcgttcacgatctgctactcctccagcaacaagaaatcattctggttcacggacacctccagtagcactcaacagttccagaatgagctgcttcagtcgtcctagcatgtccccaacacctcttgatcgctgcagatcacctggaatgcttgaaccccttggcagctctagaacacccatgtctgtcctgcagcaagccggcggctccatgatggatggtccaggtccccgaatacctgaccaccagagaacatctgtgccagaaaatcatgctcagtccaggattgcacttgccctgacagctatcagtcttggcaccgctcggcctcctccgtccatgtctgctgctggccttgctgcaagaatgtcccaggttccagccccggtgcctctcatgagtctcagaaccgcaccagcagccaaccttgccagcaggattcctgcagcctctgcggcagccatgaacctagccagcgccaggacacctgccattccaacagcagtgaacctggctgactctcgaacgccagctgcagcagcggccatgaacttggccagccccagaacagcggtggcaccttcggctgtgaacctggctgaccctcgcactcccacagccccagctgtgaacctagcaggggccagaaccccagctgccttggcagctctgagtctcacaggctctggcacaccaccaactgctgcaaactatccctccagctccagaacaccacaggctccagcctctgcaaacctggtgggtcctcggtctgcacatgccacagctcctgtgaatattgccggctccagaaccgccgcagccttggcccccgcgagcctcaccagtgctaggatggctccagcattgtctggtgcaaacctcaccagccccagggtgcccctttctgcctacgagcgtgtcagtggcagaacctcaccaccgctccttgaccgagctaggtccagaacaccaccgtctgccccaagccaatctaggatgacctctgaacgggctccctccccttcctctagaatgggccaggctccttcacagtctcttctccctccagcacaggatcagccgaggtctcctgtgccttctgctttttcagaccaatcccgttgtttgattgcccagaccacccctgtagcagggtctcagtccctttcctctggggcagtggcaacgaccacgtcctctgctggtgatcacaatggcatgctctctgtccctgcccctggggtgccccactctgatgtgggggagccacctgcctctactggggcccagcagccttctgcattagccgccctgcagccagcaaaggagcggcggagttcctcctcgtcgtcgtcgtcctctagctcctcctcttcttcatcatcgtcgtcgtcgtcctcctcctcctctggctccagttctagtgactcagagggctctagccttcctgtgcaacctgaggtggcactgaagagggtccccagccccaccccagccccaaaggaggctgttcgagagggacgtcctccggagccaaccccagccaaacggaagaggcgctctagcagttccagttccagctcctcctcttcatcttcctcctcctcctcctcctcctcttcttcctcctcctcttcctcttcttcttcttcctcctcatcttcctcctcctcgtcgtcttcctccccttcccctgctaagcctggccctcaggccttgcccaaacctgcaagccccaagaagccaccccctggcgagcggaggtcccgcagcccccggaagccaatagactccctcagggactctcggtccctcagctactcgcctgtggagcgtcgccgtccctcgccccagccctcaccacgggaccagcagagcagcagcagtgagcggggttcccggagaggccagcgtggggacagccgctcccccagccacaagcgcaggagggagacacctagccctcggcccatgagacaccgctcctccaggtctccataaattgtctttgggggattccaccacacccaatgctctggagccacaaggagtgtcccttcttccccagcagagccgtgggagggtccttgtctgctctcctttgaaccttggcagcccttggatggagggctccctttccctccccttttttttttctttgttcctgtgaaatgttaatctccgtgagttcttcctggttcatgtgttctggggggtttggggtgggagggaatgcagatgggagttgggggaggggaggatacagttcaggataccccagcctggagtcagggccagggaggcatggccccacttgtatccagaagttcccaggggtgattgtgatggtggttgggactggaggttgtataaggtgttcttggaaggaaggggcaggagttggaattagttggtccctactgtcccccatgaggttgtgaacccctccccccaacttttcatgtttcttaaaggcattttggttttttaaaatctgtacagcaagagcaactttttctgtcaaataaaaatgagaaatgcagg

SEQ ID NO: 190693 - DNA, 8829 bp, Artificial Sequence
  derived and/or modified sequence
agaatgctctgcatcgacagcgggagacgagacgcgctcgggcgtcgctttgctgccgctaggccctgtgctcctccccgcagcggaaggcctacgaatacgcggtgtcttacgtcgcttcctccgttcttcgttgcactggccaacgggacgcttagtctttcggcaacggggtgaaaccttccttgtgcctgaaaaaacggtacttcgcggtgtggcttcggcgcctgcgcaaaaggccgcggggcgcactccagttcccggcaggccccgcgacgcgcgtttgcgtgctgacgcacgcagttagtcgtgctgacgtgcagcgcggcccaggcggggtgcgagtggcgcagttggagcccgttgcggcccctgaggaagcgaggaggcgtcggcgtcggctgaggcgggcggaccggcgaggcgaggcggcggccccaggcccgagggactcgggagctcgagcagcggcggcggcaagacctctccccctcggaggcggcgggcggaggcggcgggagcggtggtgccccccccgggcacggggccatgtacaacgggatcgggctgccgacgccccggggcagcggcaccaacggctacgtccagcgcaacctgtccctggtgcggggccgccggggtgagcggcctgactacaagggagaggaggaactgcggcgcctggaggctgccctggtgaagcggcctaatcctgacatcctggaccacgagcgcaagcggcgcgtcgagctgcgatgcctcgagctggaggagatgatggaagagcaggggtacgaggaacagcaaattcaggaaaaagtggcgacctttcgactcatgttgctggagaaggatgtgaaccctgggggcaaggaggagaccccagggcagaggccagcggtcacggagactcaccagttggcagaattaaatgagaagaagaatgaaagactccgtgctgcctttggcatcagtgattcttacgtagatggcagctcttttgatcctcagcgtcgtgcccgagaagctaaacaaccagctcctgagcctcccaaaccttacagccttgttcgggagtctagcagttctcgctcaccaaccccaaagcagaagaagaagaaaaagaagaaagatagaggacgcaggtcagagagcagctctcctcgacgggagagaaagaaaagctcaaagaagaagaagcacaggtcagaatctgagtccaagaaacgtaagcataggtctcccactccaaagagcaaacgtaaatctaaggacaaaaagcgaaagcggtctcgaagtacaacaccagcccccaagagccgccgggcccaccgttcaacttctgctgactctgcttcctcctccgatacttcccgcagtcggtctcgaagtgctgcagctaaaactcatacaactgccttggctgggcgaagtccttcccctgcttcagggcgacgcggggagggagatgcgcctttcagtgaaccaggtactaccagcacacaacggcctagtagcccggagactgctacgaaacagcctagcagcccttatgaagacaaagataaagacaagaaggagaaatctgcaactcgacctagcccctctccggaaaggagcagcacaggcccagaaccacctgctcccactccgctccttgctgagcgacatggcggctccccacaaccccttgcaaccacccccttaagccaggagccagtgaaccccccatctgaggcctctccaactcgggaccgttcaccacctaagtctcccgagaaacttccccagtcttcttcctcagagagcagcccaccatcccctcaacctaccaaagtttctcggcatgccagctcttccccagaaagtcctaaacctgctccagctccagggtcccaccgagagatttcttcttctcccacatctaagaatcgctcacatggccgagcaaaacgggataaatcacattctcataccccctcccgtaggatggggaggtcccgtagccctgccaccgctaagagagggcgatctcggtctcgaacccctaccaagagaggtcattctcgatcccgatctccccagtggcgtaggtccaggtctgcacagaggtggggaagatctagaagcccccagcgacgtggccgctctaggtctcctcagcgaccaggctggtctaggagcagaaatacccagagaagaggcaggtctaggtcagcaaggcgagggaggtcccactctagatccccagccactaggggtagatctcgttctagaacaccagcccgccggggcaggtcccgctctagaacacctgccaggcggagatcacgatccagaactcccaccaggcgtaggtctcggtctagaacaccagcccggaggggcaggtctcggtctagaacacctgctaggcgcagatctaggacccgatcaccagtacgacgcaggtctcgtagtagatcaccagccaggagaagtggcaggtcacgctctagaaccccagctagacgtggccgctcacgctccagaaccccagccagacgtggccgctcacgctctagaaccccagctagacgcagtggtcgctcacgctccagaacaccagccaggagagggaggtctcggtctaggacaccaagacgaggaagatcccgcagtagaagcttagttagacgtggaagatctcactctagaacacctcaaagaagaggcagatctggctcatcttcagagcggaaaaacaaatccagaacatctcaaagaagaagcaggtccaattcaagcccagaaatgaagaaatctcgcatttcttcaaggcggagcaggtctctctcttcaccacggtccaaagcaaaatctcgcttgtctttgaggcgcagcctttcagggtcttccccatgccctaaacaaaagtcacagacaccacccaggcgcagtcgctctggatcctcccaacctaaagctaaatctagaacgccacccagacgcagtcgctccagttcttctccgccacctaaacagaaatctaagacaccatcaagacaaagtcattccagttcatctcctcatcctaaagtgaaatctggaacaccaccgaggcaagggtccataacaagtccccaggccaatgagcaatctgtaacgccacagagacggagctgttttgaatcatcacctgaccctgagttgaaatctaggaccccttctagacatagctgctcagggtcctctcctcctagagtgaaatctagcacacctcccagacagagcccatctaggtcatcatctccacaacccaaagtgaaggcaataatatcaccaagacaaagaagccattctggctcctcttctccaagtcctagtagggtgacgtcgagaacaactccacggcgaagcagatcagtatctccctgctccaatgtggaatccagattgttgccaagatacagtcattctgggtcctcctcaccagataccaaagtgaaacctgaaacaccgccaagacaaagtcactcagggtctatttcaccataccccaaagtaaaggcccaaactccaccggggccaagtctttctggatcaaagtcaccatgtccccaagagaagtctaaagactcactagttcaaagttgccctggatccctctctctctgtgcaggagtaaaatctagcacaccaccaggcgagagctattttggtgtctcatctctgcaactgaaaggacaatctcaaacttcaccagaccacagatctgatacttcaagtccagaagtgagacagagtcattcagaatcaccatctctgcagagcaaatctcaaacatcacctaagggaggtcggtccaggtcttcatctccagtcactgagctggcatccagatctccaataagacaagatagaggtgagttctcagcgagtcctatgttgaaatctggaatgtctcctgagcagagcaggttccagtctgactcttcttcatatcctacagtggactcgaattctctcttggggcagagtagattggagactgctgaatcaaaagagaaaatggccttaccccctcaggaggatgctactgcatcacctcctagacagaaagacaaatttagtccctttccagtacaggataggcctgagtcttcactggtattcaaagacacacttagaaccccgccaagggaaagaagtggtgctgggtcatctccagaaacaaaagagcaaaatagtgcattgcctacgtcaagccaagatgaagagttaatggaggtggtagagaagtctgaagaacccgcaggccaaatcctgtctcatttgtcttcagaacttaaagaaatgtccacaagtaactttgaatcatctcctgaagtagaagaaaggcctgctgtgtctttgactcttgatcagagccagtcacaggcttctttggaagcagtagaagtcccttcaatggcctcatcttggggtgggccacatttttctccagaacataaagaactgtctaactccccactcagggagaacagctttggatcacctttagaatttagaaactcaggcccacttggtacagaaatgaatactggattttcttctgaggttaaagaagatttgaatggaccgtttcttaatcagctggaaacagatccatctctagacatgaaagaacaatcgacaagatcctctggacacagcagttctgagttatccccagatgcagtggaaaaggcagggatgtcttcaaatcagagcatctcttcacctgtgcttgatgctgtacccagaacaccctcgagagaaagaagtagttctgcatcttctcctgaaatgaaagatggtttacccagaactccatcaaggagaagcaggtctgggtcttctccaggacttagagatgggtctgggactccctcgaggcacagcctgtctgggtcctctcctggaatgaaagatatacctagaacgccatctagagggagaagcgaatgtgattcttccccagaaccgaaagctttgcctcagactcctaggccgaggagtcgttctccatcatccccagagctcaacaacaagtgtcttaccccccagagagaaagaagcgggtcagaatcatcagttgatcagaaaactgtggctcggactcccctggggcagagaagtcgttcgggatcctctcaagaacttgatgtgaaacccagtgcatcccctcaggaaagaagtgagtcagactcttctccagattctaaagccaagacaagaaccccacttcggcagaggagtcggtctggatcatctccagaggttgacagcaaatctcgactatcccctcggcgcagtaggtctggttcctcccctgaagtgaaagataagccaagagcagcacccagggcacagagtggttctgattcctctcctgaacctaaagctccagcccctcgggcccttcccagacgaagcagatcaggttcatcaagcaaaggcagaggcccttctcctgaaggaagcagcagtaccgagtcctctcctgaacatccgcccaaatccagaactgctcgcagaggttccaggtcatcaccagagcccaagaccaagtctcgtacaccacctcgacgtcgcagctctcgatcatctccggagctaacaaggaaggccagactgtcccgtagaagccgctctgcctcatcctcaccagaaactcgctctagaactcccccaaggcaccggagaagtccctcagtgtcttccccggagccagccgaaaaatcgaggtcttcacgccgacggcgctcagcttcatctccacgcactaagacaacctcaaggagaggccgctctccttcgccaaagcctcgtggactccagaggtcccgttcccgctcaaggagagagaaaacaagaacaacccgacgtcgagataggtctggatcttctcagtcaacctctcggcgaagacagcggagccggtcaaggtcgcgggttactcggcggcggaggggaggctctggttatcactcaaggtcacctgcccggcaggaaagttcccggacctcctctcgacgccgaagaggccgctctcggacacccccaaccagtcggaagcgttctcgctcacgcacatcaccagccccgtggaaacgctctagatctcgagcctctccagccactcaccggcgatccaggtccagaacccccctgataagccgacgtaggtccagatctcgaacttcaccagtcagccggagacggtcaaggtccaggacttcagtgactcgacgaagatcccggtcaagagcatccccagtgagcagaaggcgatccagatccagaacgccaccagtaacccgccgtcgttcaaggtctagaacgccaacaacacgccgccgctcccgttctagaactccaccagtgactcgcagaaggtccagatccaggactccaccagtaaccaggaggcgatctcgaagcagaacttcgcctatcactcgcagaagatcaagatccagaacatctccggtcacccgaaggagatctcgatctcgcacatctccagtaactcgaagaaggtcccgctctcgaacctcaccagtgacacgccgccgctctaggtcccggacacctccagctattcggcgccgctctagatctcgaacgccactgttaccacgcaaacgttctcgaagtcgctcaccacttgctatccgccgccgctccagatcccgtactccacgaacagctcggggtaaacggtccttaacaagatctcctccagccatccgcaggcgttctgcatctggaagtagttctgatcgttcacgatctgctactcctccagcaacaagaaatcattctggttcacggacacctccagtagcactcaacagttccagaatgagctgcttcagtcgtcctagcatgtccccaacacctcttgatcgctgcagatcacctggaatgcttgaaccccttggcagctctagaacacccatgtctgtcctgcagcaagccggcggctccatgatggatggtccaggtccccgaatacctgaccaccagagaacatctgtgccagaaaatcatgctcagtccaggattgcacttgccctgacagctatcagtcttggcaccgctcggcctcctccgtccatgtctgctgctggccttgctgcaagaatgtcccaggttccagccccggtgcctctcatgagtctcagaaccgcaccagcagccaaccttgccagcaggattcctgcagcctctgcggcagccatgaacctagccagcgccaggacacctgccattccaacagcagtgaacctggctgactctcgaacgccagctgcagcagcggccatgaacttggccagccccagaacagcggtggcaccttcggctgtgaacctggctgaccctcgcactcccacagccccagctgtgaacctagcaggggccagaaccccagctgccttggcagctctgagtctcacaggctctggcacaccaccaactgctgcaaactatccctccagctccagaacaccacaggctccagcctctgcaaacctggtgggtcctcggtctgcacatgccacagctcctgtgaatattgccggctccagaaccgccgcagccttggcccccgcgagcctcaccagtgctaggatggctccagcattgtctggtgcaaacctcaccagccccagggtgcccctttctgcctacgagcgtgtcagtggcagaacctcaccaccgctccttgaccgagctaggtccagaacaccaccgtctgccccaagccaatctaggatgacctctgaacgggctccctccccttcctctagaatgggccaggctccttcacagtctcttctccctccagcacaggatcagccgaggtctcctgtgccttctgctttttcagaccaatcccgttgtttgattgcccagaccacccctgtagcagggtctcagtccctttcctctggggcagtggcaacgaccacgtcctctgctggtgatcacaatggcatgctctctgtccctgcccctggggtgccccactctgatgtgggggagccacctgcctctactggggcccagcagccttctgcattagccgccctgcagccagcaaaggagcggcggagttcctcctcgtcgtcgtcgtcctctagctcctcctcttcttcatcatcgtcgtcgtcgtcctcctcctcctctggctccagttctagtgactcagagggctctagccttcctgtgcaacctgaggtggcactgaagagggtccccagccccaccccagccccaaaggaggctgttcgagagggacgtcctccggagccaaccccagccaaacggaagaggcgctctagcagttccagttccagctcctcctcttcatcttcctcctcctcctcctcctcctcttcttcctcctcctcttcctcttcttcttcttcctcctcatcttcctcctcctcgtcgtcttcctccccttcccctgctaagcctggccctcaggccttgcccaaacctgcaagccccaagaagccaccccctggcgagcggagcctcctccctgtctccccgtctccacgccattctcttccacatgtagccagagggacctttctaaaacgcacatctggctacttccctccactccacaaatccttcgggacgccctgtggcctgcaggacaaagccccacctctgcgggagtggcgtgtgaggctcttcaccaacgggccttgcccgccctgtgttctcctcctgcccgcccccacacatgccctgtgctccagccacacccagcgccttgcagtctaa

SEQ ID NO: 190694 - DNA, 8259 bp, Artificial Sequence
  derived and/or modified sequence
atgtacaacggcatcggcctgcccacccccagaggcagcggcaccaacggctacgtgcagagaaacctgagcctggtgagaggcagaagaggcgagagacccgactacaagggcgaggaggagctgagaagactggaggccgccctggtgaagagacccaaccccgacatcctggaccacgagagaaagagaagagtggagctgagatgcctggagctggaggagatgatggaggagcagggctacgaggagcagcagatccaggagaaggtggccaccttcagactgatgctgctggagaaggacgtgaaccccggcggcaaggaggagacccccggccagagacccgccgtgaccgagacccaccagctggccgagctgaacgagaagaagaacgagagactgagagccgccttcggcatcagcgacagctacgtggacggcagcagcttcgacccccagagaagagccagagaggccaagcagcccgcccccgagccccccaagccctacagcctggtgagagagagcagcagcagcagaagccccacccccaagcagaagaagaagaagaagaagaaggacagaggcagaagaagcgagagcagcagccccagaagagagagaaagaagagcagcaagaagaagaagcacagaagcgagagcgagagcaagaagagaaagcacagaagccccacccccaagagcaagagaaagagcaaggacaagaagagaaagagaagcagaagcaccacccccgcccccaagagcagaagagcccacagaagcaccagcgccgacagcgccagcagcagcgacaccagcagaagcagaagcagaagcgccgccgccaagacccacaccaccgccctggccggcagaagccccagccccgccagcggcagaagaggcgagggcgacgcccccttcagcgagcccggcaccaccagcacccagagacccagcagccccgagaccgccaccaagcagcccagcagcccctacgaggacaaggacaaggacaagaaggagaagagcgccaccagacccagccccagccccgagagaagcagcaccggccccgagccccccgcccccacccccctgctggccgagagacacggcggcagcccccagcccctggccaccacccccctgagccaggagcccgtgaacccccccagcgaggccagccccaccagagacagaagcccccccaagagccccgagaagctgccccagagcagcagcagcgagagcagcccccccagcccccagcccaccaaggtgagcagacacgccagcagcagccccgagagccccaagcccgcccccgcccccggcagccacagagagatcagcagcagccccaccagcaagaacagaagccacggcagagccaagagagacaagagccacagccacacccccagcagaagaatgggcagaagcagaagccccgccaccgccaagagaggcagaagcagaagcagaacccccaccaagagaggccacagcagaagcagaagcccccagtggagaagaagcagaagcgcccagagatggggcagaagcagaagcccccagagaagaggcagaagcagaagcccccagagacccggctggagcagaagcagaaacacccagagaagaggcagaagcagaagcgccagaagaggcagaagccacagcagaagccccgccaccagaggcagaagcagaagcagaacccccgccagaagaggcagaagcagaagcagaacccccgccagaagaagaagcagaagcagaacccccaccagaagaagaagcagaagcagaacccccgccagaagaggcagaagcagaagcagaacccccgccagaagaagaagcagaaccagaagccccgtgagaagaagaagcagaagcagaagccccgccagaagaagcggcagaagcagaagcagaacccccgccagaagaggcagaagcagaagcagaacccccgccagaagaggcagaagcagaagcagaacccccgccagaagaagcggcagaagcagaagcagaacccccgccagaagaggcagaagcagaagcagaacccccagaagaggcagaagcagaagcagaagcctggtgagaagaggcagaagccacagcagaaccccccagagaagaggcagaagcggcagcagcagcgagagaaagaacaagagcagaaccagccagagaagaagcagaagcaacagcagccccgagatgaagaagagcagaatcagcagcagaagaagcagaagcctgagcagccccagaagcaaggccaagagcagactgagcctgagaagaagcctgagcggcagcagcccctgccccaagcagaagagccagaccccccccagaagaagcagaagcggcagcagccagcccaaggccaagagcagaaccccccccagaagaagcagaagcagcagcagccccccccccaagcagaagagcaagacccccagcagacagagccacagcagcagcagcccccaccccaaggtgaagagcggcaccccccccagacagggcagcatcaccagcccccaggccaacgagcagagcgtgaccccccagagaagaagctgcttcgagagcagccccgaccccgagctgaagagcagaacccccagcagacacagctgcagcggcagcagcccccccagagtgaagagcagcaccccccccagacagagccccagcagaagcagcagcccccagcccaaggtgaaggccatcatcagccccagacagagaagccacagcggcagcagcagccccagccccagcagagtgaccagcagaaccacccccagaagaagcagaagcgtgagcccctgcagcaacgtggagagcagactgctgcccagatacagccacagcggcagcagcagccccgacaccaaggtgaagcccgagaccccccccagacagagccacagcggcagcatcagcccctaccccaaggtgaaggcccagaccccccccggccccagcctgagcggcagcaagagcccctgcccccaggagaagagcaaggacagcctggtgcagagctgccccggcagcctgagcctgtgcgccggcgtgaagagcagcaccccccccggcgagagctacttcggcgtgagcagcctgcagctgaagggccagagccagaccagccccgaccacagaagcgacaccagcagccccgaggtgagacagagccacagcgagagccccagcctgcagagcaagagccagaccagccccaagggcggcagaagcagaagcagcagccccgtgaccgagctggccagcagaagccccatcagacaggacagaggcgagttcagcgccagccccatgctgaagagcggcatgagccccgagcagagcagattccagagcgacagcagcagctaccccaccgtggacagcaacagcctgctgggccagagcagactggagaccgccgagagcaaggagaagatggccctgcccccccaggaggacgccaccgccagcccccccagacagaaggacaagttcagccccttccccgtgcaggacagacccgagagcagcctggtgttcaaggacaccctgagaaccccccccagagagagaagcggcgccggcagcagccccgagaccaaggagcagaacagcgccctgcccaccagcagccaggacgaggagctgatggaggtggtggagaagagcgaggagcccgccggccagatcctgagccacctgagcagcgagctgaaggagatgagcaccagcaacttcgagagcagccccgaggtggaggagagacccgccgtgagcctgaccctggaccagagccagagccaggccagcctggaggccgtggaggtgcccagcatggccagcagctggggcggcccccacttcagccccgagcacaaggagctgagcaacagccccctgagagagaacagcttcggcagccccctggagttcagaaacagcggccccctgggcaccgagatgaacaccggcttcagcagcgaggtgaaggaggacctgaacggccccttcctgaaccagctggagaccgaccccagcctggacatgaaggagcagagcaccagaagcagcggccacagcagcagcgagctgagccccgacgccgtggagaaggccggcatgagcagcaaccagagcatcagcagccccgtgctggacgccgtgcccagaacccccagcagagagagaagcagcagcgccagcagccccgagatgaaggacggcctgcccagaacccccagcagaagaagcagaagcggcagcagccccggcctgagagacggcagcggcacccccagcagacacagcctgagcggcagcagccccggcatgaaggacatccccagaacccccagcagaggcagaagcgagtgcgacagcagccccgagcccaaggccctgccccagacccccagacccagaagcagaagccccagcagccccgagctgaacaacaagtgcctgaccccccagagagagagaagcggcagcgagagcagcgtggaccagaagaccgtggccagaacccccctgggccagagaagcagaagcggcagcagccaggagctggacgtgaagcccagcgccagcccccaggagagaagcgagagcgacagcagccccgacagcaaggccaagaccagaacccccctgagacagagaagcagaagcggcagcagccccgaggtggacagcaagagcagactgagccccagaagaagcagaagcggcagcagccccgaggtgaaggacaagcccagagccgcccccagagcccagagcggcagcgacagcagccccgagcccaaggcccccgcccccagagccctgcccagaagaagcagaagcggcagcagcagcaagggcagaggccccagccccgagggcagcagcagcaccgagagcagccccgagcacccccccaagagcagaaccgccagaagaggcagcagaagcagccccgagcccaagaccaagagcagaaccccccccagaagaagaagcagcagaagcagccccgagctgaccagaaaggccagactgagcagaagaagcagaagcgccagcagcagccccgagaccagaagcagaaccccccccagacacagaagaagccccagcgtgagcagccccgagcccgccgagaagagcagaagcagcagaagaagaagaagcgccagcagccccagaaccaagaccaccagcagaagaggcagaagccccagccccaagcccagaggcctgcagagaagcagaagcagaagcagaagagagaagaccagaaccaccagaagaagagacagaagcggcagcagccagagcaccagcagaagaagacagagaagcagaagcagaagcagagtgaccagaagaagaagaggcggcagcggctaccacagcagaagccccgccagacaggagagcagcagaaccagcagcagaagaagaagaggcagaagcagaaccccccccaccagcagaaagagaagcagaagcagaaccagccccgccccctggaagagaagcagaagcagagccagccccgccacccacagaagaagcagaagcagaacccccctgatcagcagaagaagaagcagaagcagaaccagccccgtgagcagaagaagaagcagaagcagaaccagcgtgaccagaagaagaagcagaagcagagccagccccgtgagcagaagaagaagcagaagcagaaccccccccgtgaccagaagaagaagcagaagcagaacccccaccaccagaagaagaagcagaagcagaaccccccccgtgaccagaagaagaagcagaagcagaaccccccccgtgaccagaagaagaagcagaagcagaaccagccccatcaccagaagaagaagcagaagcagaaccagccccgtgaccagaagaagaagcagaagcagaaccagccccgtgaccagaagaagaagcagaagcagaaccagccccgtgaccagaagaagaagcagaagcagaaccccccccgccatcagaagaagaagcagaagcagaacccccctgctgcccagaaagagaagcagaagcagaagccccctggccatcagaagaagaagcagaagcagaacccccagaaccgccagaggcaagagaagcctgaccagaagcccccccgccatcagaagaagaagcgccagcggcagcagcagcgacagaagcagaagcgccaccccccccgccaccagaaaccacagcggcagcagaaccccccccgtggccctgaacagcagcagaatgagctgcttcagcagacccagcatgagccccacccccctggacagatgcagaagccccggcatgctggagcccctgggcagcagcagaacccccatgagcgtgctgcagcaggccggcggcagcatgatggacggccccggccccagaatccccgaccaccagagaaccagcgtgcccgagaaccacgcccagagcagaatcgccctggccctgaccgccatcagcctgggcaccgccagacccccccccagcatgagcgccgccggcctggccgccagaatgagccaggtgcccgcccccgtgcccctgatgagcctgagaaccgcccccgccgccaacctggccagcagaatccccgccgccagcgccgccgccatgaacctggccagcgccagaacccccgccatccccaccgccgtgaacctggccgacagcagaacccccgccgccgccgccgccatgaacctggccagccccagaaccgccgtggcccccagcgccgtgaacctggccgaccccagaacccccaccgcccccgccgtgaacctggccggcgccagaacccccgccgccctggccgccctgagcctgaccggcagcggcaccccccccaccgccgccaactaccccagcagcagcagaaccccccaggcccccgccagcgccaacctggtgggccccagaagcgcccacgccaccgcccccgtgaacatcgccggcagcagaaccgccgccgccctggcccccgccagcctgaccagcgccagaatggcccccgccctgagcggcgccaacctgaccagccccagagtgcccctgagcgcctacgagagagtgagcggcagaaccagcccccccctgctggacagagccagaagcagaaccccccccagcgcccccagccagagcagaatgaccagcgagagagcccccagccccagcagcagaatgggccaggcccccagccagagcctgctgccccccgcccaggaccagcccagaagccccgtgcccagcgccttcagcgaccagagcagatgcctgatcgcccagaccacccccgtggccggcagccagagcctgagcagcggcgccgtggccaccaccaccagcagcgccggcgaccacaacggcatgctgagcgtgcccgcccccggcgtgccccacagcgacgtgggcgagccccccgccagcaccggcgcccagcagcccagcgccctggccgccctgcagcccgccaaggagagaagaagcagcagcagcagcagcagcagcagcagcagcagcagcagcagcagcagcagcagcagcagcagcagcagcagcggcagcagcagcagcgacagcgagggcagcagcctgcccgtgcagcccgaggtggccctgaagagagtgcccagccccacccccgcccccaaggaggccgtgagagagggcagaccccccgagcccacccccgccaagagaaagagaagaagcagcagcagcagcagcagcagcagcagcagcagcagcagcagcagcagcagcagcagcagcagcagcagcagcagcagcagcagcagcagcagcagcagcagcagcagcagcagcagcagcagccccagccccgccaagcccggcccccaggccctgcccaagcccgccagccccaagaagcccccccccggcgagagaagaagcagaagccccagaaagcccatcgacagcctgagagacagcagaagcctgagctacagccccgtggagagaagaagacccagcccccagcccagccccagagaccagcagagcagcagcagcgagagaggcagcagaagaggccagagaggcgacagcagaagccccagccacaagagaagaagagagacccccagccccagacccatgagacacagaagcagcagaagcccctag

SEQ ID NO: 190695 - DNA, 7005 bp, Artificial Sequence
  derived and/or modified sequence
atgtacaacggcatcggcctgcccacccccagaggcagcggcaccaacggctacgtgcagagaaacctgagcctggtgagaggcagaagaggcgagagacccgactacaagggcgaggaggagctgagaagactggaggccgccctggtgaagagacccaaccccgacatcctggaccacgagagaaagagaagagtggagctgagatgcctggagctggaggagatgatggaggagcagggctacgaggagcagcagatccaggagaaggtggccaccttcagactgatgctgctggagaaggacgtgaaccccggcggcaaggaggagacccccggccagagacccgccgtgaccgagacccaccagctggccgagctgaacgagaagaagaacgagagactgagagccgccttcggcatcagcgacagctacgtggacggcagcagcttcgacccccagagaagagccagagaggccaagcagcccgcccccgagccccccaagccctacagcctggtgagagagagcagcagcagcagaagccccacccccaagcagaagaagaagaagaagaagaaggacagaggcagaagaagcgagagcagcagccccagaagagagagaaagaagagcagcaagaagaagaagcacagaagcgagagcgagagcaagaagagaaagcacagaagccccacccccaagagcaagagaaagagcaaggacaagaagagaaagagaagcagaagcaccacccccgcccccaagagcagaagagcccacagaagcaccagcgccgacagcgccagcagcagcgacaccagcagaagcagaagcagaagcgccgccgccaagacccacaccaccgccctggccggcagaagccccagccccgccagcggcagaagaggcgagggcgacgcccccttcagcgagcccggcaccaccagcacccagagacccagcagccccgagaccgccaccaagcagcccagcagcccctacgaggacaaggacaaggacaagaaggagaagagcgccaccagacccagccccagccccgagagaagcagcaccggccccgagccccccgcccccacccccctgctggccgagagacacggcggcagcccccagcccctggccaccacccccctgagccaggagcccgtgaacccccccagcgaggccagccccaccagagacagaagcccccccaagagccccgagaagctgccccagagcagcagcagcgagagcagcccccccagcccccagcccaccaaggtgagcagacacgccagcagcagccccgagagccccaagcccgcccccgcccccggcagccacagagagatcagcagcagccccaccagcaagaacagaagccacggcagagccaagagagacaagagccacagccacacccccagcagaagaatgggcagaagcagaagccccgccaccgccaagagaggcagaagcagaagcagaacccccaccaagagaggccacagcagaagcagaagcccccagtggagaagaagcagaagcgcccagagatggggcagaagcagaagcccccagagaagaggcagaagcagaagcccccagagacccggctggagcagaagcagaaacacccagagaagaggcagaagcagaagcgccagaagaggcagaagccacagcagaagccccgccaccagaggcagaagcagaagcagaacccccgccagaagaggcagaagcagaagcagaacccccgccagaagaagaagcagaagcagaacccccaccagaagaagaagcagaagcagaacccccgccagaagaggcagaagcagaagcagaacccccgccagaagaagaagcagaaccagaagccccgtgagaagaagaagcagaagcagaagccccgccagaagaagcggcagaagcagaagcagaacccccgccagaagaggcagaagcagaagcagaacccccgccagaagaggcagaagcagaagcagaacccccgccagaagaagcggcagaagcagaagcagaacccccgccagaagaggcagaagcagaagcagaacccccagaagaggcagaagcagaagcagaagcctggtgagaagaggcagaagccacagcagaaccccccagagaagaggcagaagcggcagcagcagcgagagaaagaacaagagcagaaccagccagagaagaagcagaagcaacagcagccccgagatgaagaagagcagaatcagcagcagaagaagcagaagcctgagcagccccagaagcaaggccaagagcagactgagcctgagaagaagcctgagcggcagcagcccctgccccaagcagaagagccagaccccccccagaagaagcagaagcggcagcagccagcccaaggccaagagcagaaccccccccagaagaagcagaagcagcagcagccccccccccaagcagaagagcaagacccccagcagacagagccacagcagcagcagcccccaccccaaggtgaagagcggcaccccccccagacagggcagcatcaccagcccccaggccaacgagcagagcgtgaccccccagagaagaagctgcttcgagagcagccccgaccccgagctgaagagcagaacccccagcagacacagctgcagcggcagcagcccccccagagtgaagagcagcaccccccccagacagagccccagcagaagcagcagcccccagcccaaggtgaaggccatcatcagccccagacagagaagccacagcggcagcagcagccccagccccagcagagtgaccagcagaaccacccccagaagaagcagaagcgtgagcccctgcagcaacgtggagagcagactgctgcccagatacagccacagcggcagcagcagccccgacaccaaggtgaagcccgagaccccccccagacagagccacagcggcagcatcagcccctaccccaaggtgaaggcccagaccccccccggccccagcctgagcggcagcaagagcccctgcccccaggagaagagcaaggacagcctggtgcagagctgccccggcagcctgagcctgtgcgccggcgtgaagagcagcaccccccccggcgagagctacttcggcgtgagcagcctgcagctgaagggccagagccagaccagccccgaccacagaagcgacaccagcagccccgaggtgagacagagccacagcgagagccccagcctgcagagcaagagccagaccagccccaagggcggcagaagcagaagcagcagccccgtgaccgagctggccagcagaagccccatcagacaggacagaggcgagttcagcgccagccccatgctgaagagcggcatgagccccgagcagagcagattccagagcgacagcagcagctaccccaccgtggacagcaacagcctgctgggccagagcagactggagaccgccgagagcaaggagaagatggccctgcccccccaggaggacgccaccgccagcccccccagacagaaggacaagttcagccccttccccgtgcaggacagacccgagagcagcctggtgttcaaggacaccctgagaaccccccccagagagagaagcggcgccggcagcagccccgagaccaaggagcagaacagcgccctgcccaccagcagccaggacgaggagctgatggaggtggtggagaagagcgaggagcccgccggccagatcctgagccacctgagcagcgagctgaaggagatgagcaccagcaacttcgagagcagccccgaggtggaggagagacccgccgtgagcctgaccctggaccagagccagagccaggccagcctggaggccgtggaggtgcccagcatggccagcagctggggcggcccccacttcagccccgagcacaaggagctgagcaacagccccctgagagagaacagcttcggcagccccctggagttcagaaacagcggccccctgggcaccgagatgaacaccggcttcagcagcgaggtgaaggaggacctgaacggccccttcctgaaccagctggagaccgaccccagcctggacatgaaggagcagagcaccagaagcagcggccacagcagcagcgagctgagccccgacgccgtggagaaggccggcatgagcagcaaccagagcatcagcagccccgtgctggacgccgtgcccagaacccccagcagagagagaagcagcagcgccagcagccccgagatgaaggacggcctgcccagaacccccagcagaagaagcagaagcggcagcagccccggcctgagagacggcagcggcacccccagcagacacagcctgagcggcagcagccccggcatgaaggacatccccagaacccccagcagaggcagaagcgagtgcgacagcagccccgagcccaaggccctgccccagacccccagacccagaagcagaagccccagcagccccgagctgaacaacaagtgcctgaccccccagagagagagaagcggcagcgagagcagcgtggaccagaagaccgtggccagaacccccctgggccagagaagcagaagcggcagcagccaggagctggacgtgaagcccagcgccagcccccaggagagaagcgagagcgacagcagccccgacagcaaggccaagaccagaacccccctgagacagagaagcagaagcggcagcagccccgaggtggacagcaagagcagactgagccccagaagaagcagaagcggcagcagccccgaggtgaaggacaagcccagagccgcccccagagcccagagcggcagcgacagcagccccgagcccaaggcccccgcccccagagccctgcccagaagaagcagaagcggcagcagcagcaagggcagaggccccagccccgagggcagcagcagcaccgagagcagccccgagcacccccccaagagcagaaccgccagaagaggcagcagaagcagccccgagcccaagaccaagagcagaaccccccccagaagaagaagcagcagaagcagccccgagctgaccagaaaggccagactgagcagaagaagcagaagcgccagcagcagccccgagaccagaagcagaaccccccccagacacagaagaagccccagcgtgagcagccccgagcccgccgagaagagcagaagcagcagaagaagaagaagcgccagcagccccagaaccaagaccaccagcagaagaggcagaagccccagccccaagcccagaggcctgcagagaagcagaagcagaagcagaagagagaagaccagaaccaccagaagaagagacagaagcggcagcagccagagcaccagcagaagaagacagagaagcagaagcagaagcagagtgaccagaagaagaagaggcggcagcggctaccacagcagaagccccgccagacaggagagcagcagaaccagcagcagaagaagaagaggcagaagcagaaccccccccaccagcagaaagagaagcagaagcagaaccagccccgccccctggaagagaagcagaagcagagccagccccgccacccacagaagaagcagaagcagaacccccctgatcagcagaagaagaagcagaagcagaaccagccccgtgagcagaagaagaagcagaagcagaaccagcgtgaccagaagaagaagcagaagcagagccagccccgtgagcagaagaagaagcagaagcagaaccccccccgtgaccagaagaagaagcagaagcagaacccccaccaccagaagaagaagcagaagcagaaccccccccgtgaccagaagaagaagcagaagcagaaccccccccgtgaccagaagaagaagcagaagcagaaccagccccatcaccagaagaagaagcagaagcagaaccagccccgtgaccagaagaagaagcagaagcagaaccagccccgtgaccagaagaagaagcagaagcagaaccagccccgtgaccagaagaagaagcagaagcagaaccccccccgcccaggaccagcccagaagccccgtgcccagcgccttcagcgaccagagcagatgcctgatcgcccagaccacccccgtggccggcagccagagcctgagcagcggcgccgtggccaccaccaccagcagcgccggcgaccacaacggcatgctgagcgtgcccgcccccggcgtgccccacagcgacgtgggcgagccccccgccagcaccggcgcccagcagcccagcgccctggccgccctgcagcccgccaaggagagaagaagcagcagcagcagcagcagcagcagcagcagcagcagcagcagcagcagcagcagcagcagcagcagcagcagcggcagcagcagcagcgacagcgagggcagcagcctgcccgtgcagcccgaggtggccctgaagagagtgcccagccccacccccgcccccaaggaggccgtgagagagggcagaccccccgagcccacccccgccaagagaaagagaagaagcagcagcagcagcagcagcagcagcagcagcagcagcagcagcagcagcagcagcagcagcagcagcagcagcagcagcagcagcagcagcagcagcagcagcagcagcagcagcagcagcagccccagccccgccaagcccggcccccaggccctgcccaagcccgccagccccaagaagcccccccccggcgagagaagaagcagaagccccagaaagcccatcgacagcctgagagacagcagaagcctgagctacagccccgtggagagaagaagacccagcccccagcccagccccagagaccagcagagcagcagcagcgagagaggcagcagaagaggccagagaggcgacagcagaagccccagccacaagagaagaagagagacccccagccccagacccatgagacacagaagcagcagaagcccctag

SEQ ID NO: 190696 - DNA, 6036 bp, Artificial Sequence
  derived and/or modified sequence
atgaagaagagcagaatcagcagcagaagaagcagaagcctgagcagccccagaagcaaggccaagagcagactgagcctgagaagaagcctgagcggcagcagcccctgccccaagcagaagagccagaccccccccagaagaagcagaagcggcagcagccagcccaaggccaagagcagaaccccccccagaagaagcagaagcagcagcagccccccccccaagcagaagagcaagacccccagcagacagagccacagcagcagcagcccccaccccaaggtgaagagcggcaccccccccagacagggcagcatcaccagcccccaggccaacgagcagagcgtgaccccccagagaagaagctgcttcgagagcagccccgaccccgagctgaagagcagaacccccagcagacacagctgcagcggcagcagcccccccagagtgaagagcagcaccccccccagacagagccccagcagaagcagcagcccccagcccaaggtgaaggccatcatcagccccagacagagaagccacagcggcagcagcagccccagccccagcagagtgaccagcagaaccacccccagaagaagcagaagcgtgagcccctgcagcaacgtggagagcagactgctgcccagatacagccacagcggcagcagcagccccgacaccaaggtgaagcccgagaccccccccagacagagccacagcggcagcatcagcccctaccccaaggtgaaggcccagaccccccccggccccagcctgagcggcagcaagagcccctgcccccaggagaagagcaaggacagcctggtgcagagctgccccggcagcctgagcctgtgcgccggcgtgaagagcagcaccccccccggcgagagctacttcggcgtgagcagcctgcagctgaagggccagagccagaccagccccgaccacagaagcgacaccagcagccccgaggtgagacagagccacagcgagagccccagcctgcagagcaagagccagaccagccccaagggcggcagaagcagaagcagcagccccgtgaccgagctggccagcagaagccccatcagacaggacagaggcgagttcagcgccagccccatgctgaagagcggcatgagccccgagcagagcagattccagagcgacagcagcagctaccccaccgtggacagcaacagcctgctgggccagagcagactggagaccgccgagagcaaggagaagatggccctgcccccccaggaggacgccaccgccagcccccccagacagaaggacaagttcagccccttccccgtgcaggacagacccgagagcagcctggtgttcaaggacaccctgagaaccccccccagagagagaagcggcgccggcagcagccccgagaccaaggagcagaacagcgccctgcccaccagcagccaggacgaggagctgatggaggtggtggagaagagcgaggagcccgccggccagatcctgagccacctgagcagcgagctgaaggagatgagcaccagcaacttcgagagcagccccgaggtggaggagagacccgccgtgagcctgaccctggaccagagccagagccaggccagcctggaggccgtggaggtgcccagcatggccagcagctggggcggcccccacttcagccccgagcacaaggagctgagcaacagccccctgagagagaacagcttcggcagccccctggagttcagaaacagcggccccctgggcaccgagatgaacaccggcttcagcagcgaggtgaaggaggacctgaacggccccttcctgaaccagctggagaccgaccccagcctggacatgaaggagcagagcaccagaagcagcggccacagcagcagcgagctgagccccgacgccgtggagaaggccggcatgagcagcaaccagagcatcagcagccccgtgctggacgccgtgcccagaacccccagcagagagagaagcagcagcgccagcagccccgagatgaaggacggcctgcccagaacccccagcagaagaagcagaagcggcagcagccccggcctgagagacggcagcggcacccccagcagacacagcctgagcggcagcagccccggcatgaaggacatccccagaacccccagcagaggcagaagcgagtgcgacagcagccccgagcccaaggccctgccccagacccccagacccagaagcagaagccccagcagccccgagctgaacaacaagtgcctgaccccccagagagagagaagcggcagcgagagcagcgtggaccagaagaccgtggccagaacccccctgggccagagaagcagaagcggcagcagccaggagctggacgtgaagcccagcgccagcccccaggagagaagcgagagcgacagcagccccgacagcaaggccaagaccagaacccccctgagacagagaagcagaagcggcagcagccccgaggtggacagcaagagcagactgagccccagaagaagcagaagcggcagcagccccgaggtgaaggacaagcccagagccgcccccagagcccagagcggcagcgacagcagccccgagcccaaggcccccgcccccagagccctgcccagaagaagcagaagcggcagcagcagcaagggcagaggccccagccccgagggcagcagcagcaccgagagcagccccgagcacccccccaagagcagaaccgccagaagaggcagcagaagcagccccgagcccaagaccaagagcagaaccccccccagaagaagaagcagcagaagcagccccgagctgaccagaaaggccagactgagcagaagaagcagaagcgccagcagcagccccgagaccagaagcagaaccccccccagacacagaagaagccccagcgtgagcagccccgagcccgccgagaagagcagaagcagcagaagaagaagaagcgccagcagccccagaaccaagaccaccagcagaagaggcagaagccccagccccaagcccagaggcctgcagagaagcagaagcagaagcagaagagagaagaccagaaccaccagaagaagagacagaagcggcagcagccagagcaccagcagaagaagacagagaagcagaagcagaagcagagtgaccagaagaagaagaggcggcagcggctaccacagcagaagccccgccagacaggagagcagcagaaccagcagcagaagaagaagaggcagaagcagaaccccccccaccagcagaaagagaagcagaagcagaaccagccccgccccctggaagagaagcagaagcagagccagccccgccacccacagaagaagcagaagcagaacccccctgatcagcagaagaagaagcagaagcagaaccagccccgtgagcagaagaagaagcagaagcagaaccagcgtgaccagaagaagaagcagaagcagagccagccccgtgagcagaagaagaagcagaagcagaaccccccccgtgaccagaagaagaagcagaagcagaacccccaccaccagaagaagaagcagaagcagaaccccccccgtgaccagaagaagaagcagaagcagaaccccccccgtgaccagaagaagaagcagaagcagaaccagccccatcaccagaagaagaagcagaagcagaaccagccccgtgaccagaagaagaagcagaagcagaaccagccccgtgaccagaagaagaagcagaagcagaaccagccccgtgaccagaagaagaagcagaagcagaaccccccccgccatcagaagaagaagcagaagcagaacccccctgctgcccagaaagagaagcagaagcagaagccccctggccatcagaagaagaagcagaagcagaacccccagaaccgccagaggcaagagaagcctgaccagaagcccccccgccatcagaagaagaagcgccagcggcagcagcagcgacagaagcagaagcgccaccccccccgccaccagaaaccacagcggcagcagaaccccccccgtggccctgaacagcagcagaatgagctgcttcagcagacccagcatgagccccacccccctggacagatgcagaagccccggcatgctggagcccctgggcagcagcagaacccccatgagcgtgctgcagcaggccggcggcagcatgatggacggccccggccccagaatccccgaccaccagagaaccagcgtgcccgagaaccacgcccagagcagaatcgccctggccctgaccgccatcagcctgggcaccgccagacccccccccagcatgagcgccgccggcctggccgccagaatgagccaggtgcccgcccccgtgcccctgatgagcctgagaaccgcccccgccgccaacctggccagcagaatccccgccgccagcgccgccgccatgaacctggccagcgccagaacccccgccatccccaccgccgtgaacctggccgacagcagaacccccgccgccgccgccgccatgaacctggccagccccagaaccgccgtggcccccagcgccgtgaacctggccgaccccagaacccccaccgcccccgccgtgaacctggccggcgccagaacccccgccgccctggccgccctgagcctgaccggcagcggcaccccccccaccgccgccaactaccccagcagcagcagaaccccccaggcccccgccagcgccaacctggtgggccccagaagcgcccacgccaccgcccccgtgaacatcgccggcagcagaaccgccgccgccctggcccccgccagcctgaccagcgccagaatggcccccgccctgagcggcgccaacctgaccagccccagagtgcccctgagcgcctacgagagagtgagcggcagaaccagcccccccctgctggacagagccagaagcagaaccccccccagcgcccccagccagagcagaatgaccagcgagagagcccccagccccagcagcagaatgggccaggcccccagccagagcctgctgccccccgcccaggaccagcccagaagccccgtgcccagcgccttcagcgaccagagcagatgcctgatcgcccagaccacccccgtggccggcagccagagcctgagcagcggcgccgtggccaccaccaccagcagcgccggcgaccacaacggcatgctgagcgtgcccgcccccggcgtgccccacagcgacgtgggcgagccccccgccagcaccggcgcccagcagcccagcgccctggccgccctgcagcccgccaaggagagaagaagcagcagcagcagcagcagcagcagcagcagcagcagcagcagcagcagcagcagcagcagcagcagcagcagcggcagcagcagcagcgacagcgagggcagcagcctgcccgtgcagcccgaggtggccctgaagagagtgcccagccccacccccgcccccaaggaggccgtgagagagggcagaccccccgagcccacccccgccaagagaaagagaagaagcagcagcagcagcagcagcagcagcagcagcagcagcagcagcagcagcagcagcagcagcagcagcagcagcagcagcagcagcagcagcagcagcagcagcagcagcagcagcagcagcagccccagccccgccaagcccggcccccaggccctgcccaagcccgccagccccaagaagcccccccccggcgagagaagcctgctgcccgtgagccccagccccagacacagcctgccccacgtggccagaggcaccttcctgaagagaaccagcggctacttcccccccctgcacaagagcttcggcaccccctgcggcctgcaggacaaggccccccccctgagagagtggagagtgagactgttcaccaacggcccctgccccccctgcgtgctgctgctgcccgcccccacccacgccctgtgcagcagccacacccagagactggccgtgtag

SEQ ID NO: 190697 - protein, 418 aa, Artificial Sequence
  derived and/or modified sequence
MATSEQSICQARASVMVYDDTSKKWVPIKPGQQGFSRINIYHNTASNTFRVVGVKLQDQQVVINYSIVKGLKYNQATPTFHQWRDARQVYGLNFASKEEATTFSNAMLFALNIMNSQEGGPSSQRQVQNGPSPDEMDIQRRQVMEQHQQQRQESLERRTSATGPILPPGHPSSAASAPVSCSGPPPPPPPPVPPPPTGATPPPPPPLPAGGAQGSSHDESSMSGLAAAIAGAKLRRVQRPEDASGGSSPSGTSKSDANRASSGGGGGGLMEEMNKLLAKRRKAASQSDKPAEKKEDESQMEDPSTSPSPGTRAASQPPNSSEAGRKPWERSNSVEKPVSSILSRTPSVAKSPEAKSPLQSQPHSRMKPAGSVNDMALDAFDLDRMKQEILEEVVRELHKVKEEIIDAIRQELSGISTT

SEQ ID NO: 190698 - protein, 416 aa, Artificial Sequence
  derived and/or modified sequence
MSEQSICQARASVMVYDDTSKKWVPIKPGQQGFSRINIYHNTASNTFRVVGVKLQDQQVVINYSIVKGLKYNQATPTFHQWRDARQVYGLNFASKEEATTFSNAMLFALNIMNSQEGGPSSQRQVQNGPSPDEMDIQRRQVMEQHQQQRQESLERRTSATGPILPPGHPSSAASAPVSCSGPPPPPPPPVPPPPTGATPPPPPPLPAGGAQGSSHDESSMSGLAAAIAGAKLRRVQRPEDASGGSSPSGTSKSDANRASSGGGGGGLMEEMNKLLAKRRKAASQSDKPAEKKEDESQMEDPSTSPSPGTRAASQPPNSSEAGRKPWERSNSVEKPVSSILSRTPSVAKSPEAKSPLQSQPHSRMKPAGSVNDMALDAFDLDRMKQEILEEVVRELHKVKEEIIDAIRQELSGISTT

SEQ ID NO: 190699 - protein, 381 aa, Artificial Sequence
  derived and/or modified sequence
MATSEQSICQARASVMVYDDTSKKWVPIKPGQQGFSRINIYHNTASNTFRVVGVKLQDQQVVINYSIVKGLKYNQATPTFHQWRDARQVYGLNFASKEEATTFSNAMLFALNIMNSQEGGPSSQRQVQNGPSPDEMDIQRRQVMEQHQQQRQESLERRTSATGPILPPGHPSSAASAPVSCSGAPSGLAAAIAGAKLRRVQRPEDASGGSSPSGTSKSDANRASSGGGGGGLMEEMNKLLAKRRKAASQSDKPAEKKEDESQMEDPSTSPSPGTRAASQPPNSSEAGRKPWERSNSVEKPVSSILSRTPSVAKSPEAKSPLQSQPHSRMKPAGSVNDMALDAFDLDRMKQEILEEVVRELHKVKEEIIDAIRQELSGISTT

SEQ ID NO: 190700 - DNA, 1257 bp, Artificial Sequence
  derived and/or modified sequence
atggccaccagcgagcagagcatctgccaggccagagccagcgtgatggtgtacgacgacaccagcaagaagtgggtgcccatcaagcccggccagcagggcttcagcagaatcaacatctaccacaacaccgccagcaacaccttcagagtggtgggcgtgaagctgcaggaccagcaggtggtgatcaactacagcatcgtgaagggcctgaagtacaaccaggccacccccaccttccaccagtggagagacgccagacaggtgtacggcctgaacttcgccagcaaggaggaggccaccaccttcagcaacgccatgctgttcgccctgaacatcatgaacagccaggagggcggccccagcagccagagacaggtgcagaacggccccagccccgacgagatggacatccagagaagacaggtgatggagcagcaccagcagcagagacaggagagcctggagagaagaaccagcgccaccggccccatcctgccccccggccaccccagcagcgccgccagcgcccccgtgagctgcagcggcccccccccccccccccccccccccgtgccccccccccccaccggcgccaccccccccccccccccccccctgcccgccggcggcgcccagggcagcagccacgacgagagcagcatgagcggcctggccgccgccatcgccggcgccaagctgagaagagtgcagagacccgaggacgccagcggcggcagcagccccagcggcaccagcaagagcgacgccaacagagccagcagcggcggcggcggcggcggcctgatggaggagatgaacaagctgctggccaagagaagaaaggccgccagccagagcgacaagcccgccgagaagaaggaggacgagagccagatggaggaccccagcaccagccccagccccggcaccagagccgccagccagccccccaacagcagcgaggccggcagaaagccctgggagagaagcaacagcgtggagaagcccgtgagcagcatcctgagcagaacccccagcgtggccaagagccccgaggccaagagccccctgcagagccagccccacagcagaatgaagcccgccggcagcgtgaacgacatggccctggacgccttcgacctggacagaatgaagcaggagatcctggaggaggtggtgagagagctgcacaaggtgaaggaggagatcatcgacgccatcagacaggagctgagcggcatcagcaccacctag

SEQ ID NO: 190701 - DNA, 1251 bp, Artificial Sequence
  derived and/or modified sequence
atgagcgagcagagcatctgccaggccagagccagcgtgatggtgtacgacgacaccagcaagaagtgggtgcccatcaagcccggccagcagggcttcagcagaatcaacatctaccacaacaccgccagcaacaccttcagagtggtgggcgtgaagctgcaggaccagcaggtggtgatcaactacagcatcgtgaagggcctgaagtacaaccaggccacccccaccttccaccagtggagagacgccagacaggtgtacggcctgaacttcgccagcaaggaggaggccaccaccttcagcaacgccatgctgttcgccctgaacatcatgaacagccaggagggcggccccagcagccagagacaggtgcagaacggccccagccccgacgagatggacatccagagaagacaggtgatggagcagcaccagcagcagagacaggagagcctggagagaagaaccagcgccaccggccccatcctgccccccggccaccccagcagcgccgccagcgcccccgtgagctgcagcggcccccccccccccccccccccccccgtgccccccccccccaccggcgccaccccccccccccccccccccctgcccgccggcggcgcccagggcagcagccacgacgagagcagcatgagcggcctggccgccgccatcgccggcgccaagctgagaagagtgcagagacccgaggacgccagcggcggcagcagccccagcggcaccagcaagagcgacgccaacagagccagcagcggcggcggcggcggcggcctgatggaggagatgaacaagctgctggccaagagaagaaaggccgccagccagagcgacaagcccgccgagaagaaggaggacgagagccagatggaggaccccagcaccagccccagccccggcaccagagccgccagccagccccccaacagcagcgaggccggcagaaagccctgggagagaagcaacagcgtggagaagcccgtgagcagcatcctgagcagaacccccagcgtggccaagagccccgaggccaagagccccctgcagagccagccccacagcagaatgaagcccgccggcagcgtgaacgacatggccctggacgccttcgacctggacagaatgaagcaggagatcctggaggaggtggtgagagagctgcacaaggtgaaggaggagatcatcgacgccatcagacaggagctgagcggcatcagcaccacctag

SEQ ID NO: 190702 - DNA, 1978 bp, Artificial Sequence
  derived and/or modified sequence
gtgttagcttcttgtttctctattttctacctaggtttcagtttttcacttgggtttgtttcccctttgtctctggttcagcttccttttcctgtttggttttaagtaggctataaaaatcaagttgctgtcttcagagggtctgtggtcctctgatcaacataggctggtgggagtacaggactcgcctcctcagggttccctgtgctgccacttttcagccatggccacaagtgaacagagtatctgccaagcccgggcttccgtgatggtctacgatgacaccagtaagaaatgggtaccaatcaaacctggccagcagggattcagccggatcaacatctaccacaacactgccagcaacaccttcagagtcgttggagtcaagttgcaggatcagcaggttgtgatcaattattcaatcgtgaaagggctgaagtacaatcaggccacgccaaccttccaccagtggcgagatgcccgccaggtctacggcttaaactttgcaagtaaagaagaggcaaccacgttctccaatgcaatgctgtttgccctgaacatcatgaattcccaagaaggaggcccctccagccagcgtcaggtgcagaatggcccctctcctgatgagatggacatccagagaagacaagtgatggagcagcaccagcagcagcgtcaggaatctctagaaagaagaacctcggccacagggcccatcctcccaccaggacatccttcatctgcagccagcgcccccgtctcatgtagtgggcctccaccgccccccccacccccagtcccacctccacccactggggctaccccacctcccccacccccactgccagccggaggagcccaggggtccagccacgacgagagctccatgtcaggactggccgctgccatagctggggccaagctgagaagagtccaacggccagaagacgcatctggaggctccagtcccagtgggacctcaaagtccgatgccaaccgggcaagcagcgggggtggcggaggaggcctcatggaggaaatgaacaaactgctggccaagaggagaaaagcagcctcccagtcagacaagccagccgagaagaaggaagatgaaagccaaatggaagatcctagtacctccccctctccggggacccgagcagccagccagccacctaactcctcagaggctggccggaagccctgggagcggagcaactcggtggagaagcctgtgtcctcgattctgtccagaaccccgtctgtggcaaagagccccgaagctaagagcccccttcagtcgcagcctcactctaggatgaagcctgctgggagcgtgaatgacatggccctggatgccttcgacttggaccggatgaagcaggagatcctagaggaggtggtgagagagctccacaaggtgaaggaggagatcatcgacgccatcaggcaggagctgagtgggatcagcaccacgtaaggggccggcctcgctgcgctgattcgtcgagcccatccggcgacagaggacagccagaagcccagccagccccagactccagtgcaccagagcacgcacaggagcctgggcgcgctgctgtgaaacgtcctgacctgtgatcacacatgacagtgaggaaaccaagtgcaactcctgggtttttttagattctgcctgacacggaacaccaggtctgctcgtcttttttgtgttttatatttgcttatttaaggtacatttctttgggtttctagagacgcccctaagtcacctgcttcattagacggtttccaggttttctcccaggtgacgctgttagcgcctcagctggcggtgacagccggcccagcgtggcgccaccacacaccgcagagctgtccaggcacagctccgtccccagcgctcatggtgttgaaactgtctgtcatgcaccacggtgtctgtgtccacacagtaataaacggtttactgtccgca

SEQ ID NO: 190703 - DNA, 2353 bp, Artificial Sequence
  derived and/or modified sequence
ggtggggccccgcgccttttgtgtcgggctttgaccgccgcgcgcgctcattcacctcagcggccgcgggcggaggggcgcacgcgcgcgcagtcccctcggagggcggtggggcgaacagcaacgcgcgtaccctagctcttggctgctgtgctgagactagcccgcgcgcccgcgcgcctctccctcgaggactcggagccgcccgcgcactcgccaggggccgccgccccgagtctcaggcggacgcgcacgcgttcccgccgcccggaccccagccggctcgccccccgcccccccatcccccggcggcggcccccaggcacgcgcccgcgcacacgccggcccgggcacgcgcccgccaagatggcaggggccggggcccagctgtcagtcgccgccgccgcggcccttccccgcagctagcggccccgacgcccacccggagaagatgagcccccgctgccccccgcagcccagtcagacgcggagccgccgcgcccggggccggctcccccgctagcgcccgcgtcccgcgccccgccgccgccgccgccgccgccgggtcgcccctggcccggcgcgcccgtccccggcagcgacaatgagtgaacagagtatctgccaagcccgggcttccgtgatggtctacgatgacaccagtaagaaatgggtaccaatcaaacctggccagcagggattcagccggatcaacatctaccacaacactgccagcaacaccttcagagtcgttggagtcaagttgcaggatcagcaggttgtgatcaattattcaatcgtgaaagggctgaagtacaatcaggccacgccaaccttccaccagtggcgagatgcccgccaggtctacggcttaaactttgcaagtaaagaagaggcaaccacgttctccaatgcaatgctgtttgccctgaacatcatgaattcccaagaaggaggcccctccagccagcgtcaggtgcagaatggcccctctcctgatgagatggacatccagagaagacaagtgatggagcagcaccagcagcagcgtcaggaatctctagaaagaagaacctcggccacagggcccatcctcccaccaggacatccttcatctgcagccagcgcccccgtctcatgtagtgggcctccaccgccccccccacccccagtcccacctccacccactggggctaccccacctcccccacccccactgccagccggaggagcccaggggtccagccacgacgagagctccatgtcaggactggccgctgccatagctggggccaagctgagaagagtccaacggccagaagacgcatctggaggctccagtcccagtgggacctcaaagtccgatgccaaccgggcaagcagcgggggtggcggaggaggcctcatggaggaaatgaacaaactgctggccaagaggagaaaagcagcctcccagtcagacaagccagccgagaagaaggaagatgaaagccaaatggaagatcctagtacctccccctctccggggacccgagcagccagccagccacctaactcctcagaggctggccggaagccctgggagcggagcaactcggtggagaagcctgtgtcctcgattctgtccagaaccccgtctgtggcaaagagccccgaagctaagagcccccttcagtcgcagcctcactctaggatgaagcctgctgggagcgtgaatgacatggccctggatgccttcgacttggaccggatgaagcaggagatcctagaggaggtggtgagagagctccacaaggtgaaggaggagatcatcgacgccatcaggcaggagctgagtgggatcagcaccacgtaaggggccggcctcgctgcgctgattcgtcgagcccatccggcgacagaggacagccagaagcccagccagccccagactccagtgcaccagagcacgcacaggagcctgggcgcgctgctgtgaaacgtcctgacctgtgatcacacatgacagtgaggaaaccaagtgcaactcctgggtttttttagattctgcctgacacggaacaccaggtctgctcgtcttttttgtgttttatatttgcttatttaaggtacatttctttgggtttctagagacgcccctaagtcacctgcttcattagacggtttccaggttttctcccaggtgacgctgttagcgcctcagctggcggtgacagccggcccagcgtggcgccaccacacaccgcagagctgtccaggcacagctccgtccccagcgctcatggtgttgaaactgtctgtcatgcaccacggtgtctgtgtccacacagtaataaacggtttactgtccgca

SEQ ID NO: 190704 - DNA, 1257 bp, Artificial Sequence
  derived and/or modified sequence
atggctacttccgagcagagcatttgccaggctcgggccagtgtcatggtgtacgatgacacttcaaaaaaatgggttcctatcaagccaggacaacagggattttccaggattaatatttaccataataccgcttctaacacctttagagtggtcggtgtgaaattgcaggaccagcaggtcgtcatcaactatagtatcgtcaagggactgaagtacaaccaagcgactccgaccttccaccagtggcgcgatgcccgccaggtatacgggctcaattttgccagtaaggaagaggccactacctttagtaacgcaatgttgtttgccttaaacataatgaattctcaagagggcggcccctcatcccagcggcaggtgcagaacggtccatcccctgatgagatggacatccagcgccgtcaggtgatggagcaacaccagcaacagcgtcaggaaagccttgaacgaagaacttcggcaaccggccccattctgccgccgggtcatccctccagcgcggcttccgccccagtatcatgctctggacccccccccccgcctcctccacctgtgccgccacctcccacaggagctacaccacccccccccccgccactaccagctgggggcgcacaggggagctcccacgacgaatcttctatgtcaggacttgccgccgcaatcgcaggggctaagttaagaagggtgcagcgaccagaggacgcttcgggcggcagttcacccagcgggacgtccaagtctgatgccaacagggcatcttcggggggaggcgggggtggcttgatggaggagatgaacaagttgctggccaaacgacgtaaggctgcttcccagtctgacaaaccagcagagaagaaagaagacgagagccagatggaggacccctctacaagcccgtcgcctggaactcgagccgcctctcagccccccaatagctcggaggccggccgcaaaccctgggaaaggagtaactctgtggaaaagccagtgagctcgatcttgagtcgtactccttcagttgctaaatcaccggaggcaaagtcccccctgcagtcgcagccgcattcccggatgaagccagcaggcagcgttaatgacatggccctggacgcttttgatctggacagaatgaagcaagaaatactggaggaggtggtgagagagctccacaaagtgaaggaagagattatcgatgccataagacaggaacttagcggcatcagtactacttag

SEQ ID NO: 190705 - DNA, 1251 bp, Artificial Sequence
  derived and/or modified sequence
atgtctgagcagagtatctgccaggcaagagcatcagtgatggtgtatgacgatacaagcaagaagtgggtcccaattaagcccgggcagcagggattcagtcgcattaatatctatcacaacaccgcaagcaacacctttcgcgtcgtcggggtgaagctccaggaccaacaagtcgtgataaactattcgatcgtgaagggattgaaatacaaccaggccacgccgacattccaccagtggagagacgcccgccaggtttacggactgaactttgctagcaaagaggaggccaccactttctctaatgcaatgctattcgctctcaatataatgaatagccaagaaggcggtccgtcttctcagcggcaggtgcagaacggaccaagtcccgacgaaatggacatccaacggcgccaggtcatggaacagcatcagcagcagagacaggaaagcctcgagcgcaggaccagcgccaccggtcccattctgccgccaggtcatccaagttccgccgcatctgcgccggtgagctgcagcggccctccccccccaccacctccacccgtgcctccccctcctaccggcgcaacaccacctccgcctcccccactccccgctggcggagctcagggttcttcacatgacgagtcctctatgagcgggctcgccgcggccattgctggcgcaaaacttcgaagggtgcagaggcctgaggacgcttccggaggtagtagtcccagcggaaccagcaaaagcgacgctaaccgggcatcttccggagggggaggcggagggctgatggaggaaatgaataagctgctggctaagcggcgtaaagccgcctctcagtccgataagcctgctgagaaaaaggaggacgagagccaaatggaagacccctcaacttctccaagcccaggcacaagggccgcttcacagcctcctaatagcagtgaggccgggcggaaaccgtgggagcgttcaaattccgtggagaaaccagtctccagtatactgtctcggacaccttccgtggctaagtcaccagaggctaagagccctctgcagagccagccccacagcaggatgaagcccgcaggctctgtcaacgatatggcgctcgacgccttcgatctagatagaatgaagcaagagattttggaagaggttgtgagggagttgcacaaggtgaaggaagaaatcatagacgcaatcaggcaagagctgtccggaatcagcactacttag

SEQ ID NO: 190706 - DNA, 1257 bp, Artificial Sequence
  derived and/or modified sequence
atggccaccagcgagcagagcatctgccaggcccgggcctctgtgatggtgtatgatgacaccagcaagaagtgggtgcccatcaagccaggccagcagggcttcagccgcatcaacatctaccacaacacagccagcaacaccttccgggtggtgggcgtgaagctgcaggaccagcaggtggtgatcaactacagcatcgtgaagggcctgaagtacaaccaggccacccccaccttccaccagtggagagatgcccggcaggtgtatggcctgaactttgccagcaaggaggaggccaccaccttcagcaatgccatgctgtttgccctgaacatcatgaacagccaggagggcggccccagcagccagaggcaggtgcagaatggccccagcccagatgagatggacatccagaggcggcaggtgatggagcagcaccagcagcagaggcaggagagcctggagaggaggaccagcgccaccggccccatcctgcccccaggccaccccagcagcgctgccagcgcccctgtgtcctgcagcggccccccacctcctcctcctcctcctgtgcccccacctccaactggagccaccccacctcctcctccacccctgcctgctggaggagcccagggcagcagccatgatgagagctccatgagcggcctggccgccgccatcgccggggccaagctgcggcgggtgcagaggccagaagatgccagcggcggcagcagccccagcggcaccagcaagagtgatgccaacagagccagcagcggcggcggcggcggcggcctgatggaggagatgaacaagctgctggccaagaggaggaaggccgccagccagagcgacaagccagctgagaagaaggaggatgagagccagatggaggaccccagcaccagccccagccctggcaccagggctgccagccagccccccaacagcagcgaggccggcaggaagccctgggagaggagcaacagcgtggagaagcctgtgagcagcatcctgagcaggaccccatctgtggccaagagccctgaggccaagagccccctgcagagccagccccacagcaggatgaagccagctggctctgtgaatgacatggccctggatgcctttgacctggacaggatgaagcaggagatcctggaggaggtggtgcgggagctgcacaaggtgaaggaggagatcattgatgccatccggcaggagctgagcggcatcagcaccacctag

SEQ ID NO: 190707 - DNA, 1251 bp, Artificial Sequence
  derived and/or modified sequence
atgtctgagcagagcatctgccaggcccgggcctctgtgatggtgtatgatgacaccagcaagaagtgggtgcccatcaagccaggccagcagggcttcagccgcatcaacatctaccacaacacagccagcaacaccttccgggtggtgggcgtgaagctgcaggaccagcaggtggtgatcaactacagcatcgtgaagggcctgaagtacaaccaggccacccccaccttccaccagtggagagatgcccggcaggtgtatggcctgaactttgccagcaaggaggaggccaccaccttcagcaatgccatgctgtttgccctgaacatcatgaacagccaggagggcggccccagcagccagaggcaggtgcagaatggccccagcccagatgagatggacatccagaggcggcaggtgatggagcagcaccagcagcagaggcaggagagcctggagaggaggaccagcgccaccggccccatcctgcccccaggccaccccagcagcgctgccagcgcccctgtgtcctgcagcggccccccacctcctcctcctcctcctgtgcccccacctccaactggagccaccccacctcctcctccacccctgcctgctggaggagcccagggcagcagccatgatgagagctccatgagcggcctggccgccgccatcgccggggccaagctgcggcgggtgcagaggccagaagatgccagcggcggcagcagccccagcggcaccagcaagagtgatgccaacagagccagcagcggcggcggcggcggcggcctgatggaggagatgaacaagctgctggccaagaggaggaaggccgccagccagagcgacaagccagctgagaagaaggaggatgagagccagatggaggaccccagcaccagccccagccctggcaccagggctgccagccagccccccaacagcagcgaggccggcaggaagccctgggagaggagcaacagcgtggagaagcctgtgagcagcatcctgagcaggaccccatctgtggccaagagccctgaggccaagagccccctgcagagccagccccacagcaggatgaagccagctggctctgtgaatgacatggccctggatgcctttgacctggacaggatgaagcaggagatcctggaggaggtggtgcgggagctgcacaaggtgaaggaggagatcattgatgccatccggcaggagctgagcggcatcagcaccacctag

SEQ ID NO: 190708 - DNA, 1257 bp, Artificial Sequence
  derived and/or modified sequence
atggccaccagcgagcagagcatctgccaggcccgggccagcgtgatggtctacgacgatacatcaaagaagtgggtgccaataaagcctggacaacagggattcagccgcattaatatataccacaatacagcaagcaacacatttagggtggtgggggttaaactccaggaccagcaggtcgtgataaattattctatcgttaagggactcaagtataaccaggctaccccaaccttccaccagtggcgtgatgctaggcaggtttacgggctgaactttgcatcaaaagaagaagcgaccactttcagtaacgccatgttatttgcgttgaacatcatgaactctcaagaaggcggaccatccagccaacgccaggttcagaatgggcctagtcctgacgagatggatattcagaggcgccaagtaatggagcaacaccaacaacagagacaggagtcattagagcggaggacctctgctacagggccgatcctaccacccggccacccgtcttcagcggcttctgccccagtgtcttgttcggggcctccccctcctcctcctcccccagtcccccccccccctacaggcgcgactcctccccctcctccccccctgcctgctggaggtgctcagggaagctcccatgatgaatcctctatgtcaggtctagctgcggcgatcgcaggtgccaagcttcggagagtacagagacctgaggatgctagtggaggctcatccccctcaggaacttctaagagtgatgcgaatcgggctagtagcgggggtggcggaggtggactgatggaagagatgaataaactgcttgccaagaggaggaaagctgcctctcagagcgacaaacccgctgaaaagaaggaagacgaatcccagatggaagatccctctacctcaccatctccggggacacgggctgcctcacagcctccaaattcatccgaagccgggagaaaaccatgggaacgcagtaattctgtcgaaaaacccgtgtcctctatattgtccaggactccttccgtcgctaagtcccctgaagcaaagagccccctacaaagccagccacactcacggatgaagccagcaggatccgtcaatgacatggcgttggacgcgttcgacctcgatcggatgaagcaggaaatcctggaggaagtcgtgcgggagctgcacaaggtaaaggaggaaattattgacgctatcaggcaagaactctcaggcataagtacaacctag

SEQ ID NO: 190709 - DNA, 1251 bp, Artificial Sequence
  derived and/or modified sequence
atgagcgagcagagcatctgccaggcccgggccagcgtgatggtgtacgatgataccagtaagaaatgggtacctataaagcctggtcaacagggattcagccgtattaacatctaccataatacagcctccaacacattcagagtcgtaggcgtgaaactgcaagaccagcaggtagtcattaactactcaatcgtgaaaggtctgaaatataatcaagccacccctacgttccatcagtggagggacgcacggcaagtttacggcttgaactttgcctctaaggaggaggcaaccactttttcaaacgcgatgttgttcgccttgaacatcatgaactcacaagaaggcggtccgagttcacagcgccaggtacagaacgggccctcccccgatgagatggatatccagcgacggcaagttatggagcagcaccaacagcaacgacaagagtcactggagcggagaacctctgctaccggtccgatcctccctccaggacatccctcatcagcagcctcagctccggtttcttgtagcgggcctccaccaccgcctccccctcccgtccctcccccacctaccggagcgacaccacctccccctccaccgctccccgctggcggggcacaggggtccagccacgacgaaagcagcatgtccggactggcagcagccatagcaggcgctaagctccgtcgagttcagaggcccgaggacgcgagcggtgggtcaagtccctctggcacgtctaagtccgacgcaaatcgggccagcagcggagggggggggggaggactcatggaagaaatgaacaaactgctggctaagcgcaggaaggccgcttctcagtctgataagccagcagagaagaaagaggatgagtctcagatggaggacccttcaacgagcccgtcacccggcacacgggcggcgtcgcagccacctaatagctccgaggccggtcggaaaccatgggagcgatcgaacagcgttgaaaagccagtaagctctatacttagtcgtaccccatctgttgccaagagccccgaggcgaaatcccctctccagagccagccacattcccggatgaagccggccggaagcgtgaatgacatggcattagatgcattcgacctcgatcggatgaagcaagagatcttggaagaagtggtgcgcgagttgcataaggttaaggaagaaatcattgacgccattcgtcaagagctttccgggattagcactacttag

SEQ ID NO: 190710 - DNA, 1257 bp, Artificial Sequence
  derived and/or modified sequence
atggctacttctgagcagtctatttgccaagccagagcctcagtgatggtgtatgatgataccagcaaaaaatgggtgcccataaagcccggacagcaaggattctcacgaatcaacatttatcataacacggcctctaacaccttccgtgtggtgggagtgaagctacaagatcagcaagtcgtgatcaattactccattgtgaagggactaaaatacaaccaggcgacaccgaccttccatcagtggcgtgacgcacgacaggtctatgggctgaatttcgcttccaaggaagaagctactacattctccaatgccatgttatttgcgcttaacattatgaattctcaggagggagggccatccagccagcggcaggtgcaaaatggacctagccccgacgaaatggacatccagaggcggcaggttatggagcaacaccaacagcagagacaggagagtctcgaacgccgaacttccgccactggacccattctgccacccggtcacccttccagcgctgcctctgctcccgtttcttgcagtggtcccccacctcccccacctcctcccgtgccccctccacctacgggtgccaccccccctcctcccccaccgctcccggctgggggagcacagggcagctcccacgatgaaagttctatgtcaggattggcggctgctatagcaggagcaaagctgcgcagagtgcagcggccagaagacgcctcaggcggaagttcaccctcagggactagcaaatctgacgctaacagggcgtcaagcggtggcggagggggaggccttatggaggagatgaataaactgcttgctaaacggaggaaggccgcaagtcaaagcgacaaacctgccgagaaaaaggaggacgaaagccagatggaggacccttccacaagccccagccctggaacacgcgcagcatcgcaacctccgaactcatctgaggctggaagaaagccttgggagcgcagcaactcggtggagaagccagtttcaagcattctatcaagaacccccagcgtagcgaagagtccagaggctaagagcccactgcagtcccagccccattcaaggatgaaacccgcaggttcagtcaacgatatggccctggacgccttcgacctggaccgtatgaaacaggagatccttgaagaggtcgtgcgcgagctccacaaggtgaaagaagagatcattgatgcaatcagacaggagctgtctgggatcagtacaacctag

SEQ ID NO: 190711 - DNA, 1251 bp, Artificial Sequence
  derived and/or modified sequence
atgtccgagcagtccatttgtcaagccagagccagtgtcatggtatacgatgatacctccaagaaatgggtgcctattaagccaggacaacagggattctcccggataaacatctatcacaataccgcgtcgaacacatttcgtgtggtaggcgtgaaactccaagaccaacaggtcgtcatcaactacagtattgttaaaggcctgaaatacaaccaggcaacgccaacattccatcagtggcgagacgccagacaggtttacggcctcaactttgcttccaaagaggaagcaacaaccttcagtaacgcgatgctctttgccctcaacatcatgaactcccaggaaggagggcctagttcccagcgccaggtgcaaaatggcccttccccagatgaaatggatatccagaggcgacaggtgatggaacagcatcagcagcaaagacaggagagcctcgaacgtaggacttcagccaccggacctattctgcccccaggtcacccttctagtgccgcttctgctccagttagctgttctgggccacccccacctccacccccacccgttcctcctcctccaacgggtgccacacccccaccgccaccgcctttacctgctggtggggctcaggggagctcacacgatgaatcttctatgtcagggctggcagccgctatcgctggggcaaagttgaggcgggtgcagcgcccagaggacgcatccgggggttcttctccctccggcacttctaaatctgatgccaacagagcatccagcggtggcggagggggtggccttatggaggagatgaacaaattgttggccaagagaagaaaagccgcatcccagagcgacaagcctgcggaaaagaaggaggacgaaagccagatggaggaccccagtaccagtccaagtcctggaaccagagcggcatcccagcctcccaacagcagcgaggccggacgaaagccttgggagaggtcgaactctgtcgaaaagcccgtatcctcaatcttaagtcgtacaccatccgtggcaaagtcccccgaagcaaaatcgccactccagagtcaaccacactctcgtatgaagcctgcagggtcggtgaatgatatggctctcgacgccttcgatttagacaggatgaagcaggagatccttgaggaagtggttagagagttgcacaaggtgaaggaggagatcatcgacgctatccgccaggaactttccggcatctccaccacttag

SEQ ID NO: 190712 - DNA, 2928 bp, Artificial Sequence
  derived and/or modified sequence
atggatctgaactccgcgtccacagtcgttttacaggtgctgactcaggctacgtcacaggacactgcggttctcaaaccagccgaagagcaacttaagcagtgggagacacagcccggattctattcagtcctcctcaacatttttaccaaccacaccctggatatcaacgtcagatggctcgctgttctgtatttcaagcacggaatagaccggtactggcggcgggtggctccccacgcgctcagtgaggaggagaaaacaaccctgagagccgggctcatcactaacttcaatgagccaatcaatcaaatcgctacacagatcgcagttcttattgctaaagtggcccgcttggactgtcctaggcaatggcccgagctcatacccactctcattgagagcgttaaggtgcaggatgacctgcgccagcaccgcgccctgctgactttctaccatgtgacaaagacgctcgcgtcgaaacgattggctgccgaccgtaagctcttctatgacctagctagcgggatctataatttcgcttgctccctgtggaatcatcacacggacaccttcctgcaagaggtgagcagcgggaacgaggcagctatcctgagtagcttagagagaacgctgcttagtctgaaagttttgcgtaaattgacagttaacggctttgttgaaccccacaaaaacatggaagtgatgggcttcctgcatggcattttcgagaggctgaaacagttcctcgagtgctcgcggagcataggcaccgacaatgtttgtcgagaccgactcgaaaagacaatcattctattcaccaaagtgctgttggatttcttggatcagcacccattcagctttacgcccctaatccagagaagtcttgaattttctgtgtcttatgtgtttaccgaggtcggagagggtgttacttttgaaaggttcatagtgcagtgcatgaatcttatcaaaatgattgtgaaaaactacgcatataaaccgtcgaaaaattttgaggacagcagccccgagacgctggaagcgcacaagattaaaatggcttttttcacttaccctactctcaccgagatatgtcgacgcctggtatcccattactttttactaaccgaggaggagctcaccatgtgggaggaggaccctgagggtttcacagtggaggaaacaggaggcgatagttggaagtattcattacgcccatgcacagaagtgctttttatcgatatctttcacgagtacaaccagaccctcacacctgtgttactagagatgatgcagacactgcaggggccaacgaacgtggaggatatgaacgccctgctcattaaggatgctgtctataatgcagtgggtctggctgcatacgaactgtttgactccgtggactttgaccaatggttcaaaaatcagctgctgcccgaactgcaagttatccataacaggtacaagcccctgagacggcgcgtgatatggctcatcggtcagtggatttcggtcaagtttaaaagtgacctgcgcccaatgctttacgaagcgatctgtaacctgctgcaagatcaagacctggtggtacggatcgagaccgcaacaactctgaagttgactgttgatgactttgaattccggacagaccaattcctgccttatctcgagacaatgtttactctgctgtttcaactgctccagcaggttacggagtgtgatacaaagatgcacgtgttgcacgtcctgtcctgcgtaattgaacgcgtgaacatgcagattcgaccctatgtgggatgcctggttcagtaccttcccttgctttggaaacaaagtgaggaacataatatgctccgatgcgctatattaacgactctgatccacctggtccagggtctcggagcagactcgaagaacctgtatcccttcctcctgccagtgattcagctatcaaccgatgtgtctcagccccctcacgtatacttgctcgaagatggtctcgagctatggctcgtgacactggaaaacagcccttgtatcacccctgaactattacgaatttttcagaacatgtcccctctgctggagttgtcatccgagaacttacgtacatgctttaaaatcatcaacgggtacatatttctgagctccaccgagttcctgcaaacttatgccgttgggctgtgtcagagcttttgtgaattgctcaaagaaattacaactgaaggccaagtgcaggttctgaaggtcgtagaaaatgcactgaaggttaaccctatcctgggtcctcagatgttccaacctatcctcccttatgtgtttaagggaataattgaaggggaacgataccccgttgtgatgtcaacctatttaggtgttatgggccgggttttgctgcagaacacgtccttcttcagctccctattgaatgaaatggctcacaagtttaatcaggaaatggaccagctcttaggaaacatgatagagatgtgggtagaccgcatggataacataacgcagcccgagagaaggaagctgagtgctttagccttactgtccttgttaccatccgataactccgtcattcaggacaagttttgcggtattataaacatatcggtggaggggctccatgatgtgatgaccgaagaccccgaaacaggaacttataaggattgtatgctgatgagccatctcgaagaacccaaggtgaccgaggatgaagagcctcctacagaacaggataaacgcaagaaaatgcttgctttgaaggaccccgtacatactgtctcgcttcagcagtttatctacgagaagctgaaggcgcagcaagagatgttaggagaacaggggtttcaaagtttaatggagacagttgacacggaaatcgttacccagcttcaggagtttctgcagggtttctag

SEQ ID NO: 190713 - DNA, 195 bp, Artificial Sequence
  derived and/or modified sequence
atggatctaaatagtgcgagtaccgtggttctgcaggtgctgactcaggccactagccaggatactgcagtgctgaagccagccgaagagcaactcaagcagtgggaaacccagccgggattttatagcgtgctacttaatatcttcaccaaccacacactggatattaatgtcaggtggttggctgtgttatag

SEQ ID NO: 190714 - DNA, 489 bp, Artificial Sequence
  derived and/or modified sequence
atggatttgaattcagcttccaccgtggtactgcaggttttgacgcaggccactagtcaagacacagccgttctcaagcctgctgaggagcagctgaaacagtgggagacccagcccggcttctattcagtcttactcaatatctttacaaatcatacgcttgatattaatgtgcgctggcttgctgttctttatttcaaacatgggattgaccggtactggaggagggtagcaccccacgcactgtctgaggaggagaaaacaactttgcgggcgggcctgatcaccaattttaacgaacctatcaaccagattgccacacaaatcgccgttctcatagcaaaggtggcaaggctggactgcccacgccaatggccagaacttattccgaccctcatcgagagtgtgaaggtgcaggacgacttgaggcagcaccgcgccttgctgacattttatcacgtcacaaaaaccctggccagcaagaggtag

SEQ ID NO: 190715 - DNA, 450 bp, Artificial Sequence
  derived and/or modified sequence
atggatttgaacagcgcaagtaccgttgtgctacaggtgctgactcaggccacgagccaggatacagccgtcctgaagcctgcagaggagcagcttaagcaatgggaaactcagccagggttctattcagtgttacttaacatttttacaaatcatacactggacattaacgtgcgctggcttgcggtcctgtactttaagcatggcatcgatcgatattggaggagagtggcccctcacgcactgtccgaagaggagaagacaacactccgcgctggactgattactaattttaatgagccaataaaccagatagcgacccagatcgccgtcttaatcgccaaggtggcccggctcgattgccccagacagtggccagagctgatacctaccttgattgaatccgtgaaagtgcaagatgatctccgtcaacaccgcgcccttctgtag

SEQ ID NO: 190716 - DNA, 1425 bp, Artificial Sequence
  derived and/or modified sequence
atgatgcagaccctgcagggtccgaccaatgtggaggacatgaatgctttgcttataaaggacgctgtttataatgctgtcggcctggcagcttacgagctattcgattctgtggactttgatcaatggtttaagaaccagcttctgcccgaactgcaggtaattcacaatagatacaagccactgaggaggcgggtgatttggctgatcggtcagtggatctccgtcaagtttaagagtgatctcaggccaatgttgtatgaggctatctgtaatcttttgcaagatcaggacctggtggtccggatcgagactgctaccaccttgaagctcacagtggatgactttgaattccgtactgatcaatttctcccatacttggaaacaatgtttactctcttgttccagctgctgcagcaagttactgaatgcgatactaaaatgcacgtgcttcacgtcctgagctgcgttatcgaacgggtgaatatgcaaatacgaccatacgtcgggtgtttagtccagtacttgccgctgctttggaagcagtccgaggaacacaacatgctccgctgtgccatcctgaccaccctgattcacttggtgcagggattgggtgcagactccaagaatttgtacccctttttacttcccgttattcagctcagtaccgatgtctctcaaccacctcacgtttacttgctggaagatggcctcgagctttggctggtgaccctcgagaactcaccatgtataacacccgagctactaaggatttttcaaaacatgtcaccactgctcgaactgtctagtgagaatctgcgtacatgctttaagattataaatgggtatatcttcctttcaagcactgaatttctgcaaacttatgcagttggactgtgccagtccttctgtgaactgcttaaggagatcaccaccgagggtcaggtgcaggtcctgaaagttgtcgaaaatgcccttaaagtcaatcctatactggggccacagatgtttcagccgatactgccatacgttttcaagggcattatcgagggagaaagatatcctgtcgtcatgtcgacctacttgggtgtgatgggtagagtgttgttgcaaaacaccagcttcttctcaagcctcctcaacgaaatggcccacaagtttaatcaggaaatggatcagctcctggggaatatgatcgagatgtgggtggaccggatggataacatcactcagcctgagcgaaggaaactcagcgctcttgccttgttatccttgctgcctagtgacaactcagtaattcaggacaagttttgtgggatcataaacatatcagtggagggcctgcatgatgtcatgacagaggaccctgagacgggcacatacaaggattgcatgctgatgagccatctggaagaacctaaatag

SEQ ID NO: 190717 - DNA, 2953 bp, Artificial Sequence
  derived and/or modified sequence
ttatagatatattccatgaatataatcagactcttactcctgtacttctagaaatgatgcaaacacttcaaggacccacaaatgtggaagatatgaatgcactgttaatcaaagatgctgtgtataatgctgttggattagctgcttatgagctctttgacagtgttgattttgatcagtggtttaaaaaccagcttcttccagaattacaagtcattcacaataggtataagccattgcgacgcagggtgatttggctcatcggtcagtggatttctgtgaaattcaagtctgacttaagacccatgctttatgaagcaatctgtaacttgcttcaagatcaagatttagtggtccgtattgaaacagctacaactttgaagttaactgttgatgattttgaatttagaacagatcagtttctaccgtatttggaaaccatgttcacactactttttcagttactgcagcaagttacagaatgtgacacaaagatgcatgttttgcatgtcctttcttgtgtgatcgaaagagtcaacatgcagatacgaccatatgtgggatgtttggtacaatatttgcccctcctttggaagcagagtgaagaacacaatatgttgagatgtgctattttgacaacacttattcatcttgttcagggattaggagcagacagcaagaacctgtaccctttcctgctcccagttattcaactgagtacagatgtttcacagcctccacatgtttatcttctggaagatggtttagaattatggttagtaactttggaaaacagtccatgtattacaccagagttgcttcgtatatttcagaatatgtcaccacttcttgaactaagttcagaaaatcttagaacttgctttaagatcatcaatggttatatctttttatcatcaacagaatttttacagacatacgcagtaggtctatgccagtccttttgtgaacttttaaaggaaattactacagaaggtcaagttcaggtgctcaaggttgtggaaaatgcccttaaagtgaacccaatactaggtccacaaatgtttcaaccgattttaccctatgttttcaagggtattatagaaggggagaggtatcctgtagtgatgtccacgtatcttggagttatgggtcgagttctactacaaaacactagttttttttcttcactacttaatgagatggcccataaatttaatcaggagatggaccagcttttgggaaatatgattgaaatgtgggttgatcgaatggacaacattacccagcctgaaagaagaaaactttcagctttggctttgctctctcttctgccatctgataatagtgttatccaagataaattctgtgggattataaacatttcagtagaaggcctgcatgatgtcatgacggaagatcctgaaacaggaacttataaagactgtatgttgatgtctcatcttgaggaaccaaagtaacagaagatgaagaaccacccacagaacaagataagaggaaaaagatgctggccctgaaggaccctgttcatacagtgtcactgcagcagttcatctacgagaagctcaaggcacagcaggagatgctaggagaacaaggtttccagtccctcatggaaacagtggatacggagattgtcacccagctacaggagtttttgcaaggattctaagagcacatgacatgtggctgcctcccctttcagaaacaagctgagtaacccagcctgccgtttgtatgtgagagcctgctgagatgaagaaatcacttcatgaaaataagcaaagaccacacattttttactacaaaatgtaaaggataaatgtaaatcctgcataactaaaatcacaaacctattcctcaaaagaatttaattttatatttatgagggggcccttcactaaaaagtacatgtaaaagtacatttgatgacaatagctgcttagtttcctgttaagagaagaaactttatcttttaattatgtgctcttaatatttgaagatgagagttaatacctgagatgtttttctgcaaccaaaattcattaaatttggctgccttatcctttttttaagctaatgaaactacaggtttgaaaaatgacaaagctgttcagatgatgctattaaagaaatgtgtgtactaagcaaaaatatataaatagtgacaaatacacattaccaagcttatcttgcaagggagttattttcatctaacatagaaagtgtgttttatcagacaaatgcttttattttcattctaataatttgatacagaaattagtaaaggcatttttttctttttttttccagtaaatacattgggtctataaatgtgcatttgtaagggccacaaaagtgaacgtgtggtactgtagtaccacgtgggagacctctggttatggtttagtcctagttcctttgttactcctgtgagcaccgagaagaactgggcgactcccagtcccacctgtgctgtgacagtcccacgtggctatgacagactgtttagtacttacccttctcaggttcctcagtgcaggggtgcatcagggcctcaataataggggtatacctgggaggatccagcagtaatccccagggtactaggattactagtactctgatggaactagtcttccttccttattcctcgaacatgcagtacataaaaaggggaaaaggagaaaaaaaaagccttactttgttttacttgccatttattgtaaggaaactttaaagcattttttaggaaatactcaaaagcaaggttggaaaatgttttatctttctatagaaagttgggtacagtatgtaactgcgggaaacccactgcccctttgtaagctgtggaacccaaactgtatggggatatttgatgttttcagaaagaggaagaaaatatggtccaaattaaattttccaaagatacctc

SEQ ID NO: 190718 - DNA, 2928 bp, Artificial Sequence
  derived and/or modified sequence
atggacctgaacagcgccagcacagtggtgctgcaggtgctgacccaggccaccagccaggacacagctgtgctgaagccagctgaggagcagctgaagcagtgggagacccagcccggcttctacagcgtgctgctgaacatcttcaccaaccacaccctggacatcaacgtgcgctggctggccgtgctgtacttcaagcacggcatcgaccgctactggaggagagtggccccccacgccctgtctgaggaggagaagaccaccctgcgggccggcctcatcaccaacttcaatgagcccatcaaccagatcgccacccagattgctgtgctgattgccaaggtggcccggctggactgcccccggcagtggccagagctgatccccaccctgattgaatctgtgaaggtgcaggatgacctgcggcagcaccgggccctgctgaccttctaccacgtgaccaagaccctggccagcaagaggctggccgctgacaggaagctgttctatgacctggccagcggcatctacaactttgcctgcagcctgtggaaccaccacacagacaccttcctgcaggaggtgtcctctggaaatgaggccgccatcctgagcagcctggagaggaccctgctgagcctgaaggtgctgaggaagctgactgtgaatggatttgtggagccccacaagaacatggaggtgatgggcttcctgcacggcatctttgagcggctgaagcagttcctggagtgcagccgcagcatcggcacagacaacgtgtgccgggaccggctggagaagaccatcatcctcttcaccaaggtgctgctggacttcctggaccagcaccccttctccttcacccccctcatccagaggagcctggagttctctgtgtcctatgtgttcacagaggtgggggagggcgtgacctttgagcgcttcatcgtgcagtgcatgaacctgatcaagatgattgtgaagaactatgcctacaagcccagcaagaactttgaggacagcagccctgagaccctggaggcccacaagatcaagatggccttcttcacctaccccaccctgacagagatctgccggcggctggtgagccactacttcctgctgacagaggaggagctgaccatgtgggaggaggaccctgagggcttcaccgtggaggagaccggcggggacagctggaagtacagcctgcggccctgcacagaggtgctcttcatcgacatcttccacgagtacaaccagaccctgacccctgtgctgctggagatgatgcagaccctgcagggccccaccaacgtggaggacatgaatgccctgctgatcaaggatgctgtgtacaatgctgtgggcctggccgcctatgagctgtttgattctgtggactttgaccagtggttcaagaaccagctgctgcctgagctgcaggtgatccacaaccgctacaagcccctgcggcggcgggtcatctggctgattggccagtggatctctgtgaagttcaagagtgacctgcggcccatgctgtatgaggccatctgcaacctgctgcaggaccaggacctggtggtgagaattgaaacagccaccaccctgaagctgactgtggatgactttgagttcagaacagaccagttcctgccctacctggagaccatgttcaccctgctcttccagctgctgcagcaggtgacagaatgtgacaccaagatgcacgtgctgcacgtgctgagctgtgtgattgaaagagtgaacatgcagatccggccctacgtgggctgcctggtgcagtacctgcccctgctgtggaagcagagcgaggagcacaacatgctgcgctgtgccatcctgaccaccctcatccacctggtgcagggcctgggcgctgacagcaagaacctgtaccccttcctgctgcctgtgatccagctgagcacagatgtgtcccagcccccccacgtgtacctgctggaggatggcctggagctgtggctggtgaccctggagaacagcccctgcatcaccccagagctgctgcgcatcttccagaacatgagccccctgctggagctgagcagcgagaacctgcggacctgcttcaagatcatcaatggctacatcttcctgagcagcacagagttcctgcagacctatgctgtgggcctgtgccagagcttctgtgagctgctgaaggagatcaccacagagggccaggtgcaggtgctgaaggtggtggagaatgccctgaaggtgaaccccatcctgggcccccagatgttccagcccatcctgccctacgtgttcaagggcatcattgaaggagagcgctaccctgtggtgatgagcacctacctgggcgtgatgggccgggtgctgctgcagaacaccagcttcttcagcagcctgctgaatgagatggcccacaagttcaaccaggagatggaccagctgctgggcaacatgattgagatgtgggtggacaggatggacaacatcacccagcctgagaggaggaagctgagcgccctggccctgctgagcctgctgcccagcgacaacagcgtcatccaggacaagttctgtggcatcatcaacatctctgtggagggcctgcatgatgtgatgacagaggaccctgagaccggcacctacaaggactgcatgctgatgagccacctggaggagcccaaggtgacagaagatgaggagcccccaacagagcaggacaagaggaagaagatgctggccctgaaggaccctgtgcacacagtgtccctgcagcagttcatctatgagaagctgaaggcccagcaggagatgctgggggagcagggcttccagagcctgatggagaccgtggacacagagatcgtgacccagctgcaggagttcctgcagggcttctag

SEQ ID NO: 190719 - DNA, 195 bp, Artificial Sequence
  derived and/or modified sequence
atggacctgaacagcgccagcacagtggtgctgcaggtgctgacccaggccaccagccaggacacagctgtgctgaagccagctgaggagcagctgaagcagtgggagacccagcccggcttctacagcgtgctgctgaacatcttcaccaaccacaccctggacatcaacgtgcgctggctggccgtgctgtag

SEQ ID NO: 190720 - DNA, 489 bp, Artificial Sequence
  derived and/or modified sequence
atggacctgaacagcgccagcacagtggtgctgcaggtgctgacccaggccaccagccaggacacagctgtgctgaagccagctgaggagcagctgaagcagtgggagacccagcccggcttctacagcgtgctgctgaacatcttcaccaaccacaccctggacatcaacgtgcgctggctggccgtgctgtacttcaagcacggcatcgaccgctactggaggagagtggccccccacgccctgtctgaggaggagaagaccaccctgcgggccggcctcatcaccaacttcaatgagcccatcaaccagatcgccacccagattgctgtgctgattgccaaggtggcccggctggactgcccccggcagtggccagagctgatccccaccctgattgaatctgtgaaggtgcaggatgacctgcggcagcaccgggccctgctgaccttctaccacgtgaccaagaccctggccagcaagaggtag

SEQ ID NO: 190721 - DNA, 450 bp, Artificial Sequence
  derived and/or modified sequence
atggacctgaacagcgccagcacagtggtgctgcaggtgctgacccaggccaccagccaggacacagctgtgctgaagccagctgaggagcagctgaagcagtgggagacccagcccggcttctacagcgtgctgctgaacatcttcaccaaccacaccctggacatcaacgtgcgctggctggccgtgctgtacttcaagcacggcatcgaccgctactggaggagagtggccccccacgccctgtctgaggaggagaagaccaccctgcgggccggcctcatcaccaacttcaatgagcccatcaaccagatcgccacccagattgctgtgctgattgccaaggtggcccggctggactgcccccggcagtggccagagctgatccccaccctgattgaatctgtgaaggtgcaggatgacctgcggcagcaccgggccctgctgtag

SEQ ID NO: 190722 - DNA, 1425 bp, Artificial Sequence
  derived and/or modified sequence
atgatgcagaccctgcagggccccaccaacgtggaggacatgaatgccctgctgatcaaggatgctgtgtacaatgctgtgggcctggccgcctatgagctgtttgattctgtggactttgaccagtggttcaagaaccagctgctgcctgagctgcaggtgatccacaaccgctacaagcccctgcggcggcgggtcatctggctgattggccagtggatctctgtgaagttcaagagtgacctgcggcccatgctgtatgaggccatctgcaacctgctgcaggaccaggacctggtggtgagaattgaaacagccaccaccctgaagctgactgtggatgactttgagttcagaacagaccagttcctgccctacctggagaccatgttcaccctgctcttccagctgctgcagcaggtgacagaatgtgacaccaagatgcacgtgctgcacgtgctgagctgtgtgattgaaagagtgaacatgcagatccggccctacgtgggctgcctggtgcagtacctgcccctgctgtggaagcagagcgaggagcacaacatgctgcgctgtgccatcctgaccaccctcatccacctggtgcagggcctgggcgctgacagcaagaacctgtaccccttcctgctgcctgtgatccagctgagcacagatgtgtcccagcccccccacgtgtacctgctggaggatggcctggagctgtggctggtgaccctggagaacagcccctgcatcaccccagagctgctgcgcatcttccagaacatgagccccctgctggagctgagcagcgagaacctgcggacctgcttcaagatcatcaatggctacatcttcctgagcagcacagagttcctgcagacctatgctgtgggcctgtgccagagcttctgtgagctgctgaaggagatcaccacagagggccaggtgcaggtgctgaaggtggtggagaatgccctgaaggtgaaccccatcctgggcccccagatgttccagcccatcctgccctacgtgttcaagggcatcattgaaggagagcgctaccctgtggtgatgagcacctacctgggcgtgatgggccgggtgctgctgcagaacaccagcttcttcagcagcctgctgaatgagatggcccacaagttcaaccaggagatggaccagctgctgggcaacatgattgagatgtgggtggacaggatggacaacatcacccagcctgagaggaggaagctgagcgccctggccctgctgagcctgctgcccagcgacaacagcgtcatccaggacaagttctgtggcatcatcaacatctctgtggagggcctgcatgatgtgatgacagaggaccctgagaccggcacctacaaggactgcatgctgatgagccacctggaggagcccaagtag

SEQ ID NO: 190723 - DNA, 2928 bp, Artificial Sequence
  derived and/or modified sequence
atggacctgaacagcgccagcaccgtggtgctgcaggtgctgacccaagcaactagccaggacacagctgtcctcaagcccgccgaggagcagcttaagcagtgggaaacccaacctgggttctatagcgtactgttgaatatcttcactaatcacacattagatattaacgtgagatggctggcagtgctatattttaagcatggtattgatagatattggcgacgggtggcccctcatgctttgtcggaggaggaaaaaaccaccctgcgggccggcctgatcaccaacttcaacgaacctatcaatcagatagcaacacagatcgccgtattgatcgctaaagtcgccagactggattgtccgaggcaatggccagaactaatccctaccctgatagagtctgtcaaagtccaggacgatcttcgccaacatagggccctgttgacattctaccacgtgacaaagaccctggccagtaagaggctggcagccgacaggaagcttttttatgatcttgcatcagggatttacaattttgcgtgttcattgtggaaccatcatactgatacttttctgcaggaagtaagctcaggtaatgaagccgcaatattatcttcgctcgagcgcacgctcctgagcctgaaggtcctgcggaaactgacagtcaatggcttcgtggagccccataagaatatggaggtgatgggctttctgcacggaatttttgagcgcctgaagcagtttctggagtgctctagaagtatcggaacagacaatgtttgcagagatcggctggagaaaactattattctgttcacgaaggtgctgctggatttcctggaccagcatccattttcgtttactccattaattcagcggtcccttgaattcagcgtcagttacgttttcactgaggtgggcgaaggcgtcacttttgagaggttcatcgtgcagtgcatgaaccttatcaaaatgatagtcaagaactatgcttacaagccttccaaaaacttcgaggactcgtctccagaaacactcgaggcacataaaatcaaaatggcgttctttacatatccgacactgacagagatctgtcggcggctggtgagtcattacttcctcctgactgaggaggaattaacaatgtgggaggaggatccagaggggtttacagtagaggagacaggaggcgatagttggaaatattcgctcaggccatgtaccgaggtgttgttcatcgatatattccacgaatataaccaaacactcacacccgtgctactggagatgatgcagacactccagggcccaacaaatgtggaagatatgaatgccctgttaatcaaagacgctgtctataatgcagtcggactggccgcttatgaactgttcgactccgtggacttcgatcagtggttcaaaaaccagctacttccagagctgcaagtcattcataaccggtacaaaccactgagacggcgcgtcatctggctgatcgggcagtggatcagtgtcaagtttaagagtgatctccgccccatgctttacgaggcaatatgtaatctcctgcaagaccaggatctggtggttaggattgaaaccgccaccaccttgaagctgaccgtggacgattttgaatttcgtacagatcagttccttccttatctggaaaccatgttcacgctgctgtttcagctcctgcagcaagtgaccgagtgtgacacaaagatgcacgtgctccatgttctctcctgtgtaattgagcgcgtgaatatgcagatccgtccatatgtgggatgccttgtccagtatttgcccctgctgtggaagcagtccgaagagcataacatgctgcgctgcgcaatcttgactactcttatccaccttgtgcaagggctgggcgcagactcgaagaatctgtaccccttcctcctgccggtgattcaactatccaccgacgtgagtcagccgccacacgtttacttgcttgaagacggcttggagttgtggctggtgacacttgaaaactccccatgtattactccggagctgctcaggattttccagaatatgtcacctctccttgagctatcctctgagaatttgaggacatgcttcaagataatcaatggatacattttcctgtcgagcacagaattcctgcaaacctatgccgttgggctgtgccaatccttttgcgagttgctgaaggagatcacaacagaaggacaggttcaggtcctgaaagttgtggagaacgctttaaaggtcaaccccatcctcggtcctcagatgttccagccgattctgccatacgtgtttaaggggattattgagggggaaagataccctgtcgtcatgagcacctacctgggcgtgatgggaagagtccttctgcagaatacctcgttcttttcaagcctgttgaatgaaatggcccacaagttcaatcaggaaatggaccagcttctcggtaatatgatcgaaatgtgggttgaccgcatggacaacattactcagcctgagcgccgtaagttgagtgccctggctctactgagcctgttgccatcagataattccgttatccaggacaaattttgtgggataattaacatttccgttgaggggttgcacgacgtaatgactgaagaccccgaaactggaacctacaaggattgcatgttaatgtcacatctggaagagccaaaggtgacagaagatgaggaaccacctaccgagcaggacaagcgcaaaaaaatgctagctctgaaggaccctgtgcacacagtatccctccagcaatttatatacgagaagctcaaggcccagcaagaaatgttgggcgagcaggggtttcagtccttaatggaaactgtggatacagaaatcgtgacccaactgcaggagtttcttcagggcttttag

SEQ ID NO: 190724 - DNA, 195 bp, Artificial Sequence
  derived and/or modified sequence
atggacctgaacagcgccagcaccgtggtgctgcaggtgctgacccaggcgacatctcaggacaccgccgtgctgaagcccgcagaggagcaactcaaacagtgggaaacccagcccggtttctactctgtcttgctgaatattttcactaatcacacattagatattaacgtccggtggttagctgtactctag

SEQ ID NO: 190725 - DNA, 489 bp, Artificial Sequence
  derived and/or modified sequence
atggacctgaacagcgccagcaccgtggtgctgcaggtgctgacccaggccacctcccaggataccgctgtactgaaacccgctgaggaacagctgaagcagtgggagactcagccaggtttttacagtgtgctgctaaacatctttacaaaccacacgcttgacatcaacgtgcgctggctggctgttctttactttaaacatggcattgaccgttattggcggcgcgtggcaccgcacgcgctgagcgaagaggagaagacaacactccgagctggactaattacgaactttaacgagccgatcaaccaaatcgcaacccagatagcagtgctgatagctaaggtggcgagactggactgcccacggcaatggccagaattaataccaacactgatcgaatctgtgaaggtacaagatgatctccgccaacaccgggccctattgaccttctaccacgtgacaaaaaccctggcctcaaagcgatag

SEQ ID NO: 190726 - DNA, 450 bp, Artificial Sequence
  derived and/or modified sequence
atggacctgaacagcgccagcaccgtggtgctgcaggtgctgacccaggccacttctcaggacactgccgtgcttaaaccagccgaagaacaactgaagcagtgggaaacccagccagggttctactctgtcctgttgaatattttcaccaaccacacactggacatcaacgtgcgctggctagctgtcctgtattttaagcatggaattgatcggtattggcggcgagtggccccccatgccttaagtgaggaagagaagaccaccctgcgggcgggactgattaccaacttcaacgaaccaattaatcagatcgctacccaaattgcagtgctgattgccaaggtggcccgcctagattgccctaggcagtggcctgaactgattcctactttaatagagtcagttaaggtgcaggacgatttacgtcagcatcgcgccctgctctag

SEQ ID NO: 190727 - DNA, 1425 bp, Artificial Sequence
  derived and/or modified sequence
atgatgcagaccctgcagggccccaccaacgtggaggacatgaacgctctgctgataaaagatgcggtgtacaacgctgtgggccttgccgcttacgaactgttcgacagtgtggactttgaccagtggtttaaaaaccagctgctgccagagctacaagtgatccacaaccgctacaagccactccggcggcgagtgatctggctcattggccagtggatttccgttaaatttaagagtgaccttcgccccatgttgtatgaagcaatctgcaacctgctccaggatcaggatttggtggtgcgtatcgagaccgctacaacactgaaactaaccgtggatgactttgaatttagaactgaccagttcctgccttatctggagacaatgttcacactgctgttccagctactccaacaggtcactgagtgtgacacaaagatgcatgtcctgcatgtactgtcttgtgtgatcgagagggtgaatatgcagattaggccttatgttgggtgccttgtgcagtacctgcccctgttgtggaaacaaagcgaggagcacaatatgctgcgctgcgccatcctgaccacactgatccacctagttcaggggttaggagccgactcaaaaaatctgtatccatttttactcccagtgatccagctgtctactgacgtgtcgcagcccccacacgtgtatctcctagaggacgggctggagctctggcttgtgactctcgagaactctccgtgtattacacccgaactgcttcgtatcttccagaacatgagtcccttgctggagctgagttcagaaaatctcagaacctgcttcaaaataataaatgggtatatctttctgtcatccactgaattcctacagacgtacgcagtgggactgtgtcagtcattctgcgaactgctgaaggagattaccacagaggggcaggtacaggtgttgaaggtggtcgaaaatgccctgaaggttaatcccatactcggccctcaaatgtttcaacccatcctcccgtacgtctttaagggaattatcgagggcgagcgataccccgtcgttatgtcgacctatctcggagttatgggccgggttttgctccaaaacacgagcttctttagttctttgctgaatgagatggcacacaagttcaatcaagagatggaccagctgctgggcaatatgattgaaatgtgggttgatcggatggataacattactcagcctgaaagaagaaagttaagtgccctggccctcctctctttgctcccaagcgataatagcgttatccaggacaagttttgtgggatcatcaacatttctgtggagggactgcacgatgtgatgactgaggatccggagacagggacatacaaggattgcatgttgatgtcccacctggaggaaccaaagtag

SEQ ID NO: 190728 - DNA, 2928 bp, Artificial Sequence
  derived and/or modified sequence
atggatctaaactcagccagtacagtggtgcttcaagttctgacccaggcaacctctcaagacacagccgtgctcaagccagcagaggagcaactgaagcagtgggaaacacagcctggtttttattccgtcctgttgaatatctttacaaatcacaccctggatatcaacgtacggtggctcgctgtcctatactttaagcacggaattgaccggtattggcggcgtgttgcgccacatgcactctcggaggaggagaagacaactctgcgcgcaggtttgattacgaacttcaatgagcccattaatcaaatcgccacgcagattgccgtgctgatagcgaaggtcgcaaggctggattgccctagacaatggcccgagcttattcctactctaatcgaatcagtcaaagtacaggacgacctccggcagcatcgcgcactgttgacattctaccatgtgactaagaccctagctagcaaaagactggcggctgacaggaagttgttttacgatttagccagcgggatctacaacttcgcctgttcgctgtggaaccaccatactgacacttttctgcaggaggtgagcagcgggaatgaggcagccatactgtctagtctcgagcgtacactacttagcttgaaagtgcttagaaagctcacggtcaatggatttgtggaaccgcataaaaacatggaagtaatgggtttcctgcatggtatttttgagcgcctgaagcaattccttgaatgcagtcggtcaattggcaccgataatgtgtgtcgcgatcggctcgaaaagaccattatccttttcaccaaagtgctgctggatttccttgaccagcacccattcagcttcacccccctaattcaaaggagcttagaattttctgtttcttacgtctttaccgaggtgggcgagggcgtcacgttcgaacgttttatcgtgcagtgcatgaatctcattaaaatgattgtcaagaactacgcctacaaacccagtaaaaattttgaagactcctcccccgaaacactggaggcacacaagatcaaaatggcctttttcacatacccaaccttgaccgagatctgtcgcagactcgtgagccactattttctcttaaccgaggaagaactgaccatgtgggaagaggacccagaaggctttacggtcgaagagaccgggggagactcatggaagtactcactgaggccatgtaccgaggtcctgttcattgatatctttcacgaatacaatcaaactctgacccccgtgctcctggaaatgatgcagacactgcaaggaccgaccaacgtcgaagatatgaacgctctgctcatcaaagacgcagtatataacgctgtgggcctggccgcatacgagctctttgatagcgtggacttcgaccaatggttcaagaatcaactgctgccagagcttcaagtcatccacaacagatataaacctctgcggcgacgggtcatttggcttattggacaatggatctccgtgaagttcaaaagcgatctgaggccaatgctctacgaggcaatctgcaatctgctacaggaccaggatttggtggtgaggatcgagactgcaacaactctgaagctgactgtagatgacttcgagttccggaccgatcaattcttaccatacttggagacaatgttcacactgctcttccagctgttgcagcaggtgacagagtgcgataccaagatgcatgtcctgcatgtcctatcttgcgttatcgaaagagtgaatatgcaaatacgcccttatgtagggtgcctagtccagtacctgccattactttggaagcagtcagaagagcataacatgcttagatgcgccattctcaccaccctgattcacctggtgcagggcctgggggcagattcaaaaaatttgtacccctttttactacccgtcatccagttatccacggacgtcagtcaacctcctcacgtgtatcttctggaagatgggctcgagctgtggttagtaacactcgagaacagtccttgtatcaccccagagctcctgcgcatatttcagaacatgagtcccctgctggaacttagctcagagaacctccggacctgtttcaagataatcaacggttacatcttcctcagttccacggagttcctacaaacgtacgctgtgggcctctgccagtccttctgtgaactcttgaaagaaattacaaccgaaggacaagtccaggtgctcaaagtcgtggagaatgccctcaaggtaaatcctatacttggccctcaaatgttccagcccattctaccgtatgtcttcaagggcatcattgagggcgagaggtaccctgtggttatgtcaacttatctgggggtgatggggcgagtactgcttcaaaacaccagtttcttttcctctctcctgaatgaaatggcgcacaaattcaaccaagagatggatcagttgctgggaaatatgatcgagatgtgggtggacagaatggataatataacccagcccgaacgtaggaagctatcagccttggcattgctctcactactgccttcagataacagcgtgatccaagacaagttttgtggtatcatcaatatcagcgtcgagggactgcacgatgtgatgaccgaggatcctgaaacaggcacttacaaagactgcatgttgatgagccacctggaggaaccgaaggtaaccgaagatgaagaaccgcctaccgaacaagataagcggaaaaaaatgctggccctgaaggatcccgtgcacaccgtgagtctccaacaatttatatacgaaaagctcaaggcccagcaggagatgctgggggaacagggattccaaagcttgatggagacggtagacactgagatagtgacccaacttcaagaatttctgcagggcttctag

SEQ ID NO: 190729 - DNA, 195 bp, Artificial Sequence
  derived and/or modified sequence
atggacctcaactctgcttcaactgtggtgctgcaagtgctaacccaggccacctctcaggacacagctgttctgaaacccgcagaagagcagctgaaacagtgggagacccagcccggattttacagtgtgctgcttaatatctttaccaatcatacccttgatattaatgttcgctggcttgctgtgttatag

SEQ ID NO: 190730 - DNA, 489 bp, Artificial Sequence
  derived and/or modified sequence
atggacctgaactcagccagcaccgtagtgctgcaggtactaacacaagccactagtcaggacacagccgtgctcaagcctgcggaggaacagcttaaacagtgggagactcagcccggattctacagtgtgctgctgaatatttttacaaatcacactctcgacatcaatgtgagatggctggcagtgctctactttaaacatgggattgatagatactggcgcagggtggcgcctcacgctctgtcagaagaagagaagaccactttacgggctggtctgattacgaattttaatgagccaattaatcagatcgcaacccagattgcagtgctcatcgccaaggtggcgagattggattgtccaagacagtggcctgaacttatacccacccttattgagtccgtgaaggtgcaggacgacttgcgccagcatcgagcactgctgacgttttaccacgtcactaagactctagcaagtaaacgctag

SEQ ID NO: 190731 - DNA, 450 bp, Artificial Sequence
  derived and/or modified sequence
atggacctcaatagcgcttctactgtggtattgcaggtgcttacacaggctacctcacaggacacagcagtgttaaagcccgctgaagaacagctcaaacagtgggaaacacaacccggtttttatagcgtgttattgaacatctttactaaccatacattggacataaacgttcgatggctggccgtcttgtacttcaagcacgggatcgatcgatattggagacgcgtggcgccacatgccctgagtgaggaggaaaaaaccaccttgagagcaggcctaattactaatttcaatgaacccatcaatcaaatagccacacagatcgcagtcttaattgcgaaagttgctcgattggattgccccagacagtggcccgagttgatacccacgttaattgaatcagtgaaggttcaggatgacttgcggcagcatcgtgccctgctctag

SEQ ID NO: 190732 - DNA, 1425 bp, Artificial Sequence
  derived and/or modified sequence
atgatgcagacactgcaagggcctaccaatgtagaggacatgaacgccctgctgataaaggacgcggtgtataatgcagttggccttgctgcctacgagctatttgactctgtcgacttcgaccaatggtttaagaaccagctgctgcccgagctgcaggttatccataatcggtataaacctctgaggcggcgtgtgatttggttgattgggcagtggatttccgttaagtttaaaagcgacctgaggccaatgctatatgaagccatctgtaacttactgcaggaccaagatctagtggtccggatcgagacagcaaccactttaaagcttacagttgatgacttcgaattccgcacagatcaatttctcccttacctcgaaaccatgtttacactgctgttccagctgttacaacaggtgaccgaatgcgacacaaagatgcacgtcttacatgtgctctcctgtgtgatcgaacgagtcaatatgcagatccgcccttatgtagggtgcttggtgcagtacctgcccctgttgtggaagcaaagcgaagaacataatatgttgaggtgtgccatcctgactaccctaatccacctcgtgcagggcctgggagcagattcaaagaacttgtacccattcctgcttccagtaatccagctatctactgatgtgtcacaaccaccccacgtctacctcctggaggatggcctcgagctctggctggtcacccttgagaactcaccctgcattactcctgagctcttaaggatctttcagaacatgagcccactcttggaactgagcagtgagaacctccgaacctgcttcaagatcatcaacggctacatcttcttgtctagtactgaattcttgcagacctatgccgtgggcttgtgtcaaagcttttgtgagttactgaaggagatcactacagaggggcaggtgcaggtgcttaaagtcgttgagaacgcgctgaaagtcaatcctattttgggccctcagatgtttcaacccatcctgccgtatgtgtttaaaggcatcatcgaaggcgagcggtacccagtggtgatgtccacctacctgggcgtgatgggacgggttctgctgcagaatactagtttctttagcagtctactcaatgagatggcacataaattcaaccaagagatggaccagctcttaggcaatatgatcgagatgtgggtagaccgaatggataatatcacccagccagagagacgcaagctaagcgccctggctcttttaagccttctgcccagcgacaatagcgtgattcaggataaattctgtgggatcatcaatatctccgtcgagggcctacacgacgtgatgacagaggaccccgagaccggcacatacaaggattgtatgcttatgtcccacctcgaggaacctaagtag

SEQ ID NO: 190733 - DNA, 2928 bp, Artificial Sequence
  derived and/or modified sequence
atggacctgaacagcgccagcaccgtggtgctgcaggtgctgacccaggccaccagccaggacaccgccgtgctgaagcccgccgaggagcagctgaagcagtgggagacccagcccggcttctacagcgtgctgctgaacatcttcaccaaccacaccctggacatcaacgtgagatggctggccgtgctgtacttcaagcacggcatcgacagatactggagaagagtggccccccacgccctgagcgaggaggagaagaccaccctgagagccggcctgatcaccaacttcaacgagcccatcaaccagatcgccacccagatcgccgtgctgatcgccaaggtggccagactggactgccccagacagtggcccgagctgatccccaccctgatcgagagcgtgaaggtgcaggacgacctgagacagcacagagccctgctgaccttctaccacgtgaccaagaccctggccagcaagagactggccgccgacagaaagctgttctacgacctggccagcggcatctacaacttcgcctgcagcctgtggaaccaccacaccgacaccttcctgcaggaggtgagcagcggcaacgaggccgccatcctgagcagcctggagagaaccctgctgagcctgaaggtgctgagaaagctgaccgtgaacggcttcgtggagccccacaagaacatggaggtgatgggcttcctgcacggcatcttcgagagactgaagcagttcctggagtgcagcagaagcatcggcaccgacaacgtgtgcagagacagactggagaagaccatcatcctgttcaccaaggtgctgctggacttcctggaccagcaccccttcagcttcacccccctgatccagagaagcctggagttcagcgtgagctacgtgttcaccgaggtgggcgagggcgtgaccttcgagagattcatcgtgcagtgcatgaacctgatcaagatgatcgtgaagaactacgcctacaagcccagcaagaacttcgaggacagcagccccgagaccctggaggcccacaagatcaagatggccttcttcacctaccccaccctgaccgagatctgcagaagactggtgagccactacttcctgctgaccgaggaggagctgaccatgtgggaggaggaccccgagggcttcaccgtggaggagaccggcggcgacagctggaagtacagcctgagaccctgcaccgaggtgctgttcatcgacatcttccacgagtacaaccagaccctgacccccgtgctgctggagatgatgcagaccctgcagggccccaccaacgtggaggacatgaacgccctgctgatcaaggacgccgtgtacaacgccgtgggcctggccgcctacgagctgttcgacagcgtggacttcgaccagtggttcaagaaccagctgctgcccgagctgcaggtgatccacaacagatacaagcccctgagaagaagagtgatctggctgatcggccagtggatcagcgtgaagttcaagagcgacctgagacccatgctgtacgaggccatctgcaacctgctgcaggaccaggacctggtggtgagaatcgagaccgccaccaccctgaagctgaccgtggacgacttcgagttcagaaccgaccagttcctgccctacctggagaccatgttcaccctgctgttccagctgctgcagcaggtgaccgagtgcgacaccaagatgcacgtgctgcacgtgctgagctgcgtgatcgagagagtgaacatgcagatcagaccctacgtgggctgcctggtgcagtacctgcccctgctgtggaagcagagcgaggagcacaacatgctgagatgcgccatcctgaccaccctgatccacctggtgcagggcctgggcgccgacagcaagaacctgtaccccttcctgctgcccgtgatccagctgagcaccgacgtgagccagcccccccacgtgtacctgctggaggacggcctggagctgtggctggtgaccctggagaacagcccctgcatcacccccgagctgctgagaatcttccagaacatgagccccctgctggagctgagcagcgagaacctgagaacctgcttcaagatcatcaacggctacatcttcctgagcagcaccgagttcctgcagacctacgccgtgggcctgtgccagagcttctgcgagctgctgaaggagatcaccaccgagggccaggtgcaggtgctgaaggtggtggagaacgccctgaaggtgaaccccatcctgggcccccagatgttccagcccatcctgccctacgtgttcaagggcatcatcgagggcgagagataccccgtggtgatgagcacctacctgggcgtgatgggcagagtgctgctgcagaacaccagcttcttcagcagcctgctgaacgagatggcccacaagttcaaccaggagatggaccagctgctgggcaacatgatcgagatgtgggtggacagaatggacaacatcacccagcccgagagaagaaagctgagcgccctggccctgctgagcctgctgcccagcgacaacagcgtgatccaggacaagttctgcggcatcatcaacatcagcgtggagggcctgcacgacgtgatgaccgaggaccccgagaccggcacctacaaggactgcatgctgatgagccacctggaggagcccaaggtgaccgaggacgaggagccccccaccgagcaggacaagagaaagaagatgctggccctgaaggaccccgtgcacaccgtgagcctgcagcagttcatctacgagaagctgaaggcccagcaggagatgctgggcgagcagggcttccagagcctgatggagaccgtggacaccgagatcgtgacccagctgcaggagttcctgcagggcttctag

SEQ ID NO: 190734 - DNA, 195 bp, Artificial Sequence
  derived and/or modified sequence
atggacctgaacagcgccagcaccgtggtgctgcaggtgctgacccaggccaccagccaggacaccgccgtgctgaagcccgccgaggagcagctgaagcagtgggagacccagcccggcttctacagcgtgctgctgaacatcttcaccaaccacaccctggacatcaacgtgagatggctggccgtgctgtag

SEQ ID NO: 190735 - DNA, 489 bp, Artificial Sequence
  derived and/or modified sequence
atggacctgaacagcgccagcaccgtggtgctgcaggtgctgacccaggccaccagccaggacaccgccgtgctgaagcccgccgaggagcagctgaagcagtgggagacccagcccggcttctacagcgtgctgctgaacatcttcaccaaccacaccctggacatcaacgtgagatggctggccgtgctgtacttcaagcacggcatcgacagatactggagaagagtggccccccacgccctgagcgaggaggagaagaccaccctgagagccggcctgatcaccaacttcaacgagcccatcaaccagatcgccacccagatcgccgtgctgatcgccaaggtggccagactggactgccccagacagtggcccgagctgatccccaccctgatcgagagcgtgaaggtgcaggacgacctgagacagcacagagccctgctgaccttctaccacgtgaccaagaccctggccagcaagagatag

SEQ ID NO: 190736 - DNA, 450 bp, Artificial Sequence
  derived and/or modified sequence
atggacctgaacagcgccagcaccgtggtgctgcaggtgctgacccaggccaccagccaggacaccgccgtgctgaagcccgccgaggagcagctgaagcagtgggagacccagcccggcttctacagcgtgctgctgaacatcttcaccaaccacaccctggacatcaacgtgagatggctggccgtgctgtacttcaagcacggcatcgacagatactggagaagagtggccccccacgccctgagcgaggaggagaagaccaccctgagagccggcctgatcaccaacttcaacgagcccatcaaccagatcgccacccagatcgccgtgctgatcgccaaggtggccagactggactgccccagacagtggcccgagctgatccccaccctgatcgagagcgtgaaggtgcaggacgacctgagacagcacagagccctgctgtag

SEQ ID NO: 190737 - DNA, 1425 bp, Artificial Sequence
  derived and/or modified sequence
atgatgcagaccctgcagggccccaccaacgtggaggacatgaacgccctgctgatcaaggacgccgtgtacaacgccgtgggcctggccgcctacgagctgttcgacagcgtggacttcgaccagtggttcaagaaccagctgctgcccgagctgcaggtgatccacaacagatacaagcccctgagaagaagagtgatctggctgatcggccagtggatcagcgtgaagttcaagagcgacctgagacccatgctgtacgaggccatctgcaacctgctgcaggaccaggacctggtggtgagaatcgagaccgccaccaccctgaagctgaccgtggacgacttcgagttcagaaccgaccagttcctgccctacctggagaccatgttcaccctgctgttccagctgctgcagcaggtgaccgagtgcgacaccaagatgcacgtgctgcacgtgctgagctgcgtgatcgagagagtgaacatgcagatcagaccctacgtgggctgcctggtgcagtacctgcccctgctgtggaagcagagcgaggagcacaacatgctgagatgcgccatcctgaccaccctgatccacctggtgcagggcctgggcgccgacagcaagaacctgtaccccttcctgctgcccgtgatccagctgagcaccgacgtgagccagcccccccacgtgtacctgctggaggacggcctggagctgtggctggtgaccctggagaacagcccctgcatcacccccgagctgctgagaatcttccagaacatgagccccctgctggagctgagcagcgagaacctgagaacctgcttcaagatcatcaacggctacatcttcctgagcagcaccgagttcctgcagacctacgccgtgggcctgtgccagagcttctgcgagctgctgaaggagatcaccaccgagggccaggtgcaggtgctgaaggtggtggagaacgccctgaaggtgaaccccatcctgggcccccagatgttccagcccatcctgccctacgtgttcaagggcatcatcgagggcgagagataccccgtggtgatgagcacctacctgggcgtgatgggcagagtgctgctgcagaacaccagcttcttcagcagcctgctgaacgagatggcccacaagttcaaccaggagatggaccagctgctgggcaacatgatcgagatgtgggtggacagaatggacaacatcacccagcccgagagaagaaagctgagcgccctggccctgctgagcctgctgcccagcgacaacagcgtgatccaggacaagttctgcggcatcatcaacatcagcgtggagggcctgcacgacgtgatgaccgaggaccccgagaccggcacctacaaggactgcatgctgatgagccacctggaggagcccaagtag

SEQ ID NO: 190738 - protein, 2302 aa, Artificial Sequence
  derived and/or modified sequence
MTSEEMTASVLIPVTQRKVVSAQSAADESSEKVSDINISKAHTVRRSGETSHTISQLNKLKEEPSGSNLPKILSIAREKIVSDENSNEKCWEKIMPDSAKNLNINCNNILRNHQHGLPQRQFYEMYNSVAEEDLCLETGIPSPLERKVFPGIQLELDRPSMGISPLGNQSVIIETGRAHPDSRRAVFHFHYEVDRRMSDTFCTLSENLILDDCGNCVPLPGGEEKQKKNYVAYTCKLMELAKNCDNKNEQLQCDHCDTLNDKYFCFEGSCEKVDMVYSGDSFCRKDFTDSQAAKTFLSHFEDFPDNCDDVEEDAFKSKKERSTLLVRRFCKNDREVKKSVYTGTRAIVRTLPSGHIGLTAWSYIDQKRNGPLLPCGRVMEPPSTVEIRQDGSQRLSEAQWYPIYNAVRREETENTVGSLLHFLTKLPASETAHGRISVGPCLKQCVRDTVCEYRATLQRTSISQYITGSLLEATTSLGARSGLLSTFGGSTGRMMLKERQPGPSVANSNALPSSSAGISKELIDLQPLIQFPEEVASILMEQEQTIYRRVLPVDYLCFLTRDLGTPECQSSLPCLKASISASILTTQNGEHNALEDLVMRFNEVSSWVTWLILTAGSMEEKREVFSYLVHVAKCCWNMGNYNAVMEFLAGLRSRKVLKMWQFMDQSDIETMRSLKDAMAQHESSCEYRKVVTRALHIPGCKVVPFCGVFLKELCEVLDGASGLMKLCPRYNSQEETLEFVADYSGQDNFLQRVGQNGLKNSEKESTVNSIFQVIRSCNRSLETDEEDSPSEGNSSRKSSLKDKSRWQFIIGDLLDSDNDIFEQSKEYDSHGSEDSQKAFDHGTELIPWYVLSIQADVHQFLLQGATVIHYDQDTHLSARCFLQLQPDNSTLTWVKPTTASPASSKAKLGVLNNTAEPGKFPLLGNAGLSSLTEGVLDLFAVKAVYMGHPGIDIHTVCVQNKLGSMFLSETGVTLLYGLQTTDNRLLHFVAPKHTAKMLFSGLLELTRAVRKMRKFPDQRQQWLRKQYVSLYQEDGRYEGPTLAHAVELFGGRRWSARNPSPGTSAKNAEKPNMQRNNTLGISTTKKKKKILMRGESGEVTDDEMATRKAKMHKECRSRSGSDPQDINEQEESEVNAIANPPNPLPSRRAHSLTTAGSPNLAAGTSSPIRPVSSPVLSSSNKSPSSAWSSSSWHGRIKGGMKGFQSFMVSDSNMSFVEFVELFKSFSVRSRKDLKDLFDVYAVPCNRSGSESAPLYTNLTIDENTSDLQPDLDLLTRNVSDLGLFIKSKQQLSDNQRQISDAIAAASIVTNGTGIESTSLGIFGVGILQLNDFLVNCQGEHCTYDEILSIIQKFEPSISMCHQGLMSFEGFARFLMDKENFASKNDESQENIKELQLPLSYYYIESSHNTYLTGHQLKGESSVELYSQVLLQGCRSVELDCWDGDDGMPIIYHGHTLTTKIPFKEVVEAIDRSAFINSDLPIIISIENHCSLPQQRKMAEIFKTVFGEKLVTKFLFETDFSDDPMLPSPDQLRKKVLLKNKKLKAHQTPVDILKQKAHQLASMQVQAYNGGNANPRPANNEEEEDEEDEYDYDYESLSDDNILEDRPENKSCNDKLQFEYNEEIPKRIKKADNSACNKGKVYDMELGEEFYLDQNKKESRQIAPELSDLVIYCQAVKFPGLSTLNASGSSRGKERKSRKSIFGNNPGRMSPGETASFNKTSGKSSCEGIRQTWEESSSPLNPTTSLSAIIRTPKCYHISSLNENAAKRLCRRYSQKLTQHTACQLLRTYPAATRIDSSNPNPLMFWLHGIQLVALNYQTDDLPLHLNAAMFEANGGCGYVLKPPVLWDKNCPMYQKFSPLERDLDSMDPAVYSLTIVSGQNVCPSNSMGSPCIEVDVLGMPLDSCHFRTKPIHRNTLNPMWNEQFLFHVHFEDLVFLRFAVVENNSSAVTAQRIIPLKALKRGYRHLQLRNLHNEVLEISSLFINSRRMEENSSGNTMSASSMFNTEERKCLQTHRVTVHGVPGPEPFTVFTINGGTKAKQLLQQILTNEQDIKPVTTDYFLMEEKYFISKEKNECRKQPFQRAIGPEEEIMQILSSWFPEEGYMGRIVLKTQQENLEEKNIVQDDKEVILSSEEESFFVQVHDVSPEQPRTVIKAPRVSTAQDVIQQTLCKAKYSYSILSNPNPSDYVLLEEVVKDTTNKKTTTPKSSQRVLLDQECVFQAQSKWKGAGKFILKLKEQVQASREDKKKGISFASELKKLTKSTKQPRGLTSPSQLLTSESIQTKEEKPVGGLSSSDTMDYRQ

SEQ ID NO: 190739 - protein, 2312 aa, Artificial Sequence
  derived and/or modified sequence
MTSEEMTASVLIPVTQRKVVSAQSAADESSEKVSDINISKAHTVRRSGETSHTISQLNKLKEEPSGSNLPKILSIAREKIVSDENSNEKCWEKIMPDSAKNLNINCNNILRNHQHGLPQRQFYEMYNSVAEEDLCLETGIPSPLERKVFPGIQLELDRPSMGISPLGNQSVIIETGRAHPDSRRAVFHFHYEVDRRMSDTFCTLSENLILDDCGNCVPLPGGEEKQKKNYVAYTCKLMELAKNCDNKNEQLQCDHCDTLNDKYFCFEGSCEKVDMVYSGDSFCRKDFTDSQAAKTFLSHFEDFPDNCDDVEEDAFKSKKERSTLLVRRFCKNDREVKKSVYTGTRAIVRTLPSGHIGLTAWSYIDQKRNGPLLPCGRVMEPPSTVEIRQDGSQRLSEAQWYPIYNAVRREETENTVGSLLHFLTKLPASETAHGRISVGPCLKQCVRDTVCEYRATLQRTSISQYITGSLLEATTSLGARSGLLSTFGGSTGRMMLKERQPGPSVANSNALPSSSAGISKELIDLQPLIQFPEEVASILMEQEQTIYRRVLPVDYLCFLTRDLGTPECQSSLPCLKASISASILTTQNGEHNALEDLVMRFNEVSSWVTWLILTAGSMEEKREVFSYLVHVAKCCWNMGNYNAVMEFLAGLRSRKVLKMWQFMDQSDIETMRSLKDAMAQHESSCEYRKVVTRALHIPGCKVVPFCGVFLKELCEVLDGASGLMKLCPRYNSQEETLEFVADYSGQDNFLQRVGQNGLKNSEKESTVNSIFQVIRSCNRSLETDEEDSPSEGNSSRKSSLKDKSRWQFIIGDLLDSDNDIFEQSKEYDSHGSEDSQKAFDHGTELIPWYVLSIQADVHQFLLQGATVIHYDQDTHLSARCFLQLQPDNSTLTWVKPTTASPASSKAKLGVLNNTAEPGKFPLLGNAGLSSLTEGVLDLFAVKAVYMGHPGIDIHTVCVQNKLGSMFLSETGVTLLYGLQTTDNRLLHFVAPKHTAKMLFSGLLELTRAVRKMRKFPDQRQQWLRKQYVSLYQEDGRYEGPTLAHAVELFGGRRWSARNPSPGTSAKNAEKPNMQRNNTLGISTTKKKKKILMRGESGEVTDDEMATRKAKMHKECRSRSGSDPQDINEQEESEVNAIANPPNPLPSRRAHSLTTAGSPNLAAGTSSPIRPVSSPVLSSSNKSPSSAWSSSSWHGRIKGGMKGFQSFMVSDSNMSFVEFVELFKSFSVRSRKDLKDLFDVYAVPCNRSGSESAPLYTNLTIDENTSDLQPDLDLLTRNVSDLGLFIKSKQQLSDNQRQISDAIAAASIVTNGTGIESTSLGIFGVGILQLNDFLVNCQGEHCTYDEILSIIQKFEPSISMCHQGLMSFEGFARFLMDKENFASKNDESQENIKELQLPLSYYYIESSHNTYLTGHQLKGESSVELYSQVLLQGCRSVELDCWDGDDGMPIIYHGHTLTTKIPFKEVVEAIDRSAFINSDLPIIISIENHCSLPQQRKMAEIFKTVFGEKLVTKFLFETDFSDDPMLPSPDQLRKKVLLKNKKLKAHQTPVDILKQKAHQLASMQVQAYNGGNANPRPANNEEEEDEEDEYDYDYESLSDDNILEDRPENKSCNDKLQFEYNEEIPKRIKKADNSACNKGKVYDMELGEEFYLDQNKKESRQIAPELSDLVIYCQAVKFPGLSTLNASGSSRGKERKSRKSIFGNNPGRMSPGETASFNKTSGKSSCEGIRQTWEESSSPLNPTTSLSAIIRTPKCYHISSLNENAAKRLCRRYSQKLTQHTACQLLRTYPAATRIDSSNPNPLMFWLHGIQLVALNYQTDDLPLHLNAAMFEANGGCGYVLKPPVLWDKNCPMYQKFSPLERDLDSMDPAVYSLTIVSGQNVCPSNSMGSPCIEVDVLGMPLDSCHFRTKPIHRNTLNPMWNEQFLFHVHFEDLVFLRFAVVENNSSAVTAQRIIPLKALKRGYRHLQLRNLHNEVLEISSLFINSRRMEENSSGNTMSASSMFNTEERKCLQTHRVTVHGVPGPEPFTVFTINGGTKAKQLLQQILTNEQDIKPVTTDYFLMEEKYFISKEKNECRKQPFQRAIGPEEEIMQILSSWFPEEGYMGRIVLKTQQENLEEKNIVQDDKEVILSSEEESFFVQVHDVSPEQPRTVIKAPRVSTAQDVIQQTLCKAKYSYSILSNPNPSDYVLLEEVVKDTTNKKTTTPKSSQRVLLDQECVFQAQSKWKGAGKFILKLKEQVQASREDKKKGISFASELKKLTKSTKQPRGLTSPSQLLTSESIQTKEEKPVGGLSSSDTMDYRQVKIFKQEVKE

SEQ ID NO: 190740 - DNA, 6909 bp, Artificial Sequence
  derived and/or modified sequence
atgacctccgaagaaatgaccgcgtccgttttaatccccgtgacccaacgaaaagtggtcagtgctcaatccgctgcagatgagtcctccgaaaaagtaagcgacatcaatatctccaaagcacataccgtacgccgatctggtgaaacaagtcatactataagtcaactcaacaagttaaaggaagaaccaagcggaagtaatctgccaaaaatcctgtctatcgccagggagaaaatcgtctctgacgagaacagtaatgaaaaatgttgggagaaaattatgccggactcagcaaagaacctgaacatcaactgtaataacatcctccgcaatcaccagcatgggctgccacagcgtcagttttatgagatgtataatagcgtagccgaagaagacctttgtttagaaacgggaatcccaagcccgttggaacgtaaggtgtttccgggcattcagctggaattagaccgaccaagcatgggaatttcgccgttaggcaatcagagcgtaatcattgaaacggggcgagcacaccccgactcgcggagggccgttttccactttcactatgaggtcgacaggagaatgagcgacaccttctgcaccctctccgagaatttgatcttggacgactgtggtaactgcgtgccgcttcccggaggagaggagaagcagaagaaaaattatgtagcttacacctgtaagcttatggaattggctaagaactgtgataacaagaacgagcagttacaatgcgatcattgcgacacattaaacgataaatacttttgtttcgaaggtagttgcgagaaggtggacatggtatacagcggcgactccttttgccgaaaggacttcaccgattcacaggctgctaaaaccttcctgtcccactttgaagactttcccgacaactgcgacgacgtggaggaggacgcattcaagtcaaagaaagagaggagcactttgctcgttcgtcgattttgcaagaacgaccgcgaggtcaagaaatccgtttatacaggcacaagggccatagtacgcacactccctagcgggcacatcggcctcactgcttggtcttacatagaccagaagagaaatggtcccctcttgccgtgtgggagagtgatggagcctcccagcaccgtggaaattaggcaggatggtagtcaaagactctcggaagctcagtggtacccgatatataacgcagtcagaagagaagagaccgaaaataccgtcggctctttgttacacttcttgaccaaacttcctgctagcgagacagcacacgggcgtatttctgtgggaccatgtctcaaacagtgcgttcgggatactgtttgtgagtatagggccactttgcagcggactagtatttcccagtacattacagggtcactgctcgaagcaactaccagcctaggcgcacgatcagggctcctgtcaacctttgggggatcgacaggcaggatgatgttgaaagaacggcaacctgggccatctgttgctaacagtaatgccctcccatccagttctgccgggatcagcaaggagctgatcgatttgcagcctctcatccaattccctgaggaagtcgcttcaatcctgatggagcaggaacagactatctatcggcgggtgcttccagtggattatctttgtttcctgacccgtgatctgggcactcctgaatgccagtctagcttgccatgcttgaaggcctccattagtgcctccattctgactacccagaacggagaacacaacgccctggaggatctggtcatgaggttcaatgaagtgagttcctgggtaacctggctgattctgacagctgggtccatggaggagaaacgagaggtctttagttatcttgtccatgtggctaagtgttgctggaatatgggcaactacaacgccgttatggaattcttagccggcttaaggtcacggaaggtcctgaagatgtggcagttcatggatcaatccgacattgagacaatgaggagcctcaaggacgcaatggcgcagcatgaaagtagttgcgaataccggaaagttgtgacacgggccctgcatattccaggctgtaaggtagtgcctttttgcggagtcttcctgaaggaactgtgtgaagtactagacggggcctctgggcttatgaaattgtgcccacgatataactctcaggaagagacacttgaattcgtggccgattacagcggccaggataactttttgcagagagtcggacagaatggacttaaaaattctgaaaaagaatccaccgtgaactcaatatttcaagtaattaggtcatgtaatcgatctctcgagacagatgaggaagactctccatcagagggcaactccagcaggaaaagctcgctcaaggacaaaagccggtggcagttcattatcggagacttgctcgactccgataacgatatctttgaacagagcaaagaatacgacagccatggcagcgaggattcccagaaggcattcgatcacggcacagaactgatcccctggtacgtgctgagtatccaggcagatgtgcaccagtttttactccagggcgcaaccgtgattcactacgaccaggacactcacctgagtgctcgctgcttcttgcagcttcagccagataatagcacactcacatgggtaaagcccactacagcttctccagcatcaagcaaggcgaagctcggggttctgaacaacaccgctgaacctgggaaatttcctctgctgggtaacgccggattgtcttccctgacagagggtgtgctcgacttgttcgccgttaaggccgtttatatgggtcatcccgggatcgacattcacacggtctgcgttcagaacaaactgggtagcatgtttctctccgagacaggggtgactctgctctatggactgcagacgaccgataatagattgctgcattttgtcgcgcctaaacacactgctaaaatgctatttagtggccttctggagctgacacgcgccgtgcgcaagatgaggaagtttcctgatcagaggcagcagtggctccgaaaacagtacgtcagcttatatcaggaggacggccggtacgaaggtcccacacttgcccacgccgtggaattgttcggggggcggcggtggtcggccagaaacccaagtcctggaacaagcgctaaaaacgcggaaaaaccgaatatgcagcgaaacaataccctggggatctctaccaccaagaaaaaaaagaagatactgatgcgcggcgagagtggagaggtcacagatgacgagatggctaccagaaaagcaaaaatgcataaagagtgtcggtcgcgctcaggctccgacccacaggacattaacgaacaagaagaaagcgaggtcaacgcgatcgctaatcccccaaaccccctcccaagtcgccgagcccattctctcacaaccgcgggtagccccaacctcgccgcagggacctcttctcccatccgacctgtttctagccctgtgcttagcagctccaacaagagcccctcctctgcgtggagtagcagttcatggcacggtcggatcaaaggcgggatgaagggatttcagagcttcatggttagcgactccaacatgagcttcgttgagtttgtagagctgtttaaaagtttttctgtacgatctcgaaaagacctgaaggatctgttcgacgtgtacgccgtgccctgcaaccgctccggatcagaatcagccccactgtacactaatctgacaatcgacgagaatacctctgaccttcaacccgacctggatcttctcacccggaacgtcagcgacctgggcttgtttattaagtctaaacagcagctgagtgataaccagcgccaaatcagcgatgccatcgccgcagcctctattgttacaaatgggacaggtattgagtcaacgagtttagggatcttcggggttggtattctgcagcttaacgactttctggtgaactgtcagggtgagcattgcacatacgacgagattcttagcataatacagaaatttgaaccgagcatttccatgtgtcaccagggactgatgtcattcgaaggctttgcccggtttctcatggacaaggaaaactttgcctcaaagaacgatgagagccaagaaaatatcaaggagctgcaattacccctctcttattattatattgagagcagccataacacctacctcaccggccaccagctcaagggcgaatcgagcgttgaactgtactcccaagttttactgcaggggtgtcgctccgtggagctggactgctgggacggggacgacggaatgccgattatctaccacggtcataccctcaccacaaagattccttttaaagaggttgtggaggctattgacagaagcgctttcatcaacagtgatttgccaatcattattagcatcgaaaatcactgctcactgccccagcagcgtaagatggccgagatatttaagactgtgtttggcgagaaactggttactaaatttctgttcgagaccgatttcagcgacgacccaatgctgccttcaccggaccaactcaggaagaaggttctgttgaagaataaaaagctgaaggcgcaccagactcctgtcgatatccttaaacagaaagctcaccagttagcctctatgcaggtccaagcttacaatggtgggaacgccaatccccgacctgccaataacgaagaggaggaagacgaggaagacgaatatgactacgactacgaaagcctctcagacgataacatcttagaagaccgtccagaaaacaaatcctgcaacgacaaacttcagtttgagtacaatgaggagatccccaaacgcatcaagaaagcagataattctgcttgtaataaagggaaagtgtatgacatggagttgggagaagagttctatctcgatcagaacaagaaggagtccaggcaaattgcccccgaactctctgatcttgtaatatattgtcaggccgtcaaattccccggtctgtctacactgaacgccagcggcagctcccgtggaaaagaacgaaagagcaggaagtccatcttcggaaacaaccctggacggatgtcgccaggtgaaaccgcttccttcaacaagacatccgggaaaagttcatgcgagggcattcggcagacctgggaggagtccagtagcccactgaatcctaccacctctctcagtgcaattattcgcacccctaagtgctaccacataagttccctgaacgaaaacgctgcaaaacgcttgtgtcggcgatactctcagaaactaactcagcatacagcatgtcagttactgcggacctacccggcggcaacaaggatcgatagctccaaccccaaccccctgatgttctggctccacggtatccagttagtagcccttaactaccagactgacgacctgcctctacacctcaacgccgcaatgtttgaggctaacggcggttgcgggtacgtgctcaaacccccggtcttgtgggataaaaattgccccatgtaccagaagtttagcccactcgagagagacttagattccatggatccagccgtatattccctgactatcgtgagcggacagaatgtctgtccctctaattctatgggtagcccttgtatcgaggttgacgttctgggcatgcctctggatagctgtcatttcagaactaagcctatacatagaaataccttgaatcccatgtggaatgaacagttcctcttccacgttcattttgaggacctggtcttcttgaggttcgcagttgtcgagaataattcctccgccgtcacagctcagcgaatcattccactgaaggctttgaagaggggctatagacatctacaactgaggaacctgcacaacgaggtgcttgagatctcctccctttttatcaactctcgacgaatggaggaaaatagctccggaaataccatgtctgcgagtagtatgtttaacacggaggaacgcaaatgtctccagacccaccgcgtgacagttcacggagtccccggcccagagccatttacggtcttcactattaatggagggacaaaggctaagcagctgcttcagcagattcttactaatgagcaagacatcaaacccgtcacgacggattactttttaatggaggagaagtactttatatccaaagaaaagaacgaatgtaggaaacagccattccagcgcgccattggacctgaggaggagattatgcagatcctgagttcctggttccctgaagaaggttacatggggcgaatcgtcttgaaaacacagcaagaaaacctcgaagagaaaaatatcgtgcaagatgataaggaagttattctgagctcagaagaggagtcattctttgttcaggtccacgatgtatcacccgaacagcccaggactgtgattaaagcccctagggtgtccacagcacaggacgtcatccagcagaccctatgcaaggcaaagtattcttattcaatcctcagtaacccaaatcccagcgattacgtgttgctggaggaagtggttaaggacaccacaaataagaaaaccaccacaccaaaaagctctcagagggtgctactggaccaggagtgcgtcttccaggctcaatcaaagtggaaaggggccggtaagtttatcctgaagctgaaagaacaggtgcaggcatcccgcgaggataagaagaagggtatcagtttcgcttccgaactcaagaagctgacgaagagtaccaagcaacctcgtgggctgaccagcccgtctcagcttcttaccagtgaaagtattcagacaaaagaggagaagcctgtcggtggactgagctcctccgataccatggactacaggcagtag

SEQ ID NO: 190741 - DNA, 6939 bp, Artificial Sequence
  derived and/or modified sequence
atgacttcggaggagatgaccgctagtgttcttatacctgtcacccagcgtaaggtcgtgagtgcccagagcgccgcagacgagtcctctgagaaggtgagtgacattaatatttccaaagcccacaccgtgaggagatccggggaaacttcccacacaatttcacaactgaacaaactcaaggaagaaccatctggctccaacctgccgaagattctgagtatcgcgagggagaagatcgttagtgacgaaaattccaacgagaagtgttgggaaaagatcatgcctgactctgcaaaaaatctcaacataaactgcaataatatacttagaaaccatcaacatggactgccacagcgacagttttatgagatgtataattccgtcgcagaggaagatctgtgtttggaaactggcatccccagtccactggagcgaaaagtattcccagggattcagttagagctggaccgcccttccatgggaatcagtccccttggaaatcagagcgtgattatcgaaacaggtcgcgcgcatccagattctagacgggcagtgttccattttcactacgaagtcgataggcgcatgtcggacacattttgcacactgagcgaaaacctgattcttgacgattgtggtaactgcgttccactgccggggggggaggaaaagcagaaaaagaactacgtggcttacacctgtaaactcatggaactggcgaaaaactgtgacaataagaatgaacaactgcagtgtgaccattgcgacacactcaatgataagtacttttgctttgaagggagctgtgagaaggtcgatatggtgtacagcggagacagcttctgcaggaaggactttacggattcacaggctgccaagacattcctgagccattttgaggacttccctgacaactgtgatgatgtggaagaggatgccttcaagtctaaaaaggaaagatctactttactggtgcggagattttgtaaaaacgatagagaggtgaaaaagagtgtgtataccggtaccagggccattgtccgaacactgccgagcgggcatatcgggttaaccgcttggagttatattgatcaaaagaggaatggtcccctgctgccttgcgggagagtgatggaacctcccagcactgtggagattcggcaggacggcagccagcgtctgtcagaggcgcagtggtacccaatatataatgccgtgcgtcgcgaagaaaccgaaaacactgtcggctctctcctccattttctgaccaagctgccagcctccgagactgcccatggccgaattagcgtagggccttgcctgaagcagtgtgtgcgggacaccgtttgcgagtatcgagctaccctgcagcgcactagcatcagccagtacattaccggcagcctgctcgaagccacaacatctctgggagctagaagcgggctgctctctacattcggaggctctaccggtcgaatgatgctgaaggaacgacagccagggccctctgtcgctaactctaatgccctgccttctagttcagcaggcatatccaaggagctgatcgacctgcagcctcttatacagttcccagaggaagtcgcctcaatcctaatggagcaagagcagacaatttatcggcgtgtgttgcctgtggactatctctgctttctgacacgcgacctgggtacaccagagtgtcagtcatctcttccctgcttaaaagccagcatcagcgcttccattctcacaacccagaacggggaacataatgcactagaggacctcgtgatgcggtttaacgaagtgagtagttgggtgacttggttgatcttgaccgccggctctatggaggagaaaagggaagtttttagttatctggttcatgtggccaagtgctgttggaacatgggaaactataacgcagttatggaattccttgccgggctccgctcacgaaaagtgctgaaaatgtggcagttcatggatcagagcgatattgaaacgatgaggtcactgaaggacgctatggcgcagcacgaatcaagctgtgaatatcggaaggtggtgacacgcgctctgcacatcccagggtgtaaagttgtgcctttttgtggtgtttttctgaaagagctctgcgaggtcctggatggagcaagcgggttgatgaagctgtgtccgagatataattcacaggaagagacgctagaattcgtggctgactattcggggcaggacaacttcttgcagcgagtgggtcagaatggtctgaaaaactcagagaaggagtccaccgtcaactccatctttcaagtgataaggtcatgcaaccgatcacttgagaccgacgaggaggattcgccatccgaggggaactcttcccgaaagtcgagtctgaaagacaagagccggtggcagtttattattggagacttacttgatagtgacaacgatatttttgagcagtcaaaggagtacgactcccacggcagcgaggactctcagaaggcatttgaccacggaacagagctgattccctggtatgttttgagcatccaggcagacgtccatcaatttctccttcaaggcgcaaccgttattcactacgaccaggacacacatctgagcgcacggtgctttttacagttgcaacctgataacagcactctgacctgggtgaagccaacaacagccagtcccgcctcatcaaaggccaagctgggcgtcttgaacaacaccgcagaaccaggtaagttccctctgctggggaatgccggtctgtcttccctcacggaaggggtgctcgatttgttcgccgtcaaagcagtctacatgggacacccaggtatcgatatccataccgtctgcgtacagaataagctggggtcaatgtttctatcagagacaggcgttacactgctatacggcctgcaaaccaccgacaatagactgctgcacttcgtggccccaaaacacactgcgaagatgctgttcagcggactgttggagttgacacgggctgtgagaaagatgcgaaaattcccagatcagcggcagcagtggctcaggaagcaatatgtatcgctctaccaggaagacggacggtacgaaggacctacactggcacatgctgtggagctttttgggggccggaggtggtccgctaggaatccctcgccaggaacaagcgcaaagaatgctgagaaaccaaacatgcaaaggaataacacactgggaattagtactactaagaaaaaaaaaaagatactcatgcgcggcgaatctggagaagtgacagacgatgaaatggccacccggaaggccaagatgcataaagagtgcaggagcaggagcggcagtgacccccaagacatcaatgagcaggaagagtctgaggtgaatgcaattgcgaatcccccaaaccctctgccttccagacgggctcatagcctgaccaccgcaggaagccccaatcttgctgccggcacatcatcaccaatacgccctgtttccagcccagtgctgtcaagctccaacaagagtccgagcagtgcgtggagctcatcgtcctggcatggtcggattaaaggcggcatgaaagggtttcagtcatttatggtgtctgatagtaatatgagctttgtagaatttgtagaattattcaaaagcttctcagttcggtcaaggaaagatctcaaggacctgttcgatgtgtacgccgtaccttgtaataggtccgggtccgaatccgcccctctctatactaaccttacaatcgatgagaatacctcagatttacagccggacctcgacctgctcacgaggaacgtcagcgatctgggactgtttattaaatccaagcagcagctgtccgacaatcagaggcagatttcagatgcaattgccgcagccagtatcgttactaacggtaccgggatcgaaagcacctctttgggtatctttggggtcggcatcctccagctgaacgactttctggttaattgccagggcgagcactgcacttacgacgaaatcctgtctatcatccagaaattcgagcctagtatctcgatgtgtcatcaaggactgatgagtttcgagggcttcgctaggtttctgatggataaggaaaattttgcatcgaaaaatgacgaaagccaggagaacattaaggagttgcagctccctttatcctactattacattgaaagctcacataatacctacctgaccggccatcagctcaagggggaaagtagtgtagagttgtactcccaggtgctgctccagggttgcaggtccgttgagttggactgctgggatggggatgacgggatgccaatcatttaccacggccatacgttgactactaaaattcccttcaaggaggtggttgaagccatcgatcgctcagcttttataaacagcgacctgcccatcatcatctctatcgaaaatcattgcagccttccacaacagaggaaaatggccgaaatcttcaaaactgttttcggagagaagctggtcaccaagtttcttttcgagaccgattttagtgatgatcccatgctaccctcccccgatcagctgaggaagaaggttctgttgaagaataaaaagcttaaagcacaccaaacaccagtggacatccttaagcagaaagcccaccagctggccagcatgcaggtccaggcctataatggtggaaatgccaaccccagacccgcaaacaatgaagaagaagaagatgaggaggatgagtatgactatgactatgaaagcttgagtgatgacaacattctggaggataggcctgagaacaaaagctgtaatgacaaacttcagtttgagtataatgaggagataccaaaaagaattaagaaagctgacaacagtgcatgtaataaggggaaagtatatgacatggaactcggggaagagttctacctggaccaaaacaagaaagagtcccgccagatcgctccagaacttagtgacttagtgatatattgccaggctgtaaagtttcccggcttgtcaacattaaatgcctcaggttccagtaggggaaaggagcgcaagtctagaaagtctatcttcggcaacaatcccgggaggatgtcccctggcgagaccgcctccttcaataaaacctctgggaaatcatcgtgtgagggcattcggcagacgtgggaggaatcttcctctcccctgaaccccaccacttctctgtcagctatcatccgaactccaaaatgttaccatattagttccctgaatgaaaatgctgcgaaacgcttgtgtcggagatacagtcagaagttgacacaacataccgcatgtcagcttctgaggacctatcctgccgccacacggatcgattcatctaacccaaaccctcttatgttctggctccacggaattcagttagtggccctcaattatcagactgatgacctgccactccacctgaacgccgcaatgttcgaagccaacggagggtgcggatacgtcctgaagcccccggttctgtgggacaaaaactgtcccatgtatcaaaagttttctccgctagagcgcgatctcgatagtatggaccccgccgtctattctcttaccattgtgtctgggcagaatgtgtgcccttcgaatagcatgggatcaccatgcattgaagttgacgtgctgggcatgcctcttgacagttgccattttcggacgaaaccaatccaccggaatacactgaacccaatgtggaatgaacaatttctgttccatgtacacttcgaagatttagtgttccttagattcgccgtggtggaaaacaatagtagtgcagtcaccgctcagcggatcatcccactgaaggcattgaaacgcggatatcgacacctccagcttcgcaatctccacaatgaagtactcgagatttcttctctgtttatcaacagccgacggatggaggagaattcttctggaaatactatgtccgcctcatcaatgttcaacacagaagaacgaaagtgtttgcagactcatcgggttacagtgcacggtgtgccggggcctgaaccattcaccgtgttcaccataaatggaggcactaaggcaaaacagctgttgcagcagatactgaccaacgagcaggacattaagccagtgaccactgattacttcttgatggaagagaagtactttatctctaaggaaaagaacgagtgccggaaacagccattccagcgggctattggccccgaggaagaaataatgcaaattctgagttcttggttcccagaggagggctacatgggccgcattgtgctgaagactcagcaggagaacctggaggagaagaacatcgtgcaggatgataaggaggtgattctgtcctcagaggaggagagtttcttcgtccaagtccatgatgtgtccccagagcagcctcgtacagtcatcaaagctccaagagtgtcgaccgcccaggatgtgatccaacagaccttgtgtaaggctaagtacagctacagcatattgagcaaccccaacccaagtgactacgtgctgctggaggaagttgttaaggacactaccaacaaaaaaactactacaccaaagagctcacagcgcgtgctgctcgaccaggaatgtgttttccaggcccaatcgaaatggaagggggccggcaaatttatcctgaaactgaaggaacaggtccaggcaagcagagaggacaaaaagaaaggcatctcattcgcctctgagctgaaaaagctcacaaaatcgaccaagcagccacgcggattgacgtctcccagtcaactgttaacctctgagtctatccagactaaagaagagaaacccgtggggggacttagctctagtgacacgatggactatcgccaggtgaaaatctttaagcaggaagtgaaggaatag

SEQ ID NO: 190742 - DNA, 6909 bp, Artificial Sequence
  derived and/or modified sequence
atgaccagcgaggagatgacagcctctgtgctgatccctgtgacccagaggaaggtggtgtctgcccagagcgctgctgatgagagcagcgagaaggtgtctgacatcaacatcagcaaggcccacacagtgagaagaagtggagagaccagccacaccatcagccagctgaacaagctgaaggaggagcccagcggcagcaacctgcccaagatcctgagcatcgcccgggagaagatcgtgtctgatgagaacagcaatgagaagtgctgggagaagatcatgccagacagcgccaagaacctgaacatcaactgcaacaacatcctgaggaaccaccagcacggcctgccccagaggcagttctatgagatgtacaacagcgtggccgaggaggacctgtgcctggagaccggcatccccagccccctggagaggaaggtgtttcctggcatccagctggagctggaccggcccagcatgggcatcagccccctgggcaaccagagcgtcatcattgaaacaggccgggcccacccagacagcagaagagctgtgttccacttccactatgaggtggacaggaggatgtctgacaccttctgcaccctgtctgagaacctgatcctggatgactgtggcaactgtgtgcccctgcccggcggggaggagaagcagaagaagaactacgtggcctacacctgcaagctgatggagctggccaagaactgtgacaacaagaatgagcagctgcagtgtgaccactgtgacaccctgaatgacaagtacttctgctttgagggcagctgtgagaaggtggacatggtgtacagcggggacagcttctgcaggaaggacttcacagacagccaggccgccaagaccttcctgagccactttgaggacttcccagacaactgtgatgatgtggaggaggatgccttcaagagcaagaaggagaggagcaccctgctggtgcggcgcttctgcaagaatgaccgggaggtgaagaagtctgtgtacacaggcacccgggccatcgtgaggaccctgcccagcggccacatcggcctgacagcctggagctacatcgaccagaagagaaatggccccctgctgccctgtggccgggtgatggagccccccagcacagtggagatccggcaggacggcagccagaggctgtctgaggcccagtggtaccccatctacaatgctgtgcggcgggaggagacagaaaatacagtgggcagcctgctgcacttcctgaccaagctgcctgccagcgagacagcccacggccgcatctctgtgggcccctgcctgaagcagtgtgtgcgggacacagtgtgtgagtaccgggccaccctgcagaggaccagcatcagccagtacatcaccggcagcctgctggaggccaccaccagcctgggcgcccggagcggcctgctgagcacctttggaggcagcactggaaggatgatgctgaaggagcggcagcccggccccagcgtggccaacagcaatgccctgcccagcagcagcgctggcatcagcaaggagctgattgacctgcagcccctcatccagtttcctgaggaggtggccagcatcctgatggagcaggagcagaccatctaccgccgggtgctgcctgtggactacctgtgcttcctgacccgggacctgggcaccccagagtgccagagcagcctgccctgcctgaaggccagcatcagcgccagcatcctgaccacccagaatggagagcacaatgccctggaggacctggtgatgaggttcaatgaggtgtcctcctgggtgacctggctgatcctgacagctggctccatggaggagaagcgggaggtgttctcctacctggtgcacgtggccaagtgctgctggaacatgggcaactacaatgctgtgatggagttcctggccggcctgcggagcaggaaggtgctgaagatgtggcagttcatggaccagagcgacatcgagaccatgaggagcctgaaggatgccatggcccagcacgagagcagctgtgagtacaggaaggtggtgacccgggccctgcacatccctggctgcaaggtggtgcccttctgtggggtcttcctgaaggagctgtgtgaggtgctggatggagccagcggcctgatgaagctgtgcccccgctacaacagccaggaggagaccctggagtttgtggccgactacagcggccaggacaacttcctgcagagggtgggccagaatggcctgaagaacagcgagaaggagagcacagtgaacagcatcttccaggtgatccgcagctgcaacagaagcctggagacagatgaggaggacagccccagcgagggcaacagcagcaggaagagcagcctgaaggacaagagccgctggcagttcatcatcggggacctgctggacagcgacaatgacatctttgagcagagcaaggagtatgacagccacggcagcgaggacagccagaaggcctttgaccatggaacagagctgatcccctggtacgtgctgagcatccaggctgatgtgcaccagttcctgctgcagggcgccaccgtcatccactatgaccaggacacccacctgagcgcccgctgcttcctgcagctgcagcctgacaacagcaccctgacctgggtgaagcccaccacagccagccctgccagcagcaaggccaagctgggcgtgctgaacaacacagctgagcccgggaagttccccctgctgggcaatgccggcctgagcagcctgacagagggcgtgctggacctgtttgctgtgaaggctgtgtacatgggccaccctggcatcgacatccacacagtgtgtgtgcagaacaagctgggctccatgttcctgtctgagaccggggtgaccctgctgtatggcctgcagaccacagacaaccggctgctgcactttgtggcccccaagcacacagccaagatgctgttcagcggcctgctggagctgaccagggctgtgaggaagatgaggaagttcccagaccagaggcagcagtggctgaggaagcagtatgtgtccctgtaccaggaggatggccgctatgagggccccaccctggcccatgctgtggagctgtttggaggccgccgctggagcgccaggaaccccagccctggcaccagcgccaagaatgctgagaagcccaacatgcagaggaacaacaccctgggcatcagcaccaccaagaagaagaagaagatcctgatgagaggagagagcggggaggtgacagatgatgagatggccaccaggaaggccaagatgcacaaggagtgccgcagccgcagcggcagtgacccccaggacatcaatgagcaggaggagagcgaggtgaatgccatcgccaacccccccaaccccctgcccagcagaagagcccacagcctgaccacagctggcagccccaacctggccgccggcaccagcagccccatccggcctgtgagcagccctgtgctgagcagcagcaacaagagccccagcagcgcctggagcagcagctcctggcacggccgcatcaagggcggcatgaagggcttccagagcttcatggtgtctgacagcaacatgagctttgtggagtttgtggagctgttcaagagcttctctgtgcgcagcaggaaggacctgaaggacctgtttgatgtgtatgctgtgccctgcaacagaagtggcagcgagagcgcccccctgtacaccaacctgaccattgatgagaacaccagtgacctgcagcctgacctggacctgctgaccagaaatgtgtctgacctgggcctcttcatcaagagcaagcagcagctgagtgacaaccagaggcagatcagtgatgccatcgccgccgccagcatcgtgaccaacggcaccggcatcgagagcaccagcctgggcatcttcggcgtgggcatcctgcagctgaatgacttcctggtgaactgccagggcgagcactgcacctatgatgagatcctgagcatcatccagaagtttgagcccagcatctccatgtgccaccagggcctgatgagctttgagggctttgcccgcttcctgatggacaaggagaactttgccagcaagaatgatgagagccaggagaacatcaaggagctgcagctgcccctgagctactactacatcgagagcagccacaacacctacctgaccggccaccagctgaagggggagagctctgtggagctgtacagccaggtgctgctgcagggctgccgctctgtggagctggactgctgggatggagatgatggcatgcccatcatctaccacggccacaccctgaccaccaagatccccttcaaggaggtggtggaggccatcgacagaagtgccttcatcaacagcgacctgcccatcatcatcagcattgagaaccactgcagcctgccccagcagaggaagatggccgagatcttcaagacagtgtttggagagaagctggtgaccaagttcctgtttgaaacagacttcagtgatgaccccatgctgcccagcccagaccagctgaggaagaaggtgctgctgaagaacaagaagctgaaggcccaccagacccctgtggacatcctgaagcagaaggcccaccagctggcctccatgcaggtgcaggcctacaacggcggcaatgccaaccccaggcctgccaacaatgaggaggaggaggatgaggaggatgaatatgactatgactatgagagcctgagtgatgacaacatcctggaggacaggcctgagaacaagagctgcaatgacaagctgcagtttgagtacaatgaggagatccccaagaggatcaagaaggctgacaacagcgcctgcaacaagggcaaggtgtatgacatggagctgggggaggagttctacctggaccagaacaagaaggagagccggcagatcgcccctgagctgagtgacctggtgatctactgccaggccgtgaagtttcctggcctgagcaccctgaatgccagcggcagcagccggggcaaggagaggaagagcaggaagagcatctttggaaacaaccctggccgcatgagccctggagaaacagccagcttcaacaagaccagcggcaagagcagctgtgagggcatccggcagacctgggaggagagcagcagccccctgaaccccaccaccagcctgagcgccatcatccgcacccccaagtgctaccacatcagcagcctgaatgaaaatgctgccaagaggctgtgccgccgctacagccagaagctgacccagcacacagcctgccagctgctgcggacctacccagctgccaccagaattgacagcagcaaccccaaccccctgatgttctggctgcacggcatccagctggtggccctgaactaccagacagatgacctgcccctgcacctgaatgctgccatgtttgaggccaatggaggctgcggctacgtgctgaagccccctgtgctgtgggacaagaactgccccatgtaccagaagttcagccccctggagcgggacctggacagcatggaccctgctgtgtacagcctgaccatcgtgtctggccagaatgtgtgccccagcaacagcatgggcagcccctgcatcgaggtggatgtgctgggcatgcccctggacagctgccacttccgcaccaagcccatccacaggaacaccctgaaccccatgtggaatgagcagttcctgttccacgtgcactttgaggacctggtgttcctgcgctttgctgtggtggagaacaacagcagcgctgtgacagcccagaggatcatccccctgaaggccctgaagaggggctaccgccacctgcagctgaggaacctgcacaatgaggtgctggagatcagcagcctcttcatcaacagcaggaggatggaggagaacagcagcggcaacaccatgtctgccagctccatgttcaacacagaggagaggaagtgcctgcagacccaccgggtgacagtgcatggagtgcccggccctgagcccttcaccgtcttcaccatcaatggaggcaccaaggccaagcagctgctgcagcagatcctgaccaatgagcaggacatcaagcctgtgaccacagactacttcctgatggaggagaagtacttcatcagcaaggagaagaatgaatgtaggaagcagcccttccagagggccatcggccctgaggaggagatcatgcagatcctgagctcctggttccctgaggagggctacatgggcagaattgtgctgaagacccagcaggagaacctggaggagaagaacatcgtgcaggatgacaaggaggtgatcctgagcagcgaggaggagagcttctttgtgcaggtgcatgatgtgtccccagagcagcccaggacagtcatcaaggccccccgggtgtccacagcccaggatgtgatccagcagaccctgtgcaaggccaagtacagctacagcatcctgagcaaccccaaccccagcgactatgtgctgctggaggaggtggtgaaggacaccaccaacaagaagaccaccacccccaagagcagccagagggtgctgctggaccaggagtgtgtgttccaggcccagagcaagtggaagggggccggcaagttcatcctgaagctgaaggagcaggtgcaggccagccgggaggacaagaagaagggcatcagctttgccagcgagctgaagaagctgaccaagagcaccaagcagccccggggcctgaccagccccagccagctgctgaccagcgagagcatccagaccaaggaggagaagcctgtgggcggcctgagcagcagtgacaccatggactaccggcagtag

SEQ ID NO: 190743 - DNA, 6939 bp, Artificial Sequence
  derived and/or modified sequence
atgaccagcgaggagatgacagcctctgtgctgatccctgtgacccagaggaaggtggtgtctgcccagagcgctgctgatgagagcagcgagaaggtgtctgacatcaacatcagcaaggcccacacagtgagaagaagtggagagaccagccacaccatcagccagctgaacaagctgaaggaggagcccagcggcagcaacctgcccaagatcctgagcatcgcccgggagaagatcgtgtctgatgagaacagcaatgagaagtgctgggagaagatcatgccagacagcgccaagaacctgaacatcaactgcaacaacatcctgaggaaccaccagcacggcctgccccagaggcagttctatgagatgtacaacagcgtggccgaggaggacctgtgcctggagaccggcatccccagccccctggagaggaaggtgtttcctggcatccagctggagctggaccggcccagcatgggcatcagccccctgggcaaccagagcgtcatcattgaaacaggccgggcccacccagacagcagaagagctgtgttccacttccactatgaggtggacaggaggatgtctgacaccttctgcaccctgtctgagaacctgatcctggatgactgtggcaactgtgtgcccctgcccggcggggaggagaagcagaagaagaactacgtggcctacacctgcaagctgatggagctggccaagaactgtgacaacaagaatgagcagctgcagtgtgaccactgtgacaccctgaatgacaagtacttctgctttgagggcagctgtgagaaggtggacatggtgtacagcggggacagcttctgcaggaaggacttcacagacagccaggccgccaagaccttcctgagccactttgaggacttcccagacaactgtgatgatgtggaggaggatgccttcaagagcaagaaggagaggagcaccctgctggtgcggcgcttctgcaagaatgaccgggaggtgaagaagtctgtgtacacaggcacccgggccatcgtgaggaccctgcccagcggccacatcggcctgacagcctggagctacatcgaccagaagagaaatggccccctgctgccctgtggccgggtgatggagccccccagcacagtggagatccggcaggacggcagccagaggctgtctgaggcccagtggtaccccatctacaatgctgtgcggcgggaggagacagaaaatacagtgggcagcctgctgcacttcctgaccaagctgcctgccagcgagacagcccacggccgcatctctgtgggcccctgcctgaagcagtgtgtgcgggacacagtgtgtgagtaccgggccaccctgcagaggaccagcatcagccagtacatcaccggcagcctgctggaggccaccaccagcctgggcgcccggagcggcctgctgagcacctttggaggcagcactggaaggatgatgctgaaggagcggcagcccggccccagcgtggccaacagcaatgccctgcccagcagcagcgctggcatcagcaaggagctgattgacctgcagcccctcatccagtttcctgaggaggtggccagcatcctgatggagcaggagcagaccatctaccgccgggtgctgcctgtggactacctgtgcttcctgacccgggacctgggcaccccagagtgccagagcagcctgccctgcctgaaggccagcatcagcgccagcatcctgaccacccagaatggagagcacaatgccctggaggacctggtgatgaggttcaatgaggtgtcctcctgggtgacctggctgatcctgacagctggctccatggaggagaagcgggaggtgttctcctacctggtgcacgtggccaagtgctgctggaacatgggcaactacaatgctgtgatggagttcctggccggcctgcggagcaggaaggtgctgaagatgtggcagttcatggaccagagcgacatcgagaccatgaggagcctgaaggatgccatggcccagcacgagagcagctgtgagtacaggaaggtggtgacccgggccctgcacatccctggctgcaaggtggtgcccttctgtggggtcttcctgaaggagctgtgtgaggtgctggatggagccagcggcctgatgaagctgtgcccccgctacaacagccaggaggagaccctggagtttgtggccgactacagcggccaggacaacttcctgcagagggtgggccagaatggcctgaagaacagcgagaaggagagcacagtgaacagcatcttccaggtgatccgcagctgcaacagaagcctggagacagatgaggaggacagccccagcgagggcaacagcagcaggaagagcagcctgaaggacaagagccgctggcagttcatcatcggggacctgctggacagcgacaatgacatctttgagcagagcaaggagtatgacagccacggcagcgaggacagccagaaggcctttgaccatggaacagagctgatcccctggtacgtgctgagcatccaggctgatgtgcaccagttcctgctgcagggcgccaccgtcatccactatgaccaggacacccacctgagcgcccgctgcttcctgcagctgcagcctgacaacagcaccctgacctgggtgaagcccaccacagccagccctgccagcagcaaggccaagctgggcgtgctgaacaacacagctgagcccgggaagttccccctgctgggcaatgccggcctgagcagcctgacagagggcgtgctggacctgtttgctgtgaaggctgtgtacatgggccaccctggcatcgacatccacacagtgtgtgtgcagaacaagctgggctccatgttcctgtctgagaccggggtgaccctgctgtatggcctgcagaccacagacaaccggctgctgcactttgtggcccccaagcacacagccaagatgctgttcagcggcctgctggagctgaccagggctgtgaggaagatgaggaagttcccagaccagaggcagcagtggctgaggaagcagtatgtgtccctgtaccaggaggatggccgctatgagggccccaccctggcccatgctgtggagctgtttggaggccgccgctggagcgccaggaaccccagccctggcaccagcgccaagaatgctgagaagcccaacatgcagaggaacaacaccctgggcatcagcaccaccaagaagaagaagaagatcctgatgagaggagagagcggggaggtgacagatgatgagatggccaccaggaaggccaagatgcacaaggagtgccgcagccgcagcggcagtgacccccaggacatcaatgagcaggaggagagcgaggtgaatgccatcgccaacccccccaaccccctgcccagcagaagagcccacagcctgaccacagctggcagccccaacctggccgccggcaccagcagccccatccggcctgtgagcagccctgtgctgagcagcagcaacaagagccccagcagcgcctggagcagcagctcctggcacggccgcatcaagggcggcatgaagggcttccagagcttcatggtgtctgacagcaacatgagctttgtggagtttgtggagctgttcaagagcttctctgtgcgcagcaggaaggacctgaaggacctgtttgatgtgtatgctgtgccctgcaacagaagtggcagcgagagcgcccccctgtacaccaacctgaccattgatgagaacaccagtgacctgcagcctgacctggacctgctgaccagaaatgtgtctgacctgggcctcttcatcaagagcaagcagcagctgagtgacaaccagaggcagatcagtgatgccatcgccgccgccagcatcgtgaccaacggcaccggcatcgagagcaccagcctgggcatcttcggcgtgggcatcctgcagctgaatgacttcctggtgaactgccagggcgagcactgcacctatgatgagatcctgagcatcatccagaagtttgagcccagcatctccatgtgccaccagggcctgatgagctttgagggctttgcccgcttcctgatggacaaggagaactttgccagcaagaatgatgagagccaggagaacatcaaggagctgcagctgcccctgagctactactacatcgagagcagccacaacacctacctgaccggccaccagctgaagggggagagctctgtggagctgtacagccaggtgctgctgcagggctgccgctctgtggagctggactgctgggatggagatgatggcatgcccatcatctaccacggccacaccctgaccaccaagatccccttcaaggaggtggtggaggccatcgacagaagtgccttcatcaacagcgacctgcccatcatcatcagcattgagaaccactgcagcctgccccagcagaggaagatggccgagatcttcaagacagtgtttggagagaagctggtgaccaagttcctgtttgaaacagacttcagtgatgaccccatgctgcccagcccagaccagctgaggaagaaggtgctgctgaagaacaagaagctgaaggcccaccagacccctgtggacatcctgaagcagaaggcccaccagctggcctccatgcaggtgcaggcctacaacggcggcaatgccaaccccaggcctgccaacaatgaggaggaggaggatgaggaggatgaatatgactatgactatgagagcctgagtgatgacaacatcctggaggacaggcctgagaacaagagctgcaatgacaagctgcagtttgagtacaatgaggagatccccaagaggatcaagaaggctgacaacagcgcctgcaacaagggcaaggtgtatgacatggagctgggggaggagttctacctggaccagaacaagaaggagagccggcagatcgcccctgagctgagtgacctggtgatctactgccaggccgtgaagtttcctggcctgagcaccctgaatgccagcggcagcagccggggcaaggagaggaagagcaggaagagcatctttggaaacaaccctggccgcatgagccctggagaaacagccagcttcaacaagaccagcggcaagagcagctgtgagggcatccggcagacctgggaggagagcagcagccccctgaaccccaccaccagcctgagcgccatcatccgcacccccaagtgctaccacatcagcagcctgaatgaaaatgctgccaagaggctgtgccgccgctacagccagaagctgacccagcacacagcctgccagctgctgcggacctacccagctgccaccagaattgacagcagcaaccccaaccccctgatgttctggctgcacggcatccagctggtggccctgaactaccagacagatgacctgcccctgcacctgaatgctgccatgtttgaggccaatggaggctgcggctacgtgctgaagccccctgtgctgtgggacaagaactgccccatgtaccagaagttcagccccctggagcgggacctggacagcatggaccctgctgtgtacagcctgaccatcgtgtctggccagaatgtgtgccccagcaacagcatgggcagcccctgcatcgaggtggatgtgctgggcatgcccctggacagctgccacttccgcaccaagcccatccacaggaacaccctgaaccccatgtggaatgagcagttcctgttccacgtgcactttgaggacctggtgttcctgcgctttgctgtggtggagaacaacagcagcgctgtgacagcccagaggatcatccccctgaaggccctgaagaggggctaccgccacctgcagctgaggaacctgcacaatgaggtgctggagatcagcagcctcttcatcaacagcaggaggatggaggagaacagcagcggcaacaccatgtctgccagctccatgttcaacacagaggagaggaagtgcctgcagacccaccgggtgacagtgcatggagtgcccggccctgagcccttcaccgtcttcaccatcaatggaggcaccaaggccaagcagctgctgcagcagatcctgaccaatgagcaggacatcaagcctgtgaccacagactacttcctgatggaggagaagtacttcatcagcaaggagaagaatgaatgtaggaagcagcccttccagagggccatcggccctgaggaggagatcatgcagatcctgagctcctggttccctgaggagggctacatgggcagaattgtgctgaagacccagcaggagaacctggaggagaagaacatcgtgcaggatgacaaggaggtgatcctgagcagcgaggaggagagcttctttgtgcaggtgcatgatgtgtccccagagcagcccaggacagtcatcaaggccccccgggtgtccacagcccaggatgtgatccagcagaccctgtgcaaggccaagtacagctacagcatcctgagcaaccccaaccccagcgactatgtgctgctggaggaggtggtgaaggacaccaccaacaagaagaccaccacccccaagagcagccagagggtgctgctggaccaggagtgtgtgttccaggcccagagcaagtggaagggggccggcaagttcatcctgaagctgaaggagcaggtgcaggccagccgggaggacaagaagaagggcatcagctttgccagcgagctgaagaagctgaccaagagcaccaagcagccccggggcctgaccagccccagccagctgctgaccagcgagagcatccagaccaaggaggagaagcctgtgggcggcctgagcagcagtgacaccatggactaccggcaggtgaagatcttcaagcaggaggtgaaggagtag

SEQ ID NO: 190744 - DNA, 6909 bp, Artificial Sequence
  derived and/or modified sequence
atgaccagcgaggagatgaccgccagcgtgctgatccccgtgacccagaggaaagtggttagcgcccagagcgcagcagacgaaagttccgagaaggtaagcgacattaatatatccaaagctcatacagtgcgtcgttctggggaaacctcccacaccatcagtcagctgaataaactgaaggaggaaccgagcgggtcgaaccttcctaaaatcctaagcattgctagggaaaagattgtcagcgatgaaaactcaaatgagaagtgctgggaaaagataatgcccgactctgcgaagaacctcaatattaattgtaacaacatcctaaggaatcaccagcatgggctgccacagcgacagttctacgagatgtataacagtgtggccgaggaagacctttgtcttgagaccggaatccccagtccacttgaaagaaaggtgttcccaggcatccaactggagctggacaggccttctatgggaatttcccctttaggcaaccagtctgttatcattgagaccgggcgtgcacaccccgactctagacgggccgtttttcatttccattacgaggttgataggcggatgtctgataccttctgcaccttgagcgaaaatctgatcctggacgactgtggcaactgtgtccccttgcctggaggggaggagaagcagaaaaagaattacgtggcgtatacgtgtaagctcatggaattagccaagaattgcgataataaaaacgagcagctgcagtgcgatcattgcgacactttaaacgataagtatttctgtttcgagggatcatgtgaaaaggtagacatggtttactctggggacagtttttgtcgcaaagattttactgacagccaggctgcgaaaacttttctgtcccatttcgaggacttccccgacaattgcgacgatgtcgaggaagatgctttcaagagcaagaaagagagaagcacactgctcgtgagaaggttctgcaagaatgatagggaggtcaaaaagtccgtgtacactggaacccgcgccatcgtgcggactctgccttctggccatataggtcttaccgcctggagctacatcgaccagaagaggaacggaccactcctgccttgcggtcgggtgatggagcctccttcaactgtggagattaggcaggatggaagtcagaggctgagtgaggcccagtggtaccctatctacaacgcagtgcggagggaggagaccgaaaataccgtcgggtcactcctgcatttcctgaccaaacttccagcttcagagaccgcccacggccggatctcggtcggaccatgtctcaaacagtgtgtcagagacaccgtatgtgagtatcgggccacactgcaacggacttcgatatctcagtacataacgggcagcctgctcgaggccactacatctctgggagctcggagcggcctgttgtcaaccttcggaggcagcaccggacgtatgatgctcaaggagcgccagcccggcccatcggtcgctaattccaatgcactgccgagttcttctgctggcatttccaaggaactgatcgatctccagcctctgatccagtttccagaagaggttgctagcattctcatggagcaggagcagacaatatacaggagagtcttgccagtggactatctgtgctttctgactagggacctggggactcccgaatgtcagagctcactgccttgtctcaaggcctctattagcgcttcaatcttgaccactcagaatggagagcacaacgcccttgaagatctcgtaatgcgcttcaatgaagtgagttcgtgggtgacatggctgatcctgactgcaggctcaatggaggagaagagagaggtgttcagttacctggtccatgtggccaaatgctgttggaacatgggaaattacaatgcagtcatggaatttctggcgggccttagatcacgcaaagtattgaaaatgtggcagtttatggaccagtcggacatagaaactatgagaagcctcaaagatgccatggcccagcatgagagttcctgcgagtatcgaaaggtagtcacaagagccctacacatacctggttgcaaggtagtccccttctgtggggttttcctcaaagaactttgcgaggttttggatggcgcctcaggattaatgaagctgtgcccacgttacaattcccaagaggaaaccttagaattcgtggctgattactcagggcaggacaacttcctccagcgcgtgggacagaatggactcaaaaatagcgagaaagagtcgacagtcaactccatcttccaagtgatccgcagctgtaaccgaagtctggagacagatgaggaagacagtccttccgagggtaacagttcccgtaagtcctctctcaaggacaagtccaggtggcaattcatcatcggtgacctcctggattctgataatgatatctttgagcagtcgaaggaatacgactcccatgggagtgaggatagtcagaaagcattcgatcatgggaccgagctgatcccttggtatgtgcttagcatccaggctgacgtgcatcagtttctgctccagggtgcgacagtgattcactacgaccaggatacgcatctgtcagcacgctgctttttacagctccagccagataactcaacgttgacctgggttaagccgacgacggcgagccccgcatcctccaaagctaaattgggcgttctgaataataccgccgagcctggtaagttccccttacttgggaacgctggactgagctccctcaccgagggcgtgctcgatctgtttgccgtgaaggcggtctacatgggccatcctggcatcgatattcatacggtgtgtgtgcaaaacaaactggggagtatgttcctctctgagactggtgtcactctactgtatggcctgcaaacaacggataaccgcctcctgcattttgtggcacccaaacacacggctaaaatgctgttttcagggcttctcgagcttacccgggccgtgaggaagatgaggaagtttccagaccagcgccagcagtggcttcgaaaacagtacgtttcattgtatcaggaggacggccgatacgagggccccacacttgcccacgccgtcgagctatttggggggcggaggtggtcagcgaggaatccaagccccggtaccagcgccaagaacgcagagaagcctaatatgcagcggaataacacccttggcatatcaactaccaagaagaaaaaaaaaatcctcatgagaggtgaatccggagaggtgactgacgatgagatggcaaccagaaaagcaaaaatgcacaaagagtgtcgatcgcgttcaggcagcgatccccaggatatcaacgaacaagaggagtcagaggtcaacgccatcgctaacccccccaaccctctgcccagtcgccgagcccactctttaactaccgctggctctccgaatctggccgccggaactagtagtcccatcagaccggtatcctcccctgtgctgtcaagctccaacaagtccccctcttctgcttggagctcatcttcttggcacggtaggattaagggcgggatgaaaggatttcaaagttttatggtgagtgactctaacatgtcctttgttgaatttgtggagctttttaagtctttcagcgttcgatctcgcaaagatcttaaggatctgtttgacgtgtacgcagtcccatgcaacagaagcggctccgaaagtgctcccctgtataccaatctaaccattgacgaaaatacctcggacctgcagcccgatctggatcttttaacgaggaatgtcagtgatttgggtttgtttatcaagtctaaacaacagctgtcagacaatcagagacagattagcgatgctattgcggcagcttcaatcgtcacaaacggtacaggcatcgaaagcacttctttgggcatctttggcgtcggcattctgcagttaaacgactttcttgtgaactgccaaggagagcactgcacatacgacgaaatcctcagtatcatccagaaattcgaaccaagcatctccatgtgccaccagggtttaatgtctttcgagggctttgcacggttcctgatggacaaagaaaattttgctagcaagaacgatgagtcccaagaaaacatcaaggagttacaactgcctctctcttattattacatcgagtcttctcataacacttatctcactggtcatcagcttaaaggcgaatcctccgttgaactgtacagccaggtacttctgcaaggctgccggtcggtggagctcgattgctgggacggcgacgatggtatgcctatcatatatcacgggcataccttaactaccaaaatcccatttaaagaggtagtcgaggccatcgaccggtcagcatttatcaatagtgatctgcccatcattattagtatcgagaatcattgttctctgccccagcagaggaaaatggctgagatatttaagacggtgttcggcgagaaattggtcaccaagttcttgtttgaaactgatttctcagatgatcctatgctgccttccccagaccaattaagaaaaaaggtgctgctgaagaataagaaattgaaggctcaccaaacaccagtggatatcctcaaacagaaggctcaccaattagcttcaatgcaggtgcaggcctacaatggaggcaacgcgaaccctcgccccgcgaataatgaggaggaagaagacgaggaggatgaatacgactacgactatgagagccttagcgatgacaacattctcgaggaccgccccgagaacaaaagctgtaacgacaagctccagtttgagtacaatgaggagatacccaaaaggataaaaaaagccgataattccgcatgtaacaaaggaaaagtctacgatatggaattaggcgaggaattctatctggatcaaaataaaaaggagagccggcagatcgcaccagaactatccgatttggtgatttactgccaggccgtgaaatttcccgggctatccactttgaacgctagcggatcttctcgggggaaggagcgaaaatcaagaaagagtatttttgggaacaatccaggaagaatgtcaccgggggagacagcgagtttcaataaaacatccggaaaaagtagctgcgaagggatacgacagacttgggaagagagctccagccccctgaaccctacaacctctttgtctgccataataaggacccctaagtgctaccacatatcaagcctgaacgagaacgccgcaaaacgcctgtgtcgcaggtattcccagaagttgactcagcacacggcatgccaactgctcagaacttaccctgctgccacacgtattgactccagcaatccgaacccccttatgttctggctgcacggtattcaattggttgctctaaactatcagaccgatgacctgcccctccatctgaatgctgctatgttcgaggccaacggcggttgcggttacgtgctcaagccacctgtgctttgggacaagaactgccctatgtatcagaaattctccccactggagcgcgaccttgattccatggaccctgcagtctattctctaaccatagtcagtgggcagaacgtctgtccatccaatagcatgggatctccatgcattgaagtcgatgtgttgggaatgccattggacagttgtcacttccgcaccaagcctatccaccgcaatacacttaacccaatgtggaatgaacagttcctgttccatgtgcacttcgaggacttggtgttccttcgtttcgctgtagttgaaaataacagcagcgcagtgaccgctcagaggataatccctctgaaagctcttaagagggggtaccgtcacctccagctccggaaccttcacaacgaagtgctggagatctcctctctgttcatcaatagtaggcggatggaagagaattcgagcggaaacacaatgtcagctagctctatgtttaatactgaagagagaaagtgtctgcagacccaccgcgttactgttcatggcgttcccggtcccgaacctttcacagtgtttactataaatggcggtaccaaagccaagcaacttctgcagcaaatcctgaccaatgaacaggacatcaagccggtgaccactgattacttcctcatggaggaaaagtactttatctctaaggaaaaaaatgaatgtcggaagcagccattccagcgggccattggacctgaagaagaaatcatgcagattctctccagctggtttcctgaggaaggctatatggggcgtatcgttctgaaaacacaacaggagaatttagaggagaagaacatcgtgcaagatgacaaagaggtgatcctttcatccgaagaggagtcgttttttgtccaggtgcacgatgtttccccagaacagccaaggacggtgatcaaagcgccgagagtgagcaccgctcaagacgtgatccaacaaacattgtgcaaagcgaagtactcctactctattttgtctaaccccaacccctctgattacgtattgttggaggaagtggtgaaggacactacaaacaaaaaaacaactaccccaaagagttctcaacgggtgttattggatcaggagtgtgtgttccaagcgcagagtaagtggaagggagcaggcaagttcatcctcaagttaaaggaacaggtgcaggcctcgagagaagataagaagaaggggatctcatttgcttcggagttgaagaagctgaccaagagcacaaaacaacccagagggttaacttctccaagtcagttactgacctcagagagtatacagacgaaggaggagaagcccgtggggggactgtcgagcagcgacaccatggactatagacagtag

SEQ ID NO: 190745 - DNA, 6939 bp, Artificial Sequence
  derived and/or modified sequence
atgaccagcgaggagatgaccgccagcgtgctgatccccgtgacccagcgcaaagttgtttccgctcagtccgccgctgatgaatcctccgaaaaagtgtctgacatcaatatatccaaagcccacacagtgcgcaggagtggcgaaacatcccacaccatctctcagctgaacaaacttaaagaagagccaagcggttccaatctgcccaaaattctgtcaattgccagagagaagatcgtgagtgacgagaatagcaatgaaaagtgctgggagaagatcatgcctgattccgccaagaatcttaacatcaattgcaataacattctgaggaaccatcagcatggattgccacagcgccagttctatgaaatgtacaatagcgtcgcagaagaggacttatgcctcgaaacgggtattccctctcctctggagagaaaggtcttcccgggaatccagctggagcttgatcgccctagcatggggatatcaccacttggaaatcagtccgtaatcatagagacggggcgggcgcacccggatagcaggcgtgcagtgtttcacttccactacgaagtcgacaggaggatgagcgacactttttgtaccctgagcgaaaacctcatcctggatgactgtgggaactgcgtgcctctgccagggggagaggaaaaacaaaagaaaaattatgtggcttatacgtgcaagctcatggaactcgctaagaattgtgataataaaaatgaacaactgcaatgtgaccattgcgataccctaaatgataagtacttctgttttgaaggctcgtgcgagaaagtggacatggtctatagcggcgacagcttctgtaggaaagatttcactgattcccaggcggcaaaaacttttctaagtcattttgaggatttccctgacaactgtgacgatgttgaagaggacgcgtttaagtccaagaaggagcggagcaccctgctagtacgtcggttttgcaagaacgacagagaagtaaagaaatccgtttatactgggactagagcaattgtccggacactcccaagcggccatattgggctgactgcttggtcctatatcgaccagaagcggaatggacccctgttaccatgtgggagagtgatggagcctccgagcacagtcgaaatcaggcaggacggatcacagagactctcagaagcccaatggtaccctatttataatgctgtgcggcgggaggaaactgagaacacggtgggcagtctactgcactttctcaccaagttgccagcctccgagaccgcacacggacggatcagcgtcggaccttgcctgaaacagtgtgtccgggacactgtgtgcgagtatcgggccacccttcagagaacatccatcagccagtacatcacaggatccctcctcgaggccactacctcactgggtgccagatcaggcttgctcagtacattcggggggtcaactgggcgcatgatgctgaaggaacgccagcccggtccctctgtcgccaacagcaatgccttgccaagctctagcgctggcatctccaaggaacttatcgacctgcaacccctgatccaattcccagaggaagtagccagtatcctgatggaacaggagcaaaccatataccggagggtgcttcctgtggactacctttgcttcctgacccgtgacctgggcacaccagaatgccagagcagtctgccctgtctgaaggcatccatttccgctagcatactcacaacgcagaacggtgaacacaacgccctggaagatcttgtaatgaggtttaacgaagtgagtagttgggtgacttggttgattctcacggccggatcaatggaagagaaacgggaggtattcagctacctggtccacgtggctaaatgctgttggaacatgggaaactacaacgccgtgatggaattcctggctggtctacgcagccggaaggtgcttaagatgtggcagtttatggatcagtccgacatcgagacaatgcgctcacttaaagatgctatggctcaacatgagagcagctgcgaatatcgtaaagtagtgacccgggcactccatatccctgggtgtaaagtagtccctttttgtggtgttttcttgaaagagctgtgtgaggtgctggatggagccagcggcctgatgaagttgtgcccccgatataatagccaggaggaaactcttgagttcgtcgccgactacagcggacaagacaattttcttcagcgggtcgggcaaaacggccttaagaactctgagaaggagagtacagtgaactccatcttccaggtgatcagaagttgcaaccgctcgctcgagacagacgaagaagattctcccagtgagggcaattctagccgcaaatctagcttgaaagacaaaagtaggtggcagtttatcatcggcgatttgttggactctgacaatgatatctttgagcagagtaaggagtatgacagtcacggctcagaggacagccagaaagcctttgaccatgggacagagctaattccttggtacgtcctgtccattcaggctgacgtgcaccaatttctattgcaaggagcaaccgttattcactacgatcaagacactcacctctcagctcgatgcttcttgcagctgcaaccggataattccactcttacttgggtcaagcccacaaccgccagtcccgctagctctaaggcgaagctgggcgttctgaataatactgccgaaccagggaagttcccattgttgggcaatgcaggtctttcgtcgttaacagagggggtgctggacctgttcgccgtgaaagctgtatacatggggcacccaggtatcgatatacataccgtttgtgtgcagaataagctagggtccatgtttctcagcgaaaccggggtcaccctgttatacggtcttcagactacggacaatcgtctcctgcactttgttgcgccaaaacatacagcaaagatgctgttttcaggcctcctcgaactgacaagggctgtgcggaagatgcgtaagtttcccgaccagcggcagcaatggctgcgaaaacagtacgtgagcctgtaccaagaagatggcaggtacgaaggacctaccctggcacacgccgttgaactgttcggcgggcgcaggtggagtgcccgtaatccaagccctggcacaagcgcaaagaacgccgagaaacccaatatgcaaagaaacaatactctcggtattagcacgactaaaaagaagaaaaaaatcctgatgcggggagaatctggggaggtgacagatgacgagatggctactcgtaaggccaaaatgcataaagaatgtaggagcaggtccggctccgacccgcaggatattaacgagcaggaggagagcgaggtgaacgcaattgccaatccacccaaccccctgccatcaagaagggcccactctctaactacggccggctccccgaacctcgccgccgggacatcctctcctattaggccagtaagctcaccagtgttatcttccagtaataagtccccttcatcagcatggtcaagttccagttggcacggtcggattaagggggggatgaagggctttcagtcgttcatggtgtccgactcaaatatgtcgttcgtcgagttcgttgagctgttcaagtccttttccgtgaggtctcgtaaagaccttaaggacctttttgacgtctacgccgttccttgcaacagaagtggctcggagagtgctcctctttataccaatctaaccatagacgagaacacctccgacctccaacctgacctggaccttttgactcgaaatgtgtccgatctgggcctctttataaagtcgaaacaacagttgtccgacaatcaaagacagattagtgacgcaatagcggctgctagcattgtcactaacggcacaggtatcgagtcaacttctctcggcatcttcggggtgggaattctgcaactgaatgacttcctggtcaactgtcaaggagagcattgtacctacgacgagattctttcgatcatacagaaattcgagccaagcattagtatgtgccaccagggacttatgagcttcgaaggattcgcccggttcttgatggacaaggagaacttcgccagtaaaaacgacgaaagtcaagagaatatcaaggaactgcagctgcccttaagctactactacattgagtccagccacaacacttacctgaccggccaccagctgaagggggaatcaagcgtggaactgtattctcaggttctgctgcaggggtgtcgttccgtggagctcgattgttgggatggagacgatggcatgcctataatttaccacggccacacactcacaacaaaaatcccgtttaaagaggttgtggaagcaattgacagatcagcattcatcaacagcgatctgcccattattatttccattgagaaccattgctccctgccacagcagcggaaaatggccgagattttcaagactgtatttggggagaagctagtgactaaattcttgttcgaaacagatttcagtgacgaccctatgttaccatctcctgatcagttgcgtaagaaagtacttctaaaaaataagaagttaaaggcccaccagacccccgtagacatactcaagcaaaaagcccaccagctggcatccatgcaggtacaggcctataatggtggcaacgccaacccccggccagctaacaatgaagaggaggaggacgaggaggacgagtacgattatgattacgaatccttatccgacgacaacatcctggaagataggcccgaaaataagagctgtaatgacaagctccagttcgaatacaatgaggagattcctaagcggattaaaaaggctgacaattccgcatgtaacaaaggcaaagtgtacgatatggagctgggagaagagttctatctagaccagaacaaaaaagaatcccgtcagatcgcacccgaactgagcgaccttgtgatctattgccaagccgtcaagtttccgggactgtctactctcaacgcaagtgggagctccaggggaaaggagcgcaagtctcgtaaaagtattttcgggaataatccaggccgcatgagtccgggagaaacagcaagctttaacaaaacctctggcaagtccagctgtgagggaataaggcagacatgggaggaaagttccagtccactcaacccaaccacctccttgtcagctatcatccgcacccctaagtgctaccatatcagcagccttaatgaaaatgctgccaagcggctatgtagacgatacagtcagaaactgactcagcacactgcatgtcagttgctgcggacttaccccgcggctactagaatcgacagcagcaacccaaacccgcttatgttttggctacacggaattcagctcgtcgcccttaactaccagaccgacgatttgcccctacatcttaacgctgcaatgtttgaggccaatggggggtgcggatacgtgctgaagcccccagtgctctgggacaagaattgtcctatgtaccagaagttctcacctctggagcgggacttggacagcatggaccccgccgtgtactcactaacaatcgtgtctggccagaatgtctgtccatcaaattccatgggatcgccttgcattgaagtggatgttcttgggatgcctctggattcttgtcacttccggactaagccgatccaccgcaatacgctgaaccctatgtggaacgagcagttcctgtttcatgtccacttcgaagacctggtgtttctgagatttgctgtggttgaaaataattcttctgccgtcactgcacaaagaatcattcccttgaaggccctcaagagaggttatcgacacctgcaactgagaaatcttcacaatgaggtgctggagatttcctcgttgttcattaacagtagaaggatggaggaaaattcaagcgggaacactatgtccgccagttctatgtttaacacagaggagcggaagtgtctgcaaacgcacagagttacagttcacggcgtcccaggtccggaacctttcaccgtgtttacgattaacggagggacaaaggccaagcagctgttgcagcagatactaacgaatgagcaagacatcaagccagtgaccacagattacttcctgatggaggaaaagtactttattagcaaggaaaaaaacgagtgccgaaagcagcctttccagagagctattggaccagaagaggagattatgcagatcctatcctcctggtttccagaagaaggatacatgggtagaatcgtgctcaagacgcagcaagagaatctggaagagaagaacatagtgcaagatgacaaagaggtaattctttcttctgaggaagaatcttttttcgtgcaggtacatgacgtgagccccgagcaaccacgcacagttatcaaggctcccagagtgtccacagctcaagatgtgatacagcagaccctctgtaaggccaaatactcttactcaatcctgagtaacccaaatccgagcgactatgttctactggaggaggtggttaaggatacaaccaacaagaagacgactactcctaaaagctctcagagagtcctgctcgaccaagaatgcgtctttcaggcacaaagtaagtggaaaggggctgggaaatttatactgaaactcaaagagcaggtgcaagccagcagggaggacaaaaaaaaaggaatctccttcgccagcgagctgaaaaaactgacgaagtctaccaagcagccgagaggacttaccagcccttcccaattgctgactagcgaatcaattcaaacaaaggaagaaaaaccggtcggagggctttcctcctcagacaccatggactatagacaggtgaagatattcaagcaggaagtgaaggagtag

SEQ ID NO: 190746 - DNA, 7992 bp, Artificial Sequence
  derived and/or modified sequence
cgctgggcaacgtgggcaacgcggcgggcggcgggctcgcgcggcgggaggggcagcggcggcgcgcccgggctctacctcccgggctctgcctcccgggctctgcctctcgggcacttgcctggctcctgcgcgttcctgggcatcggctctgcagctgacacacagtagcggggacacccgacgccgctagcgacaggcgcgcggacggctggtcccagagggacgctgcgcttggggacgccggcgagactcgccaggagccaagaggaaacaggaatcattcaaactggattttaaaatcattgcaaatcagtgatggatcagaagttgcagagtgcaatcccgagtaaaagtcttcaaaaaattttgcttcaggtaacagaggaaggaaaattgatctaccaccttaaaaccctgatctagaaaaaatatatattcatgataggaagttataactaagaaaatttatttgcctcttaatgctcctgaatgaaaggaattatccctttgttctttgggaggacttgtgtatctgagattgttgtaataatcagtcattttattaaaaccttgacatgatcaccagggaggaaaaatagagcaatagtcaaaacctgtgtgttagtccaagatgacttctgaagaaatgacagcttctgttctcatacctgtgactcagagaaaagtggtttctgcccagtcggctgcagatgaaagtagtgaaaaggtctcagacatcaatatttcaaaagcacatactgtcagacgaagtggggagacttctcataccatctcacaactgaacaaacttaaagaagaaccttctggaagcaacttgccaaagattctctcaatagcgagggagaaaatagtgagtgatgagaacagtaatgaaaaatgttgggagaaaatcatgccagattctgcgaaaaaccttaacattaactgcaacaacatattgagaaaccatcagcatggccttcctcagagacaattttatgaaatgtacaactctgttgctgaggaagacttgtgtttagaaactggaattccttctccactggaaagaaaggtgttccctggaattcaactggaactagacagaccttccatgggcattagtcctttaggaaatcagtcagtgatcatagagacaggcagagcacaccctgacagcagaagggcagtatttcattttcattatgaagttgacagaagaatgtcagacactttctgtaccctatcagaaaacttaattttagacgattgtggaaattgtgtaccactacctgggggtgaggagaagcaaaagaaaaactatgtggcatatacctgtaaactgatggaattggccaaaaattgtgataataagaatgagcagctgcagtgtgatcattgtgacaccttgaatgataaatacttttgctttgaaggctcttgtgagaaggttgacatggtatattcaggtgatagcttttgtaggaaagactttactgacagtcaagctgccaagacctttttgagccattttgaggacttccctgataattgtgatgatgtagaagaagacgcttttaaaagcaaaaaggagcgatccactttgttagtcaggagattctgtaaaaatgacagagaagttaagaaatctgtgtatactggaacaagagcaattgtgagaactctgccttctggccacattgggctgactgcatggagttacatagatcagaagagaaatggtcccttactgccttgtgggagagtaatggaacccccgtcaacagtggagataaggcaagatgggagccaacgtctgtcagaagcccagtggtatcctatctacaatgcagtgagaagagaagaaacagaaaatacagttggatctctactccatttcctcaccaagctcccagcctccgagacagcccatggaaggataagcgttggtccatgcttaaagcaatgtgtccgagacactgtatgtgagtatcgcgccaccctccaaaggacttcaatatcgcagtacatcaccggttctctcctagaagcaaccacgtctttgggagcaagaagtggccttctcagtacttttggaggatccactggacgaatgatgctgaaagaacgccagccaggcccctctgtggccaattccaatgccctcccttcaagttcagctgggatcagcaaggagctgatcgatctgcagcctctcatccagttcccagaggaagtcgccagcatcctgatggagcaagagcagactatttaccgcagggtcttgccagtcgactacctttgcttcttaacacgggacttgggcactcctgaatgccagagctccttgccctgcctcaaagcatccatctcagcgtcgattcttaccactcagaatggagagcacaatgcccttgaagatctggtgatgaggtttaatgaggtgagctcctgggtgacatggctgatcctcacggcaggctccatggaggagaagcgagaagtcttttcatatttggtgcatgtggccaaatgctgctggaacatgggcaactacaacgctgtcatggagttcttggctggcctcaggtcaagaaaagttttaaaaatgtggcagttcatggaccagtctgatattgagaccatgaggagcctgaaggatgctatggcccagcatgagtcctcttgtgagtacagaaaggtggtgacacgtgccctgcacatccctggctgtaaggtggttccattctgtggggtgtttctgaaggagctctgtgaagtgcttgacggcgcctccggtctcatgaagctttgcccgcggtacaattcccaagaagaaactttagagtttgtagcagattacagtggacaagataatttcttacaacgagtgggacaaaatggcttaaagaattcggagaaggagtccactgtcaacagcatctttcaggtcatccggagctgcaatcgaagtctggagacagacgaggaggacagccccagtgaaggaaacagctccaggaaaagctccttgaaggataaaagccgatggcagtttataattggagatttgttggattcagacaatgacatctttgagcaatccaaagaatacgactctcatggttcagaggactcacagaaggccttcgaccatgggacggagctcatcccttggtacgtgctgtccatccaagccgatgtgcaccagttcctgctgcagggggccacggtcatccactacgaccaggacacacacctctctgcccgctgcttcctccagcttcagcccgacaatagcaccttgacctgggtaaagcccacaactgcctccccagccagcagtaaagcaaaacttggtgtacttaataacacagctgagcctggaaaattcccactactgggtaatgctggattaagtagcctgacggaaggggtcttggatctttttgcagtgaaggctgtatacatgggccaccctggcattgatatacacactgtgtgtgttcagaacaaactgggtagcatgttcctgtcagagactggtgtgacattgctctatgggcttcagaccacagacaacagattattgcacttcgtggcaccaaagcacacagctaaaatgctcttcagcggattattggaactcactagagctgtgagaaagatgaggaaattccctgaccaaagacagcagtggctgcggaaacagtacgtcagcctttatcaggaggatggacggtatgaaggcccaactttggctcacgctgtggagttgtttggtggcagacggtggagtgctcgaaaccccagccccggaacatcagcaaagaatgctgagaagcccaatatgcagagaaacaataccctgggcataagcactaccaagaaaaagaagaaaatcctcatgaggggtgagagtggagaggtaactgacgatgagatggcaacccgaaaggccaagatgcacaaagagtgtcgaagccggagtggttctgatcctcaagacattaatgaacaagaagaatcagaggtgaatgccatcgctaaccctccaaaccccctcccttccagaagagcccactctttgaccacagctgggtcccccaacttggctgccgggacgtcatctcccatcaggccagtgtcctcccctgtgctgtcttcttcaaacaagagcccatccagtgcttggagcagtagtagctggcacgggcggatcaaaggcggcatgaagggatttcagagcttcatggtttcagatagcaacatgagttttgttgaatttgttgagctgttcaaatcattcagtgtcaggagccgcaaggacctgaaggatctgtttgatgtctatgcagtgccctgcaaccgatctggctccgagtcagccccactctacaccaacctgacaattgatgaaaacaccagcgatcttcagcctgacctagatctgttgaccagaaatgtctcggatttggggttgttcattaagagtaaacagcagctatcggacaaccagaggcagatatctgatgccattgctgctgcaagcattgtgacaaatggcactgggattgagagcacatctctgggcatttttggggtgggcatacttcagctcaacgatttcctcgtgaattgccaaggagaacactgcacttatgatgaaatcctcagcatcatccagaagttcgagcctagcatcagtatgtgtcatcagggactaatgtcatttgaagggtttgccaggtttctgatggataaagaaaattttgcctcaaaaaatgatgagtcacaggagaacattaaagaactgcagctacccctctcatactattacatcgaatcttcgcacaatacctacctcacgggccatcagctcaaaggagaatcctcggtagaactctacagccaggtccttttgcaaggctgtcgaagtgtagaattggactgctgggacggagacgatgggatgcccatcatttatcatggacatacgctgacaaccaagatccccttcaaggaagtggttgaagccattgatcgcagtgccttcatcaactctgacctgccaatcatcatatcgattgagaaccactgttcattgcctcagcaacgaaaaatggcagaaattttcaagactgtgtttggagaaaagctggtgactaaattcttatttgagactgatttctcagatgatccaatgcttccttcacctgaccaactcagaaagaaagttcttcttaaaaacaagaagctaaaagcccatcagacgccagtggatatcttaaagcaaaaggctcatcagttagcatctatgcaagtgcaggcttataatggtgggaatgccaacccccgacctgccaataatgaggaagaggaagatgaggaggacgaatatgattatgactatgaatccctttctgatgacaacattctggaagacagacctgaaaataaatcatgtaatgacaagcttcagtttgaatataatgaagaaatcccaaagaggataaagaaagcagataactctgcttgcaacaaaggaaaggtttatgatatggaactgggagaagaattttatcttgatcagaataaaaaggaaagcagacagattgcaccagagctttctgaccttgtaatctattgtcaagcagtaaaatttccaggactgtcaactctaaatgcatctggctctagcagaggaaaagaaaggaaaagcaggaagtccatttttggcaacaatccgggcagaatgagcccaggggagacagcatcatttaacaaaacatctggaaaaagttcctgtgaaggcattcgacagacctgggaggaatcttcttcccctctcaacccaaccacgtccctcagtgctatcattagaactcccaaatgttatcatatctcgtcgctgaatgaaaatgccgccaaacgtctgtgtcgcaggtattctcagaaactgacccagcacaccgcctgtcagctgctgagaacttaccctgctgccacccgcatcgactcttccaacccgaaccccctcatgttctggctccatgggatacagcttgtggcactcaactaccagactgatgatctccctttacatttaaatgctgcaatgtttgaggcaaatggtggttgtggttatgtattgaaacctccagttctgtgggacaagaactgccccatgtatcagaagttttctccactagaaagagatctggacagcatggatcctgcagtctattctttaactattgtctctggtcagaatgtgtgccccagtaatagcatgggaagcccgtgcattgaagtcgacgtcctgggcatgcctctggacagctgccatttccgcacaaagcccatccatcgaaacaccctgaaccccatgtggaacgagcagtttctgttccacgttcacttcgaagatcttgtatttcttcgttttgcagttgtggaaaacaatagttcagcggtaactgctcagagaatcattccactgaaagctttaaaacgaggatatcgacatcttcagctgcgaaaccttcacaatgaagtcttggagatttctagtttattcattaacagcagaaggatggaagaaaattcctctggcaataccatgtcagcctcttcgatgtttaatacagaagaaagaaaatgtttgcagactcacagagtcacggtgcatggggtcccagggccagagccctttaccgttttcactattaatggaggcaccaaggcaaagcagcttctgcagcaaattctgacaaatgaacaagacatcaaacctgttaccacagactattttttgatggaagaaaaatattttatatctaaagaaaagaatgaatgtaggaaacaaccattccagagagccattggtccagaagaggagatcatgcaaattttaagcagctggtttccagaagagggatacatgggcaggattgtcttaaaaacccagcaggaaaacctagaagagaaaaacattgttcaagatgacaaagaggtgatcttgagctcagaggaggagagtttctttgtccaagtgcatgatgtttctccagagcaacctcgaacagtcatcaaagcaccccgcgtcagcactgcacaggatgtcattcagcagaccttatgcaaagccaaatattcctacagcatcctgagcaaccccaatccaagcgactatgtgcttttggaagaggtggtgaaagacactaccaacaagaagactaccacaccaaagtcctctcagcgggtccttctggatcaggagtgtgtgtttcaagcccaaagcaagtggaaaggtgcaggaaaattcatccttaagctaaaggagcaggtgcaggcatctcgagaagataaaaagaaaggcatttctttcgcaagtgaactcaagaagctcaccaagtcaactaaacagccccgaggacttacatcaccttctcagctcttgacctcagaaagtatccaaaccaaggaggagaaacctgtgggtggcttgtcctccagtgacacaatggattaccgacagtgactaagggcagcatgtttaacccaggtgaagatctttaagcaagaagttaaagagtgaacatggtggaaaaaatataattattttcatcagacttaaactggaaattgatgatttctgaactgaagccttcacacatgtgagatccatgctgaggagaagcaaaatggcacagggctagttgccaccaaccaatttactgatgaatgaagcccaggggactgccattttataaatgtcagcagttggaaaaatcgtcacgaattgacttagagcaagggtcagcaagcttgtctgtaaagggccaaacagtaaatattttagggctgggggccataaaatatgttgcaaccacccaattctgccattgtagtgcaaaagcagccatagacaacacatacatgaacgaacgtggctgtattccaataaaactttatttatggacactgaaa

SEQ ID NO: 190747 - DNA, 7563 bp, Artificial Sequence
  derived and/or modified sequence
atctaccaccttaaaaccctgatctagaaaaaatatatattcatgataggaagttataactaagaaaatttatttgcctcttaatgctcctgaatgaaaggaattatccctttgttctttgggaggacttgtgtatctgagattgttgtaataatcagtcattttattaaaaccttgacatgatcaccagggaggaaaaatagagcaatagtcaaaacctgtgtgttagtccaagatgacttctgaagaaatgacagcttctgttctcatacctgtgactcagagaaaagtggtttctgcccagtcggctgcagatgaaagtagtgaaaaggtctcagacatcaatatttcaaaagcacatactgtcagacgaagtggggagacttctcataccatctcacaactgaacaaacttaaagaagaaccttctggaagcaacttgccaaagattctctcaatagcgagggagaaaatagtgagtgatgagaacagtaatgaaaaatgttgggagaaaatcatgccagattctgcgaaaaaccttaacattaactgcaacaacatattgagaaaccatcagcatggccttcctcagagacaattttatgaaatgtacaactctgttgctgaggaagacttgtgtttagaaactggaattccttctccactggaaagaaaggtgttccctggaattcaactggaactagacagaccttccatgggcattagtcctttaggaaatcagtcagtgatcatagagacaggcagagcacaccctgacagcagaagggcagtatttcattttcattatgaagttgacagaagaatgtcagacactttctgtaccctatcagaaaacttaattttagacgattgtggaaattgtgtaccactacctgggggtgaggagaagcaaaagaaaaactatgtggcatatacctgtaaactgatggaattggccaaaaattgtgataataagaatgagcagctgcagtgtgatcattgtgacaccttgaatgataaatacttttgctttgaaggctcttgtgagaaggttgacatggtatattcaggtgatagcttttgtaggaaagactttactgacagtcaagctgccaagacctttttgagccattttgaggacttccctgataattgtgatgatgtagaagaagacgcttttaaaagcaaaaaggagcgatccactttgttagtcaggagattctgtaaaaatgacagagaagttaagaaatctgtgtatactggaacaagagcaattgtgagaactctgccttctggccacattgggctgactgcatggagttacatagatcagaagagaaatggtcccttactgccttgtgggagagtaatggaacccccgtcaacagtggagataaggcaagatgggagccaacgtctgtcagaagcccagtggtatcctatctacaatgcagtgagaagagaagaaacagaaaatacagttggatctctactccatttcctcaccaagctcccagcctccgagacagcccatggaaggataagcgttggtccatgcttaaagcaatgtgtccgagacactgtatgtgagtatcgcgccaccctccaaaggacttcaatatcgcagtacatcaccggttctctcctagaagcaaccacgtctttgggagcaagaagtggccttctcagtacttttggaggatccactggacgaatgatgctgaaagaacgccagccaggcccctctgtggccaattccaatgccctcccttcaagttcagctgggatcagcaaggagctgatcgatctgcagcctctcatccagttcccagaggaagtcgccagcatcctgatggagcaagagcagactatttaccgcagggtcttgccagtcgactacctttgcttcttaacacgggacttgggcactcctgaatgccagagctccttgccctgcctcaaagcatccatctcagcgtcgattcttaccactcagaatggagagcacaatgcccttgaagatctggtgatgaggtttaatgaggtgagctcctgggtgacatggctgatcctcacggcaggctccatggaggagaagcgagaagtcttttcatatttggtgcatgtggccaaatgctgctggaacatgggcaactacaacgctgtcatggagttcttggctggcctcaggtcaagaaaagttttaaaaatgtggcagttcatggaccagtctgatattgagaccatgaggagcctgaaggatgctatggcccagcatgagtcctcttgtgagtacagaaaggtggtgacacgtgccctgcacatccctggctgtaaggtggttccattctgtggggtgtttctgaaggagctctgtgaagtgcttgacggcgcctccggtctcatgaagctttgcccgcggtacaattcccaagaagaaactttagagtttgtagcagattacagtggacaagataatttcttacaacgagtgggacaaaatggcttaaagaattcggagaaggagtccactgtcaacagcatctttcaggtcatccggagctgcaatcgaagtctggagacagacgaggaggacagccccagtgaaggaaacagctccaggaaaagctccttgaaggataaaagccgatggcagtttataattggagatttgttggattcagacaatgacatctttgagcaatccaaagaatacgactctcatggttcagaggactcacagaaggccttcgaccatgggacggagctcatcccttggtacgtgctgtccatccaagccgatgtgcaccagttcctgctgcagggggccacggtcatccactacgaccaggacacacacctctctgcccgctgcttcctccagcttcagcccgacaatagcaccttgacctgggtaaagcccacaactgcctccccagccagcagtaaagcaaaacttggtgtacttaataacacagctgagcctggaaaattcccactactgggtaatgctggattaagtagcctgacggaaggggtcttggatctttttgcagtgaaggctgtatacatgggccaccctggcattgatatacacactgtgtgtgttcagaacaaactgggtagcatgttcctgtcagagactggtgtgacattgctctatgggcttcagaccacagacaacagattattgcacttcgtggcaccaaagcacacagctaaaatgctcttcagcggattattggaactcactagagctgtgagaaagatgaggaaattccctgaccaaagacagcagtggctgcggaaacagtacgtcagcctttatcaggaggatggacggtatgaaggcccaactttggctcacgctgtggagttgtttggtggcagacggtggagtgctcgaaaccccagccccggaacatcagcaaagaatgctgagaagcccaatatgcagagaaacaataccctgggcataagcactaccaagaaaaagaagaaaatcctcatgaggggtgagagtggagaggtaactgacgatgagatggcaacccgaaaggccaagatgcacaaagagtgtcgaagccggagtggttctgatcctcaagacattaatgaacaagaagaatcagaggtgaatgccatcgctaaccctccaaaccccctcccttccagaagagcccactctttgaccacagctgggtcccccaacttggctgccgggacgtcatctcccatcaggccagtgtcctcccctgtgctgtcttcttcaaacaagagcccatccagtgcttggagcagtagtagctggcacgggcggatcaaaggcggcatgaagggatttcagagcttcatggtttcagatagcaacatgagttttgttgaatttgttgagctgttcaaatcattcagtgtcaggagccgcaaggacctgaaggatctgtttgatgtctatgcagtgccctgcaaccgatctggctccgagtcagccccactctacaccaacctgacaattgatgaaaacaccagcgatcttcagcctgacctagatctgttgaccagaaatgtctcggatttggggttgttcattaagagtaaacagcagctatcggacaaccagaggcagatatctgatgccattgctgctgcaagcattgtgacaaatggcactgggattgagagcacatctctgggcatttttggggtgggcatacttcagctcaacgatttcctcgtgaattgccaaggagaacactgcacttatgatgaaatcctcagcatcatccagaagttcgagcctagcatcagtatgtgtcatcagggactaatgtcatttgaagggtttgccaggtttctgatggataaagaaaattttgcctcaaaaaatgatgagtcacaggagaacattaaagaactgcagctacccctctcatactattacatcgaatcttcgcacaatacctacctcacgggccatcagctcaaaggagaatcctcggtagaactctacagccaggtccttttgcaaggctgtcgaagtgtagaattggactgctgggacggagacgatgggatgcccatcatttatcatggacatacgctgacaaccaagatccccttcaaggaagtggttgaagccattgatcgcagtgccttcatcaactctgacctgccaatcatcatatcgattgagaaccactgttcattgcctcagcaacgaaaaatggcagaaattttcaagactgtgtttggagaaaagctggtgactaaattcttatttgagactgatttctcagatgatccaatgcttccttcacctgaccaactcagaaagaaagttcttcttaaaaacaagaagctaaaagcccatcagacgccagtggatatcttaaagcaaaaggctcatcagttagcatctatgcaagtgcaggcttataatggtgggaatgccaacccccgacctgccaataatgaggaagaggaagatgaggaggacgaatatgattatgactatgaatccctttctgatgacaacattctggaagacagacctgaaaataaatcatgtaatgacaagcttcagtttgaatataatgaagaaatcccaaagaggataaagaaagcagataactctgcttgcaacaaaggaaaggtttatgatatggaactgggagaagaattttatcttgatcagaataaaaaggaaagcagacagattgcaccagagctttctgaccttgtaatctattgtcaagcagtaaaatttccaggactgtcaactctaaatgcatctggctctagcagaggaaaagaaaggaaaagcaggaagtccatttttggcaacaatccgggcagaatgagcccaggggagacagcatcatttaacaaaacatctggaaaaagttcctgtgaaggcattcgacagacctgggaggaatcttcttcccctctcaacccaaccacgtccctcagtgctatcattagaactcccaaatgttatcatatctcgtcgctgaatgaaaatgccgccaaacgtctgtgtcgcaggtattctcagaaactgacccagcacaccgcctgtcagctgctgagaacttaccctgctgccacccgcatcgactcttccaacccgaaccccctcatgttctggctccatgggatacagcttgtggcactcaactaccagactgatgatctccctttacatttaaatgctgcaatgtttgaggcaaatggtggttgtggttatgtattgaaacctccagttctgtgggacaagaactgccccatgtatcagaagttttctccactagaaagagatctggacagcatggatcctgcagtctattctttaactattgtctctggtcagaatgtgtgccccagtaatagcatgggaagcccgtgcattgaagtcgacgtcctgggcatgcctctggacagctgccatttccgcacaaagcccatccatcgaaacaccctgaaccccatgtggaacgagcagtttctgttccacgttcacttcgaagatcttgtatttcttcgttttgcagttgtggaaaacaatagttcagcggtaactgctcagagaatcattccactgaaagctttaaaacgaggatatcgacatcttcagctgcgaaaccttcacaatgaagtcttggagatttctagtttattcattaacagcagaaggatggaagaaaattcctctggcaataccatgtcagcctcttcgatgtttaatacagaagaaagaaaatgtttgcagactcacagagtcacggtgcatggggtcccagggccagagccctttaccgttttcactattaatggaggcaccaaggcaaagcagcttctgcagcaaattctgacaaatgaacaagacatcaaacctgttaccacagactattttttgatggaagaaaaatattttatatctaaagaaaagaatgaatgtaggaaacaaccattccagagagccattggtccagaagaggagatcatgcaaattttaagcagctggtttccagaagagggatacatgggcaggattgtcttaaaaacccagcaggaaaacctagaagagaaaaacattgttcaagatgacaaagaggtgatcttgagctcagaggaggagagtttctttgtccaagtgcatgatgtttctccagagcaacctcgaacagtcatcaaagcaccccgcgtcagcactgcacaggatgtcattcagcagaccttatgcaaagccaaatattcctacagcatcctgagcaaccccaatccaagcgactatgtgcttttggaagaggtggtgaaagacactaccaacaagaagactaccacaccaaagtcctctcagcgggtccttctggatcaggagtgtgtgtttcaagcccaaagcaagtggaaaggtgcaggaaaattcatccttaagctaaaggagcaggtgcaggcatctcgagaagataaaaagaaaggcatttctttcgcaagtgaactcaagaagctcaccaagtcaactaaacagccccgaggacttacatcaccttctcagctcttgacctcagaaagtatccaaaccaaggaggagaaacctgtgggtggcttgtcctccagtgacacaatggattaccgacaggtgaagatctttaagcaagaagttaaagagtgaacatggtggaaaaaatataattattttcatcagacttaaactggaaattgatgatttctgaactgaagccttcacacatgtgagatccatgctgaggagaagcaaaatggcacagggctagttgccaccaaccaatttactgatgaatgaagcccaggggactgccattttataaatgtcagcagttggaaaaatcgtcacgaattgacttagagcaagggtcagcaagcttgtctgtaaagggccaaacagtaaatattttagggctgggggccataaaatatgttgcaaccacccaattctgccattgtagtgcaaaagcagccatagacaacacatacatgaacgaacgtggctgtattccaataaaactttatttatggacactg

SEQ ID NO: 190748 - DNA, 6909 bp, Artificial Sequence
  derived and/or modified sequence
atgactagtgaggaaatgacggcatcagttcttataccagtgacccagagaaaggttgtttcagctcagtctgctgcagatgaatccagcgagaaagtgtctgacatcaatatatcgaaagcacatacagtgcgacggtccggggaaactagtcataccatcagtcagctaaacaagcttaaggaggagccttctgggtctaacctccccaaaatcctatccatcgcgagggaaaagattgtctccgacgagaacagcaatgaaaagtgttgggagaaaattatgccagactcagccaagaatctgaacattaattgcaataacattctgcggaaccaccagcacggacttccacagcggcagttctacgaaatgtacaacagcgtggctgaagaagacctctgcctggagactggaatccccagtcccctcgaacgcaaagtgtttccaggtattcagctggagctggatcgcccttcaatgggtatttcccccttaggaaaccagagcgtgattatcgagacagggagagcacaccctgactcacggcgagccgttttccatttccactatgaggtggatcgaagaatgtccgatactttttgcacactcagcgagaacttgatactggacgactgcgggaactgcgtccccctgcccggtggcgaagaaaagcagaagaagaattatgtggcctatacctgtaagctgatggaactggcaaagaactgtgacaataaaaacgaacagcttcagtgcgaccattgcgatacactgaatgataaatacttttgttttgagggctcttgtgagaaggttgacatggtatatagtggcgattctttctgccgaaaggattttacagattcacaggctgccaaaacttttctttctcactttgaggatttccccgataattgtgatgatgtcgaggaggatgcctttaaatctaaaaaggaaaggtccactttgctcgttcgacggttttgtaaaaacgaccgtgaagtcaagaagtctgtctatacgggcactcgcgctatagtccggacattaccgagtggccacatagggttaacggcatggagttacatcgaccagaaaagaaacggcccactgctgccgtgtgggcgtgtgatggagcccccatcaaccgtcgaaatccgccaggacggcagccagcgattatccgaagcccaatggtaccccatctacaatgccgtgcgaagggaagaaactgagaacaccgtgggaagcttgttacactttctgactaagctgcccgcatctgagacagcacacgggaggatttctgtgggcccatgcctgaagcaatgcgtgcgcgacacagtatgtgagtatagagcgacacttcaaagaactagtatctcacaatatattacaggttctttgttagaagccactacttccctcggagccagatcaggcctgctttctacttttggcggaagcacaggaaggatgatgctgaaggaacgccagcccggtccgagtgtggctaattcaaacgctttgccctctagcagtgctggcattagcaaagagctgatcgatctgcagcccctgatccaatttcccgaagaggtcgcatctatactgatggagcaggaacaaactatttaccgcagagtgctcccagtggactatctgtgtttccttactcgggatctggggacaccagagtgccaatctagcctgccttgcttgaaggcttcaatctcagcatctatcctgacaacccagaacggagagcataatgcgttagaagatctggtcatgcgatttaatgaagtgtcgagttgggtcacctggctgatactgacagccggttcaatggaggagaagagagaagtttttagctatttggtacatgtggccaagtgctgctggaacatggggaactacaatgccgtgatggaattcctggctggcctcaggagccgtaaggtcctcaagatgtggcaattcatggaccagtctgacatcgagacgatgcggtctctgaaagacgctatggcacagcatgagagctcctgcgaatataggaaagtggtaacacgggctctccacatacccggatgtaaggtggtgcccttttgtggagtttttttgaaggagctgtgcgaggtgctagatggcgcatcaggtctcatgaagctgtgtcccaggtacaatagtcaagaagagacactcgaattcgttgccgattattcagggcaggataatttcttacagagggtgggccaaaacggcctaaagaacagtgagaaggagagcacagttaactccattttccaggtaatccgtagctgtaatcgtagcctggagacggacgaagaggactcaccatctgaagggaattccagtaggaaatcctccctgaaagacaaaagccgctggcagtttattattggggatctgctggattccgataacgacattttcgagcaatcaaaagaatacgacagtcacggcagcgaagattcccagaaagccttcgatcacggcaccgagctaattccctggtatgtgctatcgattcaggccgatgtgcaccagtttttgctgcagggcgctactgttattcattatgaccaagacactcacctgtctgccagatgcttcctgcagctacagcctgataatagcactctcacctgggtaaaacccaccactgcaagccctgcaagtagcaaagctaaactgggtgtccttaataatactgccgaacccggaaagtttccactcctggggaatgccggattaagctctctgactgaaggtgttttagacctgtttgccgtgaaggcagtgtacatgggacacccaggcatcgatattcataccgtgtgcgtgcaaaacaagctgggctccatgtttctgagtgagacaggtgtgactctgctgtatggccttcagactactgacaatcgtttgttgcatttcgtcgcacccaaacatacagccaaaatgctctttagtggattactcgagctcacaagagcagttagaaagatgcgaaagtttccagaccaacggcagcagtggctgcggaagcaatatgtgtcactctatcaggaagacggcaggtatgagggccctactcttgcccacgccgttgagctattcggagggaggaggtggagcgcgagaaacccatcaccaggcacctccgctaagaatgccgagaaacctaacatgcagaggaacaatactctgggaatcagtaccactaaaaagaaaaagaagattttgatgagaggagaatcgggagaagttacagatgacgaaatggccacacgcaaagccaagatgcacaaggagtgtcgcagccggagcggtagcgatccccaggacattaatgaacaggaagagtctgaggtaaatgctattgccaacccccctaacccgctgccaagtcgtcgggctcattccctgacgacggctgggagtcccaatctagctgccggtacaagcagcccaattcgacccgtttcgtctccggtactgagtagctccaacaaaagtccctccagcgcttggagctcctcctcctggcacggacgcatcaaaggtgggatgaaaggatttcaatctttcatggtgtctgactcgaacatgtcctttgtggagttcgtagagctttttaagtccttttccgtgcgttcacggaaggatctcaaagatctgttcgatgtttacgccgtcccctgtaataggagtggatcagagagcgcccctctgtatactaatctgactatcgacgaaaacacatcagatctgcagccagacctggacctgcttacaagaaacgtaagcgatctaggcctgttcatcaagtccaagcagcagctctccgacaaccagcgccagatcagcgatgctatcgctgccgcatctatcgtgacgaatgggaccggcatagagtctacctcactgggaatctttggcgtgggtatcctgcagctcaatgacttcctagtgaattgccagggggaacattgtacctacgatgagattctctccatcattcagaagttcgagccatcaatcagtatgtgtcatcaggggctcatgagcttcgagggcttcgccagatttttgatggacaaagagaactttgccagtaaaaacgacgaaagccaagaaaatattaaagagctgcagctccctttgtcctactactacattgagtcaagtcacaatacatacctcacaggtcatcaactgaaaggggaatcatccgtggagctctacagccaggtgctgctgcaaggctgccgctcagtcgaactggattgctgggacggagacgacggcatgccgatcatttatcatggtcacaccctgaccacaaagattcccttcaaggaggttgttgaggcaattgatcgcagtgctttcatcaacagcgacttaccgatcattattagcatcgagaaccattgtagcctccctcagcaacgcaagatggcagaaatatttaagacagtgttcggggagaagctggtaacgaagtttctttttgagacagatttcagtgacgatcccatgctgcccagtcccgatcagttgcgcaagaaggtcctgctcaagaataaaaaactcaaagctcaccagactccagtagacattctgaaacaaaaagctcaccaactcgcctctatgcaagtccaggcgtataacggcggaaatgcaaacccgaggcctgccaacaacgaggaggaggaggacgaagaagatgaatacgactacgactacgagtctctgtccgacgacaacattctggaagacagacccgaaaataagtcctgtaatgacaagctccaatttgaatacaacgaggagatccctaagcgaatcaaaaaggcggataactctgcctgtaataaaggcaaggtttatgatatggagttgggggaagaattctatttggaccagaacaagaaagaaagccgccagatcgccccagaattaagcgatttggtgatttactgtcaagccgtcaaattccctggcttgagcacccttaacgcctctggcagtagccgagggaaggagcggaaatctaggaaatctatattcggcaataaccctggtcggatgagtcccggagagacagcctcctttaacaagacctctggcaagtcttcttgtgaaggtattcggcaaacgtgggaagagtcctcaagcccattgaacccaacaaccagccttagcgctatcattcgaacgccgaaatgctaccatatatcatcactgaatgaaaacgccgcaaaacggctgtgccgcaggtactcacagaagctgacacagcacaccgcatgtcagctcctccgtacctatccagccgcaacaaggattgactccagcaacccaaatccactcatgttttggctccacggcattcagctggtcgccctgaattatcaaaccgacgacctccccctccatttgaatgcagccatgttcgaggccaatgggggttgtggctacgtgctgaagccccctgtcctatgggacaagaactgccctatgtaccagaagttttctcccctggaaagggatctggactccatggatcccgcagtttattccctaaccattgtcagcgggcagaacgtgtgcccttcaaattctatgggctctccctgcattgaagtggacgtgctcgggatgcctctggactcatgccatttccgcaccaagcccattcataggaacaccttaaaccctatgtggaatgaacagtttcttttccacgtgcactttgaagatcttgtgttcctgcggttcgccgtagtcgaaaataactcaagcgcagttactgcccagagaatcatccctctgaaggcactgaagagagggtataggcatctgcaactgcggaacctgcacaatgaggttctggagatttcttcgttgttcatcaactcaaggcgaatggaggagaactccagcgggaacaccatgtctgccagctccatgttcaacaccgaagagagaaaatgtctgcagacccacagggtgacagtccacggagtgcccggacctgagccatttaccgtgttcaccattaatggcggaactaaggccaagcaattgttgcaacagatattgaccaacgaacaagatatcaagccagtcactacagattacttcctcatggaggagaagtatttcataagtaaggagaaaaatgagtgtcggaagcagccatttcaaagggctataggtccagaagaggagattatgcaaattttgtcctcctggttccccgaggaagggtatatgggacggatagtccttaagacccagcaggagaacctcgaagaaaaaaatatagtgcaggatgacaaagaggtcatcctgtccagtgaggaggagagttttttcgttcaggtgcatgatgtgtcccctgagcagccacgaaccgtgataaaagcccctcgggtgagcactgctcaagacgttatccagcagacactgtgcaaggccaagtactcatattcaatactgtccaatcctaacccgtccgattatgtgcttttggaggaagtcgtcaaagatacaacgaacaagaaaaccacgactcccaagtcttctcagcgggtcctgctggaccaggaatgtgtgttccaagctcagtcgaagtggaagggcgctggaaagttcatcctcaagctcaaggagcaagtgcaggcatctcgggaagataagaagaaagggatcagctttgcttcggagctcaagaagcttacaaaatcaactaaacaacctagaggcctgacttctccatcccagctgctcacatctgagtccatccagaccaaggaggagaagccagtggggggtttgtctagctctgataccatggattaccgacagtac

SEQ ID NO: 190749 - DNA, 6938 bp, Artificial Sequence
  derived and/or modified sequence
atgactagcgaagagatgaccgccagtgtgctcatccctgttactcagcgaaaggtcgtgagcgcccaatctgccgcagatgagtcttccgaaaaggttagcgatattaacattagcaaggctcacacagtgcggagatcaggggagacgtcccatacaatatctcagttaaacaagttgaaggaagagccgagcggatccaatctgcccaagatcttaagcatcgcgagagaaaagattgtatcagatgagaacagcaacgaaaaatgctgggagaagattatgcccgattctgcaaagaatctgaacatcaactgtaacaatatcctaagaaaccaccagcatgggttacctcagagacagttttacgaaatgtacaactctgtcgccgaagaggacctctgcctcgagactgggatcccgtctcccctagagagaaaagtttttccaggtatccagctggaactggacagaccttcgatggggatttccccacttgggaaccagagcgtgatcatcgaaaccggtcgggctcaccccgattcccggagagcagtttttcattttcactatgaggtggaccgtaggatgagcgatacattttgtacactgtcagagaaccttatcctcgatgactgtggtaattgtgtgcctcttcccggtggcgaagaaaagcaaaagaaaaactacgtcgcctacacctgcaaactgatggaactggcaaaaaactgtgacaataaaaatgaacagctccaatgtgaccactgcgatactttaaacgacaaatatttctgttttgaagggtcttgtgaaaaggttgacatggtctatagcggagactccttctgccgaaaggacttcaccgattctcaggcagccaagaccttcctgtcacattttgaggattttcccgataactgtgatgacgtggaggaggacgcttttaagagcaaaaaagagaggtccaccctcctggtgcgtcgtttttgcaagaacgatcgggaggtcaaaaaatctgtgtacacaggcactcgggctatcgtgcggacgttgccatccggtcacattggtctgactgcatggtcttacatcgaccagaaacgcaacggcccattgctgccgtgcggtcgcgtgatggagcccccatccaccgtcgagatccgtcaggacggcagccagcgactgtcagaggcccaatggtatcccatctacaatgcagtcaggcgcgaggagaccgagaataccgtcggaagcttgctgcattttctgacaaaactacctgcttcagagaccgcccatggacgaatctctgttggcccttgcctgaagcagtgcgtcagagacaccgtttgcgagtaccgtgctaccctgcaacgaacttcgatttctcagtatatcacaggctctttattagaggcaacgacatccttaggcgctagaagcggcctgctcagtacattcgggggaagtactgggagaatgatgctcaaagaacgccagcccggaccctccgttgccaattcgaacgccctccccagctcttcagcgggaatcagcaaagaactgatcgacctccaacccctgatccagttcccagaggaggttgctagcatactgatggaacaggaacagaccatataccggagagttctgccagttgactacctatgtttcctgacaagagatctaggaacaccggaatgccagtcatcacttccatgtttaaaggcgtccatttcagcctctatcctgaccacccagaatggtgaacacaacgccctcgaggacttagtcatgagatttaatgaggtgtctagttgggtgacttggctgatcctaactgccggtagcatggaagagaagagagaggtgttttcttatctcgtccatgttgctaaatgttgctggaacatgggaaattataatgccgtgatggagttccttgccggtttaagatcgaggaaggtcctgaaaatgtggcagtttatggatcaatctgacattgagacaatgaggtctcttaaagacgctatggcccagcacgaaagttcctgtgaatatcggaaggtggtgactcgggctcttcatatcccaggatgcaaggtggttcctttttgtggagtgtttctgaaggagctctgtgaggtgctggacggagctagcgggctgatgaagttgtgtcctcggtacaattcacaggaggaaactttggaattcgtcgccgattactccggccaggacaattttcttcagcgcgtgggccagaatggcctaaaaaatagcgaaaaggagtccacagttaatagcatttttcaggtgataagatcctgcaataggtccctcgagacagacgaagaggacagtcctagcgagggtaacagtagccgaaagtcttccttgaaggacaaatcgcggtggcagttcataataggcgatctcctggactctgacaatgatatcttcgaacaatcaaaagagtatgactctcacggctccgaggattctcagaaggcctttgatcacggcactgagctgattccttggtatgttctgagcattcaagcagatgttcatcagtttctactgcagggtgctaccgtgatccactacgaccaagatactcacctatccgctcggtgtttcctgcagctgcagccagataattctactttgacatgggttaagccgaccacagcaagtcctgcctcctctaaagccaagctcggcgtgctgaacaataccgcggagcccggaaaattccccctgttgggaaacgctggcctgtctagtctgacagaaggcgttttggatctgtttgctgtcaaggccgtgtatatggggcatccaggtattgatatccacacagtgtgtgtgcagaataagctgggctcaatgttccttagcgagaccggagtgactctgctgtacggcttgcagaccactgacaaccgcctgctgcactttgtggctccaaaacataccgctaagatgctgttttccgggctgctggaactgactcgggctgttagaaaaatgcggaagttccctgatcagagacagcagtggctccgcaaacagtatgtctctctgtaccaggaggacgggcgatacgaaggtccaactctggcacacgcggttgagctgttcggcggaaggcgctggtctgcccgaaatccctcccctggtacgagcgcaaaaaacgccgaaaaaccgaacatgcagagaaataacaccctggggatatcgacaactaagaagaagaagaagatcctgatgaggggcgagagcggggaagtgacagacgatgagatggcaacaaggaaggcaaagatgcacaaagagtgcagatcacgaagcggcagtgatccccaggacatcaacgagcaggaagagagcgaagtgaacgctatcgccaaccccccaaaccctcttccttccaggagagctcacagtctgactacagctggctctccaaatttagccgcaggaactagctctcccattagacctgtatcatccccagtcctgtccagctctaacaaatccccgagtagtgcgtggtcatcgtcatcttggcacggcaggatcaaagggggtatgaaagggttccagagcttcatggtgagtgactccaatatgtcctttgttgagttcgttgaactctttaagagcttctcggtaagatcaagaaaggacctgaaggacctatttgacgtttatgccgttccttgcaaccgatctggctcggagtctgccccattgtacactaatctcacaatcgatgaaaacacgtctgatctgcaacccgatctcgacctccttacccgtaacgtatcagatctcgggttgttcatcaagtctaagcaacagctgtcggacaatcagagacagatctccgacgccatcgccgctgcatctatcgtgactaatggtacgggaattgaatctacgtctctgggcatcttcggcgttggcatcctgcagctcaatgactttttagtaaattgccagggtgagcactgtacctacgacgaaatcctctccattatccagaaattcgagccatccatttccatgtgtcaccaaggactgatgagcttcgaaggttttgcacggtttcttatggataaggagaattttgcctctaaaaacgatgagagccaggagaacatcaaagaactgcaactccccctgagctactactatatcgagagcagtcacaacacgtatctgacaggacaccagctgaagggtgagagcagcgtcgaactctatagccaggtattgctccaagggtgccgatcagtcgaattggattgttgggatggcgatgatggaatgcccattatttaccacgggcatacattgacgacaaaaatcccgtttaaagaagtagtggaagccatcgatcgctcggcattcatcaattcagatctccccatcataattagtatcgagaatcactgctctctgccccaacagagaaagatggccgagattttcaaaacagtgttcggcgagaagctggtcaccaagttcctgttcgagactgacttcagcgacgatcctatgcttccttcacctgaccaactccgaaagaaagtgttgttgaaaaataaaaagctgaaggcccatcagactcctgttgacatactcaagcagaaggcacaccagttagcaagcatgcaggtgcaggcctataatggtggaaatgccaatccacgacccgcaaataacgaggaggaagaagacgaggaggatgagtacgattacgattatgaatccctttccgatgacaacatccttgaggaccggccagagaacaaatcctgcaatgacaagctccagttcgagtacaacgaggaaattcctaagaggattaaaaaagcggacaacagcgcctgtaataaaggtaaagtgtatgacatggagctgggcgaggaattttacctggatcaaaacaaaaaggaatccagacagatcgcccctgaactgtcggacctcgtcatttactgccaggcagtaaagtttccaggcctgtccaccctcaatgcttcaggcagctcccgcggaaaggagaggaaatctcgcaagagcatattcgggaacaatcctgggaggatgtcacccggtgaaaccgcatcctttaacaagacgagtggaaaaagctcttgcgaaggcatccgccagacatgggaggaatcctcctctcctctgaatccaaccacctccctgagtgctatcattcgcacccctaagtgttaccatatttcctccctgaacgagaacgccgctaagaggctgtgtcgtagatattcacaaaagctcactcagcatacagcgtgtcaattgcttcgcacctaccctgctgccactcgaatcgatagcagcaatccaaatcctctgatgttctggctgcacggcatacagctagtcgccttaaactatcaaacagatgatctgccactccacctgaacgctgcaatgtttgaggctaatggaggatgtgggtacgttctgaaaccccctgtgctatgggacaagaattgcccaatgtaccagaagttctcccctctggaacgcgacctagacagtatggatcccgcagtgtacagccttactattgtgagcggccaaaacgtttgcccctcaaactcaatgggatctccttgtattgaagtcgacgtgctgggcatgcccctcgattcatgtcacttcagaactaagccgattcacagaaacacactgaacccaatgtggaacgaacagtttctgtttcatgtgcactttgaggacctggttttcctgaggtttgctgtagtcgaaaataacagctctgcggtgaccgctcagcgaataataccgctgaaggccctgaagcggggttacagacaccttcagctgcgaaatctccacaatgaagttctcgagattagttccctatttattaattcccgcaggatggaagaaaattcatccgggaatacaatgagtgcaagctctatgttcaatactgaagaacgtaagtgtctgcaaacccatcgcgttactgtccatggggtaccaggtcccgaaccatttacagtgttcactatcaatggagggacgaaagcaaagcaactgctgcagcagatactcacaaacgaacaggatataaagcccgtgactacagactacttcctaatggaggaaaaatattttatctccaaagaaaagaacgaatgccggaagcagcctttccaacgcgctatcggccctgaagaggagatcatgcaaatcttgtctagctggttccccgaggagggctacatgggaagaatagtgttaaagacccagcaggagaatctcgaagaaaaaaacatcgtgcaggatgacaaagaggtgattcttagttccgaagaggagtcctttttcgtccaggttcacgacgtgtccccagagcagccccgaacagtgatcaaagccccaagggtgtctacggctcaggatgtgattcagcagaccctctgtaaagcaaaatatagctactcaattttaagcaacccaaacccaagtgattacgtgctgcttgaagaggttgtgaaggataccactaataaaaagaccaccacacctaaatcttcccaaagagtgttactggaccaggagtgcgtgtttcaggcgcagagcaaatggaagggcgctgggaagttcatactgaagctgaaagaacaagttcaggcttctagggaggataagaaaaaaggaatcagctttgcctccgagttgaaaaagcttacaaagtctaccaaacaaccaagagggctcaccagccccagccaacttctaactagtgaaagcatccagacgaaagaggagaagcctgtgggcggtctcagctctagcgacaccatggattaccgccaggttaagatcttcaaacaagaagtaaaggagta

SEQ ID NO: 190750 - DNA, 6909 bp, Artificial Sequence
  derived and/or modified sequence
atgaccagcgaggagatgaccgccagcgtgctgatccccgtgacccagagaaaggtggtgagcgcccagagcgccgccgacgagagcagcgagaaggtgagcgacatcaacatcagcaaggcccacaccgtgagaagaagcggcgagaccagccacaccatcagccagctgaacaagctgaaggaggagcccagcggcagcaacctgcccaagatcctgagcatcgccagagagaagatcgtgagcgacgagaacagcaacgagaagtgctgggagaagatcatgcccgacagcgccaagaacctgaacatcaactgcaacaacatcctgagaaaccaccagcacggcctgccccagagacagttctacgagatgtacaacagcgtggccgaggaggacctgtgcctggagaccggcatccccagccccctggagagaaaggtgttccccggcatccagctggagctggacagacccagcatgggcatcagccccctgggcaaccagagcgtgatcatcgagaccggcagagcccaccccgacagcagaagagccgtgttccacttccactacgaggtggacagaagaatgagcgacaccttctgcaccctgagcgagaacctgatcctggacgactgcggcaactgcgtgcccctgcccggcggcgaggagaagcagaagaagaactacgtggcctacacctgcaagctgatggagctggccaagaactgcgacaacaagaacgagcagctgcagtgcgaccactgcgacaccctgaacgacaagtacttctgcttcgagggcagctgcgagaaggtggacatggtgtacagcggcgacagcttctgcagaaaggacttcaccgacagccaggccgccaagaccttcctgagccacttcgaggacttccccgacaactgcgacgacgtggaggaggacgccttcaagagcaagaaggagagaagcaccctgctggtgagaagattctgcaagaacgacagagaggtgaagaagagcgtgtacaccggcaccagagccatcgtgagaaccctgcccagcggccacatcggcctgaccgcctggagctacatcgaccagaagagaaacggccccctgctgccctgcggcagagtgatggagccccccagcaccgtggagatcagacaggacggcagccagagactgagcgaggcccagtggtaccccatctacaacgccgtgagaagagaggagaccgagaacaccgtgggcagcctgctgcacttcctgaccaagctgcccgccagcgagaccgcccacggcagaatcagcgtgggcccctgcctgaagcagtgcgtgagagacaccgtgtgcgagtacagagccaccctgcagagaaccagcatcagccagtacatcaccggcagcctgctggaggccaccaccagcctgggcgccagaagcggcctgctgagcaccttcggcggcagcaccggcagaatgatgctgaaggagagacagcccggccccagcgtggccaacagcaacgccctgcccagcagcagcgccggcatcagcaaggagctgatcgacctgcagcccctgatccagttccccgaggaggtggccagcatcctgatggagcaggagcagaccatctacagaagagtgctgcccgtggactacctgtgcttcctgaccagagacctgggcacccccgagtgccagagcagcctgccctgcctgaaggccagcatcagcgccagcatcctgaccacccagaacggcgagcacaacgccctggaggacctggtgatgagattcaacgaggtgagcagctgggtgacctggctgatcctgaccgccggcagcatggaggagaagagagaggtgttcagctacctggtgcacgtggccaagtgctgctggaacatgggcaactacaacgccgtgatggagttcctggccggcctgagaagcagaaaggtgctgaagatgtggcagttcatggaccagagcgacatcgagaccatgagaagcctgaaggacgccatggcccagcacgagagcagctgcgagtacagaaaggtggtgaccagagccctgcacatccccggctgcaaggtggtgcccttctgcggcgtgttcctgaaggagctgtgcgaggtgctggacggcgccagcggcctgatgaagctgtgccccagatacaacagccaggaggagaccctggagttcgtggccgactacagcggccaggacaacttcctgcagagagtgggccagaacggcctgaagaacagcgagaaggagagcaccgtgaacagcatcttccaggtgatcagaagctgcaacagaagcctggagaccgacgaggaggacagccccagcgagggcaacagcagcagaaagagcagcctgaaggacaagagcagatggcagttcatcatcggcgacctgctggacagcgacaacgacatcttcgagcagagcaaggagtacgacagccacggcagcgaggacagccagaaggccttcgaccacggcaccgagctgatcccctggtacgtgctgagcatccaggccgacgtgcaccagttcctgctgcagggcgccaccgtgatccactacgaccaggacacccacctgagcgccagatgcttcctgcagctgcagcccgacaacagcaccctgacctgggtgaagcccaccaccgccagccccgccagcagcaaggccaagctgggcgtgctgaacaacaccgccgagcccggcaagttccccctgctgggcaacgccggcctgagcagcctgaccgagggcgtgctggacctgttcgccgtgaaggccgtgtacatgggccaccccggcatcgacatccacaccgtgtgcgtgcagaacaagctgggcagcatgttcctgagcgagaccggcgtgaccctgctgtacggcctgcagaccaccgacaacagactgctgcacttcgtggcccccaagcacaccgccaagatgctgttcagcggcctgctggagctgaccagagccgtgagaaagatgagaaagttccccgaccagagacagcagtggctgagaaagcagtacgtgagcctgtaccaggaggacggcagatacgagggccccaccctggcccacgccgtggagctgttcggcggcagaagatggagcgccagaaaccccagccccggcaccagcgccaagaacgccgagaagcccaacatgcagagaaacaacaccctgggcatcagcaccaccaagaagaagaagaagatcctgatgagaggcgagagcggcgaggtgaccgacgacgagatggccaccagaaaggccaagatgcacaaggagtgcagaagcagaagcggcagcgacccccaggacatcaacgagcaggaggagagcgaggtgaacgccatcgccaacccccccaaccccctgcccagcagaagagcccacagcctgaccaccgccggcagccccaacctggccgccggcaccagcagccccatcagacccgtgagcagccccgtgctgagcagcagcaacaagagccccagcagcgcctggagcagcagcagctggcacggcagaatcaagggcggcatgaagggcttccagagcttcatggtgagcgacagcaacatgagcttcgtggagttcgtggagctgttcaagagcttcagcgtgagaagcagaaaggacctgaaggacctgttcgacgtgtacgccgtgccctgcaacagaagcggcagcgagagcgcccccctgtacaccaacctgaccatcgacgagaacaccagcgacctgcagcccgacctggacctgctgaccagaaacgtgagcgacctgggcctgttcatcaagagcaagcagcagctgagcgacaaccagagacagatcagcgacgccatcgccgccgccagcatcgtgaccaacggcaccggcatcgagagcaccagcctgggcatcttcggcgtgggcatcctgcagctgaacgacttcctggtgaactgccagggcgagcactgcacctacgacgagatcctgagcatcatccagaagttcgagcccagcatcagcatgtgccaccagggcctgatgagcttcgagggcttcgccagattcctgatggacaaggagaacttcgccagcaagaacgacgagagccaggagaacatcaaggagctgcagctgcccctgagctactactacatcgagagcagccacaacacctacctgaccggccaccagctgaagggcgagagcagcgtggagctgtacagccaggtgctgctgcagggctgcagaagcgtggagctggactgctgggacggcgacgacggcatgcccatcatctaccacggccacaccctgaccaccaagatccccttcaaggaggtggtggaggccatcgacagaagcgccttcatcaacagcgacctgcccatcatcatcagcatcgagaaccactgcagcctgccccagcagagaaagatggccgagatcttcaagaccgtgttcggcgagaagctggtgaccaagttcctgttcgagaccgacttcagcgacgaccccatgctgcccagccccgaccagctgagaaagaaggtgctgctgaagaacaagaagctgaaggcccaccagacccccgtggacatcctgaagcagaaggcccaccagctggccagcatgcaggtgcaggcctacaacggcggcaacgccaaccccagacccgccaacaacgaggaggaggaggacgaggaggacgagtacgactacgactacgagagcctgagcgacgacaacatcctggaggacagacccgagaacaagagctgcaacgacaagctgcagttcgagtacaacgaggagatccccaagagaatcaagaaggccgacaacagcgcctgcaacaagggcaaggtgtacgacatggagctgggcgaggagttctacctggaccagaacaagaaggagagcagacagatcgcccccgagctgagcgacctggtgatctactgccaggccgtgaagttccccggcctgagcaccctgaacgccagcggcagcagcagaggcaaggagagaaagagcagaaagagcatcttcggcaacaaccccggcagaatgagccccggcgagaccgccagcttcaacaagaccagcggcaagagcagctgcgagggcatcagacagacctgggaggagagcagcagccccctgaaccccaccaccagcctgagcgccatcatcagaacccccaagtgctaccacatcagcagcctgaacgagaacgccgccaagagactgtgcagaagatacagccagaagctgacccagcacaccgcctgccagctgctgagaacctaccccgccgccaccagaatcgacagcagcaaccccaaccccctgatgttctggctgcacggcatccagctggtggccctgaactaccagaccgacgacctgcccctgcacctgaacgccgccatgttcgaggccaacggcggctgcggctacgtgctgaagccccccgtgctgtgggacaagaactgccccatgtaccagaagttcagccccctggagagagacctggacagcatggaccccgccgtgtacagcctgaccatcgtgagcggccagaacgtgtgccccagcaacagcatgggcagcccctgcatcgaggtggacgtgctgggcatgcccctggacagctgccacttcagaaccaagcccatccacagaaacaccctgaaccccatgtggaacgagcagttcctgttccacgtgcacttcgaggacctggtgttcctgagattcgccgtggtggagaacaacagcagcgccgtgaccgcccagagaatcatccccctgaaggccctgaagagaggctacagacacctgcagctgagaaacctgcacaacgaggtgctggagatcagcagcctgttcatcaacagcagaagaatggaggagaacagcagcggcaacaccatgagcgccagcagcatgttcaacaccgaggagagaaagtgcctgcagacccacagagtgaccgtgcacggcgtgcccggccccgagcccttcaccgtgttcaccatcaacggcggcaccaaggccaagcagctgctgcagcagatcctgaccaacgagcaggacatcaagcccgtgaccaccgactacttcctgatggaggagaagtacttcatcagcaaggagaagaacgagtgcagaaagcagcccttccagagagccatcggccccgaggaggagatcatgcagatcctgagcagctggttccccgaggagggctacatgggcagaatcgtgctgaagacccagcaggagaacctggaggagaagaacatcgtgcaggacgacaaggaggtgatcctgagcagcgaggaggagagcttcttcgtgcaggtgcacgacgtgagccccgagcagcccagaaccgtgatcaaggcccccagagtgagcaccgcccaggacgtgatccagcagaccctgtgcaaggccaagtacagctacagcatcctgagcaaccccaaccccagcgactacgtgctgctggaggaggtggtgaaggacaccaccaacaagaagaccaccacccccaagagcagccagagagtgctgctggaccaggagtgcgtgttccaggcccagagcaagtggaagggcgccggcaagttcatcctgaagctgaaggagcaggtgcaggccagcagagaggacaagaagaagggcatcagcttcgccagcgagctgaagaagctgaccaagagcaccaagcagcccagaggcctgaccagccccagccagctgctgaccagcgagagcatccagaccaaggaggagaagcccgtgggcggcctgagcagcagcgacaccatggactacagacagtag

SEQ ID NO: 190751 - DNA, 6939 bp, Artificial Sequence
  derived and/or modified sequence
atgaccagcgaggagatgaccgccagcgtgctgatccccgtgacccagagaaaggtggtgagcgcccagagcgccgccgacgagagcagcgagaaggtgagcgacatcaacatcagcaaggcccacaccgtgagaagaagcggcgagaccagccacaccatcagccagctgaacaagctgaaggaggagcccagcggcagcaacctgcccaagatcctgagcatcgccagagagaagatcgtgagcgacgagaacagcaacgagaagtgctgggagaagatcatgcccgacagcgccaagaacctgaacatcaactgcaacaacatcctgagaaaccaccagcacggcctgccccagagacagttctacgagatgtacaacagcgtggccgaggaggacctgtgcctggagaccggcatccccagccccctggagagaaaggtgttccccggcatccagctggagctggacagacccagcatgggcatcagccccctgggcaaccagagcgtgatcatcgagaccggcagagcccaccccgacagcagaagagccgtgttccacttccactacgaggtggacagaagaatgagcgacaccttctgcaccctgagcgagaacctgatcctggacgactgcggcaactgcgtgcccctgcccggcggcgaggagaagcagaagaagaactacgtggcctacacctgcaagctgatggagctggccaagaactgcgacaacaagaacgagcagctgcagtgcgaccactgcgacaccctgaacgacaagtacttctgcttcgagggcagctgcgagaaggtggacatggtgtacagcggcgacagcttctgcagaaaggacttcaccgacagccaggccgccaagaccttcctgagccacttcgaggacttccccgacaactgcgacgacgtggaggaggacgccttcaagagcaagaaggagagaagcaccctgctggtgagaagattctgcaagaacgacagagaggtgaagaagagcgtgtacaccggcaccagagccatcgtgagaaccctgcccagcggccacatcggcctgaccgcctggagctacatcgaccagaagagaaacggccccctgctgccctgcggcagagtgatggagccccccagcaccgtggagatcagacaggacggcagccagagactgagcgaggcccagtggtaccccatctacaacgccgtgagaagagaggagaccgagaacaccgtgggcagcctgctgcacttcctgaccaagctgcccgccagcgagaccgcccacggcagaatcagcgtgggcccctgcctgaagcagtgcgtgagagacaccgtgtgcgagtacagagccaccctgcagagaaccagcatcagccagtacatcaccggcagcctgctggaggccaccaccagcctgggcgccagaagcggcctgctgagcaccttcggcggcagcaccggcagaatgatgctgaaggagagacagcccggccccagcgtggccaacagcaacgccctgcccagcagcagcgccggcatcagcaaggagctgatcgacctgcagcccctgatccagttccccgaggaggtggccagcatcctgatggagcaggagcagaccatctacagaagagtgctgcccgtggactacctgtgcttcctgaccagagacctgggcacccccgagtgccagagcagcctgccctgcctgaaggccagcatcagcgccagcatcctgaccacccagaacggcgagcacaacgccctggaggacctggtgatgagattcaacgaggtgagcagctgggtgacctggctgatcctgaccgccggcagcatggaggagaagagagaggtgttcagctacctggtgcacgtggccaagtgctgctggaacatgggcaactacaacgccgtgatggagttcctggccggcctgagaagcagaaaggtgctgaagatgtggcagttcatggaccagagcgacatcgagaccatgagaagcctgaaggacgccatggcccagcacgagagcagctgcgagtacagaaaggtggtgaccagagccctgcacatccccggctgcaaggtggtgcccttctgcggcgtgttcctgaaggagctgtgcgaggtgctggacggcgccagcggcctgatgaagctgtgccccagatacaacagccaggaggagaccctggagttcgtggccgactacagcggccaggacaacttcctgcagagagtgggccagaacggcctgaagaacagcgagaaggagagcaccgtgaacagcatcttccaggtgatcagaagctgcaacagaagcctggagaccgacgaggaggacagccccagcgagggcaacagcagcagaaagagcagcctgaaggacaagagcagatggcagttcatcatcggcgacctgctggacagcgacaacgacatcttcgagcagagcaaggagtacgacagccacggcagcgaggacagccagaaggccttcgaccacggcaccgagctgatcccctggtacgtgctgagcatccaggccgacgtgcaccagttcctgctgcagggcgccaccgtgatccactacgaccaggacacccacctgagcgccagatgcttcctgcagctgcagcccgacaacagcaccctgacctgggtgaagcccaccaccgccagccccgccagcagcaaggccaagctgggcgtgctgaacaacaccgccgagcccggcaagttccccctgctgggcaacgccggcctgagcagcctgaccgagggcgtgctggacctgttcgccgtgaaggccgtgtacatgggccaccccggcatcgacatccacaccgtgtgcgtgcagaacaagctgggcagcatgttcctgagcgagaccggcgtgaccctgctgtacggcctgcagaccaccgacaacagactgctgcacttcgtggcccccaagcacaccgccaagatgctgttcagcggcctgctggagctgaccagagccgtgagaaagatgagaaagttccccgaccagagacagcagtggctgagaaagcagtacgtgagcctgtaccaggaggacggcagatacgagggccccaccctggcccacgccgtggagctgttcggcggcagaagatggagcgccagaaaccccagccccggcaccagcgccaagaacgccgagaagcccaacatgcagagaaacaacaccctgggcatcagcaccaccaagaagaagaagaagatcctgatgagaggcgagagcggcgaggtgaccgacgacgagatggccaccagaaaggccaagatgcacaaggagtgcagaagcagaagcggcagcgacccccaggacatcaacgagcaggaggagagcgaggtgaacgccatcgccaacccccccaaccccctgcccagcagaagagcccacagcctgaccaccgccggcagccccaacctggccgccggcaccagcagccccatcagacccgtgagcagccccgtgctgagcagcagcaacaagagccccagcagcgcctggagcagcagcagctggcacggcagaatcaagggcggcatgaagggcttccagagcttcatggtgagcgacagcaacatgagcttcgtggagttcgtggagctgttcaagagcttcagcgtgagaagcagaaaggacctgaaggacctgttcgacgtgtacgccgtgccctgcaacagaagcggcagcgagagcgcccccctgtacaccaacctgaccatcgacgagaacaccagcgacctgcagcccgacctggacctgctgaccagaaacgtgagcgacctgggcctgttcatcaagagcaagcagcagctgagcgacaaccagagacagatcagcgacgccatcgccgccgccagcatcgtgaccaacggcaccggcatcgagagcaccagcctgggcatcttcggcgtgggcatcctgcagctgaacgacttcctggtgaactgccagggcgagcactgcacctacgacgagatcctgagcatcatccagaagttcgagcccagcatcagcatgtgccaccagggcctgatgagcttcgagggcttcgccagattcctgatggacaaggagaacttcgccagcaagaacgacgagagccaggagaacatcaaggagctgcagctgcccctgagctactactacatcgagagcagccacaacacctacctgaccggccaccagctgaagggcgagagcagcgtggagctgtacagccaggtgctgctgcagggctgcagaagcgtggagctggactgctgggacggcgacgacggcatgcccatcatctaccacggccacaccctgaccaccaagatccccttcaaggaggtggtggaggccatcgacagaagcgccttcatcaacagcgacctgcccatcatcatcagcatcgagaaccactgcagcctgccccagcagagaaagatggccgagatcttcaagaccgtgttcggcgagaagctggtgaccaagttcctgttcgagaccgacttcagcgacgaccccatgctgcccagccccgaccagctgagaaagaaggtgctgctgaagaacaagaagctgaaggcccaccagacccccgtggacatcctgaagcagaaggcccaccagctggccagcatgcaggtgcaggcctacaacggcggcaacgccaaccccagacccgccaacaacgaggaggaggaggacgaggaggacgagtacgactacgactacgagagcctgagcgacgacaacatcctggaggacagacccgagaacaagagctgcaacgacaagctgcagttcgagtacaacgaggagatccccaagagaatcaagaaggccgacaacagcgcctgcaacaagggcaaggtgtacgacatggagctgggcgaggagttctacctggaccagaacaagaaggagagcagacagatcgcccccgagctgagcgacctggtgatctactgccaggccgtgaagttccccggcctgagcaccctgaacgccagcggcagcagcagaggcaaggagagaaagagcagaaagagcatcttcggcaacaaccccggcagaatgagccccggcgagaccgccagcttcaacaagaccagcggcaagagcagctgcgagggcatcagacagacctgggaggagagcagcagccccctgaaccccaccaccagcctgagcgccatcatcagaacccccaagtgctaccacatcagcagcctgaacgagaacgccgccaagagactgtgcagaagatacagccagaagctgacccagcacaccgcctgccagctgctgagaacctaccccgccgccaccagaatcgacagcagcaaccccaaccccctgatgttctggctgcacggcatccagctggtggccctgaactaccagaccgacgacctgcccctgcacctgaacgccgccatgttcgaggccaacggcggctgcggctacgtgctgaagccccccgtgctgtgggacaagaactgccccatgtaccagaagttcagccccctggagagagacctggacagcatggaccccgccgtgtacagcctgaccatcgtgagcggccagaacgtgtgccccagcaacagcatgggcagcccctgcatcgaggtggacgtgctgggcatgcccctggacagctgccacttcagaaccaagcccatccacagaaacaccctgaaccccatgtggaacgagcagttcctgttccacgtgcacttcgaggacctggtgttcctgagattcgccgtggtggagaacaacagcagcgccgtgaccgcccagagaatcatccccctgaaggccctgaagagaggctacagacacctgcagctgagaaacctgcacaacgaggtgctggagatcagcagcctgttcatcaacagcagaagaatggaggagaacagcagcggcaacaccatgagcgccagcagcatgttcaacaccgaggagagaaagtgcctgcagacccacagagtgaccgtgcacggcgtgcccggccccgagcccttcaccgtgttcaccatcaacggcggcaccaaggccaagcagctgctgcagcagatcctgaccaacgagcaggacatcaagcccgtgaccaccgactacttcctgatggaggagaagtacttcatcagcaaggagaagaacgagtgcagaaagcagcccttccagagagccatcggccccgaggaggagatcatgcagatcctgagcagctggttccccgaggagggctacatgggcagaatcgtgctgaagacccagcaggagaacctggaggagaagaacatcgtgcaggacgacaaggaggtgatcctgagcagcgaggaggagagcttcttcgtgcaggtgcacgacgtgagccccgagcagcccagaaccgtgatcaaggcccccagagtgagcaccgcccaggacgtgatccagcagaccctgtgcaaggccaagtacagctacagcatcctgagcaaccccaaccccagcgactacgtgctgctggaggaggtggtgaaggacaccaccaacaagaagaccaccacccccaagagcagccagagagtgctgctggaccaggagtgcgtgttccaggcccagagcaagtggaagggcgccggcaagttcatcctgaagctgaaggagcaggtgcaggccagcagagaggacaagaagaagggcatcagcttcgccagcgagctgaagaagctgaccaagagcaccaagcagcccagaggcctgaccagccccagccagctgctgaccagcgagagcatccagaccaaggaggagaagcccgtgggcggcctgagcagcagcgacaccatggactacagacaggtgaagatcttcaagcaggaggtgaaggagtag

SEQ ID NO: 190752 - protein, 3114 aa, Artificial Sequence
  derived and/or modified sequence
MSWALEEWKEGLPTRALQKIQELEGQLDKLKKEKQQRQFQLDSLEAALQKQKQKVENEKTEGTNLKRENQRLMEICESLEKTKQKISHELQVKESQVNFQEGQLNSGKKQIEKLEQELKRCKSELERSQQAAQSADVSLNPCNTPQKIFTTPLTPSQYYSGSKYEDLKEKYNKEVEERKRLEAEVKALQAKKASQTLPQATMNHRDIARHQASSSVFSWQQEKTPSHLSSNSQRTPIRRDFSASYFSGEQEVTPSRSTLQIGKRDANSSFFDNSSSPHLLDQLKAQNQELRNKINELELRLQGHEKEMKGQVNKFQELQLQLEKAKVELIEKEKVLNKCRDELVRTTAQYDQASTKYTALEQKLKKLTEDLSCQRQNAESARCSLEQKIKEKEKEFQEELSRQQRSFQTLDQECIQMKARLTQELQQAKNMHNVLQAELDKLTSVKQQLENNLEEFKQKLCRAEQAFQASQIKENELRRSMEEMKKENNLLKSHSEQKAREVCHLEAELKNIKQCLNQSQNFAEEMKAKNTSQETMLRDLQEKINQQENSLTLEKLKLAVADLEKQRDCSQDLLKKREHHIEQLNDKLSKTEKESKALLSALELKKKEYEELKEEKTLFSCWKSENEKLLTQMESEKENLQSKINHLETCLKTQQIKSHEYNERVRTLEMDRENLSVEIRNLHNVLDSKSVEVETQKLAYMELQQKAEFSDQKHQKEIENMCLKTSQLTGQVEDLEHKLQLLSNEIMDKDRCYQDLHAEYESLRDLLKSKDASLVTNEDHQRSLLAFDQQPAMHHSFANIIGEQGSMPSERSECRLEADQSPKNSAILQNRVDSLEFSLESQKQMNSDLQKQCEELVQIKGEIEENLMKAEQMHQSFVAETSQRISKLQEDTSAHQNVVAETLSALENKEKELQLLNDKVETEQAEIQELKKSNHLLEDSLKELQLLSETLSLEKKEMSSIISLNKREIEELTQENGTLKEINASLNQEKMNLIQKSESFANYIDEREKSISELSDQYKQEKLILLQRCEETGNAYEDLSQKYKAAQEKNSKLECLLNECTSLCENRKNELEQLKEAFAKEHQEFLTKLAFAEERNQNLMLELETVQQALRSEMTDNQNNSKSEAGGLKQEIMTLKEEQNKMQKEVNDLLQENEQLMKVMKTKHECQNLESEPIRNSVKERESERNQCNFKPQMDLEVKEISLDSYNAQLVQLEAMLRNKELKLQESEKEKECLQHELQTIRGDLETSNLQDMQSQEISGLKDCEIDAEEKYISGPHELSTSQNDNAHLQCSLQTTMNKLNELEKICEILQAEKYELVTELNDSRSECITATRKMAEEVGKLLNEVKILNDDSGLLHGELVEDIPGGEFGEQPNEQHPVSLAPLDESNSYEHLTLSDKEVQMHFAELQEKFLSLQSEHKILHDQHCQMSSKMSELQTYVDSLKAENLVLSTNLRNFQGDLVKEMQLGLEEGLVPSLSSSCVPDSSSLSSLGDSSFYRALLEQTGDMSLLSNLEGAVSANQCSVDEVFCSSLQEENLTRKETPSAPAKGVEELESLCEVYRQSLEKLEEKMESQGIMKNKEIQELEQLLSSERQELDCLRKQYLSENEQWQQKLTSVTLEMESKLAAEKKQTEQLSLELEVARLQLQGLDLSSRSLLGIDTEDAIQGRNESCDISKEHTSETTERTPKHDVHQICDKDAQQDLNLDIEKITETGAVKPTGECSGEQSPDTNYEPPGEDKTQGSSECISELSFSGPNALVPMDFLGNQEDIHNLQLRVKETSNENLRLLHVIEDRDRKVESLLNEMKELDSKLHLQEVQLMTKIEACIELEKIVGELKKENSDLSEKLEYFSCDHQELLQRVETSEGLNSDLEMHADKSSREDIGDNVAKVNDSWKERFLDVENELSRIRSEKASIEHEALYLEADLEVVQTEKLCLEKDNENKQKVIVCLEEELSVVTSERNQLRGELDTMSKKTTALDQLSEKMKEKTQELESHQSECLHCIQVAEAEVKEKTELLQTLSSDVSELLKDKTHLQEKLQSLEKDSQALSLTKCELENQIAQLNKEKELLVKESESLQARLSESDYEKLNVSKALEAALVEKGEFALRLSSTQEEVHQLRRGIEKLRVRIEADEKKQLHIAEKLKERERENDSLKDKVENLERELQMSEENQELVILDAENSKAEVETLKTQIEEMARSLKVFELDLVTLRSEKENLTKQIQEKQGQLSELDKLLSSFKSLLEEKEQAEIQIKEESKTAVEMLQNQLKELNEAVAALCGDQEIMKATEQSLDPPIEEEHQLRNSIEKLRARLEADEKKQLCVLQQLKESEHHADLLKGRVENLERELEIARTNQEHAALEAENSKGEVETLKAKIEGMTQSLRGLELDVVTIRSEKENLTNELQKEQERISELEIINSSFENILQEKEQEKVQMKEKSSTAMEMLQTQLKELNERVAALHNDQEACKAKEQNLSSQVECLELEKAQLLQGLDEAKNNYIVLQSSVNGLIQEVEDGKQKLEKKDEEISRLKNQIQDQEQLVSKLSQVEGEHQLWKEQNLELRNLTVELEQKIQVLQSKNASLQDTLEVLQSSYKNLENELELTKMDKMSFVEKVNKMTAKETELQREMHEMAQKTAELQEELSGEKNRLAGELQLLLEEIKSSKDQLKELTLENSELKKSLDCMHKDQVEKEGKVREEIAEYQLRLHEAEKKHQALLLDTNKQYEVEIQTYREKLTSKEECLSSQKLEIDLLKSSKEELNNSLKATTQILEELKKTKMDNLKYVNQLKKENERAQGKMKLLIKSCKQLEEEKEILQKELSQLQAAQEKQKTGTVMDTKVDELTTEIKELKETLEEKTKEADEYLDKYCSLLISHEKLEKAKEMLETQVAHLCSQQSKQDSRGSPLLGPVVPGPSPIPSVTEKRLSSGQNKASGKRQRSSGIWENGRGPTPATPESFSKKSKKAVMSGIHPAEDTEGTEFEPEGLPEVVKKGFADIPTGKTSPYILRRTTMATRTSPRLAAQKLALSPLSLGKENLAESSKPTAGGSRSQKVKVAQRSPVDSGTILREPTTKSVPVNNLPERSPTDSPREGLRVKRGRLVPSPKAGLESNGSENCKVQ

SEQ ID NO: 190753 - protein, 175 aa, Artificial Sequence
  derived and/or modified sequence
LMIKGRKGKVNKMTAKETELQREMHEMAQKTAELQEELSGEKNRLAGELQLLLEEIKSSKDQLKELTLENSELKKSLDCMHKDQVEKEGKVREEIAEYQLRLHEAEKKHQALLLDTNKQYEVEIQTYREKLTSKEECLSSQKLEIDLLKSSKEELNNSLKATTQILEELKKTKEN

SEQ ID NO: 190754 - DNA, 9345 bp, Artificial Sequence
  derived and/or modified sequence
atgagttgggccctagaggagtggaaggaaggtctccccacacgagccctccaaaaaatccaggagctcgagggacagctcgacaaactcaagaaagagaaacagcaaagacagttccagttagacagtctagaagccgcgttgcagaagcagaagcagaaagtcgagaacgagaagactgaaggcaccaacctgaagcgtgagaatcagcggctcatggaaatctgtgaaagtcttgagaagacaaagcaaaaaattagccacgaacttcaggtaaaggaatcgcaggttaactttcaggagggacagctgaactcaggtaagaaacagatcgaaaagctcgaacaggagctcaaaagatgtaaaagtgagcttgaacggagtcagcaagccgcgcagtctgccgatgtttcattaaatccctgcaataccccgcagaaaatcttcactacgcccttaactccttcacagtattattcgggttctaagtacgaggatctgaaggagaaatataataaggaagtggaagagcgcaagcgcttagaggctgaggtgaaagcactgcaagcaaaaaaagctagccagaccctgccccaggccacaatgaaccatcgcgatattgcccgccaccaggcctctagttccgtgttctcctggcagcaggaaaaaactccctcacacttatccagcaacagccagagaactccaataaggagggatttctccgccagttacttcagcggggagcaggaagtcacaccttcaaggtctactctgcagataggaaaacgagacgcaaacagctcattttttgataacagctcctcaccacacttattagaccagctcaaagctcagaaccaagaactgaggaacaagatcaatgagttggagctgagacttcagggccatgagaaggaaatgaaggggcaggtaaataaattccaagaattgcagctgcaactcgaaaaggctaaggtagagcttatcgagaaggagaaagtgctcaataagtgcagagatgagctcgtccggaccacagcacagtatgaccaggcaagcactaaatatacagccctcgagcagaaattgaagaaattgacggaggatctgagctgtcagagacagaatgctgagtctgctcgatgtagtctggaacagaagattaaggaaaaagaaaaggaattccaggaggaattgtcccgccaacagaggtcttttcaaactctcgatcaggaatgtatacaaatgaaggccagacttactcaggagctgcagcaggctaagaatatgcataatgtgctgcaggcagaattggacaaactgaccagtgtgaagcagcagttagagaacaatttggaagagtttaagcagaagctgtgccgggccgagcaggccttccaggccagtcaaattaaagagaatgagttacggcgatcaatggaggagatgaaaaaggaaaataatctgctcaaaagccattccgagcagaaagcacgggaggtgtgtcacctcgaggccgaactgaagaacatcaaacagtgcctgaaccagtcccaaaacttcgccgaagaaatgaaggccaagaacacctcccaagaaacgatgctgagggatctgcaggaaaagattaaccagcaggaaaattcccttactctggagaagctgaagctagccgtcgcggacctggaaaagcagcgtgactgtagtcaggacctcttaaagaaacgtgaacaccatatcgagcagctcaacgacaagctaagcaagaccgagaaagagagtaaggccctcctcagcgctctggagctcaagaagaaggagtacgaggagttgaaggaagaaaagacacttttttcatgctggaaatcagaaaacgagaagttgctgacacagatggagagtgagaaagagaatctgcagagcaagatcaaccacttggagacttgcttaaagacacagcagatcaaatctcacgaatacaacgagcgcgtgagaaccttagaaatggatcgcgaaaatctgagcgtagagatacgaaaccttcataatgtcttggatagcaaatcagtcgaggtggaaacccagaagctggcctacatggaattgcagcagaaagccgagttttcagaccagaagcatcagaaagaaattgaaaatatgtgcttaaagacgagccagctgaccggccaggtcgaagacttagagcacaaactgcagctcttgagtaatgaaatcatggacaaagatcggtgctaccaggacctccatgccgagtatgaaagcttaagagaccttctgaagtcgaaggacgccagcttagtaacaaacgaagatcaccagcgatccctgctggccttcgaccaacagcccgcaatgcatcatagcttcgctaacatcatcggcgagcaaggatcgatgccctccgaaaggagcgagtgccgtctggaagcggaccagtcccctaagaactccgccattttgcaaaatagagtggatagtttggagttctccttggaaagtcagaagcagatgaacagcgacctgcagaaacaatgcgaggaactcgtgcaaataaaaggagagatagaggaaaacctcatgaaggccgagcagatgcatcagtcttttgtcgcggagacctcacagagaatttccaaactccaggaggatacctcggcacaccagaatgttgtggcagagacactgtcggcattagaaaataaagaaaaagagctgcagctgcttaatgataaggtagaaactgagcaggccgagattcaggaactgaaaaagagcaatcacctgctcgaagactctctgaaagagcttcagttgctgtccgagacactctccctggagaaaaaagaaatgtcatcaatcatcagcctcaataaacgggaaatagaggaactgacccaagagaatggaacactgaaggagattaatgcctctctcaaccaagagaagatgaaccttatccagaaaagcgagtcattcgcaaactatatagatgagagggagaagtctatcagtgagctctctgaccagtataagcaagagaaactgatcttactgcagaggtgcgaggagacagggaatgcatacgaagatctcagtcagaagtataaggcagcacaggagaaaaatagcaagcttgaatgtctgctgaatgagtgtacctctctttgtgaaaatcgcaaaaacgagttggagcagttaaaggaggctttcgccaaagagcaccaggaattcctgaccaagctcgcatttgccgaagagcgcaaccagaaccttatgctcgagctcgagactgtacagcaggccctacgctccgaaatgaccgacaatcaaaataactccaaatctgaggccggcggacttaaacaggagattatgaccctaaaggaagagcagaataaaatgcaaaaggaggtgaatgatttgttgcaggagaatgaacagctaatgaaagttatgaagaccaaacacgagtgtcagaacctggagtccgagccaatccggaactccgttaaggagagggaatccgagaggaatcagtgtaacttcaaaccccaaatggatctagaagtgaaggaaatttctctggatagctacaatgcgcagctcgttcagcttgaggccatgctaagaaataaagagctgaagctacaggagagcgagaaagagaaggaatgtctgcaacacgaactgcagaccatccgaggggacctggagacttcaaatttacaggatatgcaatcgcaggagatctctggtttgaaggattgcgagatcgatgcagaggagaaatatatttcgggaccccacgagctatctacaagccagaatgacaacgcccatttgcagtgctcccttcagaccaccatgaacaagctgaacgagttagaaaagatatgtgagattctgcaggctgagaagtatgaactcgtgacggaactaaacgattccaggtctgagtgtattactgccactcggaaaatggccgaggaggtaggcaaactgttgaacgaggtcaaaatcctcaacgacgactcaggtcttttgcatggagaactggtagaggatatcccagggggtgaattcggggaacaaccaaatgaacagcatccagtcagtctggctcctctggatgagtccaattcatatgagcacctgaccctaagtgataaggaggtccaaatgcacttcgctgaactccaggagaaattcttgtctctgcagagcgaacacaagatattacatgaccagcactgccagatgagcagtaagatgtcagaattgcaaacctacgtggattcactcaaggctgagaacctggtgctttccaccaatctgaggaatttccagggagacttagttaaagaaatgcagctcggcctggaggagggattggtgccttctctatcaagctcttgtgttcctgacagcagctctctctccagtctcggggacagttccttctaccgggccctattggagcagaccggcgatatgtcactgctctctaatcttgagggtgctgtgtctgccaaccagtgttctgtggacgaagttttctgctcctctctgcaggaggagaatctgactaggaaagaaacaccaagtgctcccgctaaaggagttgaggagcttgagtctctgtgcgaggtttatcggcaaagcctagagaagctagaagaaaaaatggagtcacaaggtataatgaaaaataaagaaattcaggagcttgagcagcttttgtcgagtgaaagacaggagctggactgcctgcgaaaacaatacctgtcggagaatgaacaatggcagcagaagctgacctctgtgacgctagaaatggagtccaagctcgctgccgagaagaaacaaaccgagcagctgtcgctcgaactcgaagtcgccaggttacaactccaggggctagacctcagcagcaggagtctcctcggtattgacactgaggatgccatccaaggacgcaatgaaagttgtgatattagcaaggaacatactagcgagactaccgagcgaaccccaaagcatgacgtccatcaaatctgcgacaaagacgcacaacaagacctcaacctcgacatcgaaaaaattacggaaactggcgcagtgaaaccaacaggcgagtgttccggggagcagtcccccgacacaaactacgaaccaccaggggaggataaaacgcagggttccagcgagtgtatctctgagctctcattctcaggccctaatgcccttgtgcccatggacttcctgggtaaccaggaggatatacacaatctgcaactacgtgtgaaggaaacctcaaatgagaatctcagactgctgcacgtgattgaggaccgggataggaaagttgagtccctgctgaacgagatgaaggaactggactcaaagctgcacctgcaagaagtgcagttaatgacaaagattgaggcttgtatcgaacttgaaaaaatagttggcgaactgaaaaaagaaaattcagatttgagcgaaaagctggagtacttctcttgtgaccaccaggaacttctgcagagggtcgaaacttctgagggtcttaattccgacctcgaaatgcacgctgacaagtctagccgggaagacattggggacaacgtggcgaaagtcaacgacagctggaaagagcggttcctggacgtcgagaacgagttaagccggatcagatcagagaaagccagcatcgagcatgaagctctgtacctggaagctgacctcgaggtcgtgcagacagagaagttgtgcctggagaaggataatgagaacaagcagaaagttatcgtctgtctcgaagaagagctcagcgttgtgacttcagagaggaaccaactgagaggggaactggatacgatgtcgaaaaagacaaccgccctggatcagttgtcagaaaaaatgaaggagaagacccaggaactcgaaagccatcagtctgaatgcttgcactgtatccaggtagctgaagccgaggtgaaagagaagaccgaattgctgcagaccctgtcttccgatgtgtccgagctcctaaaggacaagacccacctgcaggagaagctccaatccttagaaaaggattcacaggcactgagcctgaccaaatgcgagttggagaatcagattgctcaactgaacaaggagaaggagctgcttgtcaaagagtccgagagtttacaggctaggttaagtgaaagcgactacgaaaaacttaatgtcagcaaggccttggaggcagctctcgtggaaaaaggagagtttgctctgcgtctttcgtcaactcaggaggaggtgcaccaactcaggagggggattgagaagcttagagtacgcatagaggccgacgagaagaagcaattacatatcgctgagaagctgaaggagcgggagagggaaaatgattctcttaaagacaaggtcgaaaacctcgaacgggaactgcagatgtcagaggagaatcaggagttggtgatcctggacgcagagaactccaaagctgaggtagagaccctgaaaactcaaatcgaagaaatggcccgctccttaaaggtcttcgagcttgacctggtgaccctgcgtagtgagaaagaaaacctgaccaagcagatacaggagaaacagggtcagctgagcgaactggacaagctcctgagctcattcaagtccctcttggaagaaaaagagcaggcggaaattcagattaaagaggaaagcaaaaccgcagttgagatgttgcagaaccaactaaaggagctcaatgaagctgtggctgcgctctgcggcgaccaggagattatgaaagccacagagcagagtctcgaccccccaattgaggaggaacaccaattaaggaactcaattgagaaactgagagctcgtctggaggccgatgaaaaaaagcagctgtgcgtgctacaacagctgaaagaaagcgagcatcacgcagacttgcttaagggcagggtggaaaatctcgagcgcgaactcgaaatcgcgcggactaaccaggagcatgctgccctcgaagctgagaattcaaagggagaggtggagacgctcaaggccaagatagagggaatgactcagtcattgcggggactggagctggatgtcgtgactatccggagcgagaaggaaaacttgaccaacgagttgcaaaaggaacaggaacggatctccgagcttgagatcattaactcatcctttgaaaatattctccaggagaaggaacaggagaaggttcagatgaaagagaaaagctcaaccgccatggagatgctccagacacagctgaaagaactgaacgaaagagtggcggcactgcacaacgaccaggaggcctgtaaagccaaagaacaaaatctgagtagtcaggttgagtgcctggaattggaaaaggctcaacttctgcagggactcgatgaagccaaaaataactacattgttctgcaatcgagtgtaaacggattgatccaggaggtagaggatggaaaacagaaactcgaaaaaaaagatgaagaaatatcacgtctgaaaaatcaaatccaggatcaggagcagctggtgagtaagttgtctcaagtcgagggtgagcaccaattgtggaaagaacaaaacctggagctgcgaaatctgacggtggagcttgaacagaaaatccaggtgttgcagtcgaagaacgctagccttcaggacaccctggaggtccttcagagctcatataagaacttagagaacgaacttgaactgaccaaaatggacaagatgtcctttgtcgagaaagtcaacaagatgaccgctaaagaaactgagctccagcgcgaaatgcacgaaatggctcagaaaactgcggagctccaggaagagctgtccggggaaaaaaatcgactggcaggggagctccagctcctattggaagagataaaatcctctaaggaccagctgaaggagctgactctagaaaattcagagctcaagaaatctctagactgtatgcacaaagaccaggtggaaaaagaggggaaggtgcgagaggaaatcgccgagtatcagttgaggctacatgaggcagaaaaaaaacatcaggctctcctcctcgacactaacaaacaatacgaggttgaaatacagacttaccgcgagaagctgacttcaaaggaagagtgcttaagtagtcagaagctggaaatcgatctgcttaaaagtagcaaggaggagctcaacaactctctaaaagcaaccactcaaattctggaggagctgaaaaaaacaaaaatggacaatttaaagtatgtcaatcagctgaaaaaagagaatgaacgggcgcaggggaaaatgaaattgctcattaaatcttgcaaacagctagaggaggaaaaagaaatcctgcagaaggaacttagccaactgcaggcagctcaggagaagcagaagacaggtactgtaatggatactaaggtcgacgagctcacaacagagatcaaggagctgaaagagacccttgaggaaaagacaaaggaggccgacgagtacctcgataagtactgcagcctgctgatcagtcacgaaaagctggagaaagcaaaggagatgctcgaaacccaggtggctcatctgtgttctcaacaatccaagcaggactccaggggctctccacttctgggtcccgttgttcctggccctagcccaattccatctgtcactgaaaagcgactctcctctggccagaataaggcctctggaaaaagacagagaagtagtggtatctgggaaaacgggcgcggaccaacccccgcaacaccagagtctttttccaagaaaagtaaaaaggctgtgatgagcggaatccaccctgccgaggacaccgagggcaccgagtttgaacccgagggtcttcccgaggtcgttaaaaagggcttcgctgatatccccacgggtaagacgagtccttacatcctgagacgaactactatggctacccgcacaagtccccgcctcgcggcccaaaaattagctctgtcccccttgagcttagggaaagagaatttggcagagtcgtctaaaccaaccgccggggggagccgtagccagaaggttaaggtcgcccagcggtctcctgttgactccggcactattcttcgcgaacctactacaaagagcgtcccggtcaataatctgcctgagaggagccctaccgacagcccacgggaagggctcagggtcaagagagggcggctggtacccagccctaaggcaggcttagaatcgaatgggtcagagaattgtaaggtacagtag

SEQ ID NO: 190755 - DNA, 528 bp, Artificial Sequence
  derived and/or modified sequence
ctgatgatcaagggtcgcaagggaaaagtaaacaagatgacggccaaagagactgagctccagcgtgagatgcacgagatggcccaaaaaacagccgagttgcaggaggaattaagtggagaaaaaaatagactggccggagaactgcagctgctcctggaggagatcaagtcctctaaggatcagttgaaggaactcaccttagagaacagcgaacttaaaaagtccctcgactgcatgcacaaggaccaggtcgaaaaagagggcaaggtgcgagaagagatcgcggagtaccagctgagactgcatgaagcagaaaagaaacatcaggcactgctgctagacacgaacaagcaatacgaggtggaaatccaaacatatcgggagaagttgacatctaaggaggagtgcttaagcagtcagaaactggaaatcgacctccttaagtctagcaaagaggaactgaataactcactgaaggcaaccactcagatcctcgaagaactgaagaagacaaaggaaaattag

SEQ ID NO: 190756 - DNA, 9345 bp, Artificial Sequence
  derived and/or modified sequence
atgtcctgggccctggaggagtggaaggagggcctgcccacccgggccctgcagaagatccaggagctggagggccagctggacaagctgaagaaggagaagcagcagaggcagttccagctggacagcctggaggccgccctgcagaagcagaagcagaaggtggagaatgagaagacagagggcaccaacctgaagcgggagaaccagaggctgatggagatctgtgagagcctggagaagaccaagcagaagatcagccatgagctgcaggtgaaggagagccaggtgaacttccaggagggccagctgaacagcggcaagaagcagatcgagaagctggagcaggagctgaagcgctgcaagtctgagctggagaggagccagcaggccgcccagagcgcagatgtgtccctgaacccctgcaacaccccccagaagatcttcaccacccccctgacccccagccagtactacagcggcagcaaatatgaggacctgaaggagaagtacaacaaggaggtggaggagaggaagaggctggaggccgaggtgaaggccctgcaggccaagaaggccagccagaccctgccccaggccaccatgaaccaccgggacatcgcccggcaccaggccagcagctctgtgttctcctggcagcaggagaagacccccagccacctgagcagcaacagccagaggacccccatccggcgggacttcagcgccagctacttctctggagagcaggaggtgacccccagccgcagcaccctgcagatcggcaagagagatgccaacagcagcttctttgacaacagcagcagcccccacctgctggaccagctgaaggcccagaaccaggagctgaggaacaagatcaatgagctggagctgcggctgcagggccacgagaaggagatgaagggccaggtgaacaagttccaggagctgcagctgcagctggagaaggccaaggtggagctgattgagaaggagaaggtgctgaacaagtgcagagatgagctggtgaggaccacagcccagtatgaccaggccagcaccaagtacacagccctggagcagaagctgaagaagctgacagaggacctgagctgccagaggcagaatgctgagagcgcccgctgcagcctggagcagaagatcaaggagaaggagaaggagttccaggaggagctgagccggcagcagaggagcttccagaccctggaccaggagtgcatccagatgaaggcccggctgacccaggagctgcagcaggccaagaacatgcacaacgtgctgcaggccgagctggacaagctgacctctgtgaagcagcagctggagaacaacctggaggagttcaagcagaagctgtgcagagctgagcaggccttccaggccagccagatcaaggaaaatgagctgcggcgctccatggaggagatgaagaaggagaacaacctgctgaagagccacagcgagcagaaggcccgggaggtgtgccacctggaggccgagctgaagaacatcaagcagtgcctgaaccagagccagaactttgctgaggagatgaaggccaagaacaccagccaggagaccatgctgcgggacctgcaggagaagatcaaccagcaggagaacagcctgaccctggagaagctgaagctggccgtggccgacctggagaagcagagggactgcagccaggacctgctgaagaagcgggagcaccacatcgagcagctgaatgacaagctgagcaagacagagaaggagagcaaggccctgctgagcgccctggagctgaagaagaaggagtatgaggagctgaaggaggagaagaccctcttcagctgctggaagtcagaaaatgagaagctgctgacccagatggagagcgagaaggagaacctgcagagcaagatcaaccacctggagacctgcctgaagacccagcagatcaagagccatgagtacaatgaaagagtgaggaccctggagatggaccgggagaacctgtctgtggagatccggaacctgcacaacgtgctggacagcaagtctgtggaggtggagacccagaagctggcctacatggagctgcagcagaaggccgagttcagtgaccagaagcaccagaaggagattgagaacatgtgcctgaagaccagccagctgaccggccaggtggaggacctggagcacaagctgcagctgctgagcaatgagatcatggacaaggaccgctgctaccaggacctgcacgccgagtatgagagcctgcgggacctgctgaagagcaaggatgccagcctggtgaccaatgaagaccaccagaggagcctgctggcctttgaccagcagcctgccatgcaccacagctttgccaacatcattggagagcagggctccatgcccagcgagaggagtgaatgtcggctggaggccgaccagagccccaagaacagcgccatcctgcagaacagagtggacagcctggagttcagcctggagagccagaagcagatgaacagcgacctgcagaagcagtgtgaggagctggtgcagatcaagggggagattgaggagaacctgatgaaggccgagcagatgcaccagagctttgtggccgagaccagccagaggatcagcaagctgcaggaggacaccagcgcccaccagaatgtggtggccgagaccctgagcgccctggagaacaaggagaaggagctgcagctgctgaatgacaaggtggagacagagcaggccgagatccaggagctgaagaagagcaaccacctgctggaggacagcctgaaggagctgcagctgctgtctgagaccctgagcctggagaagaaggagatgagcagcatcatcagcctgaacaagcgggagattgaggagctgacccaggagaatggcaccctgaaggagatcaatgccagcctgaaccaggagaagatgaacctgatccagaagtctgagagctttgccaactacattgatgagcgggagaagagcatcagcgagctgagtgaccagtacaagcaggagaagctgatcctgctgcagagatgtgaggagactggaaatgcctatgaggacctgagccagaagtacaaggccgcccaggagaagaacagcaagctggagtgcctgctgaatgaatgtaccagcctgtgtgaaaataggaagaatgagctggagcagctgaaggaggcctttgccaaggagcaccaggagttcctgaccaagctggcctttgctgaggagaggaaccagaacctgatgctggagctggagaccgtgcagcaggccctgcggtctgagatgacagacaaccagaacaacagcaagtctgaggccggcggcctgaagcaggagatcatgaccctgaaggaggagcagaacaagatgcagaaggaggtgaatgacctgctgcaggagaatgagcagctgatgaaggtgatgaagaccaagcatgagtgccagaacctggagagcgagcccatcagaaattctgtgaaggagcgggagagcgagaggaaccagtgcaacttcaagccccagatggacctggaggtgaaggagatcagcctggacagctacaatgcccagctggtgcagctggaggccatgctgaggaacaaggagctgaagctgcaggagagcgagaaggagaaggagtgcctgcagcacgagctgcagaccatccggggggacctggagaccagcaacctgcaggacatgcagagccaggagatcagcggcctgaaggactgtgaaattgatgctgaggagaagtacatcagcggcccccatgagctgagcaccagccagaatgacaatgcccacctgcagtgcagcctgcagaccaccatgaacaagctgaatgagctggagaagatctgtgagatcctgcaggccgagaagtatgagctggtgacagagctgaatgacagccgctctgagtgcatcacagccaccaggaagatggccgaggaggtgggcaagctgctgaatgaggtgaagatcctgaatgatgattctggcctgctgcatggagagctggtggaggacatccctggaggagaatttggagagcagcccaatgagcagcaccctgtgtccctggcccccctggatgagagcaacagctatgagcacctgaccctgagtgacaaggaggtgcagatgcactttgctgagctgcaggagaagttcctgagcctgcagagcgagcacaagatcctgcatgaccagcactgccagatgagcagcaagatgtctgagctgcagacctacgtggacagcctgaaggccgagaacctggtgctgagcaccaacctgaggaacttccagggcgacctggtgaaggagatgcagctgggcctggaggagggcctggtgcccagcctgagcagcagctgtgtgcctgacagcagcagcctgagcagcctgggggacagcagcttctaccgggccctgctggagcagacaggagacatgagcctgctgagcaacctggagggcgctgtgtctgccaaccagtgcagcgtggatgaggtgttctgcagcagcctgcaggaggagaacctgaccaggaaggagaccccatctgccccagccaagggcgtggaggagctggagagcctgtgtgaggtgtaccggcagagcctggagaagctggaggagaagatggagagccagggcatcatgaagaacaaggagatccaggagctggagcagctgctgagcagcgagcggcaggagctggactgcctgaggaagcagtacctgtctgaaaatgagcagtggcagcagaagctgacctctgtgaccctggagatggagagcaagctggccgctgagaagaagcagacagagcagctgagcctggagctggaggtggcccggctgcagctgcagggcctggacctgagcagccgcagcctgctgggcatcgacacagaagatgccatccagggcagaaatgaaagctgtgacatcagcaaggagcacaccagcgagaccacagagaggacccccaagcatgatgtgcaccagatctgtgacaaggatgcccagcaggacctgaacctggacatcgagaagatcacagagaccggggctgtgaagcccaccggggagtgcagcggggagcagagcccagacaccaactatgagcccccaggagaggacaagacccagggcagcagcgagtgcatcagcgagctgtccttcagcggccccaatgccctggtgcccatggacttcctgggcaaccaggaggacatccacaacctgcagctgcgggtgaaggagaccagcaatgaaaacctgcggctgctgcacgtgattgaagatcgggacaggaaggtggagagcctgctgaatgagatgaaggagctggacagcaagctgcacctgcaggaggtgcagctgatgaccaagattgaggcctgcatcgagctggagaagatcgtgggggagctgaagaaggagaacagcgacctgtctgagaagctggagtacttcagctgtgaccaccaggagctgctgcagagggtggagaccagcgagggcctgaacagcgacctggagatgcacgccgacaagagcagccgggaggacatcggggacaacgtggccaaggtgaatgacagctggaaggagcgcttcctggatgtggagaatgagctgagccgcatccgctctgagaaggccagcattgagcacgaggccctgtacctggaggccgacctggaggtggtgcagacagagaagctgtgcctggagaaggacaatgaaaacaagcagaaggtgattgtgtgcctggaggaggagctgtctgtggtgaccagcgagaggaaccagctgcggggggagctggacaccatgagcaagaagaccacagccctggaccagctgtctgagaagatgaaggagaagacccaggagctggagagccaccagagtgaatgtctgcactgcatccaggtggccgaggccgaggtgaaggagaagacagagctgctgcagaccctgagcagtgatgtgtctgagctgctgaaggacaagacccacctgcaggagaagctgcagagcctggagaaggacagccaggccctgagcctgaccaagtgtgagctggagaaccagatcgcccagctgaacaaggagaaggagctgctggtgaaggagagcgagagcctgcaggcccggctgtctgagagtgactatgagaagctgaatgtgtccaaggccctggaggccgccctggtggagaagggggagtttgccctgcggctgagcagcacccaggaggaggtgcaccagctgcggcggggcatcgagaagctgcgggtgcgcatcgaggctgatgagaagaagcagctgcacatcgccgagaagctgaaggagcgggagcgggagaatgacagcctgaaggacaaggtggagaacctggagcgggagctgcagatgtctgaggagaaccaggagctggtgatcctggatgctgagaacagcaaggccgaggtggagaccctgaagacccagatcgaggagatggcccggagcctgaaggtgtttgagctggacctggtgaccctgcggtctgagaaggagaacctgaccaagcagatccaggagaagcagggccagctgtctgagctggacaagctgctgagcagcttcaagagcctgctggaggagaaggagcaggccgagatccagatcaaggaggagagcaagacagctgtggagatgctgcagaaccagctgaaggagctgaatgaagctgtggccgccctgtgtggggaccaggagatcatgaaggccacagagcagagcctggacccccccatcgaggaggagcaccagctgaggaacagcattgagaagctgcgggcccggctggaggctgatgagaagaagcagctgtgtgtgctgcagcagctgaaggagagcgagcaccacgccgacctgctgaagggccgggtggagaacctggagcgggagctggagatcgcccggaccaaccaggagcacgccgccctggaggccgagaacagcaaaggagaggtggagaccctgaaggccaagattgagggcatgacccagagcctgcggggcctggagctggatgtggtgaccatccgctctgagaaggagaacctgaccaatgagctgcagaaggagcaggagcgcatcagcgagctggagatcatcaacagcagctttgagaacatcctgcaggagaaggagcaggagaaggtgcagatgaaggagaagagcagcacagccatggagatgctgcagacccagctgaaggagctgaatgaaagagtggccgccctgcacaatgaccaggaggcctgcaaggccaaggagcagaacctgagcagccaggtggagtgcctggagctggagaaggcccagctgctgcagggcctggatgaggccaagaacaactacatcgtgctgcagagctctgtgaatggcctcatccaggaggtggaggatggcaagcagaagctggagaagaaggatgaggagatcagccggctgaagaaccagatccaggaccaggagcagctggtgtccaagctgagccaggtggagggggagcaccagctgtggaaggagcagaacctggagctgaggaacctgactgtggagctggagcagaagatccaggtgctgcagagcaagaatgccagcctgcaggacaccctggaggtgctgcagagcagctacaagaacctggagaatgagctggagctgaccaagatggacaagatgagctttgtggagaaggtgaacaagatgacagccaaggagacagagctgcagcgggagatgcatgagatggcccagaagacagctgagctgcaggaggagctgagcggggagaagaaccggctggccggggagctgcagctgctgctggaggagatcaagagcagcaaggaccagctgaaggagctgaccctggagaacagcgagctgaagaagagcctggactgcatgcacaaggaccaggtggagaaggagggcaaggtgcgggaggagattgctgagtaccagctgcggctgcacgaggccgagaagaagcaccaggccctgctgctggacaccaacaagcagtatgaggtggagatccagacctaccgggagaagctgaccagcaaggaggagtgcctgagcagccagaagctggagattgacctgctgaagagcagcaaggaggagctgaacaacagcctgaaggccaccacccagatcctggaggagctgaagaagaccaagatggacaacctgaagtatgtgaaccagctgaagaaggaaaatgaaagagcccagggcaagatgaagctgctgatcaagagctgcaagcagctggaggaggagaaggagatcctgcagaaggagctgagccagctgcaggccgcccaggagaagcagaagacaggcaccgtgatggacaccaaggtggatgagctgaccacagagatcaaggagctgaaggagaccctggaggagaagaccaaggaggctgatgagtacctggacaagtactgcagcctgctgatcagccatgagaagctggagaaggccaaggagatgctggagacccaggtggcccacctgtgcagccagcagagcaagcaggacagccggggcagccccctgctgggccctgtggtgcccggccccagccccatccccagcgtgacagagaagaggctgagcagcggccagaacaaggccagcggcaagaggcagaggagcagcggcatctgggagaatggccggggccccaccccagccaccccagagagcttcagcaagaagagcaagaaggctgtgatgagcggcatccaccctgctgaggacacagagggcacagaatttgagcctgagggcctgcctgaggtggtgaagaagggctttgctgacatccccaccgggaagaccagcccctacatcctgcggaggaccaccatggccaccaggaccagcccccggctggccgcccagaagctggccctgagccccctgagcctgggcaaggagaacctggccgagagcagcaagcccacagctgggggcagccgcagccagaaggtgaaggtggcccagaggagccctgtggacagcggcaccatcctgcgggagcccaccaccaagtctgtgcctgtgaacaacctgcctgagaggagccccacagacagcccccgggagggcctgcgggtgaagaggggccgcctggtgcccagccccaaggccggcctggagagcaatggaagtgagaactgcaaggtgcagtag

SEQ ID NO: 190757 - DNA, 528 bp, Artificial Sequence
  derived and/or modified sequence
ctgatgatcaagggcaggaagggcaaggtgaacaagatgacagccaaggagacagagctgcagcgggagatgcatgagatggcccagaagacagctgagctgcaggaggagctgtctggagagaagaaccggctggccggggagctgcagctgctgctggaggagatcaagagcagcaaggaccagctgaaggagctgaccctggagaacagcgagctgaagaagagcctggactgcatgcacaaggaccaggtggagaaggagggcaaggtgcgggaggagattgctgagtaccagctgcggctgcatgaagctgagaagaagcaccaggccctgctgctggacaccaacaagcagtatgaggtggagatccagacctaccgggagaagctgaccagcaaggaggagtgcctgagcagccagaagctggagattgacctgctgaagagcagcaaggaggagctgaacaacagcctgaaggccaccacccagatcctggaggagctgaagaagaccaaggagaactag

SEQ ID NO: 190758 - DNA, 9345 bp, Artificial Sequence
  derived and/or modified sequence
atgagctgggccctggaggagtggaaggagggcctgcccacccgggccctacaaaagatacaggaactggaaggccaactggataaattaaaaaaggaaaagcagcagcgccaatttcagctggactccctcgaggcagccctgcaaaaacaaaaacagaaggtcgagaatgagaaaaccgaaggaaccaatctgaaacgggagaaccaaaggctcatggagatttgcgagtcacttgaaaagaccaagcaaaagatcagtcacgagcttcaggttaaggagagtcaagtaaatttccaggaaggccagctcaactcgggtaagaagcagatcgaaaagctggaacaggagttaaaaagatgcaagtcggaactagagcgcagccaacaggctgcacagtcagctgacgtgtctctgaacccctgcaacaccccgcaaaagatattcaccacccccctgacacccagtcaatattacagtgggtccaagtacgaggatctgaaggaaaaatataacaaggaggtcgaggagagaaagcggttggaggcagaggtcaaagccctgcaagcgaaaaaggcgtcacagacgttacctcaagctaccatgaaccaccgggacatcgctaggcaccaagcgtccagtagcgtattttcttggcagcaagaaaagacaccttctcatctttcatcaaatagccagagaacaccgatccggcgggacttctccgccagctatttttccggagaacaagaggttaccccttcccggtctacactccagattggcaaacgagacgcaaacagttccttttttgataattcctcctcccctcacctgcttgaccaactgaaggcgcagaatcaggagctccgaaataagatcaacgagctagagttacggctccagggtcatgaaaaagaaatgaaaggacaggtgaataagttccaggaactgcagctacagctggagaaggccaaggtggaactcatagagaaagaaaaagtcctgaataaatgtcgcgatgagctggtgcggaccaccgcccagtatgaccaagccagcaccaagtacaccgccctggagcaaaagctgaagaaactcaccgaggacctatcttgccagaggcaaaacgcggaatccgctcggtgttctctggaacagaaaatcaaggagaaagaaaaggagttccaagaggagctgtcaagacagcagaggtctttccagactctcgaccaagaatgtatccagatgaaagcccggctgacccaagagctgcagcaagccaaaaacatgcataacgttctccaggccgaattagacaaactgactagcgttaagcagcagctagagaataatctagaggaattcaagcaaaagctgtgcagggctgagcaagccttccaggcctctcagataaaggagaatgaactccggagaagcatggaggagatgaagaaagagaataatctgttgaaaagtcattcagagcagaaggcccgtgaggtatgccacctcgaagcggagctaaagaacatcaaacagtgcctcaatcagagtcagaacttcgctgaagaaatgaaagcgaaaaacacctctcaggagactatgttgagagacctgcaggaaaaaataaatcagcaggagaactcgctgacactcgaaaaactgaagctggcagtagcagatttagaaaagcagcgggattgttctcaggacttacttaaaaagcgcgaacaccacatagaacagctcaacgacaaactgagtaagacggagaaggagagcaaagcactgctctctgccctggagttaaaaaaaaaagaatatgaagagctcaaggaagagaagaccctttttagttgttggaagtctgaaaacgaaaaactgctgactcagatggagtcagagaaggagaacttacagagcaagattaaccatctggagacatgcctcaagactcaacaaatcaagagccacgaatataatgagcgggtccggacacttgagatggatagagaaaaccttagtgtcgagattaggaatcttcacaacgttcttgactccaaatctgtggaggttgagacgcagaagttagcctatatggaactgcagcagaaagcagaatttagtgatcagaagcatcagaaagagatcgagaacatgtgtctgaagacaagccagctgacaggtcaggtggaagatttggagcataagttgcaacttctatccaatgagatcatggataaagacaggtgttaccaagacctacatgcagagtacgaatcccttcgcgacttattgaagtcaaaggacgcttctctcgtcactaacgaggaccatcagagatcattgctggcattcgatcagcagcccgctatgcatcactccttcgctaacatcattggggagcaggggtcaatgccgagtgagcgctcggaatgtaggctggaggcagatcaatcacccaagaacagcgctattcttcaaaaccgcgttgactctttggagttctctctggagtcgcagaaacagatgaactccgatctccagaaacagtgtgaagaacttgtccaaataaagggcgagatcgaggaaaatctgatgaaggctgagcaaatgcaccagagcttcgtggccgaaactagccagcgaataagcaagctgcaagaagatacttcggcacatcagaatgtggtcgctgagacactctccgcattggaaaataaagagaaagaactccagctgctaaacgataaggtcgagaccgaacaagcagagattcaggagctgaagaaatccaaccatcttctcgaagactcactgaaagagttgcagctgctaagtgaaaccttgagcctggagaaaaaggagatgagcagcataatcagtctgaataagagggagatagaagaactgacccaggaaaacgggacattaaaagaaataaatgcctctctaaatcaggaaaagatgaaccttatacagaagtcagaaagttttgctaattacatcgatgagcgcgagaaatccatctcagagctctctgatcagtataagcaagaaaaactgatcctgctgcagcgatgtgaagagaccggaaacgcatatgaggatttgtctcagaagtataaagctgcacaagagaaaaattccaagctggagtgccttcttaacgaatgcactagtctgtgcgagaaccgtaagaatgaactggagcagctgaaggaggcatttgccaaggagcaccaggagttcctgacaaagcttgctttcgcagaggagaggaatcaaaatcttatgctggaacttgagacagtgcagcaagctctcagaagcgagatgacagacaatcagaacaacagcaaatcagaggcaggagggctcaagcaagagataatgacgctcaaagaagaacagaacaaaatgcaaaaggaagtaaacgacctgctgcaagagaacgaacaactaatgaaggtcatgaaaacgaaacacgagtgccagaatctggagtctgaaccaataaggaattcagtcaaagaaagggagtccgagcggaatcagtgcaacttcaagccccagatggacctcgaggtcaaggagatttcactcgactcgtataatgcacagttggtccagttggaggcaatgttgagaaacaaagaattaaagctacaggagagtgaaaaggaaaaagagtgtttgcagcacgaactccaaaccattcggggtgatttggaaacctcaaatctgcaggatatgcagtcacaggagatctctgggttaaaggactgcgagattgatgccgaggagaaatacatctcaggtccacacgagctgagtacgagtcaaaatgataatgcacacctgcagtgcagtctgcagactaccatgaacaaattgaatgaactcgagaagatttgcgagattctccaggccgagaaatacgaacttgtcaccgaattgaacgacagcagaagcgaatgtatcaccgccacgagaaagatggccgaggaagtcggcaaactcctgaacgaggttaagattttgaacgatgatagtggtctgctgcacggggagctggtcgaggatatccccggaggggagttcggagagcaacccaatgagcaacacccagttagtctcgctccactcgacgagtcaaactcctatgaacaccttaccctgagcgataaagaggtccagatgcactttgccgagcttcaggaaaagttcttatctctgcagtccgaacataagattcttcacgatcagcactgccagatgtcttcaaagatgtcagagctccagacctatgtcgatagcctgaaggctgagaatcttgtgctgtctaccaatctcaggaatttccagggtgatctggtcaaggaaatgcagctcggactggaggaagggttggtcccttcattgtcgtccagctgcgtccccgattccagcagcctcagcagtttaggcgatagctcattctaccgagctctacttgagcagaccggggacatgagcctgctgagcaatcttgagggggcagtgagcgccaaccaatgttcagttgatgaggtcttttgcagctctctccaggaggaaaacttgactcggaaggagactccttcggcgcccgctaaaggggtggaggagctggagagcctgtgcgaggtctaccgccagagtctcgagaagctcgaagagaagatggaatcacagggcatcatgaaaaacaaagagatccaggagctggaacaactgctttcttctgaacgccaagaactagactgccttcgcaagcagtacttgtcagagaatgaacagtggcagcagaaactcacgtcagtgaccctggaaatggagagtaaattggccgcagagaagaagcagacagaacagctgtcactggagctggaagtggctcgtctccagctgcagggtttggatctgtcatcaaggagcctacttgggatagatactgaggacgctatacaagggcgcaacgagagctgcgacatttctaaggagcatacttccgaaacgaccgagcgaacacccaaacatgatgttcaccagatctgcgataaagatgctcagcaagacctaaacctggacatcgagaagataactgagacaggagcagttaaacctaccggcgaatgcagcggcgagcagtcaccagacactaactacgaaccgcccggtgaggacaagacacagggcagctctgaatgtatcagtgaattgagcttttctggccccaacgctctcgtgcctatggacttcctcgggaaccaggaggatatccacaacttgcagctgcgagttaaagagacatcgaacgaaaatctccggctgcttcatgtaatcgaggatcgtgaccgcaaagtcgagagcctgctcaatgagatgaaagaactagattctaagctgcatcttcaggaggtgcagctgatgaccaagatagaggcttgcattgaacttgagaaaattgtcggagaactgaagaaagagaattccgacctgagcgaaaagctcgagtacttcagttgcgaccaccaggagttactgcagagagtggaaacctccgaagggctcaactctgaccttgagatgcacgctgacaaatcttcccgggaggacataggcgacaatgtggctaaggtaaatgacagttggaaggagagatttttagacgtggaaaatgagttgtctcggatccgcagcgagaaagcctcgatcgaacatgaggcactgtatcttgaagcagatctagaggtggtgcagactgaaaaactctgcctggagaaagataacgaaaacaagcaaaaggtgatagtgtgcctcgaagaagagctgagcgttgtaacatccgagaggaatcagttaaggggcgagctcgatacaatgtcaaagaagaccacggccttagatcagctgtctgagaagatgaaggagaagactcaagaactggagtctcaccagagtgaatgcctccattgcatacaggtggctgaggccgaggtaaaagagaaaactgaactactgcagactttgtcatcagacgtcagcgagctcttaaaggataagactcatctccaggagaagctacagtcccttgagaaagattcacaagctctgtccctgactaagtgcgagctggagaatcagatcgcacagttgaacaaagaaaaagaactcctggttaaggaaagcgagtctttacaggctcgactatctgaatctgactatgaaaaattgaatgtgtctaaagctctggaagccgccctggtcgaaaagggagaatttgctctgcgcctatcctcgacgcaggaggaggttcaccagctgcggcgcggcatcgaaaaactaagagtaaggatcgaggccgatgaaaagaagcagttacacattgccgaaaagctgaaggaacgggagcgcgagaatgactccctgaaagacaaggtagagaacttggagcgagagctccagatgagcgaagagaatcaagagctcgtgatactggatgccgagaactcaaaagcggaagtggaaacactcaagactcagatcgaagaaatggcccggtcactgaaagtgttcgagctcgatctcgtgacactccggtccgaaaaggagaacctgaccaaacagatccaggagaagcaaggacagctcagtgaattggacaagctcctttcctcctttaaatcgctcttggaagaaaaggagcaggcagagatccaaattaaagaagagtctaagaccgccgtggaaatgttgcagaaccagcttaaagagctgaatgaggcagttgccgcactttgcggcgatcaagagattatgaaggctaccgaacaatctttggacccaccgatcgaggaagagcatcagctcagaaactcaatcgaaaaactgagagccagactggaagccgacgaaaagaagcagctgtgtgttctccagcaattgaaggagtctgagcatcatgcagacctgctcaaaggccgggtggagaatctcgagagagaactcgagatcgccaggactaatcaggaacacgccgccctcgaagctgagaacagcaagggagaagtggagacactcaaagccaagattgaggggatgactcagtcccttcgtggtctcgaacttgatgtggtgacaattagatcagagaaggagaacctcactaatgagttgcagaaggagcaggagcggatcagcgaactagagatcataaattcaagtttcgagaacatccttcaggaaaaggaacaagaaaaggtgcagatgaaagaaaaatcctccaccgcaatggagatgctgcagacacaactgaaggagctgaatgagagggtcgcagccctgcataatgatcaggaggcttgcaaagcgaaggagcagaacttatcatcgcaggtagaatgtctggaattggagaaagcccaactgctgcaggggctcgacgaagcaaagaataactacatcgtcctccagtcatccgtgaatggcctcatccaagaggtagaagacggaaaacagaagttagaaaaaaaagacgaggagatctccagactgaagaaccagatccaggatcaagagcaactagttagcaaactgtctcaggtggaaggggagcaccagctatggaaagaacagaacctggaactccggaatctgacagtcgagctggaacaaaagatccaagtgttgcagtctaagaacgcttctctgcaggataccctggaggtgttgcaaagttcctataagaatttggaaaatgaactggaactcacgaagatggacaaaatgtcatttgtcgaaaaagtgaacaagatgaccgccaaagaaaccgaactccagagagaaatgcacgagatggcccaaaaaaccgccgaactgcaggaggaactgtccggagagaaaaaccgtctggccggggaactccagctgctcctggaagaaatcaaatcatctaaagaccagttgaaggaactgaccttggagaatagtgaacttaagaagtctctcgactgtatgcacaaagatcaggtggagaaggagggcaaagtgcgagaggagattgctgagtatcagctcaggcttcacgaagcggaaaaaaaacatcaggcccttttactggacaccaataaacagtacgaagttgaaatccagacatacagagaaaagctgacctctaaagaagagtgcctttctagccagaaactcgaaatcgatctccttaaaagctctaaggaggaattgaacaactcgctaaaggccacaacccaaattttggaggaactaaagaagactaaaatggataaccttaagtacgtcaatcagcttaaaaaggaaaacgagcgcgctcagggcaaaatgaagcttctcataaagagctgtaagcagttggaggaagaaaaagaaatcttgcagaaagagttgtcacaacttcaggcagcccaggaaaaacagaaaaccggaacagtgatggacactaaagtggacgaactgacaactgagatcaaagagctgaaagagactctggaggaaaagactaaagaagccgatgagtaccttgataaatattgcagccttctgattagccacgagaaactggaaaaagctaaggaaatgttggaaacccaggttgcccacctctgcagtcagcaaagcaagcaggatagcagagggagccctttgttaggacccgtggtgcccggtccgagccccatcccgagcgtcacagagaagcgcttgtccagcgggcaaaataaagcctccgggaaaagacaacgctcctccggcatttgggagaatggccgaggcccaacccctgcaactcctgagagtttctctaagaaatccaagaaagcggttatgtcaggcatccaccccgccgaggacaccgaaggaactgagttcgaaccggagggattacctgaggttgttaaaaaggggttcgcggatatcccaaccgggaaaacgtcaccttatatcctccgacgcacaactatggccacaagaacctcaccacgactggccgcacaaaaactcgccctcagccctctgagcttaggcaaggagaacctggccgaaagctctaagccaactgccggtgggagtcgatcacagaaagtgaaagttgctcagcggagtccggttgacagtggcaccattcttcgcgaaccaaccactaagtccgtcccagtgaataacctgcccgaacgttcccctacggatagtcctcgcgagggacttcgggttaaaagaggccgcttggtacctagccctaaggccgggcttgagagcaacggctctgagaactgcaaggtgcaatag

SEQ ID NO: 190759 - DNA, 528 bp, Artificial Sequence
  derived and/or modified sequence
ctgatgatcaagggccggaagggcaaggtgaacaagatgaccgccaaagaaacagagcttcaaagggagatgcatgaaatggctcaaaaaacagccgagctccaggaagagctgtccggagaaaaaaaccgcttagccggggagctgcaactgttgttagaagagatcaaaagttccaaagaccaattaaaagaactcactcttgaaaactctgaactgaagaagtctctggattgtatgcacaaagaccaggtcgaaaaggaagggaaggtccgtgaagagatagcagaatatcagctgcgactgcacgaggctgagaagaagcaccaggcccttcttctcgacacgaacaaacagtacgaggtcgagatccagacatatagggagaaactgactagcaaagaagagtgtctgtcttcacagaaacttgagatcgacctgctcaagagttctaaggaggagttaaacaattctctcaaggctacaacgcagatactggaggagcttaaaaaaaccaaggaaaactag

SEQ ID NO: 190760 - DNA, 9344 bp, Artificial Sequence
  derived and/or modified sequence
atgtcctgggctctggaggaatggaaggagggtctccccacgcgagccctgcaaaaaatccaggagctagaggggcagctcgataaactgaagaaggaaaaacagcagaggcagtttcagctggattctctggaggccgcattacagaaacagaagcagaaagtggaaaacgagaagacagaagggacgaaccttaaaagagaaaaccaaaggctgatggaaatctgcgagagtctagaaaaaactaagcaaaaaattagccacgagctccaggtgaaggagtcacaagtaaactttcaggaagggcagctgaactcgggcaagaagcagattgagaagctggagcaggagctaaaaaggtgtaaatccgagctagaacgtagtcaacaggccgctcagtcagcggacgtgtcactgaacccatgcaataccccccagaaaatttttactacgccgttaaccccatcccagtattattccggcagcaaatatgaggatctcaaggagaagtataataaggaggtggaagaacgcaaaagactcgaggcagaagtaaaggccctccaagccaagaaggctagccaaacacttccacaagccaccatgaaccatcgggacatagcacggcatcaagcatcctcaagtgttttcagctggcagcaggaaaagacccctagccatctttcatccaatagccaacgcaccccaattaggcgggatttctccgccagctatttcagtggtgagcaggaggtcaccccctctcggagtactttacagatcggaaagagggatgctaactcatccttttttgacaacagcagttccccccacctgctggatcagctgaaagcccaaaatcaggaactgcgaaacaaaatcaacgagttagagctgagactgcaggggcatgaaaaagagatgaaaggtcaggtgaacaagttccaggagctgcaactccaacttgaaaaagccaaagtggaattaattgaaaaggagaaagttcttaataagtgccgcgacgaactcgtcaggacaaccgctcagtatgaccaggccagtacaaaatatacagccttggagcagaaactgaaaaagttgacagaggacctctcctgccagcgccagaatgctgagtccgcgagatgttccttagagcagaaaattaaggagaaggagaaagagtttcaggaagagctgtcacgccagcaacgaagtttccagactttagatcaggagtgcatccaaatgaaggcacgtctgacacaggagctgcagcaagcaaagaacatgcacaatgtgctacaagccgaactggataagctgaccagcgtgaagcagcagctggagaacaacttagaggagtttaagcagaagttgtgcagagctgaacaagcctttcaggcgtcccagattaaggaaaatgaattaagaaggtcaatggaagaaatgaagaaggagaacaatctgctgaaatctcactccgagcagaaagcacgggaagtctgtcacttagaagcagagttaaaaaacatcaaacagtgtctgaatcagtcgcagaactttgccgaggagatgaaggccaaaaatacttctcaggagacgatgctgcgcgatcttcaggaaaagataaaccagcaggaaaactccctgaccctggaaaagttgaagctcgccgtggccgacctagagaagcagagggactgttcccaagacctgcttaaaaagagggagcaccatatagagcagctgaatgacaagctgagcaaaacagagaaggagtccaaggccctcctgtcagccctggagttgaagaagaaagagtatgaggaattaaaggaggagaaaacccttttttcttgttggaagagtgaaaacgagaaattattaacacaaatggaatccgagaaggagaatctgcaatccaagataaatcacctcgaaacttgcctgaagacccaacagataaagagtcacgagtataatgagcgagtgcgaaccttggaaatggatcgggagaatctgagtgttgagatccggaatctccataacgtgttggactcgaaatcggtggaagtggagactcagaagctcgcctacatggagctacaacagaaggccgaattcagcgatcaaaaacaccaaaaagagatcgagaatatgtgccttaaaactagccagctgactggacaagtggaggacttggaacacaaactgcagctactcagtaacgaaatcatggacaaggatagatgttatcaggacctgcatgccgagtatgagtcactgagggatcttctcaaaagcaaagatgctagcctggtgactaatgaggatcatcagcggtcactactcgcgttcgaccagcagccagccatgcatcactcctttgcaaacataatcggagagcagggctccatgccttcagaacggtccgagtgccgccttgaagctgatcagagcccgaaaaattctgctattcttcagaaccgcgttgacagcttggagttcagcctcgaaagccagaaacagatgaactccgatctgcaaaagcagtgcgaagagcttgtccagatcaaaggcgagatcgaagagaacctcatgaaggccgaacagatgcatcaaagctttgtggccgaaacttctcagagaatctcgaaactgcaggaggacacctcagctcaccagaatgtcgtggccgagaccctcagtgctctcgagaataaagagaaagaattacagttgctcaacgataaggtggagaccgagcaggcagagatccaagagctgaagaagtctaatcatcttctcgaggactcattgaaggagctgcagcttctgagtgaaacattgtctctggaaaaaaaggagatgagctccataattagtctgaacaagcgcgagatcgaagaacttacccaagaaaacggcacactcaaggaaataaacgcgtccctcaatcaggaaaaaatgaatcttatccagaagtcagagtcctttgcaaactacatcgacgagcgcgaaaaatctatctctgaactgtctgaccagtacaagcaggaaaaattgatcctattacagaggtgtgaggagacgggaaacgcttatgaggacctgtcacagaaatataaggcagcccaggagaagaattcaaagctggagtgcctactcaacgaatgtacctctttgtgcgagaatcgtaagaatgaacttgagcagctaaaagaagcttttgcgaaggagcatcaggagtttcttaccaagcttgcattcgctgaggagcgcaaccagaacttaatgctggagctcgagacggtccagcaggccttgaggtctgagatgacagataatcaaaacaactctaaaagcgaggccggaggactgaaacaggaaatcatgacattgaaggaggaacaaaacaaaatgcagaaggaagtgaatgatttactccaagagaatgagcaacttatgaaagtgatgaagacaaagcacgagtgtcagaacctggaaagcgagccgattcggaattcggtgaaagaaagagagtctgaacggaaccagtgcaacttcaagccccaaatggacctggaggttaaagagataagcctggactcttataatgcccagctggtgcaattggaggcgatgctgagaaacaaggaactcaagctgcaggagtcagaaaaggaaaaggaatgcttgcagcacgagctgcagacaatccggggagacttggagaccagcaacctgcaggatatgcagtcacaggagatctcaggccttaaggactgtgaaatcgatgcagaagaaaaatatatcagcggaccgcacgaactcagcacatctcagaacgataatgcacacctgcagtgttcactgcagaccacaatgaataagctgaatgagctagaaaagatctgcgaaatccttcaggccgagaagtacgagctggtgaccgagctcaacgatagtcgatccgagtgcataactgcaaccagaaaaatggcggaagaagtcggcaaactgctcaatgaagtcaagatcctgaacgatgacagcgggctgcttcacggtgagctagtggaggacataccaggcggagagttcggggagcagcctaacgagcagcacccagtcagtttggctcctctggacgaatcgaactcctatgagcaccttacgcttagcgataaggaggttcagatgcactttgctgagctccaagagaagttccttagtctgcagtctgaacacaagatcctgcatgaccagcactgtcaaatgagctcgaaaatgtcagaactacaaacctacgtggattcactcaaggctgagaatctggtgctaagtaccaacctgcgcaactttcaaggagacctggtgaaggaaatgcagcttggccttgaagaggggctggtgccaagtctgagcagctcatgtgtgcccgattcttccagcctgtctagtcttggcgattcttctttttacagagcgttacttgagcagacaggagacatgtcgttgctctccaaccttgagggggcagtcagcgcgaaccagtgctccgtggatgaggtattttgttcttctctgcaggaggagaacttgacacgcaaggagacacctagtgctcccgctaagggggttgaagagctggaatcgttgtgcgaagtctatagacagtctttggaaaagttagaggagaagatggaaagtcaaggaattatgaaaaataaggagatacaagagctggagcagcttctctctagcgagcgacaagaactggactgcctccggaaacagtacctgtccgaaaacgaacagtggcagcaaaaactgacttctgtcacactggaaatggagtcgaaactagccgcagaaaaaaagcagaccgagcagctgagcctcgaactggaagtagctagacttcaactgcagggactggatctttctagccgctctttgttgggcatagacacagaggacgcgattcagggccgaaatgagagctgtgacatttccaaggagcacacttctgagacgaccgagagaacacccaaacatgacgtgcatcagatctgcgacaaagacgcacagcaagatctcaatctggatatcgagaaaatcaccgaaactggcgcagtgaagcctaccggagaatgtagtggagagcagtctccagatacaaactatgaacctccgggagaggataaaacacagggctcaagtgagtgcatctccgaactgtccttttcaggccctaacgcgcttgtgcctatggacttccttgggaaccaggaggatatccataacttgcagttaagagtcaaggagacctctaatgaaaatctgaggttactacatgtgatcgaggacagggatcgcaaagtcgagtccctgctgaatgagatgaaggagctcgattccaaactccacctgcaggaagtccagttgatgactaagatcgaggcctgcatcgaattggagaagatagtcggtgagttgaaaaaggagaattcagatctgtcggagaagctcgagtactttagttgtgaccatcaagagcttctgcaacgtgtggaaaccagtgaaggtctcaacagcgatctggaaatgcacgccgataagagttccagggaggacatcggcgacaatgtggctaaagtaaacgattcctggaaggagaggttcctagacgtggaaaacgaactttctcgaatcaggtctgagaaggcatctatagaacatgaagccctgtatcttgaggccgatcttgaagtggtgcagactgagaagttgtgccttgaaaaggataacgagaataagcagaaagtgattgtgtgtctggaagaggagctctcagtggtgactagcgagcgcaaccaactcaggggcgagctggatacaatgtcaaagaagactacagcccttgatcagctttcagaaaagatgaaagagaaaactcaagagctggaaagccaccagtccgaatgtctccattgcatccaagtggctgaggccgaggtaaaagaaaagaccgagctcctacagaccctaagcagtgatgtgtcagagctgttaaaggacaaaacacacctccaagagaagctccaaagcctggagaaagacagccaagctctgagcctcacaaaatgcgagctggaaaatcagatagctcagctgaataaggagaaggaattactggttaaagagagtgagtcgttacaggccaggctgagcgaatccgattacgagaaactaaatgtgtcgaaagcactggaagctgctctcgtggagaaaggtgaattcgccctaagactaagcagcacccaagaggaggtccaccaactccgcaggggtatagagaaacttagggtcagaatcgaagccgacgagaagaaacagctgcacatcgccgaaaagttgaaagaacgggaacgagagaacgactcactcaaagataaggtggagaacctggagcgcgaactccagatgtccgaggagaaccaggaactagtgatactcgacgcagaaaactcaaaggcagaagtggaaactttgaaaactcagatcgaagaaatggcaaggtctctaaaagtgttcgagctggacctggtcacactgcgcagtgaaaaagagaatctgaccaaacagatccaggaaaaacagggccaattgtccgagctggacaagctgctgagctccttcaaatcactactggaagaaaaggaacaggccgagatacagatcaaagaagaatccaagactgccgtagaaatgctgcagaaccaattgaaggagctgaatgaagctgtcgcagcactctgtggtgatcaagaaatcatgaaggctaccgaacagtcactggacccccctattgaagaagagcaccagttgcgaaattcaatcgaaaaattacgtgctaggctggaggcggacgagaagaaacagctttgcgtgctgcagcaattgaaagagtcggagcaccacgctgatctcctgaagggacgagttgaaaacctggagcgtgagttagaaattgctaggactaatcaggaacacgccgcattggaggcagagaactccaaaggcgaggttgaaactctaaaagcaaaaatcgagggaatgacccagagtttacggggactggagctagatgtggtcacaatcaggtcagagaaggagaatctgactaacgagctccagaaggagcaggaacgcattagtgagctagagataatcaattcgtcgttcgaaaatatcctgcaggagaaggaacaggagaaggtgcaaatgaaggagaagagcagcacagcgatggaaatgctgcagacccaattgaaggagctgaatgaaagggtcgctgcactccacaatgaccaggaggcttgcaaggcgaaggaacagaatcttagctctcaggtagagtgtcttgaattagagaaggctcagctgctccagggcctcgacgaggcgaagaacaattacattgtgctgcaatctagtgttaacggtcttatacaagaagttgaggacggaaagcagaagctggaaaaaaaggacgaagaaatctctcgcctcaaaaaccaaatccaggatcaagagcagctggtgtccaagctctcccaggtagagggagagcaccaactttggaaagagcagaaccttgaactgcgcaacctgaccgttgagctggagcagaaaatccaggtgctgcagagcaaaaacgcttcattacaggacaccctggaagttcttcaatcgtcctataaaaacctcgagaatgagctggagctcactaaaatggacaaaatgagctttgtggagaaggtcaacaaaatgactgccaaggagactgagctgcaacgcgaaatgcacgaaatggctcagaagaccgccgagctgcaggaggaactgtccggcgagaagaaccgattagcaggggaactacagttgctgctcgaggagatcaaaagcagcaaggaccaactgaaagagctgacgttagagaacagtgagctgaaaaagagtctggattgcatgcacaaagatcaagtggagaaagagggtaaggtgcgggaggagatagctgagtaccagttacgcctgcacgaggctgagaaaaagcaccaagctctgctgttggacacaaataagcagtacgaggtagaaattcagacatatagagagaagctcaccagcaaagaggaatgtctgtctagccaaaaattagaaatcgacctgctgaagtcatctaaggaggagctgaataattctctgaaagcaaccacacagattctggaggagctgaagaagaccaagatggataacctaaaatacgtgaaccaactaaagaaggagaatgaacgtgcccagggaaaaatgaaacttctgatcaagtcgtgcaagcagctagaagaggagaaagagatcctgcaaaaggaattgtctcagttacaggcagcccaggaaaaacagaagacaggcaccgtaatggataccaaagtggatgaactcactaccgaaataaaagagctcaaagaaactctggaagaaaagacaaaagaggccgatgaatatctggataaatactgcagccttctaatctctcatgaaaagttggaaaaagccaaagagatgttagagacacaggttgcccatttatgtagccaacagagcaaacaggacagtcgcggttcacccctgctgggcccagttgtgccagggccaagccctatcccgagcgtcaccgagaagagactgagtagcggccagaacaaagcttcaggtaaacggcagcggagttctgggatctgggagaacggacgcggacccacacctgcgaccccggaaagcttcagcaagaagtccaagaaagcagtcatgtcaggaattcaccccgctgaagataccgagggcactgaatttgagcccgagggcttaccagaggtggtaaagaaaggctttgccgacattccgaccggtaagacctccccctacatcttgcggagaactaccatggctacgcgcacatcaccacggctcgctgcccagaaactggccctaagccctctttcactgggtaaggagaacttggccgagtcgtccaaacccaccgccggaggctcacgatcgcaaaaagtgaaagtcgcacaacggtccccggtggattcaggaaccattctaagggagcctacaacaaagagtgttcccgtgaacaaccttccggagaggtctcccaccgacagtcccagggaaggcctgagagtgaagcgtggaagactggtgcccagcccaaaagcgggactggaaagcaatggcagtgaaaattgtaaggtccagta

SEQ ID NO: 190761 - DNA, 528 bp, Artificial Sequence
  derived and/or modified sequence
ctcatgattaaaggccgaaaggggaaagtgaataagatgacagcaaaggagacggaactccagagagaaatgcacgagatggcgcagaaaaccgcggagctccaggaggagctctccggagagaagaacagattagccggtgaattgcagttgctgttagaagaaattaaaagctctaaggaccaactgaaagaactgactctggaaaacagcgagctcaaaaaatccctggattgtatgcataaggaccaggtcgaaaaagagggaaaggttagggaagaaatcgccgaatatcagcttcgcctgcatgaagccgagaagaagcaccaggcattgctccttgacacaaacaagcagtacgaagtcgagatccagacgtacagagagaagctgacctccaaggaggagtgtttatcctcacagaaactcgagatcgatctgctgaaaagctccaaagaggagttaaataactctctgaaagcaacgacccaaatattggaagagctgaaaaagaccaaggaaaattag

SEQ ID NO: 190762 - DNA, 10307 bp, Artificial Sequence
  derived and/or modified sequence
agaagcgggcgaattgggcaccggtggcggctgcgggcagtttgaattagactctgggctccagcccgccgaagccgcgccagaactgtactctccgagaggtcgttttcccgtccccgagagcaagtttatttacaaatgttggagtaataaagaaggcagaacaaaatgagctgggctttggaagaatggaaagaagggctgcctacaagagctcttcagaaaattcaagagcttgaaggacagcttgacaaactgaagaaggaaaagcagcaaaggcagtttcagcttgacagtctcgaggctgcgctgcagaagcaaaaacagaaggttgaaaatgaaaaaaccgagggtacaaacctgaaaagggagaatcaaagattgatggaaatatgtgaaagtctggagaaaactaagcagaagatttctcatgaacttcaagtcaaggagtcacaagtgaatttccaggaaggacaactgaattcaggcaaaaaacaaatagaaaaactggaacaggaacttaaaaggtgtaaatctgagcttgaaagaagccaacaagctgcgcagtctgcagatgtctctctgaatccatgcaatacaccacaaaaaatttttacaactccactaacaccaagtcaatattatagtggttccaagtatgaagatctaaaagaaaaatataataaagaggttgaagaacgaaaaagattagaggcagaggttaaagccttgcaggctaaaaaagcaagccagactcttccacaagccaccatgaatcaccgcgacattgcccggcatcaggcttcatcatctgtgttctcatggcagcaagagaagaccccaagtcatctttcatctaattctcaaagaactccaattaggagagatttctctgcatcttacttttctggggaacaagaggtgactccaagtcgatcaactttgcaaatagggaaaagagatgctaatagcagtttctttgacaattctagcagtcctcatcttttggatcaattaaaagcgcagaatcaagagctaagaaacaagattaatgagttggaactacgcctgcaaggacatgaaaaagaaatgaaaggccaagtgaataagtttcaagaactccaactccaactggagaaagcaaaagtggaattaattgaaaaagagaaagttttgaacaaatgtagggatgaactagtgagaacaacagcacaatacgaccaggcgtcaaccaagtatactgcattggaacaaaaactgaaaaaattgacggaagatttgagttgtcagcgacaaaatgcagaaagtgccagatgttctctggaacagaaaattaaggaaaaagaaaaggagtttcaagaggagctctcccgtcaacagcgttctttccaaacactggaccaggagtgcatccagatgaaggccagactcacccaggagttacagcaagccaagaatatgcacaacgtcctgcaggctgaactggataaactcacatcagtaaagcaacagctagaaaacaatttggaagagtttaagcaaaagttgtgcagagctgaacaggcgttccaggcgagtcagatcaaggagaatgagctgaggagaagcatggaggaaatgaagaaggaaaacaacctccttaagagtcactctgagcaaaaggccagagaagtctgccacctggaggcagaactcaagaacatcaaacagtgtttaaatcagagccagaattttgcagaagaaatgaaagcgaagaatacctctcaggaaaccatgttaagagatcttcaagaaaaaataaatcagcaagaaaactccttgactttagaaaaactgaagcttgctgtggctgatctggaaaagcagcgagattgttctcaagaccttttgaagaaaagagaacatcacattgaacaacttaatgataagttaagcaagacagagaaagagtccaaagccttgctgagtgctttagagttaaaaaagaaagaatatgaagaattgaaagaagagaaaactctgttttcttgttggaaaagtgaaaacgaaaaacttttaactcagatggaatcagaaaaggaaaacttgcagagtaaaattaatcacttggaaacttgtctgaagacacagcaaataaaaagtcatgaatacaacgagagagtaagaacgctggagatggacagagaaaacctaagtgtcgagatcagaaaccttcacaacgtgttagacagtaagtcagtggaggtagagacccagaaactagcttatatggagctacagcagaaagctgagttctcagatcagaaacatcagaaggaaatagaaaatatgtgtttgaagacttctcagcttactgggcaagttgaagatctagaacacaagcttcagttactgtcaaatgaaataatggacaaagaccggtgttaccaagacttgcatgccgaatatgagagcctcagggatctgctaaaatccaaagatgcttctctggtgacaaatgaagatcatcagagaagtcttttggcttttgatcagcagcctgccatgcatcattcctttgcaaatataattggagaacaaggaagcatgccttcagagaggagtgaatgtcgtttagaagcagaccaaagtccgaaaaattctgccatcctacaaaatagagttgattcacttgaattttcattagagtctcaaaaacagatgaactcagacctgcaaaagcagtgtgaagagttggtgcaaatcaaaggagaaatagaagaaaatctcatgaaagcagaacagatgcatcaaagttttgtggctgaaacaagtcagcgcattagtaagttacaggaagacacttctgctcaccagaatgttgttgctgaaaccttaagtgcccttgagaacaaggaaaaagagctgcaacttttaaatgataaggtagaaactgagcaggcagagattcaagaattaaaaaagagcaaccatctacttgaagactctctaaaggagctacaacttttatccgaaaccctaagcttggagaagaaagaaatgagttccatcatttctctaaataaaagggaaattgaagagctgacccaagagaatgggactcttaaggaaattaatgcatccttaaatcaagagaagatgaacttaatccagaaaagtgagagttttgcaaactatatagatgaaagggagaaaagcatttcagagttatctgatcagtacaagcaagaaaaacttattttactacaaagatgtgaagaaaccggaaatgcatatgaggatcttagtcaaaaatacaaagcagcacaggaaaagaattctaaattagaatgcttgctaaatgaatgcactagtctttgtgaaaataggaaaaatgagttggaacagctaaaggaagcatttgcaaaggaacaccaagaattcttaacaaaattagcatttgctgaagaaagaaatcagaatctgatgctagagttggagacagtgcagcaagctctgagatctgagatgacagataaccaaaacaattctaagagcgaggctggtggtttaaagcaagaaatcatgactttaaaggaagaacaaaacaaaatgcaaaaggaagttaatgacttattacaagagaatgaacagctgatgaaggtaatgaagactaaacatgaatgtcaaaatctagaatcagaaccaattaggaactctgtgaaagaaagagagagtgagagaaatcaatgtaattttaaacctcagatggatcttgaagttaaagaaatttctctagatagttataatgcgcagttggtgcaattagaagctatgctaagaaataaggaattaaaacttcaggaaagtgagaaggagaaggagtgcctgcagcatgaattacagacaattagaggagatcttgaaaccagcaatttgcaagacatgcagtcacaagaaattagtggccttaaagactgtgaaatagatgcggaagaaaagtatatttcagggcctcatgagttgtcaacaagtcaaaacgacaatgcacaccttcagtgctctctgcaaacaacaatgaacaagctgaatgagctagagaaaatatgtgaaatactgcaggctgaaaagtatgaactcgtaactgagctgaatgattcaaggtcagaatgtatcacagcaactaggaaaatggcagaagaggtagggaaactactaaatgaagttaaaatattaaatgatgacagtggtcttctccatggtgagttagtggaagacataccaggaggtgaatttggtgaacaaccaaatgaacagcaccctgtgtctttggctccattggacgagagtaattcctacgagcacttgacattgtcagacaaagaagttcaaatgcactttgccgaattgcaagagaaattcttatctttacaaagtgaacacaaaattttacatgatcagcactgtcagatgagctctaaaatgtcagagctgcagacctatgttgactcattaaaggccgaaaatttggtcttgtcaacgaatctgagaaactttcaaggtgacttggtgaaggagatgcagctgggcttggaggaggggctcgttccatccctgtcatcctcttgtgtgcctgacagctctagtcttagcagtttgggagactcctccttttacagagctcttttagaacagacaggagatatgtctcttttgagtaatttagaaggggctgtttcagcaaaccagtgcagtgtagatgaagtattttgcagcagtctgcaggaggagaatctgaccaggaaagaaaccccttcggccccagcgaagggtgttgaagagcttgagtccctctgtgaggtgtaccggcagtccctcgagaagctagaagagaaaatggaaagtcaagggattatgaaaaataaggaaattcaagagctcgagcagttattaagttctgaaaggcaagagcttgactgccttaggaagcagtatttgtcagaaaatgaacagtggcaacagaagctgacaagcgtgactctggagatggagtccaagttggcggcagaaaagaaacagacggaacaactgtcacttgagctggaagtagcacgactccagctacaaggtctggacttaagttctcggtctttgcttggcatcgacacagaagatgctattcaaggccgaaatgagagctgtgacatatcaaaagaacatacttcagaaactacagaaagaacaccaaagcatgatgttcatcagatttgtgataaagatgctcagcaggacctcaatctagacattgagaaaataactgagactggtgcagtgaaacccacaggagagtgctctggggaacagtccccagataccaattatgagcctccaggggaagataaaacccagggctcttcagaatgcatttctgaattgtcattttctggtcctaatgctttggtacctatggatttcctggggaatcaggaagatatccataatcttcaactgcgggtaaaagagacatcaaatgagaatttgagattacttcatgtgatagaggaccgtgacagaaaagttgaaagtttgctaaatgaaatgaaagaattagactcaaaactccatttacaggaggtacaactaatgaccaaaattgaagcatgcatagaattggaaaaaatagttggggaacttaagaaagaaaactcagatttaagtgaaaaattggaatatttttcttgtgatcaccaggagttactccagagagtagaaacttctgaaggcctcaattctgatttagaaatgcatgcagataaatcatcacgtgaagatattggagataatgtggccaaggtgaatgacagctggaaggagagatttcttgatgtggaaaatgagctgagtaggatcagatcggagaaagctagcattgagcatgaagccctctacctggaggctgacttagaggtagttcaaacagagaagctatgtttagaaaaagacaatgaaaataagcagaaggttattgtctgccttgaagaagaactctcagtggtcacaagtgagagaaaccagcttcgtggagaattagatactatgtcaaaaaaaaccacggcactggatcagttgtctgaaaaaatgaaggagaaaacacaagagcttgagtctcatcaaagtgagtgtctccattgcattcaggtggcagaggcagaggtgaaggaaaagacggaactccttcagactttgtcctctgatgtgagtgagctgttaaaagacaaaactcatctccaggaaaagctgcagagtttggaaaaggactcacaggcactgtctttgacaaaatgtgagctggaaaaccaaattgcacaactgaataaagagaaagaattgcttgtcaaggaatctgaaagcctgcaggccagactgagtgaatcagattatgaaaagctgaatgtctccaaggccttggaggccgcactggtggagaaaggtgagttcgcattgaggctgagctcaacacaggaggaagtgcatcagctgagaagaggcatcgagaaactgagagttcgcattgaggccgatgaaaagaagcagctgcacatcgcagagaaactgaaagaacgcgagcgggagaatgattcacttaaggataaagttgagaaccttgaaagggaattgcagatgtcagaagaaaaccaggagctagtgattcttgatgccgagaattccaaagcagaagtagagactctaaaaacacaaatagaagagatggccagaagcctgaaagtttttgaattagaccttgtcacgttaaggtctgaaaaagaaaatctgacaaaacaaatacaagaaaaacaaggtcagttgtcagaactagacaagttactctcttcatttaaaagtctgttagaagaaaaggagcaagcagagatacagatcaaagaagaatctaaaactgcagtggagatgcttcagaatcagttaaaggagctaaatgaggcagtagcagccttgtgtggtgaccaagaaattatgaaggccacagaacagagtctagacccaccaatagaggaagagcatcagctgagaaatagcattgaaaagctgagagcccgcctagaagctgatgaaaagaagcagctctgtgtcttacaacaactgaaggaaagtgagcatcatgcagatttacttaagggtagagtggagaaccttgaaagagagctagagatagccaggacaaaccaagagcatgcagctcttgaggcagagaattccaaaggagaggtagagaccctaaaagcaaaaatagaagggatgacccaaagtctgagaggtctggaattagatgttgttactataaggtcagaaaaagaaaatctgacaaatgaattacaaaaagagcaagagcgaatatctgaattagaaataataaattcatcatttgaaaatattttgcaagaaaaagagcaagagaaagtacagatgaaagaaaaatcaagcactgccatggagatgcttcaaacacaattaaaagagctcaatgagagagtggcagccctgcataatgaccaagaagcctgtaaggccaaagagcagaatcttagtagtcaagtagagtgtcttgaacttgagaaggctcagttgctacaaggccttgatgaggccaaaaataattatattgttttgcaatcttcagtgaatggcctcattcaagaagtagaagatggcaagcagaaactggagaagaaggatgaagaaatcagtagactgaaaaatcaaattcaagaccaagagcagcttgtctctaaactgtcccaggtggaaggagagcaccaactttggaaggagcaaaacttagaactgagaaatctgacagtggaattggagcagaagatccaagtgctacaatccaaaaatgcctctttgcaggacacattagaagtgctgcagagttcttacaagaatctagagaatgagcttgaattgacaaaaatggacaaaatgtcctttgttgaaaaagtaaacaaaatgactgcaaaggaaactgagctgcagagggaaatgcatgagatggcacagaaaacagcagagctgcaagaagaactcagtggagagaaaaataggctagctggagagttgcagttactgttggaagaaataaagagcagcaaagatcaattgaaggagctcacactagaaaatagtgaattgaagaagagcctagattgcatgcacaaagaccaggtggaaaaggaagggaaagtgagagaggaaatagctgaatatcagctacggcttcatgaagctgaaaagaaacaccaggctttgcttttggacacaaacaaacagtatgaagtagaaatccagacataccgagagaaattgacttctaaagaagaatgtctcagttcacagaagctggagatagaccttttaaagtctagtaaagaagagctcaataattcattgaaagctactactcagattttggaagaattgaagaaaaccaagatggacaatctaaaatatgtaaatcagttgaagaaggaaaatgaacgtgcccaggggaaaatgaagttgttgatcaaatcctgtaaacagctggaagaggaaaaggagatactgcagaaagaactctctcaacttcaagctgcacaggagaagcagaaaacaggtactgttatggataccaaggtcgatgaattaacaactgagatcaaagaactgaaagaaactcttgaagaaaaaaccaaggaggcagatgaatacttggataagtactgttccttgcttataagccatgaaaagttagagaaagctaaagagatgttagagacacaagtggcccatctgtgttcacagcaatctaaacaagattcccgagggtctcctttgctaggtccagttgttccaggaccatctccaatcccttctgttactgaaaagaggttatcatctggccaaaataaagcttcaggcaagaggcaaagatccagtggaatatgggagaatggtagaggaccaacacctgctaccccagagagcttttctaaaaaaagcaagaaagcagtcatgagtggtattcaccctgcagaagacacggaaggtactgagtttgagccagagggacttccagaagttgtaaagaaagggtttgctgacatcccgacaggaaagactagcccatatatcctgcgaagaacaaccatggcaactcggaccagcccccgcctggctgcacagaagttagcgctatccccactgagtctcggcaaagaaaatcttgcagagtcctccaaaccaacagctggtggcagcagatcacaaaaggtcaaagttgctcagcggagcccagtagattcaggcaccatcctccgagaacccaccacgaaatccgtcccagtcaataatcttcctgagagaagtccgactgacagccccagagagggcctgagggtcaagcgaggccgacttgtccccagccccaaagctggactggagtccaacggcagtgagaactgtaaggtccagtgaaggcactttgtgtgtcagtacccctgggaggtgccagtcattgaatagataaggctgtgcctacaggacttctctttagtcagggcatgctttattagtgaggagaaaacaattccttagaagtcttaaatatattgtactctttagatctcccatgtgtaggtattgaaaaagtttggaagcactgatcacctgttagcattgccattcctctactgcaatgtaaatagtataaagctatgtatataaagctttttggtaatatgttacaattaaaatgacaagcactatatcacaatctctgtttgtatgtgggttttacactaaaaaaatgcaaaacacattttattcttctaattaacagctcctaggaaaatgtagacttttgctttatgatattctatctgtagtatgaggcatggaatagttttgtatcgggaatttctcagagctgagtaaaatgaaggaaaagcatgttatgtgtttttaaggaaaatgtgcacacatatacatgtaggagtgtttatctttctcttacaatctgttttagacatctttgcttatgaaacctgtacatatgtgtgtgtgggtatgtgtttatttccagtgagggctgcaggcttcctagaggtgtgctataccatgcgtctgtcgttgtgcttttttctgtttttagaccaattttttacagttctttggtaagcattgtcgtatctggtgatggattaacatatagcctttgttttctaataaaatagtcgccttcgttttctgtaagaatgattcctaagtgt

SEQ ID NO: 190763 - DNA, 525 bp, Artificial Sequence
  derived and/or modified sequence
ttgatgattaaaggaagaaaaggtaaggtaaacaaaatgactgcaaaggaaactgagctgcagagggaaatgcatgagatggcacagaaaacagcagagctgcaagaagaactcagtggagagaaaaataggctagctggagagttgcagttactgttggaagaaataaagagcagcaaagatcaattgaaggagctcacactagaaaatagtgaattgaagaagagcctagattgcatgcacaaagaccaggtggaaaaggaagggaaagtgagagaggaaatagctgaatatcagctacggcttcatgaagctgaaaagaaacaccaggctttgcttttggacacaaacaaacagtatgaagtagaaatccagacataccgagagaaattgacttctaaagaagaatgtctcagttcacagaagctggagatagaccttttaaagtctagtaaagaagagctcaataattcattgaaagctactactcagattttggaagaattgaagaaaaccaaggaaaat

SEQ ID NO: 190764 - DNA, 9345 bp, Artificial Sequence
  derived and/or modified sequence
atgagctgggccctggaggagtggaaggagggcctgcccaccagagccctgcagaagatccaggagctggagggccagctggacaagctgaagaaggagaagcagcagagacagttccagctggacagcctggaggccgccctgcagaagcagaagcagaaggtggagaacgagaagaccgagggcaccaacctgaagagagagaaccagagactgatggagatctgcgagagcctggagaagaccaagcagaagatcagccacgagctgcaggtgaaggagagccaggtgaacttccaggagggccagctgaacagcggcaagaagcagatcgagaagctggagcaggagctgaagagatgcaagagcgagctggagagaagccagcaggccgcccagagcgccgacgtgagcctgaacccctgcaacaccccccagaagatcttcaccacccccctgacccccagccagtactacagcggcagcaagtacgaggacctgaaggagaagtacaacaaggaggtggaggagagaaagagactggaggccgaggtgaaggccctgcaggccaagaaggccagccagaccctgccccaggccaccatgaaccacagagacatcgccagacaccaggccagcagcagcgtgttcagctggcagcaggagaagacccccagccacctgagcagcaacagccagagaacccccatcagaagagacttcagcgccagctacttcagcggcgagcaggaggtgacccccagcagaagcaccctgcagatcggcaagagagacgccaacagcagcttcttcgacaacagcagcagcccccacctgctggaccagctgaaggcccagaaccaggagctgagaaacaagatcaacgagctggagctgagactgcagggccacgagaaggagatgaagggccaggtgaacaagttccaggagctgcagctgcagctggagaaggccaaggtggagctgatcgagaaggagaaggtgctgaacaagtgcagagacgagctggtgagaaccaccgcccagtacgaccaggccagcaccaagtacaccgccctggagcagaagctgaagaagctgaccgaggacctgagctgccagagacagaacgccgagagcgccagatgcagcctggagcagaagatcaaggagaaggagaaggagttccaggaggagctgagcagacagcagagaagcttccagaccctggaccaggagtgcatccagatgaaggccagactgacccaggagctgcagcaggccaagaacatgcacaacgtgctgcaggccgagctggacaagctgaccagcgtgaagcagcagctggagaacaacctggaggagttcaagcagaagctgtgcagagccgagcaggccttccaggccagccagatcaaggagaacgagctgagaagaagcatggaggagatgaagaaggagaacaacctgctgaagagccacagcgagcagaaggccagagaggtgtgccacctggaggccgagctgaagaacatcaagcagtgcctgaaccagagccagaacttcgccgaggagatgaaggccaagaacaccagccaggagaccatgctgagagacctgcaggagaagatcaaccagcaggagaacagcctgaccctggagaagctgaagctggccgtggccgacctggagaagcagagagactgcagccaggacctgctgaagaagagagagcaccacatcgagcagctgaacgacaagctgagcaagaccgagaaggagagcaaggccctgctgagcgccctggagctgaagaagaaggagtacgaggagctgaaggaggagaagaccctgttcagctgctggaagagcgagaacgagaagctgctgacccagatggagagcgagaaggagaacctgcagagcaagatcaaccacctggagacctgcctgaagacccagcagatcaagagccacgagtacaacgagagagtgagaaccctggagatggacagagagaacctgagcgtggagatcagaaacctgcacaacgtgctggacagcaagagcgtggaggtggagacccagaagctggcctacatggagctgcagcagaaggccgagttcagcgaccagaagcaccagaaggagatcgagaacatgtgcctgaagaccagccagctgaccggccaggtggaggacctggagcacaagctgcagctgctgagcaacgagatcatggacaaggacagatgctaccaggacctgcacgccgagtacgagagcctgagagacctgctgaagagcaaggacgccagcctggtgaccaacgaggaccaccagagaagcctgctggccttcgaccagcagcccgccatgcaccacagcttcgccaacatcatcggcgagcagggcagcatgcccagcgagagaagcgagtgcagactggaggccgaccagagccccaagaacagcgccatcctgcagaacagagtggacagcctggagttcagcctggagagccagaagcagatgaacagcgacctgcagaagcagtgcgaggagctggtgcagatcaagggcgagatcgaggagaacctgatgaaggccgagcagatgcaccagagcttcgtggccgagaccagccagagaatcagcaagctgcaggaggacaccagcgcccaccagaacgtggtggccgagaccctgagcgccctggagaacaaggagaaggagctgcagctgctgaacgacaaggtggagaccgagcaggccgagatccaggagctgaagaagagcaaccacctgctggaggacagcctgaaggagctgcagctgctgagcgagaccctgagcctggagaagaaggagatgagcagcatcatcagcctgaacaagagagagatcgaggagctgacccaggagaacggcaccctgaaggagatcaacgccagcctgaaccaggagaagatgaacctgatccagaagagcgagagcttcgccaactacatcgacgagagagagaagagcatcagcgagctgagcgaccagtacaagcaggagaagctgatcctgctgcagagatgcgaggagaccggcaacgcctacgaggacctgagccagaagtacaaggccgcccaggagaagaacagcaagctggagtgcctgctgaacgagtgcaccagcctgtgcgagaacagaaagaacgagctggagcagctgaaggaggccttcgccaaggagcaccaggagttcctgaccaagctggccttcgccgaggagagaaaccagaacctgatgctggagctggagaccgtgcagcaggccctgagaagcgagatgaccgacaaccagaacaacagcaagagcgaggccggcggcctgaagcaggagatcatgaccctgaaggaggagcagaacaagatgcagaaggaggtgaacgacctgctgcaggagaacgagcagctgatgaaggtgatgaagaccaagcacgagtgccagaacctggagagcgagcccatcagaaacagcgtgaaggagagagagagcgagagaaaccagtgcaacttcaagccccagatggacctggaggtgaaggagatcagcctggacagctacaacgcccagctggtgcagctggaggccatgctgagaaacaaggagctgaagctgcaggagagcgagaaggagaaggagtgcctgcagcacgagctgcagaccatcagaggcgacctggagaccagcaacctgcaggacatgcagagccaggagatcagcggcctgaaggactgcgagatcgacgccgaggagaagtacatcagcggcccccacgagctgagcaccagccagaacgacaacgcccacctgcagtgcagcctgcagaccaccatgaacaagctgaacgagctggagaagatctgcgagatcctgcaggccgagaagtacgagctggtgaccgagctgaacgacagcagaagcgagtgcatcaccgccaccagaaagatggccgaggaggtgggcaagctgctgaacgaggtgaagatcctgaacgacgacagcggcctgctgcacggcgagctggtggaggacatccccggcggcgagttcggcgagcagcccaacgagcagcaccccgtgagcctggcccccctggacgagagcaacagctacgagcacctgaccctgagcgacaaggaggtgcagatgcacttcgccgagctgcaggagaagttcctgagcctgcagagcgagcacaagatcctgcacgaccagcactgccagatgagcagcaagatgagcgagctgcagacctacgtggacagcctgaaggccgagaacctggtgctgagcaccaacctgagaaacttccagggcgacctggtgaaggagatgcagctgggcctggaggagggcctggtgcccagcctgagcagcagctgcgtgcccgacagcagcagcctgagcagcctgggcgacagcagcttctacagagccctgctggagcagaccggcgacatgagcctgctgagcaacctggagggcgccgtgagcgccaaccagtgcagcgtggacgaggtgttctgcagcagcctgcaggaggagaacctgaccagaaaggagacccccagcgcccccgccaagggcgtggaggagctggagagcctgtgcgaggtgtacagacagagcctggagaagctggaggagaagatggagagccagggcatcatgaagaacaaggagatccaggagctggagcagctgctgagcagcgagagacaggagctggactgcctgagaaagcagtacctgagcgagaacgagcagtggcagcagaagctgaccagcgtgaccctggagatggagagcaagctggccgccgagaagaagcagaccgagcagctgagcctggagctggaggtggccagactgcagctgcagggcctggacctgagcagcagaagcctgctgggcatcgacaccgaggacgccatccagggcagaaacgagagctgcgacatcagcaaggagcacaccagcgagaccaccgagagaacccccaagcacgacgtgcaccagatctgcgacaaggacgcccagcaggacctgaacctggacatcgagaagatcaccgagaccggcgccgtgaagcccaccggcgagtgcagcggcgagcagagccccgacaccaactacgagccccccggcgaggacaagacccagggcagcagcgagtgcatcagcgagctgagcttcagcggccccaacgccctggtgcccatggacttcctgggcaaccaggaggacatccacaacctgcagctgagagtgaaggagaccagcaacgagaacctgagactgctgcacgtgatcgaggacagagacagaaaggtggagagcctgctgaacgagatgaaggagctggacagcaagctgcacctgcaggaggtgcagctgatgaccaagatcgaggcctgcatcgagctggagaagatcgtgggcgagctgaagaaggagaacagcgacctgagcgagaagctggagtacttcagctgcgaccaccaggagctgctgcagagagtggagaccagcgagggcctgaacagcgacctggagatgcacgccgacaagagcagcagagaggacatcggcgacaacgtggccaaggtgaacgacagctggaaggagagattcctggacgtggagaacgagctgagcagaatcagaagcgagaaggccagcatcgagcacgaggccctgtacctggaggccgacctggaggtggtgcagaccgagaagctgtgcctggagaaggacaacgagaacaagcagaaggtgatcgtgtgcctggaggaggagctgagcgtggtgaccagcgagagaaaccagctgagaggcgagctggacaccatgagcaagaagaccaccgccctggaccagctgagcgagaagatgaaggagaagacccaggagctggagagccaccagagcgagtgcctgcactgcatccaggtggccgaggccgaggtgaaggagaagaccgagctgctgcagaccctgagcagcgacgtgagcgagctgctgaaggacaagacccacctgcaggagaagctgcagagcctggagaaggacagccaggccctgagcctgaccaagtgcgagctggagaaccagatcgcccagctgaacaaggagaaggagctgctggtgaaggagagcgagagcctgcaggccagactgagcgagagcgactacgagaagctgaacgtgagcaaggccctggaggccgccctggtggagaagggcgagttcgccctgagactgagcagcacccaggaggaggtgcaccagctgagaagaggcatcgagaagctgagagtgagaatcgaggccgacgagaagaagcagctgcacatcgccgagaagctgaaggagagagagagagagaacgacagcctgaaggacaaggtggagaacctggagagagagctgcagatgagcgaggagaaccaggagctggtgatcctggacgccgagaacagcaaggccgaggtggagaccctgaagacccagatcgaggagatggccagaagcctgaaggtgttcgagctggacctggtgaccctgagaagcgagaaggagaacctgaccaagcagatccaggagaagcagggccagctgagcgagctggacaagctgctgagcagcttcaagagcctgctggaggagaaggagcaggccgagatccagatcaaggaggagagcaagaccgccgtggagatgctgcagaaccagctgaaggagctgaacgaggccgtggccgccctgtgcggcgaccaggagatcatgaaggccaccgagcagagcctggacccccccatcgaggaggagcaccagctgagaaacagcatcgagaagctgagagccagactggaggccgacgagaagaagcagctgtgcgtgctgcagcagctgaaggagagcgagcaccacgccgacctgctgaagggcagagtggagaacctggagagagagctggagatcgccagaaccaaccaggagcacgccgccctggaggccgagaacagcaagggcgaggtggagaccctgaaggccaagatcgagggcatgacccagagcctgagaggcctggagctggacgtggtgaccatcagaagcgagaaggagaacctgaccaacgagctgcagaaggagcaggagagaatcagcgagctggagatcatcaacagcagcttcgagaacatcctgcaggagaaggagcaggagaaggtgcagatgaaggagaagagcagcaccgccatggagatgctgcagacccagctgaaggagctgaacgagagagtggccgccctgcacaacgaccaggaggcctgcaaggccaaggagcagaacctgagcagccaggtggagtgcctggagctggagaaggcccagctgctgcagggcctggacgaggccaagaacaactacatcgtgctgcagagcagcgtgaacggcctgatccaggaggtggaggacggcaagcagaagctggagaagaaggacgaggagatcagcagactgaagaaccagatccaggaccaggagcagctggtgagcaagctgagccaggtggagggcgagcaccagctgtggaaggagcagaacctggagctgagaaacctgaccgtggagctggagcagaagatccaggtgctgcagagcaagaacgccagcctgcaggacaccctggaggtgctgcagagcagctacaagaacctggagaacgagctggagctgaccaagatggacaagatgagcttcgtggagaaggtgaacaagatgaccgccaaggagaccgagctgcagagagagatgcacgagatggcccagaagaccgccgagctgcaggaggagctgagcggcgagaagaacagactggccggcgagctgcagctgctgctggaggagatcaagagcagcaaggaccagctgaaggagctgaccctggagaacagcgagctgaagaagagcctggactgcatgcacaaggaccaggtggagaaggagggcaaggtgagagaggagatcgccgagtaccagctgagactgcacgaggccgagaagaagcaccaggccctgctgctggacaccaacaagcagtacgaggtggagatccagacctacagagagaagctgaccagcaaggaggagtgcctgagcagccagaagctggagatcgacctgctgaagagcagcaaggaggagctgaacaacagcctgaaggccaccacccagatcctggaggagctgaagaagaccaagatggacaacctgaagtacgtgaaccagctgaagaaggagaacgagagagcccagggcaagatgaagctgctgatcaagagctgcaagcagctggaggaggagaaggagatcctgcagaaggagctgagccagctgcaggccgcccaggagaagcagaagaccggcaccgtgatggacaccaaggtggacgagctgaccaccgagatcaaggagctgaaggagaccctggaggagaagaccaaggaggccgacgagtacctggacaagtactgcagcctgctgatcagccacgagaagctggagaaggccaaggagatgctggagacccaggtggcccacctgtgcagccagcagagcaagcaggacagcagaggcagccccctgctgggccccgtggtgcccggccccagccccatccccagcgtgaccgagaagagactgagcagcggccagaacaaggccagcggcaagagacagagaagcagcggcatctgggagaacggcagaggccccacccccgccacccccgagagcttcagcaagaagagcaagaaggccgtgatgagcggcatccaccccgccgaggacaccgagggcaccgagttcgagcccgagggcctgcccgaggtggtgaagaagggcttcgccgacatccccaccggcaagaccagcccctacatcctgagaagaaccaccatggccaccagaaccagccccagactggccgcccagaagctggccctgagccccctgagcctgggcaaggagaacctggccgagagcagcaagcccaccgccggcggcagcagaagccagaaggtgaaggtggcccagagaagccccgtggacagcggcaccatcctgagagagcccaccaccaagagcgtgcccgtgaacaacctgcccgagagaagccccaccgacagccccagagagggcctgagagtgaagagaggcagactggtgcccagccccaaggccggcctggagagcaacggcagcgagaactgcaaggtgcagtag

SEQ ID NO: 190765 - DNA, 528 bp, Artificial Sequence
  derived and/or modified sequence
ctgatgatcaagggcagaaagggcaaggtgaacaagatgaccgccaaggagaccgagctgcagagagagatgcacgagatggcccagaagaccgccgagctgcaggaggagctgagcggcgagaagaacagactggccggcgagctgcagctgctgctggaggagatcaagagcagcaaggaccagctgaaggagctgaccctggagaacagcgagctgaagaagagcctggactgcatgcacaaggaccaggtggagaaggagggcaaggtgagagaggagatcgccgagtaccagctgagactgcacgaggccgagaagaagcaccaggccctgctgctggacaccaacaagcagtacgaggtggagatccagacctacagagagaagctgaccagcaaggaggagtgcctgagcagccagaagctggagatcgacctgctgaagagcagcaaggaggagctgaacaacagcctgaaggccaccacccagatcctggaggagctgaagaagaccaaggagaactag

SEQ ID NO: 190766 - DNA, 2102 bp, Artificial Sequence
  derived and/or modified sequence
agaaatctcctcaagccagagcctgtgctgtgaggggcttcgggaccttggggcagctcctgagttcagacagagttcaggaagggagacaggggcacagagagacagaggttcatggactgaggcaaaggctgggccaggctcagcaacccaggcctcccgcaggcaggcagaggctgccctgtaacccatggagaccagaccaacagctctgatgagctccacagtggctgcagctgcgcctgcagctggggctgcctccaggaaggagtctccaggcagatggggcctgggggaggatcccacaggcgtgagcccctcgctccagtgccgcgtgtgcggagacagcagcagcgggaagcactatggcatctatgcctgcaacggctgcagcggcttcttcaagaggagcgtacggcggaggctcatctacaggtgccaggtgggggcagggatgtgccccgtggacaaggcccaccgcaaccagtgccaggcctgccggctgaagaagtgcctgcaggcggggatgaaccaggacgccgtgcagaacgagcgccagccgcgaagcacagcccaggtccacctggacagcatggagtccaacactgagtcccggccggagtccctggtggctcccccggccccggcagggcgcagcccacggggccccacacccatgtctgcagccagagccctgggccaccacttcatggccagccttataacagctgaaacctgtgctaagctggagccagaggatgctgatgagaatattgatgtcaccagcaatgaccctgagttcccctcctctccatactcctcttcctccccctgcggcctggacagcatccatgagacctcggctcgcctactcttcatggccgtcaagtgggccaagaacctgcctgtgttctccagcctgcccttccgggatcaggtgatcctgctggaagaggcgtggagtgaactctttctcctcggggccatccagtggtctctgcctctggacagctgtcctctgctggcaccgcccgaggcctctgctgccggtggtgcccagggccggctcacgctggccagcatggagacgcgtgtcctgcaggaaactatctctcggttccgggcattggcggtggaccccacggagtttgcctgcatgaaggccttggtcctcttcaagccagagacgcggggcctgaaggatcctgagcacgtagaggccttgcaggaccagtcccaagtgatgctgagccagcacagcaaggcccaccaccccagccagcccgtgaggtgacctgagcatgcgcccacccactcatctgtccctgacctctaacctttctctgcctctcccacactctcccagagctcactgattagacagcacaagggtctcagttcaacagcatacagccaacatctatggtgtcccaggcacagtgccaggccccgggagtggggaccaagatgtacataagacaaagctactgccttctagagacaaccggcagtgacctcactgaagacaaaaactgccctagccaggtactgagggttgcatgaatctgcaggagacagagatccccttgcatgggaaacataaagcagaattgggagggactttgtggagacagggctggacttgaaaggaagaagaagtctaaaagaaaacatcatttgcaaagggagagaggggcaagcatgatatgttgttagaacaggagcccactttgaaggtataacaggttcctgccagtgagaaatggggagaataagccagaaaagtaccctaggaccagcccgttcaggactttgaatgccagccaaaggccacgtctgacttgggaggcagagggcagctactgcaggtttccgagcagagggtcatacacagggctggacctcacgcagactggcatggccatgggtccagaggatactactgggaaggggatggcagctactgccaccttccagatggttccatggagttctgatctttgggcatggccaggggaagcagaagggagactctaggagttgaaatgggtcagacccggtgtttgggtgaaggtaaggaatgagggaagaggagctctttg

SEQ ID NO: 190767 - DNA, 1104 bp, Artificial Sequence
  derived and/or modified sequence
atggaaacgagacccactgcacttatgagtagcacggttgccgcggctgctcccgcagctggagccgcttcccgtaaagaatcacctgggcggtgggggttgggggaggaccctacaggagtttcacctagcctccaatgccgcgtctgcggagattcctcgagcggcaaacactatgggatttatgcatgtaacggttgtagcggcttttttaagaggtcagtacgaaggcggttaatttatcggtgccaagtgggcgccggaatgtgcccggtcgataaggctcacagaaatcaatgtcaggcctgccgtctaaaaaagtgtttgcaggcggggatgaatcaggacgcagttcagaacgaaaggcaaccccgttcgaccgcccaggtccaccttgatagtatggaaagcaacaccgagagtagacccgaatcactcgtagcccctcccgcaccagccggaagaagcccacgcggtccaacacccatgtccgcggcccgggcccttggacaccacttcatggctagcctcattaccgccgagacatgtgcaaaactcgaacccgaggatgccgacgagaatattgatgtgacttctaacgacccagagttcccatcctctccttacagctcttccagcccctgtggcctagacagtatccatgagacatccgctcgcttgctctttatggcagtgaagtgggctaaaaatctgcctgtttttagctctctgcccttccgtgaccaagtgatccttttggaagaggcgtggtccgagctttttctgctgggcgctattcagtggtcactgccactggattcttgcccgctactagccccccctgaggccagcgcagccgggggcgcccagggaaggctcactctagcatctatggagactagggttttgcaggagacaatcagcaggtttcgcgccttagccgtggaccccactgagttcgcatgcatgaaggctctcgtgctctttaagcccgagacccgggggctcaaggatccggaacatgtggaagctttacaggaccagtcgcaggtaatgctgtcccagcatagcaaggcacaccacccttcccagcctgtccgctag

SEQ ID NO: 190768 - DNA, 1104 bp, Artificial Sequence
  derived and/or modified sequence
atggagacccggcccacagccctgatgagcagcacagtggccgccgccgccccagctgctggggccgccagcaggaaggagagccctggccgctggggcctgggggaggaccccactggagtgagccccagcctgcagtgccgggtgtgtggggacagcagcagcggcaagcactacggcatctatgcctgcaatggctgcagcggcttcttcaagaggtctgtgagaagaagactcatctaccgctgccaggtgggcgccggcatgtgccctgtggacaaggcccacaggaaccagtgccaggcctgccgcctgaagaagtgcctgcaggccggcatgaaccaggatgctgtgcagaatgaaaggcagcccaggagcacagcccaggtgcacctggacagcatggagagcaacacagagagcaggcctgagagcctggtggcccccccagccccagctggccgcagcccccggggccccacccccatgtctgctgcccgggccctgggccaccacttcatggccagcctcatcacagctgagacctgtgccaagctggagccagaagatgctgatgaaaatattgatgtgaccagcaatgaccctgagttccccagcagcccctacagcagcagcagcccctgtggcctggacagcatccacgagaccagcgcccggctgctcttcatggctgtgaagtgggccaagaacctgcctgtgttcagcagcctgcccttccgggaccaggtgatcctgctggaggaggcctggagcgagctgttcctgctgggcgccatccagtggagcctgcccctggacagctgccccctgctggcccctcctgaggccagcgctgctgggggcgcccagggccgcctgaccctggcctccatggagaccagggtgctgcaggagaccatcagccgcttccgggccctggccgtggaccccacagaatttgcctgcatgaaggccctggtgctcttcaagccagagacccggggcctgaaggaccctgagcacgtggaggccctgcaggaccagagccaggtgatgctgagccagcacagcaaggcccaccaccccagccagcctgtgaggtag

SEQ ID NO: 190769 - DNA, 1104 bp, Artificial Sequence
  derived and/or modified sequence
atggagacccggcccaccgccctgatgagcagcaccgtggccgccgccgccccggccgcaggcgccgcttctcgcaaggagtcacctggaagatgggggctcggtgaggatccgaccggcgtttccccaagtttgcagtgtagagtatgcggagactcgagcagtgggaagcactatgggatctacgcctgcaacgggtgctccgggttctttaaacggtcagtgaggcgccgactgatctacagatgccaggtgggcgcgggtatgtgtcctgtggacaaggcccatcgaaaccagtgccaagcgtgtagattgaaaaaatgtttacaggctggtatgaaccaggacgctgtgcagaacgagcgtcagcctcgatccaccgctcaagtgcatctggactctatggagtccaatacggaatccagacctgagtctctggtcgcacctccagctccagccgggcgcagcccgcggggacctacccctatgagtgccgcccgggctttaggccaccactttatggctagcctgattactgcagagacttgcgccaaactggaacctgaagatgcagacgagaacattgacgttacctcaaatgatcccgagtttcccagctccccctattctagttctagcccgtgcggccttgatagcatccacgagacatcggctcggctactgttcatggccgtgaagtgggcaaagaacctacccgtattctcatcactaccctttagggatcaggtgattctacttgaagaggcatggtccgagctgttcctccttggggccatccagtggagcctcccactcgactcatgtcccctgctggccccacccgaggcaagcgccgcgggtggcgcccagggaagactgactctggcgtcaatggagaccagggtattgcaggagacgatcagcaggttccgggcgctggcagtggaccctaccgagtttgcatgtatgaaggccctggtgttgtttaagcctgagacacgagggttaaaggatccggagcatgttgaggcgctgcaagatcagagtcaggttatgttatcccaacattctaaagctcaccacccatcgcagcctgtccggtag

SEQ ID NO: 190770 - DNA, 1104 bp, Artificial Sequence
  derived and/or modified sequence
atggagactcggcctacggcactgatgtcctcaactgtggccgctgctgcaccagctgctggagccgctagtaggaaagaatcgcccggaaggtggggtttgggggaggacccaaccggcgtgagtccatcgctacaatgccgcgtctgcggcgattctagcagcgggaaacattatggcatctatgcctgtaacggctgctccggctttttcaagcgttccgtgaggcgacgccttatttatcggtgccaggttggagcgggtatgtgcccagtggacaaagcccaccgcaaccagtgtcaggcttgcagattaaagaagtgcttgcaagctggcatgaaccaagacgccgttcagaatgagcgccagcctcgcagcactgctcaagttcaccttgattcaatggaatcaaatacagagtctcgaccagagtcactagttgcccctcccgcaccagctggcagaagtccccgtggtcctaccccaatgtctgccgcacgcgctctcggccatcacttcatggctagtctcattaccgcagagacctgtgcaaaactcgagcccgaggacgccgatgagaatattgacgtgacctccaacgacccagagttcccgtcttctccttactcgtcgagtagcccatgtgggctggacagtatacacgagaccagtgctaggctcctctttatggcagtcaagtgggccaaaaacctcccagtctttagttcactgcccttccgagaccaagtaatcctgctggaagaggcttggtcagagctgtttctactgggtgctatccaatggtccctgccgctggactcatgtcccctgctagcgccaccagaagcatcagcagcagggggtgctcagggaagacttaccctggcttccatggagacgcgggtgctgcaggaaactatctcccgatttcgcgctctggcggtggatcccactgagttcgcctgcatgaaggcccttgtcctcttcaagcccgaaactcgtgggctgaaagatccggaacatgtggaggccctgcaggaccagagccaggtgatgcttagccaacattctaaagcccaccacccaagccagcccgtcagatag

SEQ ID NO: 190771 - DNA, 1104 bp, Artificial Sequence
  derived and/or modified sequence
atggagaccagacccaccgccctgatgagcagcaccgtggccgccgccgcccccgccgccggcgccgccagcagaaaggagagccccggcagatggggcctgggcgaggaccccaccggcgtgagccccagcctgcagtgcagagtgtgcggcgacagcagcagcggcaagcactacggcatctacgcctgcaacggctgcagcggcttcttcaagagaagcgtgagaagaagactgatctacagatgccaggtgggcgccggcatgtgccccgtggacaaggcccacagaaaccagtgccaggcctgcagactgaagaagtgcctgcaggccggcatgaaccaggacgccgtgcagaacgagagacagcccagaagcaccgcccaggtgcacctggacagcatggagagcaacaccgagagcagacccgagagcctggtggccccccccgcccccgccggcagaagccccagaggccccacccccatgagcgccgccagagccctgggccaccacttcatggccagcctgatcaccgccgagacctgcgccaagctggagcccgaggacgccgacgagaacatcgacgtgaccagcaacgaccccgagttccccagcagcccctacagcagcagcagcccctgcggcctggacagcatccacgagaccagcgccagactgctgttcatggccgtgaagtgggccaagaacctgcccgtgttcagcagcctgcccttcagagaccaggtgatcctgctggaggaggcctggagcgagctgttcctgctgggcgccatccagtggagcctgcccctggacagctgccccctgctggccccccccgaggccagcgccgccggcggcgcccagggcagactgaccctggccagcatggagaccagagtgctgcaggagaccatcagcagattcagagccctggccgtggaccccaccgagttcgcctgcatgaaggccctggtgctgttcaagcccgagaccagaggcctgaaggaccccgagcacgtggaggccctgcaggaccagagccaggtgatgctgagccagcacagcaaggcccaccaccccagccagcccgtgagatag

SEQ ID NO: 190772 - protein, 20 aa, Artificial Sequence
  derived and/or modified sequence
LFHLSVDNEHRGQGIAKALV

SEQ ID NO: 190773 - protein, 1377 aa, Artificial Sequence
  derived and/or modified sequence
MDEVEQDQHEARLKELFDSFDTTGTGSLGQEELTDLCHMLSLEEVAPVLQQTLLQDNLLGRVHFDQFKEALILILSRTLSNEEHFQEPDCSLEAQPKYVRGGKRYGRRSLPEFQESVEEFPEVTVIEPLDEEARPSHIPAGDCSEHWKTQRSEEYEAEGQLRFWNPDDLNASQSGSSPPQDWIEEKLQEVCEDLGITRDGHLNRKKLVSICEQYGLQNVDGEMLEEVFHNLDPDGTMSVEDFFYGLFKNGKSLTPSASTPYRQLKRHLSMQSFDESGRRTTTSSAMTSTIGFRVFSCLDDGMGHASVERILDTWQEEGIENSQEILKALDFSLDGNINLTELTLALENELLVTKNSIHQAALASFKAEIRHLLERVDQVVREKEKLRSDLDKAEKLKSLMASEVDDHHAAIERRNEYNLRKLDEEYKERIAALKNELRKEREQILQQAGKQRLELEQEIEKAKTEENYIRDRLALSLKENSRLENELLENAEKLAEYENLTNKLQRNLENVLAEKFGDLDPSSAEFFLQEERLTQMRNEYERQCRVLQDQVDELQSELEEYRAQGRVLRLPLKNSPSEEVEANSGGIEPEHGLGSEECNPLNMSIEAELVIEQMKEQHHRDICCLRLELEDKVRHYEKQLDETVVSCKKAQENMKQRHENETHTLEKQISDLKNEIAELQGQAAVLKEAHHEATCRHEEEKKQLQVKLEEEKTHLQEKLRLQHEMELKARLTQAQASFEREREGLQSSAWTEEKVRGLTQELEQFHQEQLTSLVEKHTLEKEELRKELLEKHQRELQEGRYESEKLQQENSILRNEITTLNEEDSISNLKLGTLNGSQEEMWQKTETVKQENAAVQKMVENLKKQISELKIKNQQLDLENTELSQKNSQNQEKLQELNQRLTEMLCQKEKEPGNSALEEREQEKFNLKEELERCKVQSSTLVSSLEAELSEVKIQTHIVQQENHLLKDELEKMKQLHRCPDLSDFQQKISSVLSYNEKLLKEKEALSEELNSCVDKLAKSSLLEHRIATMKQEQKSWEHQSASLKSQLVASQEKVQNLEDTVQNVNLQMSRMKSDLRVTQQEKEALKQEVMSLHKQLQNAGGKSWAPEIATHPSGLHNQQKRLSWDKLDHLMNEEQQLLWQENERLQTMVQNTKAELTHSREKVRQLESNLLPKHQKHLNPSGTMNPTEQEKLSLKRECDQFQKEQSPANRKVSQMNSLEQELETIHLENEGLKKKQVKLDEQLMEMQHLRSTATPSPSPHAWDLQLLQQQACPMVPREQFLQLQRQLLQAERINQHLQEELENRTSETNTPQGNQEQLVTVMEERMIEVEQKLKLVKRLLQEKVNQLKEQVSLPGHLCSPTSHSSFNSSFTSLYCH

SEQ ID NO: 190774 - DNA, 4134 bp, Artificial Sequence
  derived and/or modified sequence
atggacgaggtggagcaggaccagcacgaggccagactgaaggagctgttcgacagcttcgacaccaccggcaccggcagcctgggccaggaggagctgaccgacctgtgccacatgctgagcctggaggaggtggcccccgtgctgcagcagaccctgctgcaggacaacctgctgggcagagtgcacttcgaccagttcaaggaggccctgatcctgatcctgagcagaaccctgagcaacgaggagcacttccaggagcccgactgcagcctggaggcccagcccaagtacgtgagaggcggcaagagatacggcagaagaagcctgcccgagttccaggagagcgtggaggagttccccgaggtgaccgtgatcgagcccctggacgaggaggccagacccagccacatccccgccggcgactgcagcgagcactggaagacccagagaagcgaggagtacgaggccgagggccagctgagattctggaaccccgacgacctgaacgccagccagagcggcagcagccccccccaggactggatcgaggagaagctgcaggaggtgtgcgaggacctgggcatcaccagagacggccacctgaacagaaagaagctggtgagcatctgcgagcagtacggcctgcagaacgtggacggcgagatgctggaggaggtgttccacaacctggaccccgacggcaccatgagcgtggaggacttcttctacggcctgttcaagaacggcaagagcctgacccccagcgccagcaccccctacagacagctgaagagacacctgagcatgcagagcttcgacgagagcggcagaagaaccaccaccagcagcgccatgaccagcaccatcggcttcagagtgttcagctgcctggacgacggcatgggccacgccagcgtggagagaatcctggacacctggcaggaggagggcatcgagaacagccaggagatcctgaaggccctggacttcagcctggacggcaacatcaacctgaccgagctgaccctggccctggagaacgagctgctggtgaccaagaacagcatccaccaggccgccctggccagcttcaaggccgagatcagacacctgctggagagagtggaccaggtggtgagagagaaggagaagctgagaagcgacctggacaaggccgagaagctgaagagcctgatggccagcgaggtggacgaccaccacgccgccatcgagagaagaaacgagtacaacctgagaaagctggacgaggagtacaaggagagaatcgccgccctgaagaacgagctgagaaaggagagagagcagatcctgcagcaggccggcaagcagagactggagctggagcaggagatcgagaaggccaagaccgaggagaactacatcagagacagactggccctgagcctgaaggagaacagcagactggagaacgagctgctggagaacgccgagaagctggccgagtacgagaacctgaccaacaagctgcagagaaacctggagaacgtgctggccgagaagttcggcgacctggaccccagcagcgccgagttcttcctgcaggaggagagactgacccagatgagaaacgagtacgagagacagtgcagagtgctgcaggaccaggtggacgagctgcagagcgagctggaggagtacagagcccagggcagagtgctgagactgcccctgaagaacagccccagcgaggaggtggaggccaacagcggcggcatcgagcccgagcacggcctgggcagcgaggagtgcaaccccctgaacatgagcatcgaggccgagctggtgatcgagcagatgaaggagcagcaccacagagacatctgctgcctgagactggagctggaggacaaggtgagacactacgagaagcagctggacgagaccgtggtgagctgcaagaaggcccaggagaacatgaagcagagacacgagaacgagacccacaccctggagaagcagatcagcgacctgaagaacgagatcgccgagctgcagggccaggccgccgtgctgaaggaggcccaccacgaggccacctgcagacacgaggaggagaagaagcagctgcaggtgaagctggaggaggagaagacccacctgcaggagaagctgagactgcagcacgagatggagctgaaggccagactgacccaggcccaggccagcttcgagagagagagagagggcctgcagagcagcgcctggaccgaggagaaggtgagaggcctgacccaggagctggagcagttccaccaggagcagctgaccagcctggtggagaagcacaccctggagaaggaggagctgagaaaggagctgctggagaagcaccagagagagctgcaggagggcagatacgagagcgagaagctgcagcaggagaacagcatcctgagaaacgagatcaccaccctgaacgaggaggacagcatcagcaacctgaagctgggcaccctgaacggcagccaggaggagatgtggcagaagaccgagaccgtgaagcaggagaacgccgccgtgcagaagatggtggagaacctgaagaagcagatcagcgagctgaagatcaagaaccagcagctggacctggagaacaccgagctgagccagaagaacagccagaaccaggagaagctgcaggagctgaaccagagactgaccgagatgctgtgccagaaggagaaggagcccggcaacagcgccctggaggagagagagcaggagaagttcaacctgaaggaggagctggagagatgcaaggtgcagagcagcaccctggtgagcagcctggaggccgagctgagcgaggtgaagatccagacccacatcgtgcagcaggagaaccacctgctgaaggacgagctggagaagatgaagcagctgcacagatgccccgacctgagcgacttccagcagaagatcagcagcgtgctgagctacaacgagaagctgctgaaggagaaggaggccctgagcgaggagctgaacagctgcgtggacaagctggccaagagcagcctgctggagcacagaatcgccaccatgaagcaggagcagaagagctgggagcaccagagcgccagcctgaagagccagctggtggccagccaggagaaggtgcagaacctggaggacaccgtgcagaacgtgaacctgcagatgagcagaatgaagagcgacctgagagtgacccagcaggagaaggaggccctgaagcaggaggtgatgagcctgcacaagcagctgcagaacgccggcggcaagagctgggcccccgagatcgccacccaccccagcggcctgcacaaccagcagaagagactgagctgggacaagctggaccacctgatgaacgaggagcagcagctgctgtggcaggagaacgagagactgcagaccatggtgcagaacaccaaggccgagctgacccacagcagagagaaggtgagacagctggagagcaacctgctgcccaagcaccagaagcacctgaaccccagcggcaccatgaaccccaccgagcaggagaagctgagcctgaagagagagtgcgaccagttccagaaggagcagagccccgccaacagaaaggtgagccagatgaacagcctggagcaggagctggagaccatccacctggagaacgagggcctgaagaagaagcaggtgaagctggacgagcagctgatggagatgcagcacctgagaagcaccgccacccccagccccagcccccacgcctgggacctgcagctgctgcagcagcaggcctgccccatggtgcccagagagcagttcctgcagctgcagagacagctgctgcaggccgagagaatcaaccagcacctgcaggaggagctggagaacagaaccagcgagaccaacaccccccagggcaaccaggagcagctggtgaccgtgatggaggagagaatgatcgaggtggagcagaagctgaagctggtgaagagactgctgcaggagaaggtgaaccagctgaaggagcaggtgagcctgcccggccacctgtgcagccccaccagccacagcagcttcaacagcagcttcaccagcctgtactgccactag

SEQ ID NO: 190775 - DNA, 4134 bp, Artificial Sequence
  derived and/or modified sequence
atggatgaggtcgaacaggaccagcacgaggcacggcttaaagaactttttgatagctttgatacgaccggcacgggcagtctgggccaagaagagttgacggatctgtgccatatgctctccctggaagaggtggcacctgttctgcagcagacactgctacaggataatcttctgggacgagtgcactttgaccagttcaaggaagcccttattttgattctcagtcgaactttgtccaatgaggagcactttcaggaacccgactgcagcttggaagcccagcccaagtacgtacgaggcggaaagcgttacggccggcgcagcctcccggagtttcaggagtctgtagaggagttccccgaagtcaccgtgatagaacctctggacgaggaggcccggcctagtcatattcctgccggcgactgtagtgaacactggaaaacacagcgcagcgaggaatacgaggcagagggacaactgcggttttggaaccctgacgatttaaacgccagccaatccggctccagccctccccaggattggatcgaagagaagctgcaagaggtgtgtgaggacctcgggattacccgcgacgggcacctcaatcgtaagaagcttgtttctatatgtgaacagtatggactccagaatgtcgatggggaaatgttagaagaggtgtttcataacctggatccggatgggaccatgtcagtagaagattttttctacgggctgttcaaaaatggcaagagcctcacaccaagtgctagcacaccctataggcagctgaagagacatctgtctatgcaaagcttcgatgaatcaggcagaagaaccactaccagctctgccatgacgagtacgatcggcttccgtgtcttttcctgtctcgatgacggtatggggcacgcctcagtagaacgcattttggacacctggcaggaggaaggcatcgagaattcccaggagattctcaaagctctggacttctcgcttgatggaaatataaacttgacggagcttaccttggccctggagaatgagcttctggtgacgaagaacagcatccaccaagccgcattagcctcctttaaagctgaaattcgccatctgctagaacgcgtcgaccaggttgtgcgggagaaggagaagctccgctcagatcttgacaaggccgagaaactcaaaagcctcatggctagcgaggtggacgatcaccacgcagctatagaaaggagaaacgagtataacttgcgcaaactggatgaggaatataaagagcgcatcgccgccttgaaaaatgaactgcggaaagagagggagcaaatccttcagcaggcgggcaaacagcgcctggaattagaacaagagatcgaaaaagccaagacagaggaaaactacatccgcgacagattagcactgagcctgaaggagaacagtcggctggagaatgaattgctggagaatgctgagaagcttgctgaatacgagaacctgacaaacaaactgcaaaggaacctggaaaatgtgctggcagagaagtttggcgacttggacccctcaagtgccgagttcttcctacaggaggagagactaacgcagatgcgaaacgaatacgagcgccagtgtagagtgctgcaagaccaggttgacgagctgcagagtgagctcgaggaatacagggcacagggccgcgttttgcggcttcccttgaagaattccccaagcgaggaggtcgaggcaaacagcggagggatcgagcccgaacatggcctaggctcggaggagtgcaacccgctcaacatgagcattgaggccgaactggttatcgagcagatgaaggagcagcatcaccgtgatatttgttgcctgagacttgagctcgaagacaaggtgagacattacgaaaaacagttggatgaaaccgtggttagctgcaaaaaagctcaggagaacatgaagcagagacatgagaatgaaacacatactctcgagaagcagatatctgacctgaagaacgaaattgcggagctgcagggacaggccgcggtgttgaaggaggctcaccatgaggccacctgtagacatgaggaagagaaaaagcaactgcaggttaaattggaggaggaaaagacccatctccaagaaaaactacgactgcaacacgaaatggagctgaaggcacggctgacgcaggctcaagccagtttcgaacgcgaaagagaaggcttgcagtcctcagcctggacagaggaaaaggttcgagggcttacacaggaattagaacagttccatcaggagcaactgacttctttggtggaaaaacacactttggagaaagaagaactgaggaaagaactgttggaaaaacatcaacgggaactgcaggagggcaggtatgagtcagagaagctccagcaggagaacagcattctcagaaatgaaatcaccacactgaatgaagaggacagtatcagtaacttaaaactggggacgttaaatgggtcccaggaggaaatgtggcagaaaacagaaaccgtgaaacaagagaacgccgccgtgcaaaagatggtcgaaaatctcaagaagcagatctcagaactcaagataaagaaccagcaactggatctggagaatacagaactgtctcagaagaatagtcagaatcaggagaaacttcaagagctgaaccaaaggctcacagaaatgctgtgccagaaggaaaaggagccgggcaactctgcgcttgaagaacgcgaacaggagaaattcaatctaaaagaagaactggaaagatgcaaggtgcagtcaagcacccttgtgtcgagtctggaagctgaactgagcgaggtgaagattcagacccacatcgtacagcaggaaaatcacttgttgaaagatgagctcgaaaagatgaaacagctgcacaggtgccctgacctcagtgattttcagcagaagatcagcagcgtcctatcctacaatgagaaactccttaaggagaaggaggccctgtctgaggagttgaatagctgtgtggataaacttgccaagtccagcttgctcgaacaccgcattgctacaatgaagcaggagcagaaatcatgggagcaccagagtgcctctctgaagtcgcagctggtggccagccaggagaaggttcagaacctcgaggacacagtgcagaatgtcaatctgcaaatgtccagaatgaaaagtgatctgagagttacacaacaggagaaggaggccctaaaacaggaagtcatgagcttgcataagcaactacagaacgccggcgggaaaagctgggctcccgagattgctactcaccctagcggcttgcataaccagcagaagcgactctcctgggataagctggaccatctcatgaacgaggagcagcagctgctgtggcaggagaatgaacgactacagacgatggtgcagaataccaaagccgaactgactcacagcagggaaaaggtgcggcagctggaaagcaatctgctgccgaagcatcagaaacacttgaatccttcaggcacaatgaatcccacagagcaggagaaactatcactgaaaagagaatgtgaccagtttcaaaaagagcagtcccctgccaacaggaaggtatcacagatgaattccctcgaacaagagctggaaaccatacacctggagaacgagggtcttaagaagaagcaagtcaagctggatgagcagctgatggagatgcagcacctgcgatccaccgctacgccctctcccagcccccacgcatgggacttgcagttacttcaacagcaggcttgtccgatggttccaagggaacagtttttgcaactacagagacagctcctgcaggctgagaggataaatcaacatcttcaggaagaattagagaataggacctccgagaccaataccccccaaggcaaccaggaacaactggtgacagtgatggaggagagaatgattgaggttgaacagaaactgaagcttgtcaaaaggctgttacaggagaaggtgaaccaactgaaagagcaggtgagcttgccaggtcacctctgctccccaacatctcatagttcgttcaacagctccttcactagtttgtactgccattag

SEQ ID NO: 190776 - DNA, 4134 bp, Artificial Sequence
  derived and/or modified sequence
atggatgaggtggagcaggaccagcacgaggcccggctgaaggagctgtttgacagctttgacaccactggaacaggcagcctgggccaggaggagctgacagacctgtgccacatgctgagcctggaggaggtggcccctgtgctgcagcagaccctgctgcaggacaacctgctgggccgggtgcactttgaccagttcaaggaggccctgatcctgatcctgagcaggaccctgagcaatgaggagcacttccaggagccagactgcagcctggaggcccagcccaagtatgtgcggggcggcaagagatatggaagaagaagcctgcctgagttccaggagagcgtggaggagttccctgaggtgaccgtcatcgagcccctggatgaggaggcccggcccagccacatcccagctggggactgcagcgagcactggaagacccagaggtctgaggagtatgaagctgagggccagctgcgcttctggaacccagatgacctgaatgccagccagagcggcagcagccccccccaggactggattgaggagaagctgcaggaggtgtgtgaggacctgggcatcaccagagatggccacctgaacaggaagaagctggtgtccatctgtgagcagtatggcctgcagaatgtggatggagagatgctggaggaggtgttccacaacctggaccctgatggcaccatgtctgtggaggacttcttctacggcctcttcaagaatggcaagagcctgacccccagcgccagcaccccctaccggcagctgaagaggcacctgtccatgcagagctttgatgagagcggccgccgcaccaccaccagcagcgccatgaccagcaccatcggcttccgggtcttcagctgcctggatgatggcatgggccacgcctctgtggagcgcatcctggacacctggcaggaggagggcatcgagaacagccaggagatcctgaaggccctggacttcagcctggatggcaacatcaacctgacagagctgaccctggccctggagaatgagctgctggtgaccaagaacagcatccaccaggccgccctggccagcttcaaggccgagatccgccacctgctggagcgggtggaccaggtggtgcgggagaaggagaagctgcggagtgacctggacaaggccgagaagctgaagagcctgatggccagcgaggtggatgaccaccacgccgccattgaaagaagaaatgagtacaacctgaggaagctggatgaggagtacaaggagagaattgctgccctgaagaatgagctgaggaaggagcgggagcagatcctgcagcaggccggcaagcagaggctggagctggagcaggagattgagaaggccaagacagaggagaactacatccgggaccggctggccctgagcctgaaggagaacagccggctggagaatgagctgctggagaatgctgagaagctggccgagtatgagaacctgaccaacaagctgcagaggaacctggagaatgtgctggccgagaagtttggagacctggaccccagcagcgctgagttcttcctgcaggaggagcggctgacccagatgagaaatgaatatgaaaggcagtgccgggtgctgcaggaccaggtggatgagctgcagagcgagctggaggagtaccgggcccagggccgggtgctgcggctgcccctgaagaacagccccagcgaggaggtggaggccaacagcggcggcatcgagcctgagcacggcctgggcagcgaggagtgcaaccccctgaacatgagcattgaagctgagctggtgattgagcagatgaaggagcagcaccaccgggacatctgctgcctgcggctggagctggaggacaaggtgcgccactatgagaagcagctggatgaaacagtggtgtcctgcaagaaggcccaggagaacatgaagcagagacatgaaaatgagacccacaccctggagaagcagatcagtgacctgaagaatgaaattgctgagctgcagggccaggccgctgtgctgaaggaggcccaccacgaggccacctgcagacatgaggaggagaagaagcagctgcaggtgaagctggaggaggagaagacccacctgcaggagaagctgcggctgcagcacgagatggagctgaaggcccggctgacccaggcccaggccagctttgagcgggagcgggagggcctgcagagcagcgcctggacagaggagaaggtgcggggcctgacccaggagctggagcagttccaccaggagcagctgaccagcctggtggagaagcacaccctggagaaggaggagctgaggaaggagctgctggagaagcaccagcgggagctgcaggagggccgctatgaaagtgagaagctgcagcaggagaacagcatcctgagaaatgagatcaccaccctgaatgaagaagattccatcagcaacctgaagctgggcaccctgaatggcagccaggaggagatgtggcagaagacagaaacagtgaagcaggagaatgctgctgtgcagaagatggtggagaacctgaagaagcagatcagcgagctgaagatcaagaaccagcagctggacctggagaacacagagctgagccagaagaacagccagaaccaggagaagctgcaggagctgaaccagaggctgacagagatgctgtgccagaaggagaaggagcccggcaacagcgccctggaggagcgggagcaggagaagttcaacctgaaggaggagctggagcgctgcaaggtgcagagcagcaccctggtgagcagcctggaggccgagctgtctgaggtgaagatccagacccacatcgtgcagcaggagaaccacctgctgaaggatgagctggagaagatgaagcagctgcaccgctgcccagacctgagtgacttccagcagaagatcagctctgtgctgagctacaatgagaagctgctgaaggagaaggaggccctgtctgaggagctgaacagctgtgtggacaagctggccaagagcagcctgctggagcacagaattgccaccatgaagcaggagcagaagtcctgggagcaccagagcgccagcctgaagagccagctggtggccagccaggagaaggtgcagaacctggaggacacagtgcagaatgtgaacctgcagatgagcaggatgaagagtgacctgcgggtgacccagcaggagaaggaggccctgaagcaggaggtgatgagcctgcacaagcagctgcagaatgctgggggcaagtcctgggcccctgagatcgccacccaccccagcggcctgcacaaccagcagaagaggctgtcctgggacaagctggaccacctgatgaatgaggagcagcagctgctgtggcaggagaatgaaaggctgcagaccatggtgcagaacaccaaggccgagctgacccacagccgggagaaggtgcggcagctggagagcaacctgctgcccaagcaccagaagcacctgaaccccagcggcaccatgaaccccacagagcaggagaagctgagcctgaagcgggagtgtgaccagttccagaaggagcagagccctgccaacaggaaggtgtcccagatgaacagcctggagcaggagctggagaccatccacctggagaatgaaggcctgaagaagaagcaggtgaagctggatgagcagctgatggagatgcagcacctgcggagcacagccacccccagccccagcccccacgcctgggacctgcagctgctgcagcagcaggcctgccccatggtgccccgggagcagttcctgcagctgcagaggcagctgctgcaggccgagcgcatcaaccagcacctgcaggaggagctggagaacagaacatctgagaccaacaccccccagggcaaccaggagcagctggtgacagtgatggaggagaggatgattgaggtggagcagaagctgaagctggtgaagaggctgctgcaggagaaggtgaaccagctgaaggagcaggtgtccctgcccggccacctgtgcagccccaccagccacagcagcttcaacagcagcttcaccagcctgtactgccactag

SEQ ID NO: 190777 - DNA, 4216 bp, Artificial Sequence
  derived and/or modified sequence
gagagaccgacagaaggtgagcactgtgggctatgggatggatgaggtggagcaggaccagcatgaggcccgactcaaggagctgtttgacagttttgacacgacgggcacagggtccctggggcaggaggaactcaccgacctttgccacatgttgagcttggaggaggtggccccagtgctgcagcagacattacttcaggacaacctcttgggcagggtacattttgaccaatttaaagaagcattaatactcatcttgtccagaactctgtcaaatgaagaacactttcaagaaccagactgctcactagaagctcagcccaaatatgttagaggtgggaagcgttacggacgaaggtccttgcccgagttccaagagtccgtggaggagtttcctgaagtgacggtgattgagccactggatgaagaagcgcggccttcacacatcccagccggtgactgcagtgagcactggaagacgcaacgcagtgaggagtatgaagcggaaggccagttaaggttttggaacccagatgacttgaatgcttcacagagtggatcttcccctccccaagactggatagaagagaaactgcaagaagtttgtgaagatttggggatcacccgtgatggtcacctgaaccggaagaagctggtctccatctgtgagcagtatggtttacagaatgtggatggagagatgctcgaggaagtattccataatcttgatcctgacggtacaatgagtgtagaagattttttctatggtttgtttaaaaatggaaaatctcttacaccatcagcatctactccatatagacaactaaaaaggcacctttccatgcagtctttcgatgagagtggacgacgtaccacaacctcatcagcaatgacaagtaccattggctttcgggtcttctcctgcctggatgatgggatgggccatgcatctgtggagagaatactggacacctggcaggaagagggcattgagaacagccaggagatcctgaaggccttggatttcagcctcgatggaaacatcaatttgacagaattaacactggcccttgaaaatgaacttttggttaccaagaacagcattcaccaggcggctctggccagctttaaggctgaaatccggcatttgttggaacgagttgatcaggtggtcagagaaaaagagaagctacggtcagatctggacaaggccgagaagctcaagtctttaatggcctcggaggtggatgatcaccatgcggccatagagcggcggaatgagtacaacctcaggaaactggatgaagagtacaaggagcgaatagcagccttaaaaaatgaactccgaaaagagagagagcagatcctgcagcaggcaggcaagcagcgtttagaacttgaacaggaaattgaaaaggcaaaaacagaagagaactatatccgggaccgccttgccctctctttaaaggaaaacagtcgtctggaaaatgagcttctagaaaatgcagagaagttggcagaatatgagaatctgacaaacaaacttcagagaaatttggaaaatgtgttagcagaaaagtttggtgacctcgatcctagcagtgctgagttcttcctgcaagaagagagactgacacagatgagaaatgaatatgagcggcagtgcagggtactacaagaccaagtagatgaactccagtctgagctggaagaatatcgtgcacaaggcagagtgctcaggcttccgttgaagaactcaccgtcagaagaagttgaggctaacagcggtggcattgagcccgaacacgggctcggttctgaagaatgcaatccattgaatatgagcattgaggcagagctggtcattgaacagatgaaagaacaacatcacagggacatatgttgcctcagactggagctcgaagataaagtgcgccattatgaaaagcagctggacgaaaccgtggtcagctgcaagaaggcacaggagaacatgaagcaaaggcatgagaacgaaacgcacaccttagaaaaacaaataagtgaccttaaaaatgaaattgctgaacttcaggggcaagcagcagtgctcaaggaggcacatcatgaggccacttgcaggcatgaggaggagaaaaaacaactgcaagtgaagcttgaggaggaaaagactcacctgcaggagaagctgaggctgcaacatgagatggagctcaaggctagactgacacaggctcaagcaagctttgagcgggagagggaaggccttcagagtagcgcctggacagaagagaaggtgagaggcttgactcaggaactagagcagtttcaccaggagcagctgacaagcctggtggagaaacacactcttgagaaagaggagttaagaaaagagctcttggaaaagcaccaaagggagcttcaggagggaagatatgaatctgaaaagcttcaacaggaaaattctattttgagaaatgaaattactactttaaatgaagaagatagcatttctaacctgaaattagggacattaaatggatctcaggaagaaatgtggcaaaaaacggaaactgtaaaacaagaaaatgctgcagttcagaagatggttgaaaatttaaagaaacagatttcagaattaaaaatcaaaaaccaacaattggatttggaaaatacagaacttagccaaaagaactctcaaaaccaggaaaaactgcaagaacttaatcaacgtctaacagaaatgctatgccagaaggaaaaagagccaggaaacagtgcattggaggaacgggaacaagagaagtttaatctgaaagaagaactggaacgttgtaaagtgcagtcctccactttagtgtcttctctggaggcggagctctctgaagttaaaatacagacccatattgtgcaacaggaaaaccaccttctcaaagatgaactggagaaaatgaaacagctgcacagatgtcccgatctctctgacttccagcaaaaaatctctagtgttctaagctacaacgaaaaactgctgaaagaaaaggaagctctgagtgaggaattaaatagctgtgtcgataagttggcaaaatcaagtcttttagagcatagaattgcgacgatgaagcaggaacagaaatcctgggaacatcagagtgcgagcttaaagtcacagctggtggcttctcaggaaaaggttcagaatttagaagacaccgtgcagaatgtaaacctgcaaatgtcccggatgaaatctgacctacgagtgactcagcaggaaaaggaggctttaaaacaagaagtgatgtctttacataagcaacttcagaatgctggtggcaagagctgggccccagagatagctactcatccatcagggctccataaccagcagaaaaggctgtcctgggacaagttggatcatctgatgaatgaggaacagcagctgctttggcaagagaatgagaggctccagaccatggtacagaacaccaaagccgaactcacgcactcccgggagaaggtccgtcagttggaatccaatcttcttcccaagcaccaaaaacatctaaacccatcaggtaccatgaatcccacagagcaagaaaaattgagcttaaagagagagtgtgatcagtttcagaaagaacaatctcctgctaacaggaaggtcagtcagatgaattcccttgaacaagaattagaaacaattcatttggaaaatgaaggcctgaaaaagaaacaagtaaaactggatgagcagctcatggagatgcagcacctgaggtccactgcgacgcctagcccgtcccctcatgcttgggatttgcagctgctccagcagcaagcctgtccgatggtgcccagggagcagtttctgcagcttcaacgccagctgctgcaggcagaaaggataaaccagcacctgcaggaggaacttgaaaacaggacctccgaaaccaacacaccacagggaaaccaggaacaactggtaactgtcatggaggaacgaatgatagaagttgaacagaaactgaaactagtgaaaaggcttcttcaagagaaagtgaatcagctcaaagaacaagtgagcctacccggtcatctctgttcacccacctcacattccagctttaactccagttttacatccctttattgccattaactcgttaacttatgttgtctaataaaggcaaattctattataaat

SEQ ID NO: 190778 - DNA, 4134 bp, Artificial Sequence
  derived and/or modified sequence
atggacgaggtggagcaggaccagcacgaggcccggctgaaggagttgttcgatagttttgataccacaggaacgggcagtttagggcaggaagaactgactgatctctgtcatatgctgagtctagaggaagttgcgcccgtgttacagcagactctgcttcaggataacttgttgggccgcgttcacttcgaccaatttaaagaggcgttgattctgatcctgagtcgtacactgtcaaacgaggaacacttccaggagcccgactgttcactggaggcacagcccaaatatgtgaggggcgggaaaaggtatggaaggcgaagtctgccagaatttcaggaaagcgtagaggaatttcctgaggtgaccgtgattgaacctctggacgaggaggcccggcccagtcacatccccgccggcgactgttccgagcactggaaaactcaaaggtcggaggagtacgaggccgaggggcagctgcgcttctggaatccagatgatctgaatgctagccagagcggctcctccccacctcaggattggatagaagagaagttacaggaggtctgcgaagacttggggatcacacgcgatggccatttaaacagaaaaaaactggtgtctatttgtgagcagtacggtctgcagaatgtcgatggtgagatgctcgaggaggtgtttcacaatttagatcctgacggcaccatgtcagttgaggatttcttttacggactctttaagaacggtaagtcactcaccccgtcagcgtccacaccataccgacaactcaagagacatctttcaatgcagtcattcgacgagtcgggtcgacggacgacaacctcctcagccatgacctccaccattggatttagggtgtttagttgcctagatgatggcatgggccacgcctccgttgagcgcattctggatacatggcaggaggagggcatagaaaattctcaggagatattgaaagctctggacttttccttagacgggaacatcaatcttactgaactcacattggctctggagaacgagctgctcgtgaccaagaactccattcaccaagctgcgctcgccagcttcaaggctgaaatcaggcatctgctggaaagagtggaccaggttgttcgagaaaaggagaagcttaggtcggacctggataaagccgaaaaactgaaaagtctgatggcttctgaagtggatgatcatcacgccgccatcgagaggcgtaacgaatacaacctgcgaaagctcgacgaggagtacaaggaaaggatcgccgcattgaagaatgagctccggaaggagagggagcagatacttcaacaagccggcaagcagcgcctcgagctggagcaggaaatcgagaaggccaagacggaggaaaactacatacgcgataggctggctctgtcactgaaggagaactccaggctggaaaatgagctgcttgagaatgccgagaagctcgcagagtacgagaaccttaccaataagctccagcggaatctggaaaatgtgttagccgaaaagtttggggatcttgatccatcctcagcagagtttttcctccaagaggaacggctgacacagatgaggaacgaatacgagcgccagtgcagagtcctgcaggaccaggtcgatgagcttcaaagcgagttggaagagtaccgtgctcaaggcagggtgctccgattgccactaaagaacagcccatctgaagaagttgaggctaactctgggggcatcgagccagaacacggtttaggctccgaagaatgtaatcctctgaacatgagcattgaggccgagcttgtcatagaacagatgaaggaacaacatcaccgcgacatctgttgcttaaggttagaactggaggataaagtgcgccattatgagaagcaactagatgaaactgttgtctcttgtaaaaaagctcaagaaaatatgaaacagagacacgagaacgagacacacacactggagaagcaaataagcgatctgaagaatgaaatcgctgagctgcaaggtcaggcagccgtgcttaaggaggcccatcacgaggcgacatgccgccatgaggaggagaagaagcagctgcaggttaagctggaagaagagaaaacacacctgcaggagaagctgaggctgcaacatgaaatggagctgaaggccaggttgacccaggcccaagcatcttttgagcgagaaagagaagggctccagtcaagcgcgtggaccgaagagaaggtgcgcggcctgacccaggagctggagcaattccatcaggaacagctgactagtcttgtcgagaagcataccctggagaaggaggaattacgcaaggagctcctagaaaagcaccagcgagaattgcaggagggacggtacgagtccgagaagcttcagcaagaaaactctattcttcggaatgagatcacgactttaaatgaggaagattccatttctaacctgaagctcggcaccctgaacgggtctcaggaggagatgtggcagaagactgaaaccgtcaaacaggagaatgcggcggttcagaagatggtggagaatctcaaaaaacagatatctgagctgaagattaagaaccaacagctcgaccttgaaaacacagaattgagtcagaaaaactcgcagaatcaagagaagctgcaggagcttaatcaacgccttacagaaatgctgtgccagaaggagaaagagcccgggaacagcgccctggaggaaagggagcaggagaaattcaatctgaaagaggagctggagaggtgcaaagtgcagtcatcaacactggtgtcttcactcgaagccgaactgtcagaggtgaagatccagacccacatcgttcagcaggagaaccacctcctgaaggatgagcttgagaagatgaaacagctccaccgttgccctgatctttctgattttcagcagaagatatccagcgtcctgtcatacaacgagaaattgctgaaagagaaagaagcactgtcagaagaactcaattcttgtgtggacaagctggcaaagtcctcactgctggagcatcgcatcgcaactatgaagcaggaacagaaaagttgggaacaccaaagcgcgagtctcaaatctcaactggttgcatctcaggagaaagtccagaacttggaggatactgtgcagaatgttaaccttcagatgagtaggatgaagtcagacctgcgggtaacccaacaggaaaaagaagcactgaagcaggaggtcatgtctttacataagcaactccagaatgcaggtgggaagtcatgggcccctgaaatcgctacccaccctagtgggctgcacaaccagcagaagcgccttagctgggataaactcgatcatctgatgaatgaagagcagcagctgctgtggcaagagaacgagcgattgcagacaatggtacagaataccaaggccgaactcacccattcccgcgaaaaggttcgccagcttgagagcaacctgctgcccaagcaccagaaacacctgaaccctagcggaaccatgaaccctaccgaacaggagaagttgtctcttaaaagggaatgtgatcagttccagaaggagcagtccccggccaatcggaaagtgtcccagatgaacagtctcgagcaggagttagagactatccacttggagaatgagggtttgaagaagaaacaggtgaaacttgacgaacagctcatggagatgcagcacctgcgttccacagctactcccagcccctctccccacgcctgggacctccagttacttcagcagcaagcctgccccatggtgcccagggaacagtttttacagttgcagcgccaactgctgcaagccgagaggatcaaccaacatctccaggaagaactcgaaaatcgcacatccgaaactaacacgcctcaggggaatcaggaacagctcgtcaccgtcatggaggagcggatgatcgaagtcgagcagaaactcaaattggttaaacggctgctgcaggagaaagtgaaccagctgaaagaacaggtgtccctgccggggcacttgtgttcccctaccagccactcctcgttcaattccagcttcacttcactttactgtcactag

SEQ ID NO: 190779 - DNA, 4134 bp, Artificial Sequence
  derived and/or modified sequence
atggatgaggtggagcaagaccagcacgaagccaggctgaaagagctgttcgactcatttgatacaacaggcaccgggagcctcggccaggaagagttaacagatctgtgtcatatgttatctcttgaggaggtggccccagtgctacaacagaccctcctccaggacaatctgctggggagggtgcacttcgaccagttcaaggaggctttgatcctcattcttagccgtacactttccaacgaggaacatttccaggagccagattgttctctagaagcccagcccaagtacgtgagaggcggaaagaggtatggacgtcgcagcctgccggagttccaggagtcagtggaagagttcccagaagtgaccgtcatagagccacttgacgaggaagctaggccatcccacattcccgctggagattgctctgaacattggaaaacacagaggtctgaggagtatgaagctgagggacagttgcgtttctggaacccagacgacctgaacgcctcacagtctgggagctcaccacctcaggactggatagaggaaaaactccaagaagtctgtgaagaccttggaataactcgagatggccaccttaaccggaagaaactggtgtccatatgcgaacagtacggacttcagaatgtcgacggtgagatgttggaggaagttttccacaacctggatccagacggtaccatgtcagtcgaagactttttctacgggctcttcaaaaacgggaaatccctgaccccaagtgcgagcaccccctaccggcaacttaaacggcatctgagcatgcagagctttgatgaatccggccgaagaactactactagttcagcaatgacctcgacaattggtttcagagtgttttcatgcctcgacgacggtatgggccatgcttcggttgagcggatccttgacacatggcaggaagagggaattgagaatagccaggagatactgaaagctctggacttttccttggatggcaatattaatctgacagagctcactctcgctctggagaatgagctgctggtgacaaagaattccattcaccaggccgcacttgcaagttttaaagctgagataagacatctcctggagagagtggatcaagtggtgcgcgagaaggaaaagctcagaagcgatttggataaggcggaaaagcttaagtcactgatggcatccgaagttgacgatcaccacgcggctattgagcgcagaaacgaatacaatctaaggaaactggatgaggagtataaagaacgaatagcagcattgaaaaacgaactgcgaaaggaacgagagcaaattctgcagcaggctggcaagcagcgcttggaactcgaacaggagatcgagaaagccaaaactgaggagaattatatccgggaccgcctagcgctttctctcaaggaaaacagccgcctggaaaacgaattactggaaaatgctgaaaagcttgccgagtacgagaatttgacaaataaactccagcgtaatctggaaaatgtcctggctgaaaagtttggggacctggacccgtcttccgctgaatttttcctgcaggaggaacggttaacccagatgagaaatgagtatgagaggcagtgccgggttttgcaggatcaggtggatgagcttcagtccgagctcgaggaatatagagctcaggggcgagtgttaaggctcccgctgaaaaactctccaagtgaagaggttgaagcgaatagcggcggaatcgaaccagaacacggtcttggctctgaggaatgtaatcccctgaacatgagtatcgaagctgaattagtcatagagcaaatgaaggaacagcatcacagagacatctgttgtcttcgactcgagcttgaagacaaagtcagacactacgagaagcagcttgacgagacggtcgtgagctgtaagaaagctcaggaaaatatgaagcaacgccatgaaaacgagacacataccctcgagaagcagatctctgatctcaagaatgagatcgccgagctgcagggccaggctgctgtcctgaaagaagcccatcatgaggcgacatgtaggcatgaggaggaaaaaaaacaactgcaggtcaagctagaagaggaaaagacccacctacaagaaaagctgcgccttcaacatgagatggaactaaaagcacgcctcactcaggcccaggcaagctttgaacgggaacgcgagggcctccagagcagtgcctggacagaggagaaggtacgcggactgacccaagagctggaacagtttcaccaggagcaattgacgtccctggttgagaagcacacgttggagaaagaggagttgcgcaaagagctcctggagaaacaccagcgcgagctgcaggaaggcagatatgaaagcgagaagcttcagcaggagaacagtatcttgcggaacgagatcacgacccttaacgaggaggactctattagcaacctgaagttgggcaccctcaacggaagccaggaagaaatgtggcagaaaactgaaacagttaagcaggaaaacgccgctgtgcagaagatggtcgagaacctcaaaaagcaaatctcggaattaaaaatcaagaatcagcaactcgacctcgaaaatacagagctgagtcagaagaacagtcaaaaccaggaaaagttgcaagagctgaatcaacgactcactgagatgctgtgccaaaaagagaaagagcctggcaatagtgccctcgaggagagagaacaagaaaagtttaacctaaaggaagaactggagcgctgcaaggtccagtccagcacattggtgagctccctagaggcggaactcagcgaggtcaagattcagactcacattgtccagcaggaaaatcatctgttgaaggacgagctggaaaaaatgaaacaactccaccgatgtcctgatctctcagatttccagcagaaaatcagctctgtgctgtcatacaacgagaagctgctcaaagagaaggaggcattgagtgaagaactgaactcatgcgttgacaaattggccaaaagctctctgctcgaacaccggatcgccacaatgaagcaagaacagaagtcttgggaacatcagtcagcttcgttgaagtctcagctggtggccagtcaagagaaagtgcagaaccttgaggacactgtgcaaaatgtgaatctacagatgtctaggatgaaatctgatctaagagtgacccaacaggaaaaggaggcacttaaacaggaagtgatgagtctgcacaaacagctgcagaacgccggtggtaaaagctgggctcccgagattgcgacacatcctagcggacttcataatcagcagaagagactgagctgggacaaactcgaccatctaatgaacgaggagcagcaactcctgtggcaggaaaatgagagactccaaacaatggtgcagaacaccaaagcagaactcacccattcccgggagaaagttcgccagctggaaagcaacttactgcctaaacatcagaaacacctcaacccttctggtacaatgaacccgaccgaacaagagaagttgagcctcaaaagggaatgtgaccagttccagaaagagcagagccctgcaaaccggaaagtatcccagatgaattctctagaacaggaattagaaactattcatctggagaacgagggcctgaaaaagaaacaggtgaagctggacgaacaactgatggagatgcaacacctgagatctaccgccaccccatcaccatctcctcacgcgtgggacctccaactgcttcagcagcaggcttgtcccatggtccctagggaacagttcctgcagctgcaaaggcagctcctgcaggccgagcggatcaatcaacatcttcaagaagagcttgagaacaggacctcagaaaccaacacccctcagggcaatcaggaacaactcgtgacggttatggaggagaggatgatagaggtggaacaaaaacttaaactcgtcaaaagactgttgcaggagaaagtgaatcaactgaaggaacaggtttctctgcccggacacctgtgttcaccgacaagccactcctcgttcaattcctcttttacaagtttatattgtcattag

SEQ ID NO: 190780 - protein, 870 aa, Artificial Sequence
  derived and/or modified sequence
MQAAVAVSVPFLLLCVLGTCPPARCGQAGDASLMELEKRKENRFVERQSIVPLRLIYRSGGEDESRHDALDTRVRGDLGGPQLTHVDQASFQVDAFGTSFILDVVLNHDLLSSEYIERHIEHGGKTVEVKGGEHCYYQGHIRGNPDSFVALSTCHGLHGMFYDGNHTYLIEPEENDTTQEDFHFHSVYKSRLFEFSLDDLPSEFQQVNITPSKFILKPRPKRSKRQLRRYPRNVEEETKYIELMIVNDHLMFKKHRLSVVHTNTYAKSVVNMADLIYKDQLKTRIVLVAMETWATDNKFAISENPLITLREFMKYRRDFIKEKSDAVHLFSGSQFESSRSGAAYIGGICSLLKGGGVNEFGKTDLMAVTLAQSLAHNIGIISDKRKLASGECKCEDTWSGCIMGDTGYYLPKKFTQCNIEEYHDFLNSGGGACLFNKPSKLLDPPECGNGFIETGEECDCGTPAECVLEGAECCKKCTLTQDSQCSDGLCCKKCKFQPMGTVCREAVNDCDIRETCSGNSSQCAPNIHKMDGYSCDGVQGICFGGRCKTRDRQCKYIWGQKVTASDKYCYEKLNIEGTEKGNCGKDKDTWIQCNKRDVLCGYLLCTNIGNIPRLGELDGEITSTLVVQQGRTLNCSGGHVKLEEDVDLGYVEDGTPCGPQMMCLEHRCLPVASFNFSTCLSSKEGTICSGNGVCSNELKCVCNRHWIGSDCNTYFPHNDDAKTGITLSGNGVAGTNIIIGIIAGTILVLALILGITAWGYKNYREQRSNGLSHSWSERIPDTKHISDICENGRPRSNSWQGNLGGNKKKIRGKRFRPRSNSTETLSPAKSPSSSTGSIASSRKYPYPMPPLPDEDKKVNRQSARLWETSI

SEQ ID NO: 190781 - DNA, 2613 bp, Artificial Sequence
  derived and/or modified sequence
atgcaggcggccgttgcggtgagtgtcccgtttctgctgttgtgtgtcctgggtacgtgcccccccgccaggtgtgggcaagctggtgacgccagccttatggagttagagaagaggaaggaaaataggtttgtcgagagacagagcattgttccactgcgccttatttatcggagcggaggagaggatgaatcaagacacgacgctctggatacccgggtcaggggagacctcggagggccccagctgacccacgtggaccaagcatccttccaggttgacgcattcgggaccagtttcattttagatgtggtattaaatcatgatctcctgtcatctgaatacattgagaggcatatagaacatggcggtaagaccgttgaagtcaagggcggcgaacattgctactaccagggccatattcgagggaaccccgattcctttgtggccctctctacatgtcacgggcttcatggaatgttttatgatgggaatcacacatacttgatcgagccagaggagaatgacaccacacaggaggattttcatttccattccgtatataagtctagactcttcgagttcagccttgatgacctcccaagtgagttccagcaagtcaatatcaccccaagtaagttcatcttgaagccacgcccaaagaggagtaagcgtcagctgcgtagatacccccgcaacgttgaggaagagactaaatacatcgagctgatgattgttaacgaccatctcatgttcaagaagcaccgactctctgtagtgcacacaaatacttatgctaagagcgtggttaatatggctgatctgatctacaaagaccaacttaaaacaagaattgtgctggtcgctatggagacttgggccacggacaacaaatttgcaatttccgagaacccactaattacccttagggagtttatgaagtaccgccgggacttcattaaagagaagtccgatgcagtgcatttgttctccggttctcaattcgaatcatcacgatcaggcgctgcctatatcggaggtatctgttcgctgctgaaaggcggaggagttaacgagttcggcaaaacggatctcatggcggtgactctggcccaatccttagcccacaatattggaattatcagcgacaaaagaaaactggcatctggggaatgcaagtgcgaggatacctggagcggctgtatcatgggcgatacaggatactatctccccaaaaagttcacgcaatgcaacatcgaggaataccacgactttctaaacagcggtggaggagcttgcctgtttaacaagccctcaaaactgttggacccacccgagtgcggcaatggctttatcgaaacgggggaagagtgtgactgcgggaccccagccgagtgtgttctggagggcgctgaatgctgcaaaaaatgcacccttacccaagattcccaatgtagtgacggcctgtgttgcaaaaaatgtaaatttcagcccatggggacagtgtgtagagaagcagtaaatgattgcgatattcgggagacctgcagtgggaattcttcccaatgcgcaccaaatattcataaaatggatggctattcctgcgacggcgtgcagggaatctgtttcggtggccgatgcaagacgagagatcggcagtgcaaatacatatggggccagaaggttactgcctccgataagtactgttatgagaagcttaacattgagggcaccgagaaaggaaattgcggaaaggacaaggatacgtggattcagtgcaacaaaagagacgttctctgtgggtatttgctgtgtaccaatattgggaatatcccacgcctcggggagctggatggagaaatcacaagtactcttgtcgtgcagcagggtcgcaccctgaactgtagtgggggtcatgtcaagctggaggaggacgttgacctgggctacgttgaggatggtactccctgtggtccccagatgatgtgtctggagcacaggtgccttcccgtggcaagttttaacttcagcacttgtctgagctcgaaggagggcaccatctgctcggggaacggcgtatgtagcaacgaactcaagtgcgtatgtaatagacactggataggttctgactgtaatacatatttcccccataatgatgacgcgaagactgggatcacgcttagcgggaacggcgtggctgggactaatatcatcatcggcatcattgccgggacaattctcgtgctggccctcatcctggggatcactgcatggggctacaagaactaccgagagcaacggagcaatggtctgtcccacagctggtccgagcgaatccccgacaccaagcacatctctgatatctgtgagaatgggcggcctcggtccaactcgtggcagggcaaccttggggggaacaagaaaaaaatcaggggaaaaaggtttagacccaggtctaactcaaccgagaccctgtcacccgccaagtctccaagctctagtaccggatccatcgcctcttctagaaagtacccttaccccatgccaccattgcccgacgaggacaagaaagtgaacagacagagtgctcgcctgtgggagaccagcatttag

SEQ ID NO: 190782 - DNA, 2613 bp, Artificial Sequence
  derived and/or modified sequence
atgcaggccgctgtggccgtgtctgtgcccttcctgctgctgtgtgtgctgggcacctgccccccagcccgctgtggccaggccggagatgccagcctgatggagctggagaagaggaaagaaaatagatttgtggagcggcagagcatcgtgcccctgcggctcatctacagaagtggaggagaagatgagagcagacatgatgccctggacaccagggtgcggggggacctgggcggcccccagctgacccacgtggaccaggccagcttccaggtggatgccttcggcaccagcttcatcctggatgtggtgctgaaccacgacctgctgagcagcgagtacatcgagcggcacatcgagcacggcggcaagacagtggaggtgaagggcggggagcactgctactaccagggccacatccggggcaacccagacagctttgtggccctgagcacctgccacggcctgcacggcatgttttatgatggcaaccacacctacctgattgagcctgaggagaatgacaccacccaggaggacttccacttccacagcgtgtacaagagccggctgtttgagttcagcctggatgacctgcccagcgagttccagcaggtgaacatcacccccagcaagttcatcctgaagccccggcccaagaggagcaagaggcagctgcggcgctaccccagaaatgtggaggaggagaccaagtacatcgagctgatgattgtgaatgaccacctgatgttcaagaagcaccggctgtctgtggtgcacaccaacacctacgccaagtctgtggtgaacatggctgacctgatctacaaggaccagctgaagaccagaattgtgctggtggccatggagacctgggccacagacaacaagtttgccatcagcgagaaccccctcatcaccctgcgggagttcatgaagtaccgccgggacttcatcaaggagaagagtgatgctgtgcacctgttcagcggcagccagtttgagagcagccgcagcggggccgcctacatcggcggcatctgcagcctgctgaagggcggcggcgtgaatgaatttgggaagacagacctgatggctgtgaccctggcccagagcctggcccacaacatcggcatcatcagtgacaagaggaagctggccagcggagaatgtaaatgtgaggacacctggagcggctgcatcatgggagacaccggctactacctgcccaagaagttcacccagtgcaacatcgaggagtaccatgacttcctgaacagcggcggcggggcctgcctcttcaacaagcccagcaagctgctggaccccccagaatgtggaaatggcttcatcgagaccggggaggagtgtgactgtggcaccccagcagaatgtgtgctggagggcgctgagtgctgcaagaagtgcaccctgacccaggacagccagtgcagtgatggcctgtgctgcaagaagtgcaagttccagcccatgggcaccgtgtgccgggaggccgtgaatgactgtgacatccgggagacctgcagcggcaacagcagccagtgtgcccccaacatccacaagatggatggctacagctgtgatggagtgcagggcatctgctttggaggccgctgcaagacccgggaccggcagtgcaagtacatctggggccagaaggtgacagccagtgacaagtactgctatgagaagctgaacatcgagggcacagagaagggcaactgtgggaaggacaaggacacctggatccagtgcaacaagagagatgtgctgtgtggctacctgctgtgcaccaacatcggcaacatcccccggctgggggagctggatggagagatcaccagcaccctggtggtgcagcagggccgcaccctgaactgcagcggcggccacgtgaagctggaggaggatgtggacctgggctacgtggaggatggcaccccctgtggcccccagatgatgtgcctggagcaccgctgcctgcctgtggccagcttcaacttcagcacctgcctgagcagcaaggagggcaccatctgcagcggaaatggagtgtgcagcaatgagctgaagtgtgtgtgcaacagacactggattggaagtgactgcaacacctacttcccccacaatgatgatgccaagacaggcatcaccctgtctggaaatggagtggccggcaccaacatcatcatcggcatcatcgccggcaccatcctggtgctggccctgatcctgggcatcacagcctggggctacaagaactaccgggagcagaggagcaatggcctgagccacagctggagcgagcgcatcccagacaccaagcacatcagtgacatctgtgaaaatggccggcccaggagcaacagctggcagggcaacctgggcggcaacaagaagaagatccggggcaagcgcttccggcccaggagcaacagcacagagaccctgagccctgccaagagccccagcagcagcacaggcagcatcgccagcagcaggaagtacccctaccccatgccacccctgcctgatgaggacaagaaggtgaaccggcagagcgcccggctgtgggagaccagcatctag

SEQ ID NO: 190783 - DNA, 2613 bp, Artificial Sequence
  derived and/or modified sequence
atgcaggccgccgtggccgtgagcgtgcccttcctgctgctgtgcgtgctgggcacgtgccctccagctaggtgtgggcaggcaggggatgccagcctcatggaactggagaagcgcaaagagaatcgatttgtggaacggcagagcatcgtgcctctgcggctgatatacagatcagggggggaggacgagtcccgccacgacgccctagacacgcgggtgcggggggacctgggtggcccccagctcacacacgtagatcaggctagctttcaggtggacgcatttggaactagctttattctcgacgtggtgctgaaccatgatttgttaagcagcgaatacatcgagagacatatcgagcatggggggaaaacagttgaagtgaagggtggcgagcactgttactaccagggtcatatccggggaaatccagattcctttgtggctctgagtacatgtcatggacttcacgggatgttctatgatggaaatcatacatatctgatcgaaccagaggagaacgacacaacccaggaagatttccacttccattctgtgtacaagtctagactgttcgagttttcactggatgacctccctagtgaatttcagcaggtaaatattacaccttcaaagttcattctgaagccacgaccaaagcggagtaagagacagttaaggcggtacccgaggaacgtagaggaggaaacgaagtatatcgaattaatgattgtgaacgaccatctcatgttcaagaaacacaggttgtcagtggtgcacacaaacacgtacgctaagagtgtggtgaacatggccgatcttatctacaaagatcagctgaaaactcgaattgtcttagtggcaatggagacatgggccaccgataacaagtttgctatatcagaaaaccctcttattaccctgcgcgagtttatgaaataccggagggatttcataaaggagaagtccgatgcggtccacctgttcagcgggagccagttcgaaagctcccggagcggggctgcttacatcggcgggatttgttccttgctgaagggaggaggagtgaatgaatttggtaagaccgatctgatggccgttaccctggctcagagcctagctcataacatcggcatcattagcgataagaggaagctggccagtggcgagtgtaagtgcgaagacacttggtctggatgcattatgggtgatactgggtattatctgcctaagaagtttacccaatgtaatatcgaggagtatcacgactttttgaatagcggagggggcgcttgcttgtttaacaagccatccaagttgctggatcccccagaatgcggtaacggatttatcgagactggcgaagaatgcgattgcggcacgcctgcggaatgcgtgctggaaggcgcagagtgttgcaaaaagtgcactctaactcaggactcacagtgttcagatggactgtgttgcaaaaagtgtaagtttcagcctatggggactgtgtgtagagaagcagtaaatgactgtgatattcgtgaaacctgtagtggaaactcatcgcagtgcgccccaaacatccacaaaatggatggttactcgtgtgacggagtacagggtatttgctttggagggcggtgcaaaactcgtgatcgccagtgcaagtacatctgggggcaaaaggtgacagcgtctgataagtactgttacgagaaactgaacattgagggtaccgaaaaaggcaattgcgggaaggataaggacacctggattcagtgcaacaagagggatgtgctatgcgggtatctcttgtgcactaatattggaaacatcccccgcctcggcgagctcgatggggaaatcacaagtactttagtggtccagcagggccgcacccttaactgttccggcgggcacgttaaacttgaggaagacgttgacctgggatatgttgaggatggaacaccatgcggccctcagatgatgtgcctcgaacatcgttgtctgcccgtggcctcattcaatttctctacctgtctctcctctaaggaagggaccatatgctccggtaacggcgtttgcagtaatgaactgaaatgcgtctgcaacaggcactggattggctctgattgcaatacctatttcccccataatgacgatgccaagacaggtatcaccctctcaggaaacggagtggctggcaccaacatcatcatcggcattattgctgggaccatcttggtgctcgccctgatcctcgggatcactgcttggggctacaaaaactacagggaacaaaggtcaaacggactctcacattcttggtcagagcgaatcccagacaccaagcacattagtgacatttgcgaaaacgggaggccacgatccaacagttggcagggaaatctcggcggaaacaagaaaaagatcaggggaaaaagatttagaccccggtccaactcaacagaaacactctcacccgcaaaaagtccgtcttccagtaccgggtctatcgctagcagcaggaagtacccttaccccatgccccccctacccgatgaggacaagaaggtgaataggcagtctgccagactatgggaaacgtctatttag

SEQ ID NO: 190784 - DNA, 2613 bp, Artificial Sequence
  derived and/or modified sequence
atgcaggctgcagtggccgtgagcgtgccatttctgctgctgtgtgttctggggacatgtccaccagcacgctgcggacaagcgggagatgcttcactcatggagttggaaaaaagaaaggaaaatcgctttgtggagcggcagtcaatcgtgccattaaggctgatctaccgcagcgggggagaagacgaaagtaggcatgacgcactagacaccagagttaggggggacctgggcggaccacagttgactcacgtggatcaggcctcgttccaggttgatgccttcggtactagtttcatcctcgatgtggtgttaaaccacgacctcctttctagtgaatacattgaaagacacatcgaacacggaggtaagaccgtggaagtgaaggggggtgaacactgttactaccaaggacatatccgcggaaaccctgacagctttgtcgccctgagcacttgccacggacttcatggcatgttttatgacgggaatcacacatatctgattgaaccagaagagaacgataccacacaggaggacttccattttcattccgtgtacaagtccagactgttcgagttctccctggacgatctgccctctgagtttcaacaggttaatattacccctagcaagttcatcctcaagcctcgcccaaagcggagcaagagacagctgaggagataccccaggaatgtggaggaagaaacaaaatatatcgaactgatgattgtcaacgatcacttgatgtttaaaaagcaccgcctgagcgtcgtgcataccaatacttatgctaagtccgtggtgaatatggccgatctcatctacaaggatcagttaaagacaaggatcgtcttagttgctatggagacatgggctaccgataacaagtttgctatttccgagaatcctctgattaccttgcgtgaattcatgaagtacagacgcgattttattaaggaaaaatccgacgcagtgcacctgttttcaggatcccagttcgagtctagtagatcaggagctgcatatattggtggaatatgttccctcttaaaaggcggaggcgtaaatgaatttggcaagaccgatctgatggctgtgacactggcacagagtctcgcccataatattgggatcattagtgataaaagaaagttggcctcaggagaatgcaaatgcgaggacacctggtccggctgtatcatgggagacaccgggtactacttgcctaagaagtttacacagtgcaacatagaggagtatcacgatttcctgaatagcggcggaggagcctgtctgttcaacaagccctctaagctcctggatccacctgaatgcggaaacggcttcatcgagaccggagaggagtgcgattgcggaacgcccgctgagtgtgttctcgagggagccgagtgctgtaagaagtgtaccttgacccaggactctcagtgttcagatggcttgtgttgcaaaaagtgcaagtttcagccaatgggtacagtgtgccgagaggccgtgaacgattgcgatatcagggagacctgtagcggcaattcctcacagtgtgccccaaacatccacaaaatggatgggtacagctgcgatggcgtccagggtatctgctttggaggccgttgcaagacacgtgaccggcagtgcaaatacatatggggtcagaaggtaaccgcatccgacaaatattgctacgaaaagctaaatattgaaggaacggagaaagggaactgcggcaaggataaggatacttggatccagtgtaataagcgtgatgttctgtgcgggtacctgctctgtaccaacattggaaatattcccaggctcggggagctcgacggtgagataaccagcaccttagtggtgcaacaaggcagaacactcaactgttctggtgggcacgtcaagctcgaggaggatgtggacctgggctatgtggaggatggcactccatgcggccctcagatgatgtgcctggaacatcggtgcctccctgttgcatcatttaactttagtacctgcctatctagtaaagagggaaccatttgttccggcaacggcgtctgttcaaacgagttgaaatgcgtctgtaatcgacactggattggaagcgactgcaacacttacttcccacataatgatgacgctaaaaccggaattaccctctctggcaacggggtggctggaaccaatataataataggcattatagccggtacaatcttggtgctcgctctaatcctgggaatcaccgcctgggggtacaagaattatcgggagcagcgaagcaacgggctgtctcactcctggagcgagcgtatcccggatacgaagcacatttcagacatttgcgagaacggaaggccgaggagtaacagctggcaggggaatctaggtggtaacaaaaaaaagatcagaggcaaacggttccggccacgcagcaacagtactgaaactcttagcccggctaagagccctagttcctcgactggttcaatcgcttcatccaggaaatacccttacccaatgcctccactgccagacgaggacaaaaaggtgaataggcaaagcgctaggctatgggaaacaagcatttag

SEQ ID NO: 190785 - DNA, 2613 bp, Artificial Sequence
  derived and/or modified sequence
atgcaggccgccgtggccgtgagcgtgcccttcctgctgctgtgcgtgctgggcacctgcccccccgccagatgcggccaggccggcgacgccagcctgatggagctggagaagagaaaggagaacagattcgtggagagacagagcatcgtgcccctgagactgatctacagaagcggcggcgaggacgagagcagacacgacgccctggacaccagagtgagaggcgacctgggcggcccccagctgacccacgtggaccaggccagcttccaggtggacgccttcggcaccagcttcatcctggacgtggtgctgaaccacgacctgctgagcagcgagtacatcgagagacacatcgagcacggcggcaagaccgtggaggtgaagggcggcgagcactgctactaccagggccacatcagaggcaaccccgacagcttcgtggccctgagcacctgccacggcctgcacggcatgttctacgacggcaaccacacctacctgatcgagcccgaggagaacgacaccacccaggaggacttccacttccacagcgtgtacaagagcagactgttcgagttcagcctggacgacctgcccagcgagttccagcaggtgaacatcacccccagcaagttcatcctgaagcccagacccaagagaagcaagagacagctgagaagataccccagaaacgtggaggaggagaccaagtacatcgagctgatgatcgtgaacgaccacctgatgttcaagaagcacagactgagcgtggtgcacaccaacacctacgccaagagcgtggtgaacatggccgacctgatctacaaggaccagctgaagaccagaatcgtgctggtggccatggagacctgggccaccgacaacaagttcgccatcagcgagaaccccctgatcaccctgagagagttcatgaagtacagaagagacttcatcaaggagaagagcgacgccgtgcacctgttcagcggcagccagttcgagagcagcagaagcggcgccgcctacatcggcggcatctgcagcctgctgaagggcggcggcgtgaacgagttcggcaagaccgacctgatggccgtgaccctggcccagagcctggcccacaacatcggcatcatcagcgacaagagaaagctggccagcggcgagtgcaagtgcgaggacacctggagcggctgcatcatgggcgacaccggctactacctgcccaagaagttcacccagtgcaacatcgaggagtaccacgacttcctgaacagcggcggcggcgcctgcctgttcaacaagcccagcaagctgctggacccccccgagtgcggcaacggcttcatcgagaccggcgaggagtgcgactgcggcacccccgccgagtgcgtgctggagggcgccgagtgctgcaagaagtgcaccctgacccaggacagccagtgcagcgacggcctgtgctgcaagaagtgcaagttccagcccatgggcaccgtgtgcagagaggccgtgaacgactgcgacatcagagagacctgcagcggcaacagcagccagtgcgcccccaacatccacaagatggacggctacagctgcgacggcgtgcagggcatctgcttcggcggcagatgcaagaccagagacagacagtgcaagtacatctggggccagaaggtgaccgccagcgacaagtactgctacgagaagctgaacatcgagggcaccgagaagggcaactgcggcaaggacaaggacacctggatccagtgcaacaagagagacgtgctgtgcggctacctgctgtgcaccaacatcggcaacatccccagactgggcgagctggacggcgagatcaccagcaccctggtggtgcagcagggcagaaccctgaactgcagcggcggccacgtgaagctggaggaggacgtggacctgggctacgtggaggacggcaccccctgcggcccccagatgatgtgcctggagcacagatgcctgcccgtggccagcttcaacttcagcacctgcctgagcagcaaggagggcaccatctgcagcggcaacggcgtgtgcagcaacgagctgaagtgcgtgtgcaacagacactggatcggcagcgactgcaacacctacttcccccacaacgacgacgccaagaccggcatcaccctgagcggcaacggcgtggccggcaccaacatcatcatcggcatcatcgccggcaccatcctggtgctggccctgatcctgggcatcaccgcctggggctacaagaactacagagagcagagaagcaacggcctgagccacagctggagcgagagaatccccgacaccaagcacatcagcgacatctgcgagaacggcagacccagaagcaacagctggcagggcaacctgggcggcaacaagaagaagatcagaggcaagagattcagacccagaagcaacagcaccgagaccctgagccccgccaagagccccagcagcagcaccggcagcatcgccagcagcagaaagtacccctaccccatgccccccctgcccgacgaggacaagaaggtgaacagacagagcgccagactgtgggagaccagcatctag

SEQ ID NO: 190786 - DNA, 9334 bp, Artificial Sequence
  derived and/or modified sequence
cgggcgctcgctccctgccgagctcttgtcgcccgcccgagcctttgccaggggatgaggtgggaggcgctagaaaccacttagctacagccaaccgcccaatgcagcactcgctcgctccccccgccagcggaagcgtccgcgaagcacaatgcagcactgagccgcggtggaggttgcagcgccacggccgccgcagcaccggccggggctgggtggaggtggccgcggggaccccgggggcgcggagcgagggaaacggactcggcggcgccggcatgaggagctgagcgtctcgggcgaggcgggctgacggcagcaccatgcaggcggcagtggctgtgtccgtgcccttcttgctgctctgtgtcctggggacctgccctccggcgcgctgcggccaggcaggagacgcctcattgatggagctagagaagaggaaggaaaaccgcttcgtggagcgccagagcatcgtgccactgcgcctcatctaccgctcgggcggcgaagacgaaagtcggcacgacgcgctcgacacgcgggtgcggggcgacctcggtggcccgcagttgactcatgttgaccaagcaagcttccaggttgatgcctttggaacgtcattcattctcgatgtcgtgctaaatcatgatttgctgtcctctgaatacatagagagacacattgaacatggaggcaagactgtggaagttaaaggaggagagcactgttactaccagggccatatccgaggaaaccctgactcatttgttgcattgtcaacatgccacggacttcatgggatgttctatgacgggaaccacacatatctcattgagccagaagaaaatgacactactcaagaggatttccattttcattcagtttacaaatccagactgtttgaattttccttggatgatcttccatctgaatttcagcaagtaaacattactccatcaaaatttattttgaagccaagaccaaaaaggagtaaacggcagcttcgtcgatatcctcgtaatgtagaagaagaaaccaaatacattgaactgatgattgtgaatgatcaccttatgtttaaaaaacatcggctttccgttgtacataccaatacctatgcgaaatctgtggtgaacatggcagatttaatatataaagaccaacttaagaccaggatagtattggttgctatggaaacctgggcgactgacaacaagtttgccatatctgaaaatccattgatcaccctacgtgagtttatgaaatacaggagggattttatcaaagagaaaagtgatgcagttcaccttttttcgggaagtcaatttgagagtagccggagcggggcagcttatattggtgggatttgctcgttgctgaaaggaggaggcgtgaatgaatttgggaaaactgatttaatggctgttacacttgcccagtcattagcccataatattggtattatctcagacaaaagaaagttagcaagtggtgaatgtaaatgcgaggacacgtggtccgggtgcataatgggagacactggctattatcttcctaaaaagttcacccagtgtaatattgaagagtatcatgacttcctgaatagtggaggtggtgcctgccttttcaacaaaccttctaagcttcttgatcctcctgagtgtggcaatggcttcattgaaactggagaggagtgtgattgtggaaccccggccgaatgtgtccttgaaggagcagagtgttgtaagaaatgcaccttgactcaagactctcaatgcagtgacggtctttgctgtaaaaagtgcaagtttcagcctatgggcactgtgtgccgagaagcagtaaatgattgtgatattcgtgaaacgtgctcaggaaattcaagccagtgtgcccctaatattcataaaatggatggatattcatgtgatggtgttcagggaatttgctttggaggaagatgcaaaaccagagatagacaatgcaaatacatttgggggcaaaaggtgacagcatcagacaaatattgctatgagaaactgaatattgaagggacggagaagggtaactgtgggaaagacaaagacacatggatacagtgcaacaaacgggatgtgctttgtggttaccttttgtgtaccaatattggcaatatcccaaggcttggagaactcgatggtgaaatcacatctactttagttgtgcagcaaggaagaacattaaactgcagtggtgggcatgttaagcttgaagaagatgtagatcttggctatgtggaagatgggacaccttgtggtccccaaatgatgtgcttagaacacaggtgtcttcctgtggcttctttcaactttagtacttgcttgagcagtaaagaaggcactatttgctcaggaaatggagtttgcagtaatgagctgaagtgtgtgtgtaacagacactggataggttctgattgcaacacttacttccctcacaatgatgatgcaaagactggtatcactctgtctggcaatggtgttgctggcaccaatatcataataggcataattgctggcaccattttagtgctggccctcatattaggaataactgcgtggggttataaaaactatcgagaacagaggtcaaatgggctctctcattcttggagtgaaaggattccagacacaaaacatatttcagacatctgtgaaaatgggcgacctcgaagtaactcttggcaaggtaacctgggaggcaacaaaaagaaaatcagaggcaaaagatttagacctcggtctaattcaactgagactttatctcctgccaagtctccttcttcatcaactgggtctattgcctccagcagaaaatacccttacccaatgcctccacttcctgatgaggacaagaaagtgaaccgacaaagtgccaggctatgggagacatccatttaagatcaactgtttacatgtgatacatcgaaaactgtttacttcaacttttatagaaacccaggctcatggaatcactgcaaatctatctgctcttcagacaatacgaagaccctctgagatgctacagaggagaggaagcggagtttcacatctggttaccattttctttttgtcattggcttaggatttaactaaccatgaaaagaactactgaaatattacactataacatggaacaataaaggtactggtatgttaatggataatccgcatgacagataatatgtagaaatattcataaagttaactcacatgacccaaatgtagcaagtttcctaaggtacaatagtggattcagaacttgacgttctgaggcacatcctcactgtaaacagtaatgctatatgcatgaagcttctgtttattgttttccatatttaaggaaacaacatcccataatagaaatgagcatgcagggctaaggcatataggatttttctgcaggactttaaagctttgaaaggccaatatcccataggctaactttaaacatgtatttttatttttgttttgttttttacttttcatatttatattagcatacaaggacaattgtatatatgtaacatttttaaaattttaaaaaaatgcagctgttacacacaagtgtattttgccaaatgcctaaaaattccgtcacaatcacatcatcgtcatccatccagtgatcttcaaagactataagcaggtaatgtaaatatagtggtcaatgctgtaaatgtgtctctccataattcgtatttgtccaaaacatgtgatatccctttaacctgtgcacagtctggaggcagttttattgagtgagtagttgagtgagagaacaaaatgcccagcaaaacttctggcctccacagtttgctgatgcaggagcccactctgctgccgatgggctgctccctggaaatcatctatcccatccgtccatcccatctcatcccagtgagccagcccctcagcagtgtgtgctgctgagattaagcaagtgcaccaaagacacatgagacaacgtactgccagtgagctggtagcttctggtttgccaatactctaaccctttgtggcctgaagttttgttccttggcaaaactttgtagtcacccttatctgtgaaatgaatgacttgttttaacaaaaacaactttgacactgttgattaagaatatttgtcatcactgggatgtgaatcccaacaagtcattctgcactgactctgaagcaagatgacggaagattctactgtttgagttgagcagcttcaaccattcataaagggttaagttagatctaaaccacagagatgcagcatctgcgaagttacactaacagctggtgggggaaagaatctgatgctttgaaacatatatttttaatccataggaaaataagattctattttaaaagacccttctttaaaaccaaagtttgatagctgttataatggcagatctgtcattccaaaagaaagctagctaccctagtgaggctggagattgatgggctcaatcacatggtctgctctgaagtatacttctgatttcctcatttgctgtgtgttcttaagaggaatggaatctgcagacaggttttcagatatactctcttaaatttgatcctctcccatagtatccatggacaaaatccatatcatcttcatatgtaatcaatttgattacatatcatgcccaaactgaagggccgagttagaaggcagcattttatactgtgtgtttatgtcttctgtaatggacctctcttttgaaagtctttgaaatgtttggaaagcaatttaatgatccaaaattacataatgtaaaacagcatttttcatgacaggaagggatgtgattgttgatatgaccataaagcgatccatcaggccaaggtttgggtgagtgttgggcagtgttgccacatagctcaagccaagaacagaagggcagacagattgaaagatgtagcaaataaagtgactttttaccaagatcactgtaacgtgcactgaatgtttcctggtactgagtgtacaaaaggctaatgctataaggtttattttgactataaaagagtttatagatttgaatataaggtgcctcatgtaaatatgcttcctagttacaggtacacaaactctaatttgaaagaatccacaaatggctagctgagaagttaacagatctctatcattcgtctgtgtgtctttcttccctcacctatttttacatgaaattattatttcaaatgaaaatcatgatcatgtgccttttgggagacatggtttctctagaggtatatagtttgtaattacccgccttggtaataaccttcctgtggaactgactaaaaatttttgttttatttgtagagattatgatttgaggtatacagtaactttaatgttctattcttggaatctactctatctcccatgtttaaacattcttagagccatttgtgggattcattgacaaatttatagtctcaagggagagtttcaagaagtatctatatgtatactcatggttggggttctagaggcattacatctaaatatttatgacttttcatccaccgaggtaggtagcattaaatatacaagcacagcattatttctctttaaatatctattttggagagaaactttgaggccgtatcacagtttatatcatgcaactaatatttatatttcccaatccactacaaaatcattgctaagcagaagagagcagttatttggcctttatgttccattgtatgcctttttcccctcttccagttttatgcattgataagactacagattggcaccctgctgcctgagaagttccatttatccatagtcattgcagtgcagtaaaccctgatttaaaggaacatttaagtctctccagtaagtgtgaacaggaaggcatgggatagaagagagtccttatggagtggactggccacatgaactgtcctccagccactctttatttagatgggaagtggcatggtcctctgaacgctgcaggctggaaatgatccccagggcacatgcaatctgtggaaaggaatacatcggacagtgcaacatggtgagggctttcaatttgctgtggttgctgtatttttaacaagacacccggagcttcgattaggaataacctatcattagagttgttcctttaaaaaatgttgatgaataaagcaaatgtgggtttaaaatgccaacttatttttcactttgatattggtgctttattaagtgataccatagtttctctctcttttccctgttactttaaaaagaattttaaaattgtgtttgtatataaggtcagtctggcatagaatttctgaaagtaacattaataggatttctaaagaagttgtcagaaagacaaaattggatattctctgcactttcagagaaggactatttatgtttgaatttcataacaggcttacatttcttttctattgattcccttgcatatctacataatttaatcctgtctattgtcccagatctcttgtggctactttacctgttaccttttttgggattttgttctttatgttttacagttaccttcggaccagaagatatatggtatttttattcacttttttcagtgttttaaaataaggtttgttcatttattcattttatccattcatttcctattgtcgtatagttctaaccatatatatagtactttaaatattttcttatgttattatttaacacaataataaattcttatctaaagaaaagattattttactttattttacttaaaggaaagagaatttattggcaggatattgagtagcttgtagagtatatggaaggggagagccaagttaggaactggcaggagcgaggagggacaagacagctgcctgcacagtctgataggacacatctggctgctgccactggatgcccacatgggcagcgtgttgtaaatatcaccctaccagttggtaagttggcatgaattttccatgaaacacttgactgccatttgcagcatcatatctactttttatgcacctaattatatttttcctttcacttttatgtttttttctaaaactgccacctaaatacctttccactccgttaaatgtatggagtcaagataaatttctcattcttgctctacagtttaagatgtataagaagtaaacacttccgtggaatagggcttaatttggggctcaaatgttttgttttcctcctgagatgtttttgaatggataagactactctggttttggatgcagcaacttttctcctggcatggaagaactaaggactttgataaacagtttcccattgatagtataatataatgaggggcccagtctgctcttgtgaaaattggctgagcggcagcagcccatcccagctgtgtgtgagtagccccgctgttaaaagtacacctgctgggaattgttggcacatgctcatagcatatgctctgtgggggaggtgcttttaattccaagaggagcttttctcccacatctgcggatgcagaacaaagatgcagcaggactttagaaaacaggagtgtttctactgacattttattcattgctttgttagtcccgcaaatggagcaacttctggttgtttgtaagcagaaaaacaaaacattcaaaaccaaaaacctaattagtacttttgtcctttatatccctaggatgctctagggagtagaggtggcaggcatctttatcttcacccactggcacattagcagcttatgcaacttaggaagtcactgggagatgagtcctaaaagcctgaatttcaggatggggaggagataagaagcagagaactttgggagaccatggggcatttagtcctggcatagacacagaatggatattcacaggaagattcctgaggccagatatgcaggagagcacacattgtcacaaggggtgtggtgggaagagaggtgctggatgcctaagacagacttctgtgcttggcagattgactgagtgttgactctgaatactttgtggtccagtccataataggccagtcactcctgcctgatgcatccctgttgcactgttcataaaacctgtatcatatggggaagcttcaaggctggcaggcttttcatcaagtaatcatcattccatgttcctacgtatccttgaaatcaaaaccaggcaatatgtgtgtttttggttttgttttacaaaaaggcatacaatgagacgaattcttaagataatgcacatacagaatcatcaataaagtttcaaagagtttatgaagaaaaggtattttcctttcttgtaaaaaatgttatatatatataatattctgatctgcattcaccttagggcttagcctcttattttatgaattttcaggctgtgatttgtgttggatggctaagctctaaaataatgcaaatagccccaatctttaaatatagcggtgctaagttgaacaagtaacacaatacagaaaatgctgatatgaatacttagtaataatacaaaagttcctgctaaattatatatgtgtatcactgcctgactagaaaccccacttttcttttctaatccagcacaaaatcaaactctgattctacaaccagtctttttaaagggcaaaaatgactcaacacctttgttttgtatggaaaacttttttttttacactaactgcaaaactgctttaaaaaaaggcttattcaggatagataagcatgtactccttttttaacttgctggaagacttgcccctccaaactagcacccccaaaagacaacttctttcagaaacggggtgttttacctaaacatagtagcttacatgttagccagcagtaggtcggcactagtgttttccacggttatcacctttgacaggtgatgtgcatctatagatagtggaagccaccccatgaggaggtgttaatagcagcatggtttcacttttggtaatcaggtaatcatgtgtatatacttagattcgcattattttaacatttctctgctactctgcacttcaggttcgttaagctattttaataattactggggttatggcaaacaccaatggaaatgtatatggcaactgctttcctgagcaagtgtgatttgttttatggctgttcaagttataaaattgttcttacattgtaggtaaacaaaatcttgatgtttttaaaggtcactgtaacttaaggttcaaatttctggcacagttttattagtattcacttcggaagctaataagataccatggttttctatgttactcccattgtaacattagtaaagtgactttcaataaaagatttatgttattttga

SEQ ID NO: 190787 - protein, 421 aa, Artificial Sequence
  derived and/or modified sequence
MRWILFIGALIGSSICGQEKFFGDQVLRINVRNGDEISKLSQLVNSNNLKLNFWKSPSSFNRPVDVLVPSVSLQAFKSFLRSQGLEYAVTIEDLQALLDNEDDEMQHNEGQERSSNNFNYGAYHSLEAIYHEMDNIAADFPDLARRVKIGHSFENRPMYVLKFSTGKGVRRPAVWLNAGIHSREWISQATAIWTARKIVSDYQRDPAITSILEKMDIFLLPVANPDGYVYTQTQNRLWRKTRSRNPGSSCIGADPNRNWNASFAGKGASDNPCSEVYHGPHANSEVEVKSVVDFIQKHGNFKGFIDLHSYSQLLMYPYGYSVKKAPDAEELDKVARLAAKALASVSGTEYQVGPTCTTVYPASGSSIDWAYDNGIKFAFTFELRDTGTYGFLLPANQIIPTAEETWLGLKTIMEHVRDNLY

SEQ ID NO: 190788 - DNA, 1266 bp, Artificial Sequence
  derived and/or modified sequence
atgcgttggatcctttttataggtgcactcataggctccagtatctgcgggcaggaaaaattttttggcgaccaggtgcttcgcataaacgttcgcaatggtgatgaaatttctaagctgtcccagttagtgaactcaaataatctgaaattgaacttctggaagtccccttcatcctttaaccggcccgtagacgtacttgtcccatcagtttcgctgcaggcttttaaaagcttcctgagaagtcagggactggaatacgccgtgacgattgaagatctgcaggctttgctcgataatgaggatgatgaaatgcaacacaatgaggggcaggaaagaagctcaaataacttcaactacggggcataccattcacttgaagctatctatcacgaaatggataatatagccgccgattttcccgacctcgctcggcgcgtcaaaatcggtcattctttcgagaatcggcctatgtacgtgttgaagttttccacggggaagggggtgagaaggccagccgtgtggctgaacgcagggatacactcacgggaatggatctctcaggccacggccatctggaccgcgcgaaaaatcgtctccgattaccagcgcgacccagctatcaccagcatactggagaaaatggacattttcctgctgcctgttgcaaacccagacggttatgtctatacacagacgcagaatcgattgtggcgtaaaactcgttccaggaatccaggaagctcatgtataggagccgaccccaaccgtaattggaacgccagctttgctggcaagggggcctctgacaacccatgctcggaggtatatcacgggccccatgccaactcagaggtcgaggtgaagtcagtcgtcgacttcatccagaaacatggcaacttcaaggggttcatagatctgcacagttactctcaactgctgatgtatccctacggctatagcgtaaaaaaggcccccgatgctgaagaactcgacaaggtcgcccgcctagcagcgaaggccctggcctctgtgagcggaacagaataccaagtgggccccacgtgcacaacagtatatccagcttctggaagttccatcgactgggcctatgacaatggaattaaattcgcctttaccttcgagttacgggacactggcacctatggctttcttctccctgctaaccagatcatcccaacagccgaggagacctggcttggtctcaagacaataatggaacacgtgcgggacaatttgtactag

SEQ ID NO: 190789 - DNA, 1266 bp, Artificial Sequence
  derived and/or modified sequence
atgcgctggatcctcttcatcggggccctgattggcagcagcatctgtggccaggagaagttcttcggggaccaggtgctgcgcatcaacgtgagaaatggagatgagatcagcaagctgagccagctggtgaacagcaacaacctgaagctgaacttctggaagagccccagcagcttcaacagacctgtggatgtgctggtgcccagcgtgtccctgcaggccttcaagagcttcctgcggagccagggcctggagtatgctgtgaccatcgaggacctgcaggccctgctggacaatgaagatgatgagatgcagcacaatgaaggccaggagaggagcagcaacaacttcaactacggggcctaccacagcctggaggccatctaccacgagatggacaacattgctgctgacttcccagacctggccaggagagtgaagattggccacagctttgagaaccggcccatgtatgtgctgaagttcagcactggaaaaggagtgcggcggcctgctgtgtggctgaatgccggcatccacagccgggagtggatcagccaggccacagccatctggacagccaggaagatcgtgtctgactaccagagggaccctgccatcaccagcatcctggagaagatggacatcttcctgctgcctgtggccaacccagatggctacgtgtacacccagacccagaaccggctgtggaggaagaccaggagcaggaaccctggcagcagctgcattggagctgaccccaacagaaactggaatgccagctttgctgggaagggggccagtgacaacccctgcagcgaggtgtaccacggcccccacgccaacagcgaggtggaggtgaagtctgtggtggacttcatccagaagcacggcaacttcaagggcttcatcgacctgcacagctacagccagctgctgatgtacccctacggctacagcgtgaagaaggccccagatgctgaggagctggacaaggtggcccggctggccgccaaggccctggcctctgtgtctggaacagagtaccaggtgggccccacctgcaccaccgtgtacccagccagcggcagcagcattgactgggcctatgacaatggcatcaagtttgccttcacctttgagctgcgggacaccggcacctacggcttcctgctgcctgccaaccagatcatccccacagctgaggagacctggctgggcctgaagaccatcatggagcacgtgcgggacaacctgtactag

SEQ ID NO: 190790 - DNA, 1266 bp, Artificial Sequence
  derived and/or modified sequence
atgcggtggatcctgttcatcggcgccctgatcggcagcagcatctgtggacaagaaaaattcttcggagatcaggtcttgaggataaacgtcagaaacggcgatgaaatcagtaagctgtcgcagttagtgaactcgaacaatctgaagttgaatttctggaagtctccgagcagttttaacagacctgttgatgtgcttgttccttccgtgtcgctgcaggcattcaagtcttttctcaggtcacaggggttggaatacgccgtgaccatcgaggatttacaggccctgcttgataatgaggacgatgagatgcagcacaacgagggccaagagaggtcctctaataacttcaattacggagcttatcatagtctggaggctatctaccatgagatggataacatagcagctgattttcccgatttagcgcgaagggtgaaaattgggcacagctttgagaatagacccatgtacgtgttgaagttctcgaccgggaagggcgtcaggcgtcccgccgtgtggctgaacgcgggcattcattctagagagtggatttcacaagcaacagccatctggactgctaggaagattgtgtcagattaccagagggacccagcaatcactagcattctggagaagatggacatttttctcctgcctgtcgccaacccagacggttatgtgtacactcagacacagaaccggctttggcgcaaaacgaggagccggaatcccgggagttcctgcataggcgctgacccaaaccgaaattggaatgcctcattcgcgggtaagggggccagcgacaatccctgctctgaagtgtaccacggtcctcacgccaactccgaagtggaggtcaagtccgtggtggactttattcagaaacatggcaacttcaagggattcatcgacttacactcttactcccagctgctgatgtacccctatggatactcagtaaagaaagccccggatgcagaagaactcgataaagtcgcaagactagcagcgaaagcactggccagcgtttccggtacagaatatcaggtgggccctacttgtaccacagtgtaccctgcatcaggatcaagtatcgattgggcgtacgacaacggaatcaagtttgcgttcacttttgagttaagggacactggtacgtatggattcctgcttcctgccaatcagataatccctaccgccgaggaaacctggttgggattgaaaacaattatggaacacgtgcgcgacaatctctactag

SEQ ID NO: 190791 - DNA, 1266 bp, Artificial Sequence
  derived and/or modified sequence
atgcgatggattctgttcatcggggcactgatagggtcaagcatttgcggccaggagaagttcttcggcgaccaagtgctcagaattaatgtgaggaacggtgacgaaatcagtaaactgtcccagctggtgaacagcaacaacttgaaattgaacttctggaaatcccctagtagctttaacaggcccgtggatgttctcgttccctcagtgtctctccaagcatttaagagctttttacgctcacaaggcctggagtacgccgtcacgatcgaggatctgcaggccctattagataacgaggatgacgagatgcagcataatgaaggccaggagcgcagtagcaataatttcaactatggagcctatcatagcctggaggctatttaccacgaaatggataacatcgctgccgattttcctgacctcgcgaggcgcgtgaaaattggacacagttttgaaaaccgccctatgtacgttctcaaatttagtactgggaaaggggtgcggagacccgctgtgtggttgaatgccggtattcactctagggaatggatctcccaagccacagcaatttggactgctcgtaaaatcgtgtccgactatcagcgagatccagcgatcacttctattctggagaaaatggacatcttcctcttgccggtagccaatccggatggctacgtgtacacccagacccagaaccggctctggcggaaaacacggagcaggaatcctgggtcaagttgcattggtgccgaccccaaccggaattggaacgcctcgtttgccggaaagggagccagcgataacccgtgtagcgaggtgtaccacgggccacatgctaactccgaggtggaggtgaaaagcgtggtagactttatccagaaacacggaaacttcaaaggcttcattgacctccactcctattcccagctgttaatgtacccttatggttactctgttaagaaggcccctgatgccgaagagctggacaaggtggcccgactggccgctaaagccctggcttctgtgtctggaactgagtatcaggttggaccgacctgtaccactgtctaccccgctagcggctcttcaatcgactgggcatacgataacggcatcaagttcgcctttacttttgagttacgtgataccggcacgtatggctttcttctgccagcaaatcagatcatccccacagccgaggaaacctggctgggactgaaaacaataatggaacacgtgcgggataacttgtattag

SEQ ID NO: 190792 - DNA, 2797 bp, Artificial Sequence
  derived and/or modified sequence
gccactgtatgactgactccccggggacatgaggtggatactgttcattggggcccttattgggtccagcatctgtggccaagaaaaattttttggggaccaagttttgaggattaatgtcagaaatggagacgagatcagcaaattgagtcaactagtgaattcaaacaacttgaagctcaatttctggaaatctccctcctccttcaatcggcctgtggatgtcctggtcccatctgtcagtctgcaggcatttaaatccttcctgagatcccagggcttagagtacgcagtgacaattgaggacctgcaggcccttttagacaatgaagatgatgaaatgcaacacaatgaagggcaagaacggagcagtaataacttcaactacggggcttaccattccctggaagctatttaccacgagatggacaacattgccgcagactttcctgacctggcgaggagggtgaagattggacattcgtttgaaaaccggccgatgtatgtactgaagttcagcactgggaaaggcgtgaggcggccggccgtttggctgaatgcaggcatccattcccgagagtggatctcccaggccactgcaatctggacggcaaggaagattgtatctgattaccagagggatccagctatcacctccatcttggagaaaatggatattttcttgttgcctgtggccaatcctgatggatatgtgtatactcaaactcaaaaccgattatggaggaagacgcggtcccgaaatcctggaagctcctgcattggtgctgacccaaatagaaactggaacgctagttttgcaggaaagggagccagcgacaacccttgctccgaagtgtaccatggaccccacgccaattcggaagtggaggtgaaatcagtggtagatttcatccaaaaacatgggaatttcaagggcttcatcgacctgcacagctactcgcagctgctgatgtatccatatgggtactcagtcaaaaaggccccagatgccgaggaactcgacaaggtggcgaggcttgcggccaaagctctggcttctgtgtcgggcactgagtaccaagtgggtcccacctgcaccactgtctatccagctagcgggagcagcatcgactgggcatatgacaacggcatcaaatttgcattcacatttgagttgagagataccgggacctatggcttcctcctgccagctaaccagatcatccccactgcagaggagacgtggctggggctgaagaccatcatggagcatgtgcgggacaacctctactaggcgatggctctgctctgtctacatttatttgtacccacacgtgcacgcactgaggccattgttaaaggagctctttcctacctgtgtgagtcagagccctctgggtttgtggagcacacaggcctgcccctctccagccagctccctggagtcgtgtgtcctggcagtgtccctgcaagaactggttctgccagcctgctcaattttggtcctgctgtttttgatgagccttttgtctgtttctccttccaccctgctggctgggcggctgcactcagcatcaccccttcctgggtggcatgtctctctctacctcatttttagaaccaaagaacatctgagatgattctctaccctcatccacatctagccaagccagtgaccttgctctggtggcactgtgggagacaccacttgtctttaggtgggtctcaaagatgatgtagaatttcctttaatttctcgcagtcttcctggaaaatattttcctttgagcagcaaatcttgtagggatatcagtgaaggtctctccctccctcctctcctgtttttttttttttgagacagagttttgctcttgttgcccaggctggagtgtgatggctcgatcttggctcaccacaacctctgcctcctgggttcaagcaattctcctgcctcagcctcttgagtagcttggtttataggcgcatgccaccatgcctggctaattttgtgtttttagtagagacagggtttctccatgttggtcaggctggtctcaaactcccaacctcaggtgatctgccctccttggcctcccagagtgctgggattacaggtgtgagccactgtgccgggcccgtcccctccttttttaggcctgaatacaaagtagaagatcactttccttcactgtgctgagaatttctagatactacagttcttactcctctcttccctttgttattcagtgtgaccaggatggcgggaggggatctgtgtcactgtaggtactgtgcccaggaaggctgggtgaagtgaccatctaaattgcaggatggtgaaattatccccatctgtcctaatgggcttacctcctctttgccttttgaactcacttcaaagatctaggcctcatcttacaggtcctaaatcactcatctggcctggataatctcactgccctggcacattcccatttgtgctgtggtgtatcctgtgtttccttgtcctggtttgtgtgtgtgtgtgtgtgtgtgtgtgtgtgtgtgtgtgtgtttgtgtgtgtgtgtctgtctattttgtatcctggaccacaagttcctaagtagagcaagaattcatcaaccagctgcctcttgtttcatttcacctcagcacgtaccatctgtccttttgttgttgttttgtttttgtttttttgcttttaccaaacatgtctgtaaatcttaacctcctgcctaggatttgtacagcatctggtgtgtgcttataagccaataaatattcaatgtgagtttc

SEQ ID NO: 190793 - DNA, 1266 bp, Artificial Sequence
  derived and/or modified sequence
atgagatggatcctgttcatcggcgccctgatcggcagcagcatctgcggccaggagaagttcttcggcgaccaggtgctgagaatcaacgtgagaaacggcgacgagatcagcaagctgagccagctggtgaacagcaacaacctgaagctgaacttctggaagagccccagcagcttcaacagacccgtggacgtgctggtgcccagcgtgagcctgcaggccttcaagagcttcctgagaagccagggcctggagtacgccgtgaccatcgaggacctgcaggccctgctggacaacgaggacgacgagatgcagcacaacgagggccaggagagaagcagcaacaacttcaactacggcgcctaccacagcctggaggccatctaccacgagatggacaacatcgccgccgacttccccgacctggccagaagagtgaagatcggccacagcttcgagaacagacccatgtacgtgctgaagttcagcaccggcaagggcgtgagaagacccgccgtgtggctgaacgccggcatccacagcagagagtggatcagccaggccaccgccatctggaccgccagaaagatcgtgagcgactaccagagagaccccgccatcaccagcatcctggagaagatggacatcttcctgctgcccgtggccaaccccgacggctacgtgtacacccagacccagaacagactgtggagaaagaccagaagcagaaaccccggcagcagctgcatcggcgccgaccccaacagaaactggaacgccagcttcgccggcaagggcgccagcgacaacccctgcagcgaggtgtaccacggcccccacgccaacagcgaggtggaggtgaagagcgtggtggacttcatccagaagcacggcaacttcaagggcttcatcgacctgcacagctacagccagctgctgatgtacccctacggctacagcgtgaagaaggcccccgacgccgaggagctggacaaggtggccagactggccgccaaggccctggccagcgtgagcggcaccgagtaccaggtgggccccacctgcaccaccgtgtaccccgccagcggcagcagcatcgactgggcctacgacaacggcatcaagttcgccttcaccttcgagctgagagacaccggcacctacggcttcctgctgcccgccaaccagatcatccccaccgccgaggagacctggctgggcctgaagaccatcatggagcacgtgagagacaacctgtactag

SEQ ID NO: 190794 - protein, 367 aa, Artificial Sequence
  derived and/or modified sequence
MAPSGPGSSARRRCRRVLYWIPVVFITLLLGWSYYAYAIQLCIVSMENTGEQVVCLMAYHLLFAMFVWSYWKTIFTLPMNPSKEFHLSYAEKDLLEREPRGEAHQEVLRRAAKDLPIYTRTMSGAIRYCDRCQLIKPDRCHHCSVCDKCILKMDHHCPWVNNCVGFSNYKFFLLFLAYSLLYCLFIAATDLQYFIKFWTNGLPDTQAKFHIMFLFFAAAMFSVSLSSLFGYHCWLVSKNKSTLEAFRSPVFRHGTDKNGFSLGFSKNMRQVFGDEKKYWLLPIFSSLGDGCSFPTCLVNQDPEQASTPAGLNSTAKNLENHQFPAKPLRESQSHLLTDSQSWTESSINPGKCKAGMSNPALTMENET

SEQ ID NO: 190795 - DNA, 1104 bp, Artificial Sequence
  derived and/or modified sequence
atggcccccagcggccccggcagcagcgccagaagaagatgcagaagagtgctgtactggatccccgtggtgttcatcaccctgctgctgggctggagctactacgcctacgccatccagctgtgcatcgtgagcatggagaacaccggcgagcaggtggtgtgcctgatggcctaccacctgctgttcgccatgttcgtgtggagctactggaagaccatcttcaccctgcccatgaaccccagcaaggagttccacctgagctacgccgagaaggacctgctggagagagagcccagaggcgaggcccaccaggaggtgctgagaagagccgccaaggacctgcccatctacaccagaaccatgagcggcgccatcagatactgcgacagatgccagctgatcaagcccgacagatgccaccactgcagcgtgtgcgacaagtgcatcctgaagatggaccaccactgcccctgggtgaacaactgcgtgggcttcagcaactacaagttcttcctgctgttcctggcctacagcctgctgtactgcctgttcatcgccgccaccgacctgcagtacttcatcaagttctggaccaacggcctgcccgacacccaggccaagttccacatcatgttcctgttcttcgccgccgccatgttcagcgtgagcctgagcagcctgttcggctaccactgctggctggtgagcaagaacaagagcaccctggaggccttcagaagccccgtgttcagacacggcaccgacaagaacggcttcagcctgggcttcagcaagaacatgagacaggtgttcggcgacgagaagaagtactggctgctgcccatcttcagcagcctgggcgacggctgcagcttccccacctgcctggtgaaccaggaccccgagcaggccagcacccccgccggcctgaacagcaccgccaagaacctggagaaccaccagttccccgccaagcccctgagagagagccagagccacctgctgaccgacagccagagctggaccgagagcagcatcaaccccggcaagtgcaaggccggcatgagcaaccccgccctgaccatggagaacgagacctag

SEQ ID NO: 190796 - DNA, 1104 bp, Artificial Sequence
  derived and/or modified sequence
atggccccgagcggcccaggcagctcggcgagaaggagatgtagaagggtgctgtattggatccctgtggtctttattacgcttctgcttggctggtcatattacgcatatgctatacaactttgcattgtgtcgatggaaaacacaggggagcaggtggtgtgtctgatggcttaccacctgctgtttgccatgttcgtgtggtcgtactggaagactatcttcaccctgccaatgaatccctctaaggaattccacctgtcatacgcggagaaggatctgttggaacgggagcctaggggagaggcccaccaggaagtgctaaggagggccgcgaaagacctgcccatatacaccaggaccatgagcggcgccatcagatattgtgatcgatgtcaactcatcaaaccggatagatgtcatcactgctccgtttgcgataaatgcatactgaagatggatcatcactgtccatgggtcaataattgcgtcggattttccaattacaaattcttcctgctgtttttagcctactctcttctgtactgcctgtttatcgccgcgacagacttgcaatatttcataaagttttggaccaacgggctgccagacacccaggctaaattccatattatgtttctgtttttcgcagccgccatgttctccgtgtcgctctctagcttgtttggctaccattgctggctagtttccaaaaacaagtccactctggaagccttcagatctccagtcttcaggcacggcacagacaaaaacggcttctctttgggcttctcaaagaatatgaggcaagtgttcggagatgagaagaaatattggttgcttcctatattttcttcactcggggatggctgttccttcccaacttgcctggttaatcaggacccggagcaggctagtactcccgccggtctgaactctaccgcgaagaatttggagaaccaccagtttccggctaagcctctacgagagtcccagtcccatcttctcaccgatagccagtcttggactgaatcctctatcaatcccggtaaatgtaaggcaggcatgtctaacccagctctgacaatggagaacgagacatag

SEQ ID NO: 190797 - DNA, 1104 bp, Artificial Sequence
  derived and/or modified sequence
atggcccccagcggccctggcagcagcgcccggcggcgctgcagaagagtgctgtactggatccctgtggtgttcatcaccctgctgctgggctggagctactatgcctatgccatccagctgtgcatcgtgtccatggagaacacaggagagcaggtggtgtgcctgatggcctaccacctgctgtttgccatgtttgtgtggagctactggaagaccatcttcaccctgcccatgaaccccagcaaggagttccacctgtcctatgcagagaaggacctgctggagcgggagcccagaggagaggcccaccaggaggtgctgcggcgggccgccaaggacctgcccatctacaccaggaccatgtctggggccatccgctactgtgaccgctgccagctgatcaagccagaccgctgccaccactgcagcgtgtgtgacaagtgcatcctgaagatggaccaccactgcccctgggtgaacaactgtgtgggcttcagcaactacaagttcttcctgctcttcctggcctacagcctgctgtactgcctcttcatcgccgccacagacctgcagtacttcatcaagttctggaccaacggcctgcctgacacccaggccaagttccacatcatgttcctgttctttgctgctgccatgttttctgtgtccctgagcagcctgtttggctaccactgctggctggtgtccaagaacaagagcaccctggaggccttccgcagccctgtgttcagacatggaacagacaagaatggcttcagcctgggcttcagcaagaacatgaggcaggtgtttggagatgagaagaagtactggctgctgcccatcttcagcagcctgggagatggctgcagcttccccacctgcctggtgaaccaggaccctgagcaggccagcaccccagctggcctgaacagcacagccaagaacctggagaaccaccagtttcctgccaagcccctgcgggagagccagagccacctgctgacagacagccagagctggacagagagcagcatcaaccctgggaagtgcaaggccggcatgagcaacccagccctgaccatggagaatgagacctag

SEQ ID NO: 190798 - DNA, 1104 bp, Artificial Sequence
  derived and/or modified sequence
atggcccccagcggccccggcagcagcgcccggcggcggtgccggagagtactgtactggattccagtggtgtttattacccttctgctcgggtggtcatattacgcttatgctattcagctgtgcattgtctctatggagaacactggggagcaggtggtgtgtttaatggcctatcacctcctcttcgccatgtttgtttggagctactggaaaaccatcttcacattgcccatgaatccatcaaaagagtttcatctgagttacgcggagaaagatcttctcgaaagggagccccgcggggaagcgcaccaggaagtgctcaggcgtgcggccaaggaccttcccatatacaccagaacgatgagtggtgccatccgttattgcgacagatgccagctcataaagcccgacagatgccaccattgtagcgtgtgcgacaagtgtattctgaagatggaccaccactgcccctgggtgaataactgtgtgggctttagtaattataagtttttcttgctttttctcgcgtactccctcctgtactgcctgttcattgcggctacagatctccagtactttatcaaattctggaccaacgggctgccggatacacaagccaaatttcacattatgttcctgttctttgccgccgctatgttttctgtttcactctcctctctctttgggtatcattgttggctggtgagcaaaaataagtctacattggaagcattcaggtcaccagtatttcggcatggaaccgacaagaatgggtttagcctggggtttagcaaaaacatgcgacaagtgtttggtgatgagaaaaagtattggctgctgcccatattttccagcctcggggatggctgctctttcccaacctgtttggtgaaccaggatcccgagcaggcgtccacaccggcaggtctgaatagtaccgctaagaatctcgaaaaccatcaatttccagcaaaacccctccgcgagtcacaatcacacttactgacagacagtcagtcttggaccgaatcttctatcaatccaggaaagtgtaaagcaggcatgtcaaatccagctctgaccatggagaatgagacatag

SEQ ID NO: 190799 - DNA, 1104 bp, Artificial Sequence
  derived and/or modified sequence
atggctccttccggccctggcagttcagcccgtaggaggtgtcggagagtgctgtattggattcctgtcgtgttcattactcttttgttaggatggtcctactatgcttatgctatccaactgtgcatcgtgtccatggagaacacaggagagcaggtggtatgcctgatggcttatcatctgctcttcgctatgttcgtgtggagttactggaagaccatatttacactgcctatgaacccctccaaagaattccatctgagctacgccgaaaaggacctgctggagagggagccacggggagaagcccaccaggaggttctccggagagctgctaaagatctgcccatatacactcgaaccatgtcaggcgctattcggtattgcgataggtgccagctgattaagcctgacaggtgccaccattgtagtgtctgtgacaaatgcatcctgaaaatggaccatcattgcccttgggtgaataattgcgttggattcagtaattacaaattcttcctgctgtttctggcttatagcctcttgtactgtctcttcatcgctgctacagatctgcagtatttcattaaattctggacaaacggactgccagatacccaggcaaagtttcatatcatgttcctgttctttgccgcagctatgttttccgtatctctaagcagtttgtttggttatcattgctggctggtttctaaaaataagtccactcttgaggctttccgatccccggtcttccggcacggcactgacaagaacggcttctctcttggcttctcgaagaacatgagacaggtgttcggggacgaaaaaaaatactggctactgcccattttttcctctctcggtgatggttgttctttcccaacatgtctggtaaaccaagaccctgagcaggcctctacccctgccggtctcaactcgaccgctaagaacttagaaaaccatcagttcccagcaaagcctttgcgagagtcccagtcccatctcctgaccgattctcagagctggactgagagtagcatcaatcccggaaagtgcaaagccggtatgtcaaatccggcactaactatggagaatgagacctag

SEQ ID NO: 190800 - DNA, 6377 bp, Artificial Sequence
  derived and/or modified sequence
cgcaagttgaagcgcgagggttccacgcgggctgcggggacgcgggcctcggtgctgcagactttctcagggcgcctgggtcgcggcaggcgcggagtcccgagcgcagcagctgctccgccggcctcgcctccgacccccgccctgcgccaagcgcggaagcgctcgcgacctaactgccccgggtgccgggcgcctagggaggggccgccaccgcccgctccgccccgggggcctgcgcccagcagcccccgcctccccggaatccagaggccgagccggaggcggcggggccacggtgggagcccgcgaggtggcccgagcgagggccccgcatccccgcagagcccgcccgagggcgcagcctgccacgccaggggaggcggccgggcggcggggaacggcgggggcggagcgcagcctcccgacgccgccgcctcaccgcccccctccgcctcctcggcctccgctcgcagccgccgcctccgcctccgccgggctgaggagccgggagtccgccgcgccggctcggggctgcgggatggggagttagcgccacggcggcggcagtggccgcagcgcaccccgccgccgcccaggagcccgtccagccaggggtgccgggcccgcccagcccgccccggagccaggcccgcgggcggcggcggagctgggcaggtggatgcggctggaagatggcgccctcgggcccgggcagcagcgccaggcggcggtgccggcgggtgctgtactggatcccggtggtgttcatcaccctcctgctcggctggtcctactacgcctacgccatccagctgtgcatagtgtccatggaaaacactggcgaacaagttgtgtgcctgatggcctatcatctactttttgcaatgtttgtctggtcatactggaaaactatctttacattaccaatgaatccttcaaaagaattccatctctcttatgcagagaaagatttgttggagagagagccaagaggagaagcccatcaggaagttcttaggcgagcagccaaggatcttcccatctataccaggaccatgtctggagccatccgatactgtgacagatgccaacttataaaaccagatcgctgccatcactgctccgtctgtgataaatgtattttgaagatggatcatcattgtccatgggtgaacaattgtgttggattttcaaattataagttctttctccttttcttggcttattctctgctctactgcctttttattgcggcaacagatttacagtattttatcaaattttggacaaatggcctacctgatactcaagccaagttccatattatgtttttattctttgctgcagctatgttttctgtcagcttgtcttctctgtttggctatcattgttggctagtcagcaaaaataaatctacattagaggcattcagaagtccagtatttcgacatggaacagataagaatggattcagcttgggtttcagtaaaaacatgcgacaagtttttggtgatgagaagaagtactggttgctacccattttttcaagtctaggtgatggctgctcctttccaacttgccttgttaaccaggatcctgaacaagcatctactcctgcagggctgaattccacagctaaaaatctcgaaaaccatcagtttcctgcaaagccattgagagagtcccagagccaccttcttactgattctcagtcttggacggagagcagcataaacccaggaaaatgcaaagctggtatgagcaatcctgcattaaccatggaaaatgagacttaactcttcaagcaagataaattcatactttataaaagtatcaatgctgtagatggatggaagaggcttcccacaggaaggtgccaccagtcagttgtgcctatgtccctttggctggaaatgcagaatatgaattgattagttctctccaagccattgcttaaaatataacatgttttggatccaatacacacattgttacaactaacacaaattcctattaaatattaaaagtagttctggtttattaatcaacggggaaaacatcttctccaaaaaacttggaataaatccaaggaccagtttttacccaaatatatgggtagcacagtttatcacatagaaactccattaatcatctgattttccgaatctgaaaattgagactattaagatattaggatttcagagatttcaagtcacattataatgataagcattattcataaaacttgttacctttaagaaggtggaagtggcaaaccatacttcttttttttcctctgatgtgaatccagcctcagactgagtgaactgtaataattatgaattcattacagagtccaggtggcctgcagttgaagatcatcaaccatttttgcctcacttaattccagccttttgttttctgctggaaaataagtgtggacattgaagcttgagctctcaaagcagttggctggaatacttttgtcagaatacggtacatttctattacatcagaaatatattttcatctcttcttgttaaattgggaggaaatttatgatagcaattatgaagattgttttatgacattcttttgtcagtttggctttctaaaaatctctttttagattatttctcctgttgaacatagtaaaactattgaatttctcttaagaattcctaataggtcaatagatttaccctccagtgatatctatattatttctttctcgtctcatcaaaatgatgacaggtaaactatatttttccttaaacacctattacagttaaattatgcaaatcattaaataaaaatcatacaacttttggaaagttagttcaacatgaactaaaatggcatgctatttggaaatttagtttgagataaactaaagtgtgttgatgccagaatgttcagcttcagtaaatataataagctcttgtgccttgtatgcactatttaaaaaaagttttttttatttgagtccagtataattcatgtaaatgttaacaattagaataatactctgtatgcttttttgatactgattttgagaatttaaagcagattaccttttaaaactggaccaactaagtaattggtatttaatcaaagagaaaatggtaataaacttttcaaaatctttgttaaaccaaacattcaacacaaaataaactagaaggccagaggataatggaataaaagatcattgcaattacttatccttcctaaaaatatagttttatattaattgtgcttatggaagaaacaatgtcagccaagtccattttatagtttgagtgcaattctttgaacaatagaaatatctgcagtctttcacagatttgtattatgctgaagagtttcatctgacaatctgcttcaagaaatctcagaaaatatgataacattttaactttcattttagagcacgttttggtcatttttaaaaatacctaaagtgccagaccggaacctatagctactgctagaagtcttaaaaaaaccaacagcagcacaggatgtattaagaattatatgaagtcaggtttgtttttttttttttttttttttcaaagcacagtactgttagctgtttttgtggacaggattcgattaagtattccctcttgtcaaactggaagctaggggaaaaagagggatttttatcctttactcttctagagtactgttaatgcccctttcccacagtcttttatataattaaatatatgtcaatacacattagaatcagatttgaaaaagttaaaacaatttcattgttgtaattgttccctttctgttttcatatagtgaataacctttaaagggttgttttgttttgttttgaattataggagttataatctttggagatgattgcatatctcattagatatgcaatataaatttatctgagtgaacaaagtgctaaataaatagatctacattttgtacatatttatataaaatttacctttaagtatttactttaaaaaatttaatggcttaactcgaacttgaagacacatacttcaactgtccttattgtccattaaactgataattttgatttttcttgcttttatagattttactatataggaatcaagatttaagaaattttgcattaaaaatagtgtaccaatgcttcatatacgttagttatttgctattatgtagggaagaggattgttatttcaaagatatattaaagaacagttgcatctgaatataatcatgatgcattcaatgaagttcatatccatgaattcactcctaatataccctaataaagtggttgatcacctacattatctgtctataagaaactgcctttgcactgacaatgtaaattattttaagcataaattttcctaatagtttattagagctactaatggcaaaattcatgtcttcaatgtggccataacataggtcttgggaggggtggtgagaaaataaggtatttactttgtagtagttaagtgattctgaggacaattagaaacagactataaaactcaactacactgtaatcaatagacaactattggaaatatggcatatgttgacaaacacttaactagggaaatcaaagatataaatcatgtttataaaaaattaggcacgcaatcatgtgattcatgcttcaagaaaatatatgaaaaaagtgttactccattatgttataaactagcagattttccctattttgaaatgcatgtaaacgggctcggctgattctgaaattgtactgtatcatttggtatttacttatatggtcaaatacttgtttgtaaaagtgatggttctgatacctttgatcaaacatagatacaaacctcagaaaatggtaaatgcaaagcagtttacgttgtaaatcatgatggtgtcctccagcacaaccatcccacccacacacctagactacagattctgatctgtgaatattttcaccaaagtgacatttaaacaagtggatttttcacaaataacacgtgtttaatatctttctgcagaaacgtgttcttctaaagcagaaaaccacgtggcttaatcccaaatgttttacacttcttttccacatacttagccagttcagcaccgatttcctcttatatgtggaaggagactatgttacatacctgaagtattactcttttacaaagataccattagaattttctcactgtcttggtaaaaattcctagattctactttttattgcaagtgttagcaatatgatcttgtaacgccatgaaaagcattaagtagaagccaacattaacctagattttacaactgagcaatctgttccccaccagatttcctttagaatttattaccaaaggatcttattttgttacagaacacaggaaattgttaaaccttataatgttgcaaaccatgcattttccttttctcttttccataagatttttttattgtagtagtgccctggcttgtaaacagtggacatcactgaaaggatgaaatcaagtaggcttgtttcaaagagactcctgtgaatcaactatgaatatgaagtatctcccagaacaatgttgagtgtttcaggagactctgaaacagggcacccattttttttttccttcctcaaaatagtctccttgaaatgtgagcaaagaactatgatgatgcagtccaggtatctaatagctcaatcaccaacaccgctgagaattgttcttataccagcaaaaagttcaaatacaataacctgggcaatgccaacagaagacacttttaatcatttgcagacctttcttgttgcaggaaagtgagggcaaaaacaaactggtgaaaaatgttcaaaaatagatctttttgatgttcatagccagtattcagtatttctgtattgtttacaattgggggaaaatgtctgttaaggctaatcatctgagtgatttgagtagcaattaaaccaaagggaaacttttaataagttattttaagccctggtttatggctagttcccttttgctcaggaaaaatagtactactttatggtttatgaaaacctatgatttatgttgcatcttccggggaaggtttaacagtacaaggagctgaatcctacctgaaattattaatgcttaatatattgcttctgtttgattgataaaggtgcttaatcaattgaaaaaaaaacgcataatgcttcaaggtaaaattccgttgattctgaatttaaaaagatactacagaatgcgtcagttctcctgttgtatttttctcagttatgagagcaaggctattttgtcagtttagattttgtgtctttttctgtcagtatgtatggctccctaattgaaaacatcttaaatgaactaatcaaacactta

SEQ ID NO: 190801 - protein, 722 aa, Artificial Sequence
  derived and/or modified sequence
MPLHQLGDKPLTFPSPNSAMENGLDHTPPSRRASPGTPLSPGSLRSAAHSPLDTSKQPLCQLWAEKHGARGTHEVRYVSAGQSVACGWWAFAPPCLQVLNTPKGILFFLCAAAFLQGMTVNGFINTVITSLERRYDLHSYQSGLIASSYDIAACLCLTFVSYFGGSGHKPRWLGWGVLLMGTGSLVFALPHFTAGRYEVELDAGVRTCPANPGAVCADSTSGLSRYQLVFMLGQFLHGVGATPLYTLGVTYLDENVKSSCSPVYIAIFYTAAILGPAAGYLIGGALLNIYTEMGRRTELTTESPLWVGAWWVGFLGSGAAAFFTAVPILGYPRQLPGSQRYAVMRAAEMHQLKDSSRGEASNPDFGKTIRDLPLSIWLLLKNPTFILLCLAGATEATLITGMSTFSPKFLESQFSLSASEAATLFGYLVVPAGGGGTFLGGFFVNKLRLRGSAVIKFCLFCTVVSLLGILVFSLHCPSVPMAGVTASYGGSLLPEGHLNLTAPCNAACSCQPEHYSPVCGSDGLMYFSLCHAGCPAATETNVDGQKVYRDCSCIPQNLSSGFGHATAGKCTSTCQRKPLLLVFIFVVIFFTFLSSIPALTATLRCVRDPQRSFALGIQWIVVRILGGIPGPIAFGWVIDKACLLWQDQCGQQGSCLVYQNSAMSRYILIMGLLYKVLGVLFFAIACFLYKPLSESSDGLETCLPSQSSAPDSATDSQLQSSV

SEQ ID NO: 190802 - protein, 582 aa, Artificial Sequence
  derived and/or modified sequence
MPLHQLGDKPLTFPSPNSAMENGLDHTPPSRRASPGTPLSPGSLRSAAHSPLDTSKQPLCQLWAEKHGARGTHEVRYVSAGQSVACGWWAFAPPCLQVLNTPKGILFFLCAAAFLQGMTVNGFINTVITSLERRYDLHSYQSGLIASSYDIAACLCLTFVSYFGGSGHKPRWLGWGVLLMGTGSLVFALPHFTAGRYEVELDAGVRTCPANPGAVCADSTSGLSRYQLVFMLGQFLHGVGATPLYTLGVTYLGMSTFSPKFLESQFSLSASEAATLFGYLVVPAGGGGTFLGGFFVNKLRLRGSAVIKFCLFCTVVSLLGILVFSLHCPSVPMAGVTASYGGSLLPEGHLNLTAPCNAACSCQPEHYSPVCGSDGLMYFSLCHAGCPAATETNVDGQKVYRDCSCIPQNLSSGFGHATAGKCTSTCQRKPLLLVFIFVVIFFTFLSSIPALTATLRCVRDPQRSFALGIQWIVVRILGGIPGPIAFGWVIDKACLLWQDQCGQQGSCLVYQNSAMSRYILIMGLLYKVLGVLFFAIASSRAASDHRPRPPGHGGHSAFPDDRTVPLGDAITRELLFDLQPST

SEQ ID NO: 190803 - protein, 722 aa, Artificial Sequence
  derived and/or modified sequence
MPLHQLGDKPLTFPSPNSAMENGLDHTPPSRRASPGTPLSPGSLRSAAHSPLDTSKQPLCQLWAEKHGARGTHEVRYVSAGQSVACGWWAFAPPCLQVLNTPKGILFFLCAAAFLQGMTVNGFINTVITSLERRYDLHSYQSGLIASSYDIAACLCLTFVSYFGGSGHKPRWLGWGVLLMGTGSLVFALPHFTAGRYEVELDAGVRTCPANPGAVCADSTSGLSRYQLVFMLGQFLHGVGATPLYTLGVTYLDENVKSSCSPVYIAIFYTAAILGPAAGYLIGGALLNIYTEMGRRTELTTESPLWVGAWWVGFLGSGAAAFFTAVPILGYPRQLPGSQRYAVMRAAEMHQLKDSSRGEASNPDFGKTIRDLPLSIWLLLKNPTFILLCLAGATEATLITGMSTFSPKFLESQFSLSASEAATLFGYLVVPAGGGGTFLGGFFVNKLRLRGSAVIKFCLFCTVVSLLGILVFSLHCPSVPMAGVTASYGGSLLPEGHLNLTAPCNAACSCQPEHYSPVCGSDGLMYFSLCHAGCPAATETNVDGQKVYRDCSCIPQNLSSGFGHATAGKCTSTFLYIPQQHSCTNGNSTTGALQETPRSKRACRCVRDPQRSFALGIQWIVVRILGGIPGPIAFGWVIDKACLLWQDQCGQQGSCLVYQNSAMSRYILIMGLLYKVLGVLFFAIACFLYKPLSESSDGLETCLPSQSSAPDSATDSQLQSSV

SEQ ID NO: 190804 - protein, 151 aa, Artificial Sequence
  derived and/or modified sequence
TTALCAARTASCTSHCATQGALQPRRRMWTARRCVRDPQRSFALGIQWIVVRILGGIPGPIAFGWVIDKACLLWQDQCGQQGSCLVYQNSAMSRYILIMGLLYKVLGVLFFAIACFLYKPLSESSDGLETCLPSQSSAPDSATDSQLQSSV

SEQ ID NO: 190805 - DNA, 2169 bp, Artificial Sequence
  derived and/or modified sequence
atgccgttacaccaactaggcgacaagcctcttaccttccctagcccaaatagcgcaatggagaacggactagatcacacccctccctccaggagggcgtcccccggcactcccctttcacccggtagtcttaggtccgcagcacattctcccctggacactagcaagcagcctttatgtcagctctgggctgagaagcatggtgccaggggtactcatgaggttcgctacgtgagcgccggacagtctgttgcttgtggctggtgggcctttgccccaccttgcctgcaggtgctcaatactcctaagggcatcttgttctttctctgcgctgcagcctttctgcaaggcatgacagttaatggctttattaacacagtgataacatccctggaacgcaggtatgatctgcattcctaccagtctggacttatagcctcctcctacgacatcgctgcatgcctgtgtttgaccttcgtgtcatatttcggggggtctggccataagccaaggtggcttgggtggggcgtcctgctcatgggcacgggatctcttgtctttgccttaccccactttactgccggcagatacgaagtggagctcgacgctggggtgaggacgtgccccgcaaatccaggcgctgtttgtgccgactctactagtggcctatcaagatatcagctcgtcttcatgctcgggcagttcttacacggcgtgggcgctacacctttatacacgctcggggtgacatatctggatgagaacgtaaagtcctcgtgctcgccggtgtatattgctattttttataccgctgcgattttaggacccgccgctgggtatctgatcgggggcgcacttcttaacatctacacagagatgggcagacgtaccgaactgacgacagagagtcccttgtgggtgggcgcttggtgggttgggttcctcggctctggtgccgccgcgttcttcaccgctgtcccaattcttggttaccctcggcagctgccaggaagtcagcgttacgcagttatgcgggcagccgagatgcaccagctcaaggatagtagtcgtggggaggcgtctaaccctgatttcggaaagaccatcagggatctgccactttctatttggttgttgctgaagaatcctacgttcatcctgctgtgcctagccggtgctacggaggccactctcatcacggggatgagcacattttctccaaaatttttagagagccagtttagcctttccgctagtgaagctgcaactctttttgggtacctcgtggtgcccgccggtggcggaggcacgtttctgggggggtttttcgtgaataagctaagactgcggggatccgcggtcatcaagttttgtctgttttgcactgtggttagcctgttaggaattctggtcttcagccttcactgcccatctgtgccgatggccggtgtcactgcaagctacggagggtctctgctgccggaaggacatctgaacctgactgccccctgcaatgctgcatgtagttgccaacctgaacactattcccccgtctgcggatctgacggtctgatgtatttttccctttgtcatgctggctgccctgccgcaaccgagacaaatgtagatggccagaaggtttatcgagattgcagctgcattcctcagaacctgtcatccggctttggacatgcaaccgccggaaaatgtacaagcacctgtcagcgcaaacccctgctcctggtgtttatcttcgtcgtgatctttttcacattcttgagctctatcccagccctcaccgccacactgcgctgtgtgagagacccccagcggtcttttgccctcggcattcagtggatagtggtaaggatacttggcggtattcctgggccgatcgcattcggatgggttatcgataaggcttgcctcctctggcaggaccagtgtgggcaacagggatcttgcttagtgtaccaaaacagtgccatgtcacggtacatcttgattatgggcctgttatacaaagttctgggcgtgctgttctttgctatcgcgtgctttctttacaagcccctcagtgaatccagcgacgggctcgagacctgcctgccttctcagagctcagcccccgacagcgctaccgattctcaattacagtccagcgtgtag

SEQ ID NO: 190806 - DNA, 2169 bp, Artificial Sequence
  derived and/or modified sequence
atgcccctgcaccagctgggggacaagcccctgaccttccccagccccaacagcgccatggagaatggcctggaccacaccccacccagcagaagagccagccctggcacccccctgagccctggcagcctgcggtctgctgcccacagccccctggacaccagcaagcagcccctgtgccagctgtgggccgagaagcatggagcccggggcacccatgaggtgcgctacgtgtctgctggccagagcgtggcctgtggctggtgggcctttgccccaccctgcctgcaggtgctgaacacccccaagggcatcctcttcttcctgtgtgccgccgccttcctgcagggcatgacagtgaatggcttcatcaacacagtcatcaccagcctggagaggagatatgacctgcacagctaccagagcggcctgattgccagcagctatgacattgctgcctgcctgtgcctgacctttgtgtcctactttggaggcagcggccacaagccccgctggctgggctggggcgtgctgctgatgggcaccggcagcctggtgtttgccctgccccacttcaccgctggccgctatgaggtggagctggatgctggggtgaggacctgcccagccaaccctggagctgtgtgtgccgacagcaccagcggcctgagccgctaccagctggtgttcatgctgggccagttcctgcatggagtgggcgccacccccctgtacaccctgggcgtgacctacctggatgaaaatgtgaagagcagctgcagccctgtgtacatcgccatcttctacacagctgccatcctgggccctgctgctggctacctgattggaggagccctgctgaacatctacacagagatgggcagaagaacagagctgaccacagagagccccctgtgggtgggcgcctggtgggtgggcttcctgggcagcggggccgccgccttcttcaccgctgtgcccatcctgggctacccccggcagctgcccggcagccagagatatgctgtgatgagagctgctgagatgcaccagctgaaggacagcagcagaggagaggccagcaacccagactttgggaagaccatccgggacctgcccctgagcatctggctgctgctgaagaaccccaccttcatcctgctgtgcctggccggggccacagaggccaccctcatcaccggcatgagcaccttcagccccaagttcctggagagccagttcagcctgagcgccagcgaggccgccaccctgtttggctacctggtggtgcctgctgggggcggcggcaccttcctgggcggcttctttgtgaacaagctgcggctgcggggcagcgctgtgatcaagttctgcctcttctgcaccgtggtgtccctgctgggcatcctggtgttcagcctgcactgccccagcgtgcccatggccggcgtgacagccagctatggaggcagcctgctgcctgagggccacctgaacctgacagccccctgcaatgctgcctgcagctgccagcctgagcactacagccctgtgtgtggcagtgatggcctgatgtacttcagcctgtgccacgccggctgcccagctgccacagagaccaacgtggatggccagaaggtgtacagagactgcagctgcatcccccagaacctgagcagcggcttcggccacgccacagctgggaagtgcaccagcacctgccagaggaagcccctgctgctggtgttcatctttgtggtgatcttcttcaccttcctgagcagcatcccagccctgacagccaccctgcgctgtgtgcgggacccccagaggagctttgccctgggcatccagtggatcgtggtgcgcatcctgggcggcatccctggccccatcgccttcggctgggtgattgacaaggcctgcctgctgtggcaggaccagtgtggccagcagggcagctgcctggtgtaccagaacagcgccatgagccgctacatcctgatcatgggcctgctgtacaaggtgctgggcgtgctcttctttgccatcgcctgcttcctgtacaagcccctgtctgagagcagtgatggcctggagacctgcctgcccagccagagcagcgccccagacagcgccacagacagccagctgcagagctctgtgtag

SEQ ID NO: 190807 - DNA, 2169 bp, Artificial Sequence
  derived and/or modified sequence
atgcccctgcaccagctgggcgacaagcccctgaccttccccagccccaatagtgctatggaaaacgggctggaccacacaccacccagccgacgagcatcccctgggacccccctgagtccagggtccttgcgctccgccgcccacagcccgctcgatactagcaagcaaccactatgtcagctttgggccgaaaagcacggtgccaggggcactcatgaggttcgatatgtgtctgcgggccagtctgttgcttgcggatggtgggcattcgcgccaccttgcctgcaggttttgaatacacccaagggaattctttttttcctatgcgccgccgccttcctacaaggaatgactgtaaatggattcatcaatacagtgatcacgtccctcgagcgacgctacgacctgcactcctaccagtctggactgatcgcttcaagttatgatatagcagcctgtttgtgcctgacgttcgtttcctatttcggaggcagcgggcataaacctcgctggctagggtggggtgtcctgttaatgggaaccggatctttagtgttcgcgttgccccacttcactgcgggtaggtatgaagtggagctcgacgcaggggtgaggacatgcccggccaacccgggcgctgtctgcgcagattcaacctccggcctcagcagataccagttggtcttcatgctgggccagtttctccatggggttggggctactccactatacacgctgggagtgacatacctggacgaaaacgtgaaatcttcttgcagcccagtgtacatcgctatattttatacggccgcaattcttggaccggccgcggggtatctcatcggcggggccctgctgaatatctataccgagatgggcaggcggacagaattgaccactgaatctcccctatgggtgggggcatggtgggtcggcttcctgggctcaggcgctgcagcgttcttcaccgctgtcccaatccttgggtaccccagacaactgcctggaagccaacggtatgccgtaatgagagccgccgaaatgcatcagttgaaggattcttcaagaggtgaagctagtaatccggacttcgggaagacaataagagatctcccacttagtatatggctgctccttaaaaaccccacatttatactgctctgtctggcgggggctacggaagcgaccctcatcacaggcatgtccactttcagccctaagttcctcgaatctcagtttagcctgagcgcctccgaggcagccactctgttcggatacctggtggttcccgccgggggtggaggaactttcctcggaggcttttttgttaacaagctccgtctgaggggctccgccgttattaaattctgcctgttctgtactgttgtttcactgctggggatcctggttttcagcctacattgtcctagcgtgccaatggcgggcgtgacagcctcatatggtggcagtttgctccccgaaggccatttgaaccttacggccccttgcaatgcagcctgcagctgccagcctgagcactatagtcctgtgtgtggttcggatggactgatgtacttctcgctgtgccacgccggctgcccagccgccacagaaactaacgtggatggccagaaggtttaccgcgattgctcatgcataccccagaacttatcatcagggttcggccacgccacagccggaaagtgcacctcgacttgccaaaggaagcccctgctacttgtgttcatttttgtagtgatcttctttacattcctcagctctatccccgccctcactgctaccctgaggtgcgtgagggacccccagcggtcattcgccctcgggattcagtggattgtggttaggatcctaggaggcattcccggaccaattgcatttggctgggtgatcgataaagcttgcctcctttggcaggatcaatgcggacaacagggttcatgcctggtctaccagaactccgctatgtcccggtatatcctgattatgggattgctgtacaaagtgttgggcgtgctgttctttgccatcgcctgtttcctttataagcccttgtccgaaagtagtgatgggttggagacctgtctgccctcccagagctctgcccccgactctgccacagattcccagctgcaatcgagtgtatag

SEQ ID NO: 190808 - DNA, 2169 bp, Artificial Sequence
  derived and/or modified sequence
atgcctctgcaccagctcggcgacaaacctctgaccttccccagtcccaatagcgctatggaaaacggtctcgatcatacccccccatcacgccgagctagtccaggaactcccctgtcacccggatccctgcgaagcgccgctcattccccgctagacacatctaaacagccactctgtcaattgtgggccgaaaaacatggagctcgcggtacccatgaggtgagatacgtttcagctgggcagtcggtggcctgcggctggtgggccttcgccccaccatgcctgcaggtgttgaacacaccgaagggaattctgtttttcctttgcgctgcagccttccttcaaggcatgacagtcaacggcttcattaacactgtgataacaagtttggagcgtagatatgacctccactcttaccaaagtggattgatcgcctccagctatgacattgccgcatgcctgtgcctgacatttgtctcctatttcggcggttcggggcacaagccacggtggctcggatggggcgtgttgcttatgggaacaggatctctcgtgttcgctctgcctcacttcactgcaggccgatacgaagttgagttagatgctggtgttcggacgtgccctgccaaccctggcgcagtgtgcgccgattctacatcaggactgtcacggtaccagctggtgttcatgctgggccagttccttcacggcgtgggtgcaaccccactgtatactcttggcgtgacttacctggacgagaatgttaaaagctcctgcagcccagtctacatcgccatattctacacagctgcaattttgggaccggctgctggttatttgatcggcggagccctacttaacatttatacggaaatggggaggagaaccgagttgactacagaatcccccctttgggttggagcctggtgggtaggttttttgggtagtggcgctgcagcttttttcaccgcagttcccatccttggatatccgaggcagctccccggatcacaacgctacgctgtcatgagggccgcagagatgcaccagctgaaggattcttccaggggcgaggcctctaacccagatttcgggaaaacgatccgtgacctgcctctgagtatctggctccttctcaaaaatccgacgttcattcttctgtgcctggctggagcaaccgaggccacacttatcacgggtatgtccacattcagcccaaagtttctggagagccagttctcactgagcgcttctgaagcagctactctgttcggttacctggtcgttcctgcgggaggagggggtaccttcttgggtggtttcttcgttaacaaactccgcttgcgtggctcggcagttataaagttctgtctgttctgcacagtggtaagcctgctgggcatcctcgtgttttctctccattgcccatccgtgcccatggctggcgtgacagcctcatatgggggaagcctgctgcctgaggggcacctcaacctgactgccccttgcaacgccgcatgttcatgccagcccgagcactacagtccagtctgtggctccgacggccttatgtactttagcctgtgtcatgccggttgtcctgctgctacagaaacaaacgtggacgggcaaaaggtgtatcgcgactgcagttgcattccacagaacttatcaagcggatttggccatgccacagccggaaagtgtacctccacatgtcagaggaagcctcttctcctggtcttcatcttcgtggttatttttttcacttttctgtcttccattcctgctctcaccgctacccttcgatgcgtgcgagacccccagcggagctttgctctgggcatacagtggattgtcgtgcgtatactggggggaattcccggaccgattgcctttggatgggtgattgacaaagcctgcttgttatggcaggatcagtgtggccagcagggctcctgcctggtgtaccaaaatagcgcaatgagtcggtacattctgattatgggactgctttataaggtcctgggagtccttttctttgccatcgcctgctttttatataaacccctgagtgaaagctcggatgggttggaaacttgtctcccttctcagtctagtgcccctgactcagccactgattcgcagctgcagtcttctgtttag

SEQ ID NO: 190809 - DNA, 2169 bp, Artificial Sequence
  derived and/or modified sequence
atgcccctgcaccagctgggcgacaagcccctgaccttccccagccccaacagcgccatggagaacggcctggaccacaccccccccagcagaagagccagccccggcacccccctgagccccggcagcctgagaagcgccgcccacagccccctggacaccagcaagcagcccctgtgccagctgtgggccgagaagcacggcgccagaggcacccacgaggtgagatacgtgagcgccggccagagcgtggcctgcggctggtgggccttcgcccccccctgcctgcaggtgctgaacacccccaagggcatcctgttcttcctgtgcgccgccgccttcctgcagggcatgaccgtgaacggcttcatcaacaccgtgatcaccagcctggagagaagatacgacctgcacagctaccagagcggcctgatcgccagcagctacgacatcgccgcctgcctgtgcctgaccttcgtgagctacttcggcggcagcggccacaagcccagatggctgggctggggcgtgctgctgatgggcaccggcagcctggtgttcgccctgccccacttcaccgccggcagatacgaggtggagctggacgccggcgtgagaacctgccccgccaaccccggcgccgtgtgcgccgacagcaccagcggcctgagcagataccagctggtgttcatgctgggccagttcctgcacggcgtgggcgccacccccctgtacaccctgggcgtgacctacctggacgagaacgtgaagagcagctgcagccccgtgtacatcgccatcttctacaccgccgccatcctgggccccgccgccggctacctgatcggcggcgccctgctgaacatctacaccgagatgggcagaagaaccgagctgaccaccgagagccccctgtgggtgggcgcctggtgggtgggcttcctgggcagcggcgccgccgccttcttcaccgccgtgcccatcctgggctaccccagacagctgcccggcagccagagatacgccgtgatgagagccgccgagatgcaccagctgaaggacagcagcagaggcgaggccagcaaccccgacttcggcaagaccatcagagacctgcccctgagcatctggctgctgctgaagaaccccaccttcatcctgctgtgcctggccggcgccaccgaggccaccctgatcaccggcatgagcaccttcagccccaagttcctggagagccagttcagcctgagcgccagcgaggccgccaccctgttcggctacctggtggtgcccgccggcggcggcggcaccttcctgggcggcttcttcgtgaacaagctgagactgagaggcagcgccgtgatcaagttctgcctgttctgcaccgtggtgagcctgctgggcatcctggtgttcagcctgcactgccccagcgtgcccatggccggcgtgaccgccagctacggcggcagcctgctgcccgagggccacctgaacctgaccgccccctgcaacgccgcctgcagctgccagcccgagcactacagccccgtgtgcggcagcgacggcctgatgtacttcagcctgtgccacgccggctgccccgccgccaccgagaccaacgtggacggccagaaggtgtacagagactgcagctgcatcccccagaacctgagcagcggcttcggccacgccaccgccggcaagtgcaccagcacctgccagagaaagcccctgctgctggtgttcatcttcgtggtgatcttcttcaccttcctgagcagcatccccgccctgaccgccaccctgagatgcgtgagagacccccagagaagcttcgccctgggcatccagtggatcgtggtgagaatcctgggcggcatccccggccccatcgccttcggctgggtgatcgacaaggcctgcctgctgtggcaggaccagtgcggccagcagggcagctgcctggtgtaccagaacagcgccatgagcagatacatcctgatcatgggcctgctgtacaaggtgctgggcgtgctgttcttcgccatcgcctgcttcctgtacaagcccctgagcgagagcagcgacggcctggagacctgcctgcccagccagagcagcgcccccgacagcgccaccgacagccagctgcagagcagcgtgtag

SEQ ID NO: 190810 - DNA, 2169 bp, Artificial Sequence
  derived and/or modified sequence
atgcccctgcaccagctgggcgacaagcccctgaccttccccagccccaacagcgccatggagaacggcctggaccacaccccccccagcagaagagccagccccggcacccccctgagccccggcagcctgagaagcgccgcccacagccccctggacaccagcaagcagcccctgtgccagctgtgggccgagaagcacggcgccagaggcacccacgaggtgagatacgtgagcgccggccagagcgtggcctgcggctggtgggccttcgcccccccctgcctgcaggtgctgaacacccccaagggcatcctgttcttcctgtgcgccgccgccttcctgcagggcatgaccgtgaacggcttcatcaacaccgtgatcaccagcctggagagaagatacgacctgcacagctaccagagcggcctgatcgccagcagctacgacatcgccgcctgcctgtgcctgaccttcgtgagctacttcggcggcagcggccacaagcccagatggctgggctggggcgtgctgctgatgggcaccggcagcctggtgttcgccctgccccacttcaccgccggcagatacgaggtggagctggacgccggcgtgagaacctgccccgccaaccccggcgccgtgtgcgccgacagcaccagcggcctgagcagataccagctggtgttcatgctgggccagttcctgcacggcgtgggcgccacccccctgtacaccctgggcgtgacctacctggacgagaacgtgaagagcagctgcagccccgtgtacatcgccatcttctacaccgccgccatcctgggccccgccgccggctacctgatcggcggcgccctgctgaacatctacaccgagatgggcagaagaaccgagctgaccaccgagagccccctgtgggtgggcgcctggtgggtgggcttcctgggcagcggcgccgccgccttcttcaccgccgtgcccatcctgggctaccccagacagctgcccggcagccagagatacgccgtgatgagagccgccgagatgcaccagctgaaggacagcagcagaggcgaggccagcaaccccgacttcggcaagaccatcagagacctgcccctgagcatctggctgctgctgaagaaccccaccttcatcctgctgtgcctggccggcgccaccgaggccaccctgatcaccggcatgagcaccttcagccccaagttcctggagagccagttcagcctgagcgccagcgaggccgccaccctgttcggctacctggtggtgcccgccggcggcggcggcaccttcctgggcggcttcttcgtgaacaagctgagactgagaggcagcgccgtgatcaagttctgcctgttctgcaccgtggtgagcctgctgggcatcctggtgttcagcctgcactgccccagcgtgcccatggccggcgtgaccgccagctacggcggcagcctgctgcccgagggccacctgaacctgaccgccccctgcaacgccgcctgcagctgccagcccgagcactacagccccgtgtgcggcagcgacggcctgatgtacttcagcctgtgccacgccggctgccccgccgccaccgagaccaacgtggacggccagaaggtgtacagagactgcagctgcatcccccagaacctgagcagcggcttcggccacgccaccgccggcaagtgcaccagcaccttcctgtacatcccccagcagcacagctgcaccaacggcaacagcaccaccggcgccctgcaggagacccccagaagcaagagagcctgcagatgcgtgagagacccccagagaagcttcgccctgggcatccagtggatcgtggtgagaatcctgggcggcatccccggccccatcgccttcggctgggtgatcgacaaggcctgcctgctgtggcaggaccagtgcggccagcagggcagctgcctggtgtaccagaacagcgccatgagcagatacatcctgatcatgggcctgctgtacaaggtgctgggcgtgctgttcttcgccatcgcctgcttcctgtacaagcccctgagcgagagcagcgacggcctggagacctgcctgcccagccagagcagcgcccccgacagcgccaccgacagccagctgcagagcagcgtgtag

SEQ ID NO: 190811 - DNA, 456 bp, Artificial Sequence
  derived and/or modified sequence
accaccgccctgtgcgccgccagaaccgccagctgcaccagccactgcgccacccagggcgccctgcagcccagaagaagaatgtggaccgccagaagatgcgtgagagacccccagagaagcttcgccctgggcatccagtggatcgtggtgagaatcctgggcggcatccccggccccatcgccttcggctgggtgatcgacaaggcctgcctgctgtggcaggaccagtgcggccagcagggcagctgcctggtgtaccagaacagcgccatgagcagatacatcctgatcatgggcctgctgtacaaggtgctgggcgtgctgttcttcgccatcgcctgcttcctgtacaagcccctgagcgagagcagcgacggcctggagacctgcctgcccagccagagcagcgcccccgacagcgccaccgacagccagctgcagagcagcgtgtag

SEQ ID NO: 190812 - DNA, 1863 bp, Artificial Sequence
  derived and/or modified sequence
atgcccctgcaccagctgggcgacaagcccctgaccttccccagccccaacagcgccatggagaacggcctggaccacaccccccccagcagaagagccagccccggcacccccctgagccccggcagcctgagaagcgccgcccacagccccctggacaccagcaagcagcccctgtgccagctgtgggccgagaagcacggcgccagaggcacccacgaggtgagatacgtgagcgccggccagagcgtggcctgcggctggtgggccttcgcccccccctgcctgcaggtgctgaacacccccaagggcatcctgttcttcctgtgcgccgccgccttcctgcagggcatgaccgtgaacggcttcatcaacaccgtgatcaccagcctggagagaagatacgacctgcacagctaccagagcggcctgatcgccagcagctacgacatcgccgcctgcctgtgcctgaccttcgtgagctacttcggcggcagcggccacaagcccagatggctgggctggggcgtgctgctgatgggcaccggcagcctggtgttcgccctgccccacttcaccgccggcagatacgaggtggagctggacgccggcgtgagaacctgccccgccaaccccggcgccgtgtgcgccgacagcaccagcggcctgagcagataccagctggtgttcatgctgggccagttcctgcacggcgtgggcgccacccccctgtacaccctgggcgtgacctacctggacgagaacgtgaagagcagctgcagccccgtgtacatcgccatcttctacaccgccgccatcctgggccccgccgccggctacctgatcggcggcgccctgctgaacatctacaccgagatgggcagaagaaccgagctgaccaccgagagccccctgtgggtgggcgcctggtgggtgggcttcctgggcagcggcgccgccgccttcttcaccgccgtgcccatcctgggctaccccagacagctgcccggcagccagagatacgccgtgatgagagccgccgagatgcaccagctgaaggacagcagcagaggcgaggccagcaaccccgacttcggcaagaccatcagagacctgcccctgagcatctggctgctgctgaagaaccccaccttcatcctgctgtgcctggccggcgccaccgaggccaccctgatcaccggcatgagcaccttcagccccaagttcctggagagccagttcagcctgagcgccagcgaggccgccaccctgttcggctacctggtggtgcccgccggcggcggcggcaccttcctgggcggcttcttcgtgaacaagctgagactgagaggcagcgccgtgatcaagttctgcctgttctgcaccgtggtgagcctgctgggcatcctggtgttcagcctgcactgccccagcgtgcccatggccggcgtgaccgccagctacggcggcagcctgctgcccgagggccacctgaacctgaccgccccctgcaacgccgcctgcagctgccagcccgagcactacagccccgtgtgcggcagcgacggcctgatgtacttcagcctgtgccacgccggctgccccgccgccaccgagaccaacgtggacggccagaaggtgagcggcgccgccgcctacagaccctgcccccccctggaccccggcaagggccccccctgcctgcccctggtgatcggcgccatcgtgggcctgcccagatgcaccgagaccgtggccgtgagcctgagaatcttccccctggtgctggccatgcccctgcagggcaacgccctgcagctggtgagagagagccccagcttctggttcagctacagcctgtag

SEQ ID NO: 190813 - DNA, 2169 bp, Artificial Sequence
  derived and/or modified sequence
atgccacttcaccagctgggggataaaccactcacttttccaagccccaactcagccatggagaatggactggatcacactcccccctctcgcagagcgagcccaggaacaccactgtccccaggctctttacgcagcgccgctcactctcccctggacaccagtaaacaacctttgtgtcagttgtgggccgaaaagcatggcgcccggggcacacatgaggtgaggtatgtctcagcaggccagagcgtcgcttgcggatggtgggctttcgctcccccctgtctacaggtgctgaacacgccaaagggcatcttgtttttcctgtgtgcggctgctttcctgcagggcatgactgtcaacggctttataaataccgtgatcacttcgcttgagcgtaggtacgatcttcactcctaccaatctggcctcattgcgtcgagctacgacatagccgcttgcctgtgcctgactttcgtgtcttacttcggaggtagcgggcataaacctaggtggttgggatggggcgtcctgctgatgggcaccgggtcattggtcttcgcactgccccacttcaccgccgggagatacgaggtggaactcgatgccggcgtgcgcacgtgtcctgcgaacccaggagccgtatgtgctgatagcacaagcgggttgtctcgataccagcttgtatttatgctggggcagtttctgcacggcgtcggggccacaccactgtacaccttgggtgtgacatatctggatgaaaatgtcaagtcatcttgtagtcccgtctacatcgcgattttttataccgcagcaattctgggccctgctgcgggctatctgatcggcggtgcactgctgaacatctacaccgaaatgggccgccgcactgagctcaccaccgagtctcccttgtgggtcggcgcttggtgggttggctttttgggctccggcgcagcagccttctttacagctgttcccatccttggctatccgagacagctccctggcagccagcgctacgccgtgatgcgggctgctgagatgcaccagcttaaggatagcagtagaggtgaagccagcaacccggacttcggcaaaaccatccgtgatctgccattgtccatctggcttctgctgaagaaccctacattcattctgctctgtctcgctggcgccaccgaagctactcttattacaggcatgtctactttctctccaaagttcctggaatctcaattctctctctcagctagcgaagccgctactctctttggctatctggtcgtccccgcgggtgggggggggacttttctcggcggctttttcgtaaataaactgcgcctgcgggggagcgctgttattaagttctgccttttctgcaccgtcgtttccctgctaggcatcctggtgttctcccttcattgcccatctgttcctatggcaggtgttactgcgagttatggcgggagcctgctacccgagggtcaccttaacctgacagcaccctgtaacgcagcatgcagctgccagcctgagcattactcccctgtctgcgggagtgacggactgatgtacttctccctgtgtcacgctggttgtccagccgcaacagaaacaaacgtggacggtcagaaggtctatcgcgactgcagttgtatcccgcagaatctgtcaagtgggttcggacatgccacagcaggcaaatgcaccagcacctgccagaggaaacctctgttgctcgtgttcatatttgtggtaatcttctttacctttctaagctcgatccccgccctgactgcgaccttgcggtgcgtgcgggatcctcagaggtcttttgcactcggaatacaatggattgtggtgcgcattctgggcggaattcccgggcccatagcatttggttgggtaatcgacaaagcctgtctcctgtggcaggatcaatgtgggcagcagggttcctgtctcgtgtaccagaattccgctatgtccagatacattctaatcatgggattgctctacaaggtcctgggcgttctgtttttcgcaatagcgtgcttcttgtacaaaccactctcagaaagctccgacggactggaaacatgcctaccaagtcagtcttccgcacctgatagtgcaactgattcacagttacaaagttctgtttag

SEQ ID NO: 190814 - DNA, 2169 bp, Artificial Sequence
  derived and/or modified sequence
atgcctctgcaccagctgggcgataaaccactcactttccccagcccaaattctgctatggaaaatggcttggaccacacacctccatcccgtcgcgcctcccccggtacacctttgagccctggaagtttgagatcagccgcccactctcccctggatacttctaagcaaccactgtgccagctgtgggcagagaagcacggtgctcggggaacccatgaggtcagatacgttagtgccggccagagcgtggcgtgtggctggtgggcctttgctcctccgtgccttcaggtgctaaatacaccaaaggggattctctttttcctgtgtgctgccgcttttcttcaaggaatgacagttaacggtttcataaatacagtgatcacttccctagagaggcgctatgacctgcactcatatcaatccggtcttattgctagttcctacgacatcgcagcgtgtttgtgcctgaccttcgtcagttacttcggcggcagtggacacaaaccaaggtggttaggatggggagtgctcttaatgggcaccggttctctcgtcttcgctctgccgcatttcacggctggcagatatgaagtggaattagatgctggggtgcgcacctgtccagctaaccctggggccgtgtgtgccgacagtacaagcgggctctcgcggtaccaattggtttttatgctgggccagttcctccatggggtgggggctaccccgttgtacactttgggggtgacatacctggacgagaacgtgaagagctcttgctcccctgtgtatattgcgatcttttacaccgccgccatcctggggcccgcagctgggtaccttatcggaggagcccttttaaacatttacacagagatgggccgaaggacagagctgacgacagagtctcctctctgggtaggagcgtggtgggtcggtttcttaggatctggggcggctgccttttttaccgccgtacctattctcggatacccaaggcagctaccagggagtcagcggtacgccgtgatgagggctgctgagatgcatcagctaaaagactcatctagaggagaagctagcaatccggattttggtaaaacaatccgcgatttgccactctccatttggctgctcctaaaaaaccctacttttatcctgttgtgtctggcgggagccacggaggcaaccctgatcacaggcatgagtaccttctcgcccaagttcttagaatcccagttttcattgtccgcttctgaagccgctacactcttcggctaccttgtggtacctgccggtggtgggggaaccttccttggcggcttcttcgtaaacaagcttagattgagaggttcagccgtgatcaagttctgtctattttgcacggtggttagcttactcggaattttggttttcagtctccactgtccttccgtgccgatggcaggggtcactgcttcgtacggtggctctctgctgcccgagggacacctaaatttaaccgccccttgcaacgcggcctgtagttgccagccggagcattactcccctgtatgtggttctgatgggctgatgtacttctcattatgtcatgccggatgtcctgccgcgaccgagactaatgtcgatggtcagaaagtgtaccgagattgtagctgtattccacaaaacctaagtagcggttttggccatgctactgcgggcaaatgcacgtccacgttcctgtacataccacaacagcattcttgtacaaatggtaactccacaaccggcgctcttcaggagacccccaggtccaagcgggcctgccgatgtgtgcgggatccacaacgctctttcgccctagggatacagtggatcgtggtgagaatactcggtggaatccctggccctatcgcttttgggtgggtgatcgacaaagcatgtcttttgtggcaagatcagtgtggccagcaaggttcgtgtctcgtgtaccagaacagtgccatgtctaggtacattctcattatggggctgctctataaggtgctgggagtgttgttttttgctattgcttgtttcctctataagcccctctcagaatcctctgacggactcgaaacgtgcttgccaagtcaatctagtgcgccggatagtgccactgactcccagctgcagtcttcagtgtag

SEQ ID NO: 190815 - DNA, 456 bp, Artificial Sequence
  derived and/or modified sequence
actacagctctctgtgccgcaaggacagcgagctgtacctcccattgtgccacacagggggctctgcaacccagaagacggatgtggaccgctcgtcgttgtgtgcgggatccacagcggtctttcgctctcggtatccagtggattgtggtgcgaattctgggaggcattccaggccctattgccttcggctgggtcatcgataaagcttgcttgctttggcaagatcaatgtgggcagcaggggagctgcctggtatatcagaatagtgccatgagtcgttatatccttatcatgggtctgctgtataaggtgctgggtgtgctgttctttgctattgcatgtttcctgtataagccgcttagtgagtcttccgatggcctggagacctgtctgccctctcagtcctcggctccagactccgcgacggattcgcagttacagtccagcgtgtag

SEQ ID NO: 190816 - DNA, 1863 bp, Artificial Sequence
  derived and/or modified sequence
atgcctcttcatcaactgggggacaagcccctcacatttccatcgcctaatagtgctatggagaatggactagaccacacacccccaagccggcgcgctagtcccggaactcccctgtctcccggatccctgcggtccgccgctcattctccgttagatacatccaaacagcccctatgccagttatgggccgaaaagcatggcgcccggggaacccacgaagtgagatacgtgtcagccggtcaatccgtcgcctgtgggtggtgggcgtttgcccctccttgccttcaggtgcttaacacccccaagggaatcttattctttctctgcgctgctgccttcctgcagggtatgacagtgaacggatttattaatacagtgattacatccctcgagcgacgatatgatctgcacagctaccagagcggcttaattgcgtctagttacgacattgcagcatgcctgtgccttacttttgttagttatttcggaggttctgggcacaagccccgttggttgggatggggggttcttctcatgggtaccgggagtcttgtttttgctctaccccacttcaccgccggtcggtacgaagtcgaactagacgccggggtccgcacgtgtcccgctaacccgggtgcggtttgcgccgactccactagcggactttctagatatcagctggtgttcatgttggggcaattcctgcacggcgtgggcgcaacccctttgtatacactgggtgtgacctacctggacgagaacgtgaagtcctcctgctcccctgtgtatattgccatattctatactgccgcaattctgggccctgctgctggatatcttatcggaggggccctgctcaacatctacacggagatgggccgaagaacagagctgaccacagaaagccctctgtgggtcggggcctggtgggtcgggttcctggggtctggtgccgcggctttcttcacagcagttcccatcctgggctatcctcgccagctgcctggtagtcaacgctacgccgttatgcgggctgcagaaatgcatcaactgaaggattcttcccgcggagaggcttcgaatcccgattttggcaaaactatcagggacctccctttgagcatctggcttttgctgaagaatccaactttcattcttttgtgcctagccggggcaacagaggcaacactcattaccggtatgtcgacattcagcccaaagttcttggagtcccagttttccctctccgcctcagaggcagctacgctttttggataccttgtcgtgccagcgggaggcgggggaaccttcttggggggcttttttgttaataagttgaggctgcggggcagcgccgtcattaagttctgtctgttttgtaccgtggtgtcactacttggaattctggtgttctctctgcattgccccagcgtcccaatggctggcgtgactgcatcttacgggggatctctcttaccagaaggccatctaaatctcacagcaccatgtaacgcagcttgcagctgtcagccagaacattattcgcctgtttgtggatcggacgggctgatgtacttcagcctatgccacgcaggctgccctgcggctacagagaccaatgtcgacggacagaaggtatccggggccgcagcctacaggccttgccctcccctcgatcctggcaaagggcctccttgcctgccgctggtgattggagcgatcgtagggctcccacgatgtaccgaaacagtggccgtgagcctgcgcatcttccccctggttctggccatgcctctccaggggaatgcgcttcagctggtacgggagagcccttccttttggtttagctatagcctgtag

SEQ ID NO: 190817 - DNA, 2169 bp, Artificial Sequence
  derived and/or modified sequence
atgcccctgcaccagctgggggacaagcccctgaccttccccagccccaacagcgccatggagaatggcctggaccacaccccacccagcagaagagccagccctggcacccccctgagccctggcagcctgcggtctgctgcccacagccccctggacaccagcaagcagcccctgtgccagctgtgggccgagaagcatggagcccggggcacccatgaggtgcgctacgtgtctgctggccagagcgtggcctgtggctggtgggcctttgccccaccctgcctgcaggtgctgaacacccccaagggcatcctcttcttcctgtgtgccgccgccttcctgcagggcatgacagtgaatggcttcatcaacacagtcatcaccagcctggagaggagatatgacctgcacagctaccagagcggcctgattgccagcagctatgacattgctgcctgcctgtgcctgacctttgtgtcctactttggaggcagcggccacaagccccgctggctgggctggggcgtgctgctgatgggcaccggcagcctggtgtttgccctgccccacttcaccgctggccgctatgaggtggagctggatgctggggtgaggacctgcccagccaaccctggagctgtgtgtgccgacagcaccagcggcctgagccgctaccagctggtgttcatgctgggccagttcctgcatggagtgggcgccacccccctgtacaccctgggcgtgacctacctggatgaaaatgtgaagagcagctgcagccctgtgtacatcgccatcttctacacagctgccatcctgggccctgctgctggctacctgattggaggagccctgctgaacatctacacagagatgggcagaagaacagagctgaccacagagagccccctgtgggtgggcgcctggtgggtgggcttcctgggcagcggggccgccgccttcttcaccgctgtgcccatcctgggctacccccggcagctgcccggcagccagagatatgctgtgatgagagctgctgagatgcaccagctgaaggacagcagcagaggagaggccagcaacccagactttgggaagaccatccgggacctgcccctgagcatctggctgctgctgaagaaccccaccttcatcctgctgtgcctggccggggccacagaggccaccctcatcaccggcatgagcaccttcagccccaagttcctggagagccagttcagcctgagcgccagcgaggccgccaccctgtttggctacctggtggtgcctgctgggggcggcggcaccttcctgggcggcttctttgtgaacaagctgcggctgcggggcagcgctgtgatcaagttctgcctcttctgcaccgtggtgtccctgctgggcatcctggtgttcagcctgcactgccccagcgtgcccatggccggcgtgacagccagctatggaggcagcctgctgcctgagggccacctgaacctgacagccccctgcaatgctgcctgcagctgccagcctgagcactacagccctgtgtgtggcagtgatggcctgatgtacttcagcctgtgccacgccggctgcccagctgccacagagaccaacgtggatggccagaaggtgtacagagactgcagctgcatcccccagaacctgagcagcggcttcggccacgccacagctgggaagtgcaccagcaccttcctgtacatcccccagcagcacagctgcaccaatggaaacagcaccaccggggccctgcaggagacccccaggagcaagagggcctgccgctgtgtgcgggacccccagaggagctttgccctgggcatccagtggatcgtggtgcgcatcctgggcggcatccctggccccatcgccttcggctgggtgattgacaaggcctgcctgctgtggcaggaccagtgtggccagcagggcagctgcctggtgtaccagaacagcgccatgagccgctacatcctgatcatgggcctgctgtacaaggtgctgggcgtgctcttctttgccatcgcctgcttcctgtacaagcccctgtctgagagcagtgatggcctggagacctgcctgcccagccagagcagcgccccagacagcgccacagacagccagctgcagagctctgtgtag

SEQ ID NO: 190818 - DNA, 456 bp, Artificial Sequence
  derived and/or modified sequence
accacagccctgtgtgccgccaggacagccagctgcaccagccactgtgccacccagggcgccctgcagcccaggaggaggatgtggacagcccggcgctgtgtgcgggacccccagaggagctttgccctgggcatccagtggatcgtggtgcgcatcctgggcggcatccctggccccatcgccttcggctgggtgattgacaaggcctgcctgctgtggcaggaccagtgtggccagcagggcagctgcctggtgtaccagaacagcgccatgagccgctacatcctgatcatgggcctgctgtacaaggtgctgggcgtgctcttctttgccatcgcctgcttcctgtacaagcccctgtctgagagcagtgatggcctggagacctgcctgcccagccagagcagcgccccagattctgccacagacagccagctgcagagctctgtgtag

SEQ ID NO: 190819 - DNA, 1863 bp, Artificial Sequence
  derived and/or modified sequence
atgcccctgcaccagctgggggacaagcccctgaccttccccagccccaacagcgccatggagaatggcctggaccacaccccacccagcagaagagccagccctggcacccccctgagccctggcagcctgcggtctgctgcccacagccccctggacaccagcaagcagcccctgtgccagctgtgggccgagaagcatggagcccggggcacccatgaggtgcgctacgtgtctgctggccagagcgtggcctgtggctggtgggcctttgccccaccctgcctgcaggtgctgaacacccccaagggcatcctcttcttcctgtgtgccgccgccttcctgcagggcatgacagtgaatggcttcatcaacacagtcatcaccagcctggagaggagatatgacctgcacagctaccagagcggcctgattgccagcagctatgacattgctgcctgcctgtgcctgacctttgtgtcctactttggaggcagcggccacaagccccgctggctgggctggggcgtgctgctgatgggcaccggcagcctggtgtttgccctgccccacttcaccgctggccgctatgaggtggagctggatgctggggtgaggacctgcccagccaaccctggagctgtgtgtgccgacagcaccagcggcctgagccgctaccagctggtgttcatgctgggccagttcctgcatggagtgggcgccacccccctgtacaccctgggcgtgacctacctggatgaaaatgtgaagagcagctgcagccctgtgtacatcgccatcttctacacagctgccatcctgggccctgctgctggctacctgattggaggagccctgctgaacatctacacagagatgggcagaagaacagagctgaccacagagagccccctgtgggtgggcgcctggtgggtgggcttcctgggcagcggggccgccgccttcttcaccgctgtgcccatcctgggctacccccggcagctgcccggcagccagagatatgctgtgatgagagctgctgagatgcaccagctgaaggacagcagcagaggagaggccagcaacccagactttgggaagaccatccgggacctgcccctgagcatctggctgctgctgaagaaccccaccttcatcctgctgtgcctggccggggccacagaggccaccctcatcaccggcatgagcaccttcagccccaagttcctggagagccagttcagcctgagcgccagcgaggccgccaccctgtttggctacctggtggtgcctgctgggggcggcggcaccttcctgggcggcttctttgtgaacaagctgcggctgcggggcagcgctgtgatcaagttctgcctcttctgcaccgtggtgtccctgctgggcatcctggtgttcagcctgcactgccccagcgtgcccatggccggcgtgacagccagctatggaggcagcctgctgcctgagggccacctgaacctgacagccccctgcaatgctgcctgcagctgccagcctgagcactacagccctgtgtgtggcagtgatggcctgatgtacttcagcctgtgccacgccggctgcccagctgccacagagaccaacgtggatggccagaaggtgtctggagctgctgcctaccggccctgcccccccctggaccctggaaaaggaccaccctgcctgcccctggtgattggagccatcgtgggcctgccccgctgcacagagaccgtggccgtgtccctgcgcatcttccccctggtgctggccatgcccctgcagggcaatgccctgcagctggtgcgggagagccccagcttctggttctcctacagcctgtag

SEQ ID NO: 190820 - DNA, 2169 bp, Artificial Sequence
  derived and/or modified sequence
atgcccctgcaccagctgggcgacaagcccctgaccttccccagccccaacagcgcaatggaaaatgggcttgatcatacccctccatctaggagggcatctcctgggaccccgctgtcacccggaagtctgcggagcgctgctcattcacctcttgatacaagcaagcagccgctctgtcagctttgggccgaaaaacatggcgcaagaggaacccacgaggtcaggtacgtgagcgcaggtcagtccgtggcatgcggttggtgggcctttgcccctccttgcctgcaagtgcttaacacccccaaggggatcctgttttttttgtgcgcagctgcatttctccaaggaatgaccgttaatggtttcatcaacacagtgataacaagcctggaacgaaggtatgatctgcacagctatcaaagcggcctgattgcaagcagttacgatattgccgcttgcctttgcctcaccttcgtgtcctacttcggtggatctgggcataaaccacggtggctgggatggggcgttctcctcatgggtaccggctctttggtgttcgccctgccacactttactgccgggagatatgaagtcgagctggatgctggggtcagaacatgcccagcaaacccaggtgctgtgtgcgccgattcaaccagcgggctcagtaggtatcaactggtctttatgctaggccaattcctgcatggcgttggagctacccctctgtacacgctgggcgtgacgtatctggatgaaaacgttaaaagttcctgctcgcctgtatatatagcaatcttctatacagcagctatcttaggcccagctgcagggtacttgatcggtggcgcactactaaacatttacaccgagatgggccgcaggacagagctcactaccgagtccccattgtgggtgggcgcctggtgggttggctttctgggctctggggcagccgcttttttcactgctgtccccatcctaggctaccccagacagctgcccgggtcacagaggtatgcagtgatgcgggcagcagagatgcatcagcttaaagattcgtcacgcggcgaggccagcaatcctgactttggcaagactatcagggatctgccgctgtccatttggctgctgctaaagaaccctaccttcatcctcctgtgccttgccggcgcgacagaagccaccctgatcactgggatgtccacattttctcctaaattcctggaaagccagttctcactgagcgcgtccgaggccgcaactctttttggctacttggtggtgcccgctggaggcgggggcacatttctgggcggatttttcgtaaataaactgcgactaagaggatcagctgtcataaagttctgcctgttttgcaccgtcgttagtctgctcggaattctcgtgtttagtctccattgcccatccgttcccatggccggggtcaccgctagctacggaggttcactgctcccagagggacacctcaacttgacggcaccttgtaatgctgcatgttcttgtcagccagaacactattcgcccgtctgtggctcagacggactgatgtacttcagcctctgccacgctggctgccccgctgctacagagacgaacgtagatggacagaaggtgtacagagactgttcttgcatcccacaaaacctcagctcgggattcgggcatgcaacagccggtaagtgtacttccacgtgtcagcgcaagcctctgttgctggtctttattttcgttgttatatttttcacatttttgtcgagtatacccgccctgaccgccactctccgctgtgtgagggacccccagcgctcctttgcccttggtattcagtggatcgttgtgcgcattctcggcggcattcctggtcctatcgcgttcgggtgggtaatcgacaaggcatgcttattgtggcaggatcaatgcgggcagcagggctcctgcctcgtgtatcagaactctgcaatgagccgatacatccttatcatgggactgctttataaggtgttgggagtgctgttcttcgcaatcgcatgtttcttgtacaaaccgttatctgagagctcagatggacttgagacctgccttccctcccaaagctcagctccagatagcgccactgactcccagctgcagtccagtgtctag

SEQ ID NO: 190821 - DNA, 2169 bp, Artificial Sequence
  derived and/or modified sequence
atgcccctgcaccagctgggcgacaagcccctgaccttccccagcccaaattccgccatggagaacgggctcgatcacacccccccctctcgtcgtgcgagccctgggactcctcttagcccgggatccttgagaagcgccgcccattcaccgctggacacgtcaaaacagccgctttgtcaattgtgggctgagaagcatggggcccgcggcacacatgaagtacgatacgtgtctgccgggcagtcagtggcgtgcggttggtgggcttttgcccctccatgtctccaggttctgaataccccaaaggggatactcttcttcctctgtgccgctgcattccttcaggggatgacagttaatggctttatcaatactgtcatcacttctctggaaagaagatacgatctccattcttatcagtctggactgatcgcttcgtcgtatgatatcgcagcctgcttatgcctcactttcgtgtcatactttggcgggtctggccacaagcccaggtggctggggtggggcgtgcttctgatgggaaccggcagtctcgtcttcgctctgccacacttcacagcaggtaggtacgaagtcgagctggacgctggagtccgtacatgcccagccaatccaggcgctgtttgtgccgactctactagcgggctctccagatatcagttggtgttcatgctcggacagttcctgcatggagtgggtgccactcccctgtataccctgggtgtgacatatctcgatgaaaacgtgaagtcgagctgtagtccagtctacattgcaattttctacaccgcagcgatattgggacctgcagccgggtacctgatcgggggcgctctcctaaatatctatactgaaatgggacgaagaacagaactaaccacagaatcacctctctgggtgggagcgtggtgggttggcttcctcgggagtggtgcagccgccttttttactgcagtccccattctgggttatccccggcagttgccagggtcacaaagatatgccgtcatgagggctgccgagatgcaccagttaaaagactctagtcggggagaggccagtaaccctgactttggaaagaccattagagatctcccactgtcaatatggcttttgctgaagaatcccactttcatcctcctgtgcctggccggcgcaactgaagcgacgcttatcaccggcatgtcaaccttcagccccaaattcctcgaatcacaattcagcctgagcgctagcgaggccgccacactatttggctacctggtggtgccggcaggcgggggcgggacatttctcggtggttttttcgttaataagctaaggttgcgtggctcagccgttatcaaattctgtcttttctgcacagtcgtgtctctgctgggcatactggtgtttagtctacattgccccagcgtccctatggcaggcgtgactgcatcctacggcggctcccttttaccagagggtcacctgaatttgacagcgccctgtaatgccgcctgtagttgtcagcctgaacactatagtcccgtttgcggcagtgatggacttatgtatttcagtctgtgccatgcaggctgccccgccgctaccgagactaacgtggatgggcaaaaggtgtatagagactgtagctgtataccccaaaacctctccagtggattcggacacgccaccgctggcaagtgcacatctacctttctgtatatccctcagcagcacagctgcacgaacggcaattccaccaccggggctctgcaggagactcctcggtcaaaacgcgcatgtagatgcgtccgtgatccgcaacgctcttttgcacttggcatacagtggattgtggtaaggattctgggtggaatcccgggccccatcgcttttggctgggttattgataaggcctgtttgttgtggcaggatcagtgtggccaacagggctcttgcctggtctaccagaactcagcaatgtcaaggtatatcctgataatggggttgttgtataaggttctgggagtgctgtttttcgccatagcctgcttcctctacaaaccactgagcgaatcttccgacggccttgagacatgcttgccttcacagtcttctgcccctgactccgcaacagactcacaactccagtcatcggtctag

SEQ ID NO: 190822 - DNA, 456 bp, Artificial Sequence
  derived and/or modified sequence
accaccgccctgtgcgccgcccggaccgccagctgcaccagccactgtgccacccagggggccctacaaccccgcagacggatgtggactgcaaggagatgcgtacgcgatccgcaacggtcttttgccctgggcatccaatggattgtggtcagaattttaggggggatccccggacctattgccttcgggtgggtgatcgataaggcgtgcctgttgtggcaggatcagtgtgggcagcagggttcttgcctcgtctaccagaattctgccatgtcgcggtacatcctcattatgggactcctgtataaagtactgggcgtgttattcttcgcaattgcatgctttctctacaaaccactatcagagagcagtgatgggctcgagacttgcctcccgagccagtcctctgctccagatagcgccactgattcccagcttcagagctccgtctag

SEQ ID NO: 190823 - DNA, 1863 bp, Artificial Sequence
  derived and/or modified sequence
atgcccctgcaccagctgggcgacaagcccctgaccttccccagcccaaacagcgccatggaaaacggattagaccacacacctccctcaaggcgcgccagcccagggactcccttgtccccagggtccctgagatcagccgcacatagcccccttgatacgagcaaacagcccctctgccagctgtgggccgagaagcacggtgcaaggggtacccacgaggtgcgctatgtgagcgccggacaaagcgtggcctgtgggtggtgggccttcgctcctccctgcctgcaagttctgaacactcccaagggtatcctgtttttcctctgcgctgctgcgtttttacagggaatgactgtaaatggttttattaatactgtcatcactagcttggagagaaggtatgatctgcactcttaccagtcgggcttgattgcctcatcgtacgatatcgcagcgtgtctttgcctgacatttgtgagttactttggaggctccgggcataagcctaggtggttagggtggggggtactcttaatgggcacagggtccctcgtctttgccctgcctcactttacagccgggcggtatgaggtagagctggacgctggggtgagaacatgccctgccaatcctggcgcggtatgtgcggatagcacctccgggttatccagataccagctcgtgtttatgctcggccagttcctacacggggtgggggcaacacccctctacacactgggggtgacctatttggacgaaaatgtaaagtctagctgcagccctgtctacattgcaatcttttacactgccgcgattttaggcccagctgctgggtacctgattggcggtgcactactcaatatttacaccgagatgggacggcgcacggagctaacaactgagtcccctctctgggtgggtgcctggtgggtagggtttttgggctcaggagcagctgctttttttactgccgtgccaatccttggttacccccgccagctccctggcagccaacgctatgccgtaatgcgggctgctgagatgcaccaattgaaggattcgagccggggggaggcttccaatcctgattttggcaagacgattagagatttaccactttctatctggctgttgctcaagaaccctacttttatcctcttgtgtcttgccggtgccacagaggccaccctcataactgggatgtctactttcagccctaaattcctggaatcccagttcagcttgagtgccagtgaagcagcaaccctctttggttatctagtggtgcccgcgggcggtggcggcaccttcctgggcggtttctttgttaataaactaaggctgcggggtagcgccgtcattaaattttgtttgttctgcacagttgtctcactcttggggatactggtcttcagtctgcactgtccttccgtgcctatggcaggcgtgacggctagctacggaggatccctgttgccagaaggccacttgaatctgaccgccccttgcaacgcagcttgctcctgccagcctgaacactacagtcccgtctgtggctctgacgggctgatgtactttagtctgtgccacgcaggatgcccagccgccaccgaaaccaacgtagacggacagaaggtgtcaggcgccgcggcatatcggccatgccctcccctagacccaggaaagggacctccctgcctcccactagttatcggggccatagtgggcctccctcgttgtaccgagacagtagcagtgtcactgcgaatctttccgctggtgctcgctatgccccttcaggggaacgccctgcagctggttcgggagtccccctccttttggttttcttactccctctag

SEQ ID NO: 190824 - DNA, 2169 bp, Artificial Sequence
  derived and/or modified sequence
atgccacttcaccagctgggagacaaacctttgacgttcccctcgcccaattcagccatggagaatggactggatcacacccctccaagcagacgcgctagccctggcacacctttgtcccccggaagtctgaggagcgccgcacattctccactggacacctcaaaacaacctttgtgccagctgtgggctgaaaagcacggagccagaggcacccatgaagtccgttatgtctcagctggacagtccgttgcctgtggctggtgggcattcgcccctccctgtctccaggtcctgaacactccgaaaggaattttattttttttgtgtgccgctgccttcctccagggtatgaccgtcaacggttttatcaacaccgtaataaccagtctggaaaggaggtacgacttacatagctaccaaagcgggctgattgcgagtagttatgatattgccgcatgcctgtgcctgacctttgtcagctacttcgggggatcaggacataagcccaggtggcttggctggggggtcctgctcatgggaacaggcagcctggtcttcgcactgccgcatttcacggctggtagatatgaggtagagctcgacgcaggggtaagaacatgccccgctaaccctggagccgtatgtgctgattcaacgagcggcctgtcgaggtaccagctcgtgttcatgttaggacagtttttacacggagttggggcaactcccctgtacaccctcggcgtgacatatcttgatgagaacgtcaagtctagttgttcccctgtgtatatcgccatcttctacacggccgcaattctgggcccagccgcaggatacttgataggtggtgctctgctgaacatatacaccgagatgggtcgacggactgaattaacgaccgagtcccccctttgggtaggggcatggtgggtcggctttcttggttcgggtgctgctgccttcttcacagccgttccgatcttgggatatccaagacaattacctggcagccagaggtacgccgttatgcgcgctgccgagatgcaccagctcaaagactcatccagaggtgaagcttccaaccccgatttcggaaaaacaattcgggatctgcccctgtctatctggttgctgctgaagaatccaacttttatcctgctgtgtctggccggtgccactgaagccaccctaatcactggaatgagcacattctcgcccaaattcctagaaagccagttctcattaagtgcgagcgaagccgcaacgctgttcgggtatttagtggttccggctggcggaggcggtaccttcttaggcggattttttgtgaataaattgcggttgcgcggttctgccgtgatcaaattttgtctattctgcaccgtggtgtccctgctcggcatcctagtgttttctctgcattgccccagcgtcccgatggctggcgtgaccgcaagttatgggggtagtctcctacctgaaggacacctcaatctcacagccccatgcaacgccgcttgttcttgccagcccgagcattactctcccgtgtgcggatccgatggccttatgtacttttcactgtgtcacgctggctgtcccgcagccacagagaccaacgtggatggacagaaggtctaccgtgattgcagctgtattcctcaaaacttatcctcgggctttgggcacgccactgcaggaaagtgcacctctacatgccagaggaagccgctgctgttggtgttcatcttcgttgtgattttctttacattcctgtccagcatccccgcacttaccgctacacttagatgcgtacgcgatccccaaaggtcctttgcactcggcattcaatggatagtggtccgcatccttgggggaattccaggacccattgcgtttggctgggtgatagataaggcatgtcttttatggcaggaccagtgcggtcaacaagggtcctgcttggtgtatcagaacagtgccatgagccggtacattcttatcatgggacttctgtacaaagttctgggggtgctgttctttgccatcgcatgtttcctttacaagcccctgagcgaaagctcagatgggctggagacttgtctgccatcccaaagtagcgcacctgactctgccactgactctcaacttcagagttccgtctag

SEQ ID NO: 190825 - DNA, 2169 bp, Artificial Sequence
  derived and/or modified sequence
atgcctctccaccaactgggggataaaccactgaccttccccagtcctaacagcgccatggaaaatggcctggaccatacaccccctagcagaagggccagccccggtaccccactgtccccaggctctctacgaagcgctgcacactcccccctggacacttccaaacagcctctgtgccagttgtgggccgaaaagcacggggcacggggaacccacgaagtaagatatgtgtcagccggtcagagtgtcgcatgcggatggtgggcgtttgctccaccctgtctccaggtgctgaatacgccaaaaggaatcttgttttttctgtgcgcagcagcattcctgcaggggatgactgttaacggtttcatcaacacagttattacatccttggagcgtaggtacgacctgcattcctatcagtccggactgattgcatccagctacgacatcgccgcatgtctgtgcttgactttcgtgtcatatttcggaggtagtggtcataagccgaggtggttgggctggggtgttctccttatggggaccgggagcctggttttcgctctgcctcatttcacagcgggtcgctatgaagtggagttggatgccggtgtgcggacatgtccagccaacccgggagcggtatgtgccgattctacgagtggactgtcaagatatcaactggtgttcatgttgggccaattcttacacggggtgggcgcaacccccttgtataccctgggggttacatatttggacgagaacgtaaagtcaagttgctctccagtttacatcgcgatcttctatacagccgcaatcctcgggcctgccgctgggtacctcatcggtggtgcccttctgaatatttataccgagatgggcagaagaaccgagttgaccacagagtcacctctctgggtcggagcttggtgggtgggtttcctcgggagtggcgctgctgcatttttcactgccgtgccaattcttggatatccacgccagctgccaggcagccagagatatgctgttatgcgggctgctgaaatgcaccagctgaaggattcctccagaggggaagcatcaaatcccgatttcgggaagacaattagggacctccccctcagcatctggctattgctgaaaaacccaactttcattctgctttgtcttgccggagcgacggaagccacccttattaccggcatgtccaccttctcccctaagttcttggagagtcagttttctctgtcagcctccgaagccgctacactcttcgggtatctggtggtccccgctgggggtggagggactttcctaggaggtttcttcgtcaataagctgaggctccgaggaagtgcggttattaagttttgtctgttttgcaccgtggtctccttgcttgggatcctggtgttttcgctgcactgcccttcagtgcccatggccggagttaccgcatcctacgggggtagtctgttgccagagggccacctgaaccttaccgcaccttgcaatgccgcatgttcctgtcagcccgaacactacagccccgtgtgcggatcagacgggctcatgtatttctcgttgtgtcacgccggttgccccgctgccactgagaccaatgttgacggacaaaaagtctaccgagactgtagttgcattccacagaatctcagctcaggctttgggcacgccacggccggtaaatgtacatctacatttttatatatccctcagcaacactcctgtaccaatggaaacagtaccactggagccctacaagaaactccacggagcaaaagggcttgccggtgcgtccgcgatcctcagcggtcattcgctctgggcatccagtggatcgtagtgagaatccttggagggatcccaggccctattgcttttggctgggtgatcgacaaggcatgtctgctgtggcaggaccaatgtggtcagcagggctcctgcttggtctaccaaaactcggctatgtctaggtacattttgataatgggcctcctctacaaggtcttaggcgtgctgttcttcgcgatcgcatgcttcttgtataaaccactgtccgaaagcagcgacgggcttgagacttgccttccaagtcagagctcagcacccgattccgcgaccgacagccagcttcaaagctcagtgtag

SEQ ID NO: 190826 - DNA, 456 bp, Artificial Sequence
  derived and/or modified sequence
actaccgccttatgcgccgctcggacagcgagctgcacgagccattgcgccacgcagggagccctccagcctaggcgaaggatgtggaccgccagacggtgtgtaagggacccccaaaggtcattcgctctggggattcagtggatagtggtgcgcattctgggaggcatccctggcccaattgcgttcggttgggtcattgacaaagcttgcttattgtggcaagatcagtgtgggcagcagggctcctgcttggtatatcagaactccgccatgtctaggtatattctgataatgggtctgctgtacaaggttctgggggtgttattttttgccatagcctgcttcctttataaaccactgtccgagtctagtgacggactggagacctgcctgccgtctcagagctctgcgccagattctgccacagactcccagcttcagtcttcggtctag

SEQ ID NO: 190827 - DNA, 1863 bp, Artificial Sequence
  derived and/or modified sequence
atgccccttcaccaactgggggacaaacccctgaccttcccatcacctaactccgccatggagaacggtctcgatcacaccccaccctctcggcgagcttcacctggcactcccttgtcaccaggatccttaaggagtgcagcacacagtcccttggacaccagcaaacagcctttgtgccagctgtgggctgagaagcacggggctagaggtactcacgaagttcgctacgtgtcagcaggacagagtgtggcctgtggttggtgggcatttgcccctccatgtttgcaggtgctgaatacaccgaagggcatcctcttctttctgtgcgctgccgcattcctccaaggtatgacggtgaacggattcattaacaccgtcatcacctcgttggaacggaggtacgacctacactcatatcagagcggactgatcgcatcgtcatatgacattgcggcttgtctctgcctcaccttcgtctcttacttcgggggtagcgggcacaaacctaggtggctgggctggggcgtgcttctgatgggcacaggaagcctggtttttgcacttccacactttacagctggacgatatgaagtagaactcgacgccggagttcgaacttgcccagccaaccctggggctgtctgtgccgactccacgtccggcctatctcgatatcagttagtcttcatgctgggccagttcctgcacggcgtaggtgctactcctctgtacacacttggagtcacatacctggatgagaatgtcaaaagttcctgctcaccagtctacatcgcaattttctacactgcagcaatcttgggcccagccgcaggttacctgatcggcggagcactcctcaacatatacaccgagatgggcagaagaaccgagctcacgaccgaatcaccactttgggtgggcgcttggtgggtcggctttctcggatcaggggcagcagcctttttcacagctgtgcctattctggggtaccctagacagttgccaggaagccagagatatgccgtgatgagggcagcggaaatgcatcaactgaaggactcatcacggggtgaggccagcaacccagatttcgggaagactatcagggacctgcccctcagtatttggctgctcctgaaaaacccgaccttcatacttttatgcttggctggtgccactgaggctacacttatcacagggatgtccacattctccccgaaatttcttgaaagccagttctctttgagcgcatccgaagcagccacactgtttggctacctggtcgtgcccgcaggcggtggcggtactttcttaggcggtttttttgtgaacaaactccgactcaggggatcggccgttattaagttttgtctgttttgcacagttgtgtctcttctcgggatactggtcttctctctccactgcccaagcgtgccgatggcaggagtcaccgcctcctacggcggaagcttgttgccagagggtcacttgaacctgacggcaccttgcaatgcagcatgcagttgtcagcctgagcactactcaccagtatgcggcagcgatgggctgatgtatttctccctgtgccacgccggatgccccgctgccaccgagactaacgtggacgggcaaaaggtatccggggcagccgcttaccgtccttgtcctccgcttgaccctggtaaaggccctccatgcctgcctttggtgattggtgccattgtcgggctgcccaggtgcactgaaaccgtggccgtgtcattacgcatttttcccctcgttttggccatgcctttgcaggggaacgcactccagctcgtgagggaatctccaagcttctggttcagttactccttatag

SEQ ID NO: 190828 - DNA, 2776 bp, Artificial Sequence
  derived and/or modified sequence
ctgcggcgggggcggccccagcggatgaatgaagcggcgcgtggctgccggggaggccagagcgtggagcgctgcgcggcgcggcggccgggccctcgagacggggacggacacaccagcccctcggataccacttggccactcccgctgaggccactcccactgcgtggctgaagcctcgaggtcaccaggcggaggcgcggagatgcccctgcatcagctgggggacaagccgctcaccttccccagccccaactcagccatggaaaacgggcttgaccacaccccacccagcaggagggcatccccgggcacacccctgagccccggctccctccgctccgctgcccatagccccctggacaccagcaagcagcccctctgccagctctgggccgagaagcatggcgcccgggggacccatgaggtgcggtacgtctcggccgggcagagcgtggcgtgcggctggtgggccttcgcaccgccgtgcctgcaggtcctcaacacgcccaagggcatcctgttcttcctgtgtgcggccgcattcctgcaggggatgactgtgaatggcttcatcaacacagtcatcacctccctggagcgccgctatgacctgcacagctaccagagcgggctcatcgccagctcctacgacattgccgcctgcctctgcctcaccttcgtcagctacttcgggggctcagggcacaagccgcgctggctgggctggggcgtgctgcttatgggcacggggtcgctggtgttcgcgctgccccacttcacggctggccgctatgaggtggagttggacgcgggtgtcaggacgtgccctgccaaccccggcgcggtgtgtgcggacagcacctcgggcctgtcccgctaccagctggtcttcatgctgggccagttcctgcatggcgtgggtgccacacccctctacacgctgggcgtcacctacctggatgagaacgtcaagtccagctgctcgcccgtctacattgccatcttctacacagcggccatcctgggcccagctgccggctacctgattggaggtgccctgctgaatatctacacggaaatgggccgacggacggagctgaccaccgagagcccactgtgggtcggcgcctggtgggtcggcttcctgggctctggggccgctgctttcttcaccgccgttcccatccttggttaccctcggcagctgccaggctcccagcgctacgcggtcatgagagcggcggaaatgcaccagttgaaggacagcagccgtggggaggcgagcaacccggactttgggaaaaccatcagagacctgcctctctccatctggctcctgctgaagaaccccacgttcatcctgctctgcctggccggggccaccgaggccactctcatcaccggcatgtccacgttcagccccaagttcttggagtcccagttcagcctgagtgcctcagaagctgccaccttgtttgggtacctggtggtgccagcgggtggtggcggcaccttcctgggcggcttctttgtgaacaagctcaggctccggggctccgcggtcatcaagttctgcctgttctgcaccgttgtcagcctgctgggcatcctcgtcttctcactgcactgccccagtgtgcccatggcgggcgtcacagccagctacggcgggagcctcctgcccgaaggccacctgaacctaacggctccctgcaacgctgcctgcagctgccagccagaacactacagccctgtgtgcggctcggacggcctcatgtacttctcactgtgccacgcagggtgccctgcagccacggagacgaatgtggacggccagaaggtgtaccgagactgtagctgtatccctcagaatctttcctctggttttggccatgccactgcagggaaatgcacttcaacttgtcagagaaagcccctccttctggttttcatattcgttgtaattttctttacattcctcagcagcattcctgcactaacggcaactctacgatgtgtccgtgaccctcagagatcctttgccctgggaatccagtggattgtagttagaatactagggggcatcccggggcccatcgccttcggctgggtgatcgacaaggcctgtctgctgtggcaggaccagtgtggccagcagggctcctgcttggtgtaccagaattcggccatgagccgctacatactcatcatggggctcctgtacaaggtgctgggcgtcctcttctttgccatagcctgcttcttatacaagcccctgtcggagtcttcagatggcctggaaacttgtctgcccagccagtcctcagcccctgacagtgccacagatagccagctccagagcagcgtctgaccaccgcccgcgcccacccggccacggcgggcactcagcatttcctgatgacagaacagtgccgttgggtgatgcaatcacacgggaacttctatttgacctgcaaccttctacttaacctgtggtttaaagtcggctgtgacctcctgtccccagagctgtacggccctgcagtgggtgggaggaacttgcataaatatatatttatggacacacagtttgcatcagaacgtgtttatagaatgtgttttatacccgatcgtgtgtggtgtgcgtgaggacaaactccgcaggggctgtgaatcccactgggagggcggtgggcctgcagcctgaggaaggcttgtgtgtcctcagttaaaactgtgcatatcgaaatatattttgttatttaagcctgcg

SEQ ID NO: 190829 - DNA, 2665 bp, Artificial Sequence
  derived and/or modified sequence
gacacaccagcccctcggataccacttggccactcccgctgaggccactcccactgcgtggctgaagcctcgaggtcaccaggcggaggcgcggagatgcccctgcatcagctgggggacaagccgctcaccttccccagccccaactcagccatggaaaacgggcttgaccacaccccacccagcaggagggcatccccgggcacacccctgagccccggctccctccgctccgctgcccatagccccctggacaccagcaagcagcccctctgccagctctgggccgagaagcatggcgcccgggggacccatgaggtgcggtacgtctcggccgggcagagcgtggcgtgcggctggtgggccttcgcaccgccgtgcctgcaggtcctcaacacgcccaagggcatcctgttcttcctgtgtgcggccgcattcctgcaggggatgactgtgaatggcttcatcaacacagtcatcacctccctggagcgccgctatgacctgcacagctaccagagcgggctcatcgccagctcctacgacattgccgcctgcctctgcctcaccttcgtcagctacttcgggggctcagggcacaagccgcgctggctgggctggggcgtgctgcttatgggcacggggtcgctggtgttcgcgctgccccacttcacggctggccgctatgaggtggagttggacgcgggtgtcaggacgtgccctgccaaccccggcgcggtgtgtgcggacagcacctcgggcctgtcccgctaccagctggtcttcatgctgggccagttcctgcatggcgtgggtgccacacccctctacacgctgggcgtcacctacctggatgagaacgtcaagtccagctgctcgcccgtctacattgccatcttctacacagcggccatcctgggcccagctgccggctacctgattggaggtgccctgctgaatatctacacggaaatgggccgacggacggagctgaccaccgagagcccactgtgggtcggcgcctggtgggtcggcttcctgggctctggggccgctgctttcttcaccgccgttcccatccttggttaccctcggcagctgccaggctcccagcgctacgcggtcatgagagcggcggaaatgcaccagttgaaggacagcagccgtggggaggcgagcaacccggactttgggaaaaccatcagagacctgcctctctccatctggctcctgctgaagaaccccacgttcatcctgctctgcctggccggggccaccgaggccactctcatcaccggcatgtccacgttcagccccaagttcttggagtcccagttcagcctgagtgcctcagaagctgccaccttgtttgggtacctggtggtgccagcgggtggtggcggcaccttcctgggcggcttctttgtgaacaagctcaggctccggggctccgcggtcatcaagttctgcctgttctgcaccgttgtcagcctgctgggcatcctcgtcttctcactgcactgccccagtgtgcccatggcgggcgtcacagccagctacggcgggagcctcctgcccgaaggccacctgaacctaacggctccctgcaacgctgcctgcagctgccagccagaacactacagccctgtgtgcggctcggacggcctcatgtacttctcactgtgccacgcagggtgccctgcagccacggagacgaatgtggacggccagaaggtgtaccgagactgtagctgtatccctcagaatctttcctctggttttggccatgccactgcagggaaatgcacttcaacttgtcagagaaagcccctccttctggttttcatattcgttgtaattttctttacattcctcagcagcattcctgcactaacggcaactctacgatgtgtccgtgaccctcagagatcctttgccctgggaatccagtggattgtagttagaatactagggggcatcccggggcccatcgccttcggctgggtgatcgacaaggcctgtctgctgtggcaggaccagtgtggccagcagggctcctgcttggtgtaccagaattcggccatgagccgctacatactcatcatggggctcctgtacaaggtgctgggcgtcctcttctttgccatagcctgcttcttatacaagcccctgtcggagtcttcagatggcctggaaacttgtctgcccagccagtcctcagcccctgacagtgccacagatagccagctccagagcagcgtctgaccaccgcccgcgcccacccggccacggcgggcactcagcatttcctgatgacagaacagtgccgttgggtgatgcaatcacacgggaacttctatttgacctgcaaccttctacttaacctgtggtttaaagtcggctgtgacctcctgtccccagagctgtacggccctgcagtgggtgggaggaacttgcataaatatatatttatggacacacagtttgcatcagaacgtgtttatagaatgtgttttatacccgatcgtgtgtggtgtgcgtgaggacaaactccgcaggggctgtgaatcccactgggagggcggtgggcctgcagcctgaggaaggcttgtgtgtcctcagttaaaactgtgcatatcgaaatatattttgttatttaagcctg

SEQ ID NO: 190830 - DNA, 2732 bp, Artificial Sequence
  derived and/or modified sequence
ggctgccggggaggccagagcgtggagcgctgcgcggcgcggcggccgggccctcgagacggggacggacacaccagcccctcggataccacttggccactcccgctgaggccactcccactgcgtggctgaagcctcgaggtcaccaggcggaggcgcggagatgcccctgcatcagctgggggacaagccgctcaccttccccagccccaactcagccatggaaaacgggcttgaccacaccccacccagcaggagggcatccccgggcacacccctgagccccggctccctccgctccgctgcccatagccccctggacaccagcaagcagcccctctgccagctctgggccgagaagcatggcgcccgggggacccatgaggtgcggtacgtctcggccgggcagagcgtggcgtgcggctggtgggccttcgcaccgccgtgcctgcaggtcctcaacacgcccaagggcatcctgttcttcctgtgtgcggccgcattcctgcaggggatgactgtgaatggcttcatcaacacagtcatcacctccctggagcgccgctatgacctgcacagctaccagagcgggctcatcgccagctcctacgacattgccgcctgcctctgcctcaccttcgtcagctacttcgggggctcagggcacaagccgcgctggctgggctggggcgtgctgcttatgggcacggggtcgctggtgttcgcgctgccccacttcacggctggccgctatgaggtggagttggacgcgggtgtcaggacgtgccctgccaaccccggcgcggtgtgtgcggacagcacctcgggcctgtcccgctaccagctggtcttcatgctgggccagttcctgcatggcgtgggtgccacacccctctacacgctgggcgtcacctacctggatgagaacgtcaagtccagctgctcgcccgtctacattgccatcttctacacagcggccatcctgggcccagctgccggctacctgattggaggtgccctgctgaatatctacacggaaatgggccgacggacggagctgaccaccgagagcccactgtgggtcggcgcctggtgggtcggcttcctgggctctggggccgctgctttcttcaccgccgttcccatccttggttaccctcggcagctgccaggctcccagcgctacgcggtcatgagagcggcggaaatgcaccagttgaaggacagcagccgtggggaggcgagcaacccggactttgggaaaaccatcagagacctgcctctctccatctggctcctgctgaagaaccccacgttcatcctgctctgcctggccggggccaccgaggccactctcatcaccggcatgtccacgttcagccccaagttcttggagtcccagttcagcctgagtgcctcagaagctgccaccttgtttgggtacctggtggtgccagcgggtggtggcggcaccttcctgggcggcttctttgtgaacaagctcaggctccggggctccgcggtcatcaagttctgcctgttctgcaccgttgtcagcctgctgggcatcctcgtcttctcactgcactgccccagtgtgcccatggcgggcgtcacagccagctacggcgggagcctcctgcccgaaggccacctgaacctaacggctccctgcaacgctgcctgcagctgccagccagaacactacagccctgtgtgcggctcggacggcctcatgtacttctcactgtgccacgcagggtgccctgcagccacggagacgaatgtggacggccagaaggtgtaccgagactgtagctgtatccctcagaatctttcctctggttttggccatgccactgcagggaaatgcacttcaacttttctttacattcctcagcagcattcctgcactaacggcaactctacgacaggagcactccaggaaacacccaggtctaagcgggcctgcagatgtgtccgtgaccctcagagatcctttgccctgggaatccagtggattgtagttagaatactagggggcatcccggggcccatcgccttcggctgggtgatcgacaaggcctgtctgctgtggcaggaccagtgtggccagcagggctcctgcttggtgtaccagaattcggccatgagccgctacatactcatcatggggctcctgtacaaggtgctgggcgtcctcttctttgccatagcctgcttcttatacaagcccctgtcggagtcttcagatggcctggaaacttgtctgcccagccagtcctcagcccctgacagtgccacagatagccagctccagagcagcgtctgaccaccgcccgcgcccacccggccacggcgggcactcagcatttcctgatgacagaacagtgccgttgggtgatgcaatcacacgggaacttctatttgacctgcaaccttctacttaacctgtggtttaaagtcggctgtgacctcctgtccccagagctgtacggccctgcagtgggtgggaggaacttgcataaatatatatttatggacacacagtttgcatcagaacgtgtttatagaatgtgttttatacccgatcgtgtgtggtgtgcgtgaggacaaactccgcaggggctgtgaatcccactgggagggcggtgggcctgcagcctgaggaaggcttgtgtgtcctcagttaaaactgtgcatatcgaaatatattttgttatttaagcctg

SEQ ID NO: 190831 - DNA, 856 bp, Artificial Sequence
  derived and/or modified sequence
actacagccctgtgtgcggctcggacggcctcatgtacttctcactgtgccacgcagggtgccctgcagccacggagacgaatgtggacggccagaagatgtgtccgtgaccctcagagatcctttgccctgggaatccagtggattgtagttagaatactagggggcatcccggggcccatcgccttcggctgggtgatcgacaaggcctgtctgctgtggcaggaccagtgtggccagcagggctcctgcttggtgtaccagaattcggccatgagccgctacatactcatcatggggctcctgtacaaggtgctgggcgtcctcttctttgccatagcctgcttcttatacaagcccctgtcggagtcttcagatggcctggaaacttgtctgcccagccagtcctcagcccctgacagtgccacagatagccagctccagagcagcgtctgaccaccgcccgcgcccacccggccacggcgggcactcagcatttcctgatgacagaacagtgccgttgggtgatgcaatcacacgggaacttctatttgacctgcaaccttctacttaacctgtggtttaaagtcggctgtgacctcctgtccccagagctgtacggccctgcagtgggtgggaggaacttgcataaatatatatttatggacacacagtttgcatcagaacgtgtttatagaatgtgttttatacccgatcgtgtgtggtgtgcgtgaggacaaactccgcaggggctgtgaatcccactgggagggcggtgggcctgcagcctgaggaaggcttgtgtgtcctcagttaaaactgtgcatatcgaaatatattttgttatttaagcctg

SEQ ID NO: 190832 - DNA, 3092 bp, Artificial Sequence
  derived and/or modified sequence
gcggcgcggcggccgggccctcgagacggggacggacacaccagcccctcggataccacttggccactcccgctgaggccactcccactgcgtggctgaagcctcgaggtcaccaggcggaggcgcggagatgcccctgcatcagctgggggacaagccgctcaccttccccagccccaactcagccatggaaaacgggcttgaccacaccccacccagcaggagggcatccccgggcacacccctgagccccggctccctccgctccgctgcccatagccccctggacaccagcaagcagcccctctgccagctctgggccgagaagcatggcgcccgggggacccatgaggtgcggtacgtctcggccgggcagagcgtggcgtgcggctggtgggccttcgcaccgccgtgcctgcaggtcctcaacacgcccaagggcatcctgttcttcctgtgtgcggccgcattcctgcaggggatgactgtgaatggcttcatcaacacagtcatcacctccctggagcgccgctatgacctgcacagctaccagagcgggctcatcgccagctcctacgacattgccgcctgcctctgcctcaccttcgtcagctacttcgggggctcagggcacaagccgcgctggctgggctggggcgtgctgcttatgggcacggggtcgctggtgttcgcgctgccccacttcacggctggccgctatgaggtggagttggacgcgggtgtcaggacgtgccctgccaaccccggcgcggtgtgtgcggacagcacctcgggcctgtcccgctaccagctggtcttcatgctgggccagttcctgcatggcgtgggtgccacacccctctacacgctgggcgtcacctacctggatgagaacgtcaagtccagctgctcgcccgtctacattgccatcttctacacagcggccatcctgggcccagctgccggctacctgattggaggtgccctgctgaatatctacacggaaatgggccgacggacggagctgaccaccgagagcccactgtgggtcggcgcctggtgggtcggcttcctgggctctggggccgctgctttcttcaccgccgttcccatccttggttaccctcggcagctgccaggctcccagcgctacgcggtcatgagagcggcggaaatgcaccagttgaaggacagcagccgtggggaggcgagcaacccggactttgggaaaaccatcagagacctgcctctctccatctggctcctgctgaagaaccccacgttcatcctgctctgcctggccggggccaccgaggccactctcatcaccggcatgtccacgttcagccccaagttcttggagtcccagttcagcctgagtgcctcagaagctgccaccttgtttgggtacctggtggtgccagcgggtggtggcggcaccttcctgggcggcttctttgtgaacaagctcaggctccggggctccgcggtcatcaagttctgcctgttctgcaccgttgtcagcctgctgggcatcctcgtcttctcactgcactgccccagtgtgcccatggcgggcgtcacagccagctacggcgggagcctcctgcccgaaggccacctgaacctaacggctccctgcaacgctgcctgcagctgccagccagaacactacagccctgtgtgcggctcggacggcctcatgtacttctcactgtgccacgcagggtgccctgcagccacggagacgaatgtggacggccagaaggtgagtggagccgctgcctaccgcccctgtcctcccctggaccctgggaaggggcccccgtgccttccccttgtaatcggagctattgttgggcttcccaggtgtaccgagactgtagctgtatccctcagaatctttcctctggttttggccatgccactgcagggaaatgcacttcaacttgtcagagaaagcccctccttctggttttcatattcgttgtaattttctttacattcctcagcagcattcctgcactaacggcaactctacggtaagctggggtcgggtgtgcgcttgtccagagctttccttgcagcaccctgaggcggagctctgcagatcctgagacaggagcactccaggaaacacccaggtctaagcgggcctgtctgtcactggtggcaggagagacctcactgtctctgatctctgacgaggggcttcccacttgggggggggtgatgatgtggctggggactggtccaggaggccactggcctagggggtgacttggcatgcaaccccacttctgtgggtgctgacgctgtggttttctattgcagatgtgtccgtgaccctcagagatcctttgccctgggaatccagtggattgtagttagaatactagggggcatcccggggcccatcgccttcggctgggtgatcgacaaggcctgtctgctgtggcaggaccagtgtggccagcagggctcctgcttggtgtaccagaattcggccatgagccgctacatactcatcatggggctcctgtacaaggtgctgggcgtcctcttctttgccatagcctgcttcttatacaagcccctgtcggagtcttcagatggcctggaaacttgtctgcccagccagtcctcagcccctgacagtgccacagatagccagctccagagcagcgtctgaccaccgcccgcgcccacccggccacggcgggcactcagcatttcctgatgacagaacagtgccgttgggtgatgcaatcacacgggaacttctatttgacctgcaaccttctacttaacctgtggtttaaagtcggctgtgacctcctgtccccagagctgtacggccctgcagtgggtgggaggaacttgcataaatatatatttatggacacacagtttgcatcagaacgtgtttatagaatgtgttttatacccgatcgtgtgtggtgtgcgtgaggacaaactccgcaggggctgtgaatcccactgggagggcggtgggcctgcagcctgaggaaggcttgtgtgtcctcagttaaaactgtgcatatcgaaatatattttgttatttaagcctg

SEQ ID NO: 190833 - protein, 229 aa, Artificial Sequence
  derived and/or modified sequence
MKMWNNWGWCGGRRRGCTKILSTKKGIQMSIKNKHLIVIPAFSHTMSQLDFDFHCVFVSIDEGIFKAGAERSETRGAAEVQEDEDTQVEVPVDQRPAEIVDEEEDGEKANKDAEQKEDFSGMNGDLEEEGGREATDAPEQVEEILDHSEQQARPARVNGGTDEENGEELQQVNNELQLVLDKERKSQGAGSGQDEADVDPQRPPRPEVKITSPEENENNQQNKDYAAVA

SEQ ID NO: 190834 - protein, 476 aa, Artificial Sequence
  derived and/or modified sequence
MSGSSARSSHLSQPVVKSVLVYRNGDPFYAGRRVVIHEKKVSSFEVFLKEVTGGVQAPFGAVRNIYTPRTGHRIRKLDQIQSGGNYVAGGQEAFKKLNYLDIGEIKKRPMEVVNTEVKPVIHSRINVSARFRKPLQEPCTIFLIANGDLINPASRLLIPRKTLNQWDHVLQMVTEKITLRSGAVHRLYTLEGKLVESGAELENGQFYVAVGRDKFKKLPYSELLFDKSTMRRPFGQKASSLPPIVGSRKSKGSGNDRHSKSTVGSSDNSSPQPLKRKGKKEDVNSEKLTKLKQNVKLKNSQETIPNSDEGIFKAGAERSETRGAAEVQEDEDTQVEVPVDQRPAEIVDEEEDGEKANKDAEQKEDFSGMNGDLEEEGGREATDAPEQVEEILDHSEQQARPARVNGGTDEENGEELQQVNNELQLVLDKERKSQGAGSGQDEADVDPQRPPRPEVKITSPEENENNQQNKDYAAVA

SEQ ID NO: 190835 - protein, 88 aa, Artificial Sequence
  derived and/or modified sequence
  misc_feature (1)..(1): Xaa can be any naturally occurring amino acid
XVVIHEKKVSSFEVFLKEVTGGVQAPFGAVRNIYTPRTGHRIRKLDQIQSGGNYVAGGQEAFKKLNYLDIGEIKKRPMEVVNTELHVL

SEQ ID NO: 190836 - protein, 120 aa, Artificial Sequence
  derived and/or modified sequence
MSGSSARSSHLSQPVVKSVLVYRNGDPFYAGRRVVIHEKKVSSFEVFLKEVTGGVQAPFGAVRNIYTPRTGHRIRKLDQIQSGGNYVAGGQEAFKKLNYLDIGEIKKRPMEVVNTELHVL

SEQ ID NO: 190837 - DNA, 690 bp, Artificial Sequence
  derived and/or modified sequence
atgaaaatgtggaataactggggctggtgcgggggccggcgccgaggatgcaccaagattctgtctactaagaagggaattcagatgagtatcaagaacaaacatctcatcgtgatcccagctttttcccacacgatgagtcagctcgacttcgatttccactgcgtatttgtgtctattgatgaagggatcttcaaagccggcgccgaacgaagtgagactcgaggagcagctgaagtccaggaagatgaggatacgcaggttgaggtcccggttgaccagcggccggccgaaatagttgatgaggaggaggatggcgaaaaggccaacaaggacgccgagcagaaggaggatttttccggaatgaatggagacttggaggaagaagggggccgtgaagcaactgacgctcctgagcaggttgaagagatcttggatcactcagaacagcaggcgagacccgcccgggttaacggcggaactgacgaggagaacggcgaagagctgcagcaggtgaataacgagctgcagttagtgctggacaaggagcggaagagccagggcgccgggtccggccaggacgaggctgatgtcgatcctcaacgacctcctcggccggaggtgaagatcacctctccagaagagaatgaaaacaatcagcaaaacaaagactacgccgctgtggcctag

SEQ ID NO: 190838 - DNA, 1431 bp, Artificial Sequence
  derived and/or modified sequence
atgagcggcagctccgcccgatcaagtcatctgtctcagccggttgttaagtccgtgttagtgtatagaaatggcgatcctttttacgcagggagaagggtggtgattcacgagaaaaaggtgtccagtttcgaggtgttcctcaaggaagtgactggcggagtgcaggctccattcggcgcagtccgcaacatctacacacctcgtacaggccaccggatacgaaagctggatcaaattcagtcaggtgggaactatgttgcgggaggccaagaggctttcaaaaagctaaactacttggacataggtgagatcaagaagaggcctatggaagttgtgaacacagaagtgaagcccgtgattcatagcagaatcaacgtatcagccaggtttcggaaacccctgcaggagccctgtaccatcttcctcatagcaaacggggatctaattaaccccgccagtcggctcttgattcccaggaaaaccctcaaccagtgggatcatgttttacagatggtgaccgaaaagataacgctccggtcaggggcggtgcacagattatacacactggaagggaaactggttgagtcaggggcagaactcgagaacggccaattctatgtagcagtgggtcgcgacaagttcaaaaagctgccatatagtgaactgttatttgataagtcgactatgaggcggccttttggccagaaagcatcctcactgcccccaattgtgggctccaggaagtcgaagggcagcggaaacgataggcattcaaagtcaactgtcggaagcagtgacaactcctcacctcagccactgaaacggaagggcaaaaaagaggacgtcaacagcgagaaacttactaaactgaagcagaacgtgaagctgaagaatagccaagaaacaattccaaactccgatgaaggaatcttcaaagccggcgccgagagatccgaaacccgtggcgccgcagaagtgcaggaggatgaggacacgcaggtggaagtgcctgtcgaccagcggccagcggaaatagtggacgaagaagaagatggcgagaaagctaacaaagatgccgaacagaaggaagatttctccgggatgaacggcgatctggaggaggaagggggacgcgaagctacagacgctccagagcaggtagaagaaattttagatcattccgagcagcaggccaggccggcacgggtcaacggtggtaccgacgaggaaaatggggaggagctgcagcaggttaataacgaacttcagctggtgcttgataaagagcgcaaatctcagggcgccgggtcagggcaggatgaagccgatgtggatccacaacgccccccccgcccagaggtgaagatcacgtctccagaagaaaatgaaaacaaccagcaaaataaagattacgcagccgtagcttag

SEQ ID NO: 190839 - DNA, 267 bp, Artificial Sequence
  derived and/or modified sequence
taggtggtgatccatgaaaaaaaggtttcgtccttcgaggtcttccttaaagaagtcacagggggcgtgcaggccccatttggggccgtccgcaatatttacactccaagaaccgggcatcgaattcgcaagctcgatcagattcagtcaggcgggaactatgtggctggaggccaggaggcattcaaaaagttaaattatctggatatcggcgaaataaaaaaaaggccgatggaggttgtgaacaccgagcttcatgtgctgtag

SEQ ID NO: 190840 - DNA, 363 bp, Artificial Sequence
  derived and/or modified sequence
atgagcgggtcctccgcacgaagcagccacttgagtcagccagtggttaagtccgtcctcgtctaccgcaacggagatcctttctatgcagggcggagagtcgtcatacacgagaagaaggtgtctagctttgaggtgtttctgaaagaagtcaccgggggagtgcaggccccttttggcgccgtccggaacatctacacacctcgcacagggcacaggattcggaagctggatcagatccagtcaggcggcaactatgttgcaggaggccaggaggcctttaagaagctcaattacctcgacatcggcgagatcaagaaacggccaatggaggtggtgaatacagagcttcacgtgctgtag

SEQ ID NO: 190841 - DNA, 690 bp, Artificial Sequence
  derived and/or modified sequence
atgaagatgtggaacaactggggctggtgtggcggcagaagaagaggctgcaccaagatcctgagcaccaagaagggcatccagatgagcatcaagaacaagcacctgattgtcatcccagccttcagccacaccatgagccagctggactttgacttccactgtgtgtttgtgtccattgatgagggcatcttcaaggccggggctgagaggtctgagaccagaggagctgctgaggtgcaggaggatgaggacacccaggtggaggtgcctgtggaccagaggcctgctgagatcgtggatgaggaggaggatggagagaaggccaacaaggatgctgagcagaaggaggacttcagcggcatgaatggagacctggaggaggagggcggccgggaggccacagatgcccctgagcaggtggaggagatcctggaccacagcgagcagcaggcccggcctgcccgggtgaatggaggaacagatgaggagaatggagaggagctgcagcaggtgaacaatgagctgcagctggtgctggacaaggagaggaagagccagggcgccggcagcggccaggatgaagcagatgtggacccccagaggcctcccaggcctgaggtgaagatcaccagcccagaagaaaatgaaaacaaccagcagaacaaggactatgctgctgtggcctag

SEQ ID NO: 190842 - DNA, 1431 bp, Artificial Sequence
  derived and/or modified sequence
atgagcggcagcagcgcccggagcagccacctgagccagcctgtggtgaagtctgtgctggtgtacagaaatggagaccccttctacgccggccggcgggtggtgattcatgagaagaaggtgtcctcctttgaggtgttcctgaaggaggtgactggaggagtgcaggccccctttggagctgtgaggaacatctacacccccaggacaggccaccgcatcaggaagctggaccagatccagagcggcggcaactacgtggccggcggccaggaggccttcaagaagctgaactacctggacatcggggagatcaagaagaggcccatggaggtggtgaacacagaggtgaagcctgtgatccacagccgcatcaacgtgtctgcccgcttcaggaagcccctgcaggagccctgcaccatcttcctgattgccaacggggacctgatcaacccagccagccggctgctgatccccaggaagaccctgaaccagtgggaccacgtgctgcagatggtgacagagaagatcaccctgcggtctggagctgtgcaccggctgtacaccctggagggcaagctggtggagagcggggctgagctggagaatggccagttctacgtggccgtgggccgggacaagttcaagaagctgccctacagcgagctgctgtttgacaagagcaccatgagaagacccttcggccagaaggccagcagcctgccccccatcgtgggcagcaggaagagcaaaggaagtggaaatgacagacacagcaagagcacagtgggcagcagtgacaacagcagcccccagcccctgaagaggaagggcaagaaggaggatgtgaacagcgagaagctgaccaagctgaagcagaatgtgaagctgaagaacagccaggagaccatccccaacagtgatgagggcatcttcaaggccggggctgagaggtctgagaccagaggagctgctgaggtgcaggaggatgaggacacccaggtggaggtgcctgtggaccagaggcctgctgagatcgtggatgaggaggaggatggagagaaggccaacaaggatgctgagcagaaggaggacttcagcggcatgaatggagacctggaggaggagggcggccgggaggccacagatgcccctgagcaggtggaggagatcctggaccacagcgagcagcaggcccggcctgcccgggtgaatggaggaacagatgaagaaaatggagaggagctgcagcaggtgaacaatgagctgcagctggtgctggacaaggagaggaagagccagggcgccggcagcggccaggatgaagcagatgtggacccccagaggcctcccaggcctgaggtgaagatcaccagccctgaggagaatgaaaacaaccagcagaacaaggactatgctgctgtggcctag

SEQ ID NO: 190843 - DNA, 267 bp, Artificial Sequence
  derived and/or modified sequence
tgagtggtgattcatgagaagaaggtgtcctcctttgaggtgttcctgaaggaggtgactggaggagtgcaggccccctttggagctgtgaggaacatctacacccccaggacaggccaccgcatcaggaagctggaccagatccagagcggcggcaactacgtggccggcggccaggaggccttcaagaagctgaactacctggacatcggggagatcaagaagaggcccatggaggtggtgaacacagagctgcacgtgctgtag

SEQ ID NO: 190844 - DNA, 363 bp, Artificial Sequence
  derived and/or modified sequence
atgagcggcagcagcgcccggagcagccacctgagccagcctgtggtgaagtctgtgctggtgtacagaaatggagaccccttctacgccggccggcgggtggtgattcatgagaagaaggtgtcctcctttgaggtgttcctgaaggaggtgactggaggagtgcaggccccctttggagctgtgaggaacatctacacccccaggacaggccaccgcatcaggaagctggaccagatccagagcggcggcaactacgtggccggcggccaggaggccttcaagaagctgaactacctggacatcggggagatcaagaagaggcccatggaggtggtgaacacagagctgcacgtgctgtag

SEQ ID NO: 190845 - DNA, 1382 bp, Artificial Sequence
  derived and/or modified sequence
cattatgctaacagcataaacatgcagggggtgggagcagggtcacaaaagtgagtgttgtcaattctacttggaatgaaaggttgaaataatttaaacagtacgggaaatgcagagcaattttctcctctggtgacaatatagtgtccaacacttggaagtgatttttaagaatgtttatttaaattaaaaggatggatttccaaggaaaaaaaataaggaaaaggaaagaaaaaactgaacagaaaacgcaaaagtatcagtttggtcactaacctttgcaaggatacctttttattttctttaagattcctgttgtttatacacagattttaagtttactcctactgctgacccaagtgaaattccttctccagtcacagtgtcaacctctaccccccaactgcaacgagagttttgaggggcatcaatcacaccgagaagtcacagcccctcaaccactgaggtgtgggggggtagggatctgcatttcttcatatcaaccccacactatagggcacctaaatgggtgggcggtgggggagaccgactcacttgagtttcttgaaggcttcctggcctccagccacgtaattgcccccgctctggatctggtctagcttccggattcggtggccagtccgcggggtgtagatgttcctgacggccccaaagggtgcctgaacgccgccggtcacctccttcaggaagacttcgaagctggacaccttcttctcatggatgacgacgcggcgccccgcgtagaaggggtccccgttgcggtacacaagcacgctcttcacgacgggctgagacaggtggctggacctggcgctgctgccgctcatcttccccgctggccgccgcctcagctcgctgcttcgcgtcgggaggcacctccgctgtcccagcggcctcaccgcacccagggcgcgggatcgcctcctgaaacgaacgagaaactgacgaatccacaggtgaaagagaagtaacggccgtgcgcctaggcgtccacccagaggagacactaggagcttgcaggactcggagtagacgctcaagtttttcaccgtggcgtgcacagccaatcaggacccgcagtgcgcgcaccacaccaggttcacctgctacgggcagaatcaaggtggacagcttctgagcaggagccggaaacgcgcggggccttcaaacaggcacgcctagtgagggcaggagagaggaggacgcacacacacacacacacacaaatatggtgaaacccaatttcttacatcatatctgtgctaccctttccaaacagcctaatttttcttttctctcttcttgcacctttacccctcaatctcctgcttgctcccaaattaaagcaattaagttcctgg

SEQ ID NO: 190846 - DNA, 690 bp, Artificial Sequence
  derived and/or modified sequence
atgaagatgtggaacaactggggctggtgcggcggccggcggcggggttgtacgaagatcctcagcacaaaaaagggcatccagatgtcgattaagaacaaacaccttattgtcatcccagctttcagccacacgatgagtcagctggactttgacttccactgtgtcttcgtgagcatcgacgaaggaatattcaaagcaggcgccgagcgctctgagacccgaggcgccgctgaggtccaggaagatgaagacacccaggtggaggttcctgttgaccagagacccgctgagatagttgacgaagaagaagacggagaaaaggccaacaaagacgccgagcagaaggaggacttttcaggaatgaacggcgaccttgaggaagaaggcggtagagaagccactgatgcccccgaacaagttgaagagattctggaccacagtgaacagcaggcccgcccagctcgcgtgaatggcggaacagatgaggagaacggagaggagctgcaacaagtgaacaatgaactacagctggtcctggacaaggagaggaagagccagggcgccggcagcggtcaagacgaggctgacgtggacccgcaaagaccacctagacctgaggtcaagataacctctccagaagagaatgagaacaatcaacagaataaggactacgccgcagttgcctag

SEQ ID NO: 190847 - DNA, 1431 bp, Artificial Sequence
  derived and/or modified sequence
atgagcggcagcagcgcccggagcagccacctgagccagcccgtggtcaagtctgttctggtctatcgcaacggagaccccttctatgccggccgccgcgttgtgatccatgagaagaaggtgtcgagttttgaggtattcttaaaggaagtaaccggaggggtccaggctccattcggcgccgtgcgcaacatttacaccccccgaaccggtcaccgtatccggaaactcgaccaaattcagtctgggggaaattacgtcgccggcggccaggaggcctttaagaaactgaattacctggacataggcgagataaagaaaaggcccatggaagttgtaaatacagaggtgaaacccgtcatacattcaagaatcaacgttagtgcgcgcttcaggaagcccttgcaagagccgtgcacgatttttcttattgcaaatggggacctcattaatcctgcttcacgtctccttatcccccgaaaaacactcaaccagtgggatcacgtgctgcagatggtgaccgagaagatcacgctgaggagcggcgctgtccacagattgtataccctagagggcaaactggtagaatcaggtgcggagcttgagaacggtcagttttatgtcgcagtggggcgggacaaatttaaaaagttaccatattcagagctgctctttgacaaatctactatgaggaggcccttcggccagaaagcctcttcgcttccccctatagtggggagccgcaaaagcaaaggaagcggaaacgaccgacactccaaatcaacggtcgggtctagcgataacagcagtccacagccactgaaaagaaagggaaagaaagaggatgtgaacagtgaaaaactcaccaaattgaagcagaacgtgaagcttaagaatagccaggaaacaattccaaacagtgacgaggggatttttaaagccggtgccgagcggagtgagacaagaggagccgccgaggtgcaagaggacgaggatacgcaagtggaagtgccggtggaccagagaccagccgaaatcgtagatgaagaggaagacggggagaaagcaaacaaagatgccgagcagaaagaagatttcagcgggatgaatggagatctggaggaggagggaggtagggaggcaactgacgcgcccgaacaggtcgaagagattctggatcactcagagcagcaggcgaggcctgctcgagtcaacggaggcaccgacgaggagaatggtgaagaactccagcaggtgaataatgagctgcagctggtcctcgataaagagaggaagtcccagggcgccggttctggccaagatgaagctgacgttgacccccagcgcccacctagaccagaagttaagattaccagccctgaggaaaatgagaacaaccagcaaaataaggattacgcagccgtcgcttag

SEQ ID NO: 190848 - DNA, 267 bp, Artificial Sequence
  derived and/or modified sequence
tgagtggtgatccacgagaagaaggtgagcagcttcgaggtgttcctcaaggaagtaacaggtggagtgcaggcaccatttggcgcagtccgaaatatttacacgcccaggacagggcatcgtattcggaagctggaccagattcaaagcggcggcaattatgtggctggcggtcaggaggctttcaaaaaactcaattatctggatataggagagattaaaaagcggcccatggaggttgttaacacagagcttcatgtgctctag

SEQ ID NO: 190849 - DNA, 363 bp, Artificial Sequence
  derived and/or modified sequence
atgagcggcagcagcgcccggagcagccacctgagccagcccgtggtgaagtcggtcttggtttacaggaacggggaccctttctacgccggacgacgcgtggtgattcatgagaaaaaagttagttcctttgaggtattccttaaggaggtgaccggaggagtacaggccccgtttggcgctgtgcgtaatatctacactccaaggactggccacaggatccgaaaacttgatcaaatccagagcgggggcaactacgttgccgggggacaggaggcctttaagaaactgaactatctcgatattggcgaaattaagaaacgccccatggaagttgttaataccgagctccatgtgctgtag

SEQ ID NO: 190850 - DNA, 690 bp, Artificial Sequence
  derived and/or modified sequence
atgaaaatgtggaacaattgggggtggtgcgggggtcggcgtcgcggatgtactaagattctgagcaccaaaaaaggcatacagatgagcattaagaacaagcacctgatcgtaattcctgctttcagccatacgatgtcccagctagatttcgattttcactgtgtgtttgtgagcattgacgaagggatttttaaggccggagctgaacggtcagaaacccgaggcgcagccgaagtccaggaggacgaagacacacaggttgaggtaccagtcgatcaacggccagccgagattgtcgatgaagaggaggatggcgagaaggcaaataaagacgccgagcagaaggaggacttctcaggaatgaatggcgacttggaggaggagggcggacgtgaagcaaccgatgcacccgagcaggtagaagaaatcctcgaccactccgaacagcaggccaggcctgctagggtgaacggcggtacggatgaggaaaacggcgaggaactgcaacaggttaataacgagctgcagctagtgttagacaaagagagaaagagtcagggtgcgggatcagggcaggacgaagctgatgtggacccacagaggcctccacgccctgaggtgaagatcaccagccccgaggaaaacgaaaataatcaacaaaataaggactacgctgccgtggcctag

SEQ ID NO: 190851 - DNA, 1431 bp, Artificial Sequence
  derived and/or modified sequence
atgagcggcagtagcgccagatcttctcacctcagtcagcccgtggtaaaaagtgtgctggtttacagaaacggtgacccattctatgcagggaggcgtgtggtcattcatgaaaagaaggtgtcaagtttcgaggtgttcctgaaggaagtgacaggcggtgtgcaggctcctttcggggcagtaaggaacatctataccccccgaacagggcacaggattcggaagcttgatcagatccaaagcggtgggaactacgttgctggcggtcaagaggcttttaagaagctaaattaccttgacatcggcgaaatcaagaaacgccctatggaggttgtgaacactgaagtgaaacccgttattcacagcaggattaatgtgtccgccagatttagaaagcccctgcaggagccttgcactattttcctgattgccaacggcgatctgattaatcctgcctctcggctgctgattcccagaaaaactctgaatcaatgggaccacgttctccagatggtaactgaaaaaattactttgcgttctggcgctgtacataggttatatacattagaggggaaactcgtggagtctggtgcggaacttgaaaatggccagttttacgtcgcagtagggagggataaatttaaaaaactcccctatagtgaactgctctttgacaaatctaccatgaggcggcctttcggccagaaggcaagctcactgccaccgattgttggtagtcgaaaaagtaaggggagcggaaatgaccgacatagtaagagcacagtcggatcaagcgacaactcaagccctcagcccttgaagcggaaaggaaagaaggaagatgtgaattctgagaagttaacaaagttgaaacagaatgtgaagttaaaaaatagtcaggagactattccgaattccgatgagggaatttttaaagctggtgctgaacgatccgaaacaagaggcgctgcggaagtgcaggaagatgaagatacccaggttgaagttcccgtcgaccagaggccagccgagatagtggatgaagaggaggacggcgaaaaagcaaacaaagatgcggaacagaaagaagacttctctggaatgaacggcgatctggaggaggaaggtggtcgggaggctactgacgctccagagcaggtagaggagatcctggatcacagtgagcagcaggctcggccagctcgcgtcaatggcggaactgacgaggagaatggcgaggaactccagcaggttaacaacgaacttcagttggtcctggataaagagcgaaagagccagggggcagggtcaggacaggatgaagctgatgttgatcctcagcgtccgcctaggcctgaggtgaagattaccagccctgaggagaacgaaaacaatcagcagaacaaggactacgcagccgtcgcttag

SEQ ID NO: 190852 - DNA, 267 bp, Artificial Sequence
  derived and/or modified sequence
tgagtggtcatacatgagaagaaggtgtcgtccttcgaagtcttcctgaaagaagtgactgggggagtacaagcccctttcggggctgtgagaaacatttacactcccaggacaggacatcggatccggaagctggaccaaatccagtctggagggaattacgtggccggaggacaggaggcttttaagaaactcaattacttagacatcggcgagattaagaagcggcctatggaggtggtgaacacagagctgcatgtgctttag

SEQ ID NO: 190853 - DNA, 363 bp, Artificial Sequence
  derived and/or modified sequence
atgtcggggtcatctgctaggtctagtcacctgagccagcctgtggttaaatccgttctggtataccgtaatggtgatcccttttatgctggcagaagagttgtaattcatgagaaaaaggtctcttcttttgaagtgttcctcaaagaagtaaccggcggagtgcaggcccctttcggagccgtgagaaacatttataccccccgtacgggccaccgcattagaaagttggatcaaatacaatcgggcggaaactacgttgccggaggacaggaggcattcaaaaaactgaactacctggatatcggggagatcaaaaaacgccctatggaggtcgtcaatactgagttgcacgtgctgtag

SEQ ID NO: 190854 - DNA, 690 bp, Artificial Sequence
  derived and/or modified sequence
atgaagatgtggaacaactggggctggtgcggcggcagaagaagaggctgcaccaagatcctgagcaccaagaagggcatccagatgagcatcaagaacaagcacctgatcgtgatccccgccttcagccacaccatgagccagctggacttcgacttccactgcgtgttcgtgagcatcgacgagggcatcttcaaggccggcgccgagagaagcgagaccagaggcgccgccgaggtgcaggaggacgaggacacccaggtggaggtgcccgtggaccagagacccgccgagatcgtggacgaggaggaggacggcgagaaggccaacaaggacgccgagcagaaggaggacttcagcggcatgaacggcgacctggaggaggagggcggcagagaggccaccgacgcccccgagcaggtggaggagatcctggaccacagcgagcagcaggccagacccgccagagtgaacggcggcaccgacgaggagaacggcgaggagctgcagcaggtgaacaacgagctgcagctggtgctggacaaggagagaaagagccagggcgccggcagcggccaggacgaggccgacgtggacccccagagaccccccagacccgaggtgaagatcaccagccccgaggagaacgagaacaaccagcagaacaaggactacgccgccgtggcctag

SEQ ID NO: 190855 - DNA, 1431 bp, Artificial Sequence
  derived and/or modified sequence
atgagcggcagcagcgccagaagcagccacctgagccagcccgtggtgaagagcgtgctggtgtacagaaacggcgaccccttctacgccggcagaagagtggtgatccacgagaagaaggtgagcagcttcgaggtgttcctgaaggaggtgaccggcggcgtgcaggcccccttcggcgccgtgagaaacatctacacccccagaaccggccacagaatcagaaagctggaccagatccagagcggcggcaactacgtggccggcggccaggaggccttcaagaagctgaactacctggacatcggcgagatcaagaagagacccatggaggtggtgaacaccgaggtgaagcccgtgatccacagcagaatcaacgtgagcgccagattcagaaagcccctgcaggagccctgcaccatcttcctgatcgccaacggcgacctgatcaaccccgccagcagactgctgatccccagaaagaccctgaaccagtgggaccacgtgctgcagatggtgaccgagaagatcaccctgagaagcggcgccgtgcacagactgtacaccctggagggcaagctggtggagagcggcgccgagctggagaacggccagttctacgtggccgtgggcagagacaagttcaagaagctgccctacagcgagctgctgttcgacaagagcaccatgagaagacccttcggccagaaggccagcagcctgccccccatcgtgggcagcagaaagagcaagggcagcggcaacgacagacacagcaagagcaccgtgggcagcagcgacaacagcagcccccagcccctgaagagaaagggcaagaaggaggacgtgaacagcgagaagctgaccaagctgaagcagaacgtgaagctgaagaacagccaggagaccatccccaacagcgacgagggcatcttcaaggccggcgccgagagaagcgagaccagaggcgccgccgaggtgcaggaggacgaggacacccaggtggaggtgcccgtggaccagagacccgccgagatcgtggacgaggaggaggacggcgagaaggccaacaaggacgccgagcagaaggaggacttcagcggcatgaacggcgacctggaggaggagggcggcagagaggccaccgacgcccccgagcaggtggaggagatcctggaccacagcgagcagcaggccagacccgccagagtgaacggcggcaccgacgaggagaacggcgaggagctgcagcaggtgaacaacgagctgcagctggtgctggacaaggagagaaagagccagggcgccggcagcggccaggacgaggccgacgtggacccccagagaccccccagacccgaggtgaagatcaccagccccgaggagaacgagaacaaccagcagaacaaggactacgccgccgtggcctag

SEQ ID NO: 190856 - DNA, 267 bp, Artificial Sequence
  derived and/or modified sequence
tgagtggtgatccacgagaagaaggtgagcagcttcgaggtgttcctgaaggaggtgaccggcggcgtgcaggcccccttcggcgccgtgagaaacatctacacccccagaaccggccacagaatcagaaagctggaccagatccagagcggcggcaactacgtggccggcggccaggaggccttcaagaagctgaactacctggacatcggcgagatcaagaagagacccatggaggtggtgaacaccgagctgcacgtgctgtag

SEQ ID NO: 190857 - DNA, 363 bp, Artificial Sequence
  derived and/or modified sequence
atgagcggcagcagcgccagaagcagccacctgagccagcccgtggtgaagagcgtgctggtgtacagaaacggcgaccccttctacgccggcagaagagtggtgatccacgagaagaaggtgagcagcttcgaggtgttcctgaaggaggtgaccggcggcgtgcaggcccccttcggcgccgtgagaaacatctacacccccagaaccggccacagaatcagaaagctggaccagatccagagcggcggcaactacgtggccggcggccaggaggccttcaagaagctgaactacctggacatcggcgagatcaagaagagacccatggaggtggtgaacaccgagctgcacgtgctgtag

SEQ ID NO: 190858 - DNA, 3684 bp, Artificial Sequence
  derived and/or modified sequence
gaccactgaatgttttctcaatgaaaatgtggaacaactgggggtggtgtggtggtcggaggagggggtgcacaaaaatactatcaactaaaaagggaatccaaatgtctattaaaaataagcatttgattgtaattccagcattcagccacacgatgtcacaattggattttgattttcactgtgtgtttgtctcaatagatgaaggcattttcaaagctggagcagagaggtctgaaacacggggggcagcagaagtccaagaagatgaagatactcaggttgaggttccagtcgatcagaggccagcagaaatagtagacgaggaagaagatggagagaaggcaaacaaggatgcagaacagaaagaagacttttcaggaatgaatggtgaccttgaagaggaaggaggtagggaggctacagatgcccctgagcaagtcgaggagattctggatcacagtgagcagcaggcacgccctgctcgtgtaaatggaggcaccgatgaggagaatggtgaggagctgcagcaggttaataatgagcttcaactggtcctagacaaggaaagaaagtctcaaggagctggcagtggacaagatgaggctgatgtagaccctcaaagaccaccaaggccagaagtaaaaattaccagtccagaagaaaatgaaaacaaccaacaaaacaaggactatgctgccgtggcttagaacatttttaaaaagagagtatatggatcgcaagaaaaatgaagggttatcatacttgaaagataagcacatagttattgctgaatataatgtgacactatggtcgaatactacctacgaattataacattagaagcctagtggaaagaccagataactttaaatggctactaaaggataattacttacttttattgcatgtgttttaaaagtcatatagaaatattaaataagacggacagaggagaatttgcactggaagacaattgccacttgtaaaggatgaaaaataggatcactcttattgtacgctttattataagtttagaaggcagtttattctaaataatttttctctaggaaggcgtagaattttaaagaactggtaataggaaagcatgtactattttcttaaagcaataaactcttgaatgaacagattgcgatttactttcagacataatttggagatggcagtagatcaaaatgtgtccatgacttgttaacatgcctttctttcttcctccttagccaaaatccacctttgaactacaaagacagagcaaggcgttcattttggtgggaggaagcattggttcagagtgttagtgactagtatcgccatgccgtcacttaaatgctttcaggcttgcatgcttgtggctccaatggcgcacactcaggaaggaattgtaaaggagcacccagttatattataaagcctggatgtatggtttgcagataatggaaatcctgtggattttcactgatccagtctatctttaccaatagtatctctctcttctcccttatgttattagagaacctgatattggctattccaaagattaaattattttcaaatagttttcaacaaaaataaaagtgtattaggaagaaaaaagtagactatatgaagagtttgtgactgctcaatttaacttgttttttgccttatttctattaagactgttttactatgtttttgccctagggatatcagcaaatatttatttttcctagcatgatatagttagaatttcaagcagatttctttgtaattagaaggcatctgatagaaattgtaaaactttagaagttattataatgaaaccaattcctgaatcacaacttcatggactgactaaattgatttatagttgccttgtgaggtatgtatggggaaaacataaaaacataattaaaacataatttcgtcctttttatgaattcttaagagatgttcttccataaatatagaaataatatatttttcttaaaggatatatttttaattatgtggaagttgtaagcttgaaattttaacttctagtgcttttctaaaattcacaattacaagtttaaaacattttttctcttccaggtttcatttggaataaagagttggcagttatataaagcacttaataatactatagaaaatagatgtgttttttcttaatatgattttggtattttccacagatcagaagtgtaaacagagagataatgtaacagtatttggaagagataatgacacaaggatatagtgatctgggagcatgaattagaaacagggtactatgtttctggtgtaaaatctaaattgtgctttctactagcgttactttttcaaatgggatgatataaagcactgtgggctataagcaacaatcttgggttggtaggcaaatagaccaattgatctttattattattattattattattattattattttttgagatgaagtcttgctcttgtcgcccaggctgggtgcagtggcatgatcttggcttactgcaacctctgcctcctgggttcaagcacctgagcctcccgagtagctgggattacaggcatctgccaccacacctggctaatttttgtattttttgtagagacagatgtttcaccatgttggccaggctggtctcaaactcctgacctcaggtgatccgcccgcctttgcatcccaaaatgctgggattacaggtgtgagccacagcacccggtcccagttggtcttttaatattaaatttgtgcactattactgggtctggagttaatgatttcaaatagtttctaaaaataactgattaaatgtaagaaattataactaattatcaaggtgattctcttttgtttcttcaatggagagtttctctttctcttttcctcctctaataaaaatatttctttttttcctgtccttttattcattatattatgaaacttaggttttaggaaacaccttaagcgtcattttaatgaagcacaacattgatattttacatgaataataacgtttggtattttaaatatacttcaagggggtaataagccacaataactgtaccaaaaaaacttaaaaatggggacatattcatcccttgtgtgtgcatattttaccacttgttgacaagatacaattgtgacctactttgaggggatgaataacgacttatcactttaagacactttgcaaacatgttactaaaaaaaggtgcctagccaaggaaaaaaccattcacttggaattaaaattgtggatgtcacttcagagatgactttaacataaatgctgaaagttcattcacctcacaaatgtggcagttttctctgtggagaatggtggtctccgtggcagactggctctccaaattaaatgaaactcattgacagacctgggaccttttatgtgagtggacagacaagatcttggtttggcttcatgtactgttttctagagagagtgctacgaaaaacttatgatgcttttatgtgataaccaatataatgctttaatatgttaattctttgtgatgctatatacatagtttttatagttttatgaaaccactttgttaaacttatctggattttaagacacttgtaaacaaatggtttgttagtaaaattggggcattaagagttttacagagcaaataaagaagattttgacaaaagtc

SEQ ID NO: 190859 - DNA, 4707 bp, Artificial Sequence
  derived and/or modified sequence
gtccaccttgattctgcccgtagcaggtgaacctggtgtggtgcgcgcactgcgggtcctgattggctgtgcacgccacggtgaaaaacttgagcgtctactccgagtcctgcaagctcctagtgtctcctctgggtggacgcctaggcgcacggccgttacttctctttcacctgtggattcgtcagtttctcgttcgtttcaggaggcgatcccgcgccctgggtgcggtgaggccgctgggacagcggaggtgcctcccgacgcgaagcagcgagctgaggcggcggccagcggggaagatgagcggcagcagcgccaggtccagccacctgtctcagcccgtcgtgaagagcgtgcttgtgtaccgcaacggggaccccttctacgcggggcgccgcgtcgtcatccatgagaagaaggtgtccagcttcgaagtcttcctgaaggaggtgaccggcggcgttcaggcaccctttggggccgtcaggaacatctacaccccgcggactggccaccgaatccggaagctagaccagatccagagcgggggcaattacgtggctggaggccaggaagccttcaagaaactcaattacttggacataggagaaatcaagaaaagaccaatggaagttgttaatacagaggtaaaaccagtaatccatagcaggatcaacgtgtcagctcgctttagaaaaccgcttcaggagccgtgcactatcttcttgattgcaaatggagacctcataaacccagcttctcgcctccttatccccagaaaaaccttgaatcagtgggatcatgtactacaaatggtcacagaaaaaatcactctgaggagcggggctgttcacaggctttatactttagaaggaaaacttgttgagagtggagcagagttggagaatgggcagttttatgtggctgttggcagagataagtttaagaaactgccttacagtgagttactttttgacaagtcaacgatgagaaggccttttggtcagaaagcttcttcactacctcctattgtaggatccagaaagtctaaagggagtggaaatgatcgccactctaagtcaacagttggatccagtgacaactcatctcctcagcccctgaagaggaaagggaaaaaagaagacgtgaattcagaaaaactgacgaaattgaaacaaaatgtaaaattaaagaattcacaagaaaccattccaaatagtgatgaaggcattttcaaagctggagcagagaggtctgaaacacggggggcagcagaagtccaagaagatgaagatactcaggttgaggttccagtcgatcagaggccagcagaaatagtagacgaggaagaagatggagagaaggcaaacaaggatgcagaacagaaagaagacttttcaggaatgaatggtgaccttgaagaggaaggaggtagggaggctacagatgcccctgagcaagtcgaggagattctggatcacagtgagcagcaggcacgccctgctcgtgtaaatggaggcaccgatgaggagaatggtgaggagctgcagcaggttaataatgagcttcaactggtcctagacaaggaaagaaagtctcaaggagctggcagtggacaagatgaggctgatgtagaccctcaaagaccaccaaggccagaagtaaaaattaccagtccagaagaaaatgaaaacaaccaacaaaacaaggactatgctgccgtggcttagaacatttttaaaaagagagtatatggatcgcaagaaaaatgaagggttatcatacttgaaagataagcacatagttattgctgaatataatgtgacactatggtcgaatactacctacgaattataacattagaagcctagtggaaagaccagataactttaaatggctactaaaggataattacttacttttattgcatgtgttttaaaagtcatatagaaatattaaataagacggacagaggagaatttgcactggaagacaattgccacttgtaaaggatgaaaaataggatcactcttattgtacgctttattataagtttagaaggcagtttattctaaataatttttctctaggaaggcgtagaattttaaagaactggtaataggaaagcatgtactattttcttaaagcaataaactcttgaatgaacagattgcgatttactttcagacataatttggagatggcagtagatcaaaatgtgtccatgacttgttaacatgcctttctttcttcctccttagccaaaatccacctttgaactacaaagacagagcaaggcgttcattttggtgggaggaagcattggttcagagtgttagtgactagtatcgccatgccgtcacttaaatgctttcaggcttgcatgcttgtggctccaatggcgcacactcaggaaggaattgtaaaggagcacccagttatattataaagcctggatgtatggtttgcagataatggaaatcctgtggattttcactgatccagtctatctttaccaatagtatctctctcttctcccttatgttattagagaacctgatattggctattccaaagattaaattattttcaaatagttttcaacaaaaataaaagtgtattaggaagaaaaaagtagactatatgaagagtttgtgactgctcaatttaacttgttttttgccttatttctattaagactgttttactatgtttttgccctagggatatcagcaaatatttatttttcctagcatgatatagttagaatttcaagcagatttctttgtaattagaaggcatctgatagaaattgtaaaactttagaagttattataatgaaaccaattcctgaatcacaacttcatggactgactaaattgatttatagttgccttgtgaggtatgtatggggaaaacataaaaacataattaaaacataatttcgtcctttttatgaattcttaagagatgttcttccataaatatagaaataatatatttttcttaaaggatatatttttaattatgtggaagttgtaagcttgaaattttaacttctagtgcttttctaaaattcacaattacaagtttaaaacattttttctcttccaggtttcatttggaataaagagttggcagttatataaagcacttaataatactatagaaaatagatgtgttttttcttaatatgattttggtattttccacagatcagaagtgtaaacagagagataatgtaacagtatttggaagagataatgacacaaggatatagtgatctgggagcatgaattagaaacagggtactatgtttctggtgtaaaatctaaattgtgctttctactagcgttactttttcaaatgggatgatataaagcactgtgggctataagcaacaatcttgggttggtaggcaaatagaccaattgatctttattattattattattattattattattattttttgagatgaagtcttgctcttgtcgcccaggctgggtgcagtggcatgatcttggcttactgcaacctctgcctcctgggttcaagcacctgagcctcccgagtagctgggattacaggcatctgccaccacacctggctaatttttgtattttttgtagagacagatgtttcaccatgttggccaggctggtctcaaactcctgacctcaggtgatccgcccgcctttgcatcccaaaatgctgggattacaggtgtgagccacagcacccggtcccagttggtcttttaatattaaatttgtgcactattactgggtctggagttaatgatttcaaatagtttctaaaaataactgattaaatgtaagaaattataactaattatcaaggtgattctcttttgtttcttcaatggagagtttctctttctcttttcctcctctaataaaaatatttctttttttcctgtccttttattcattatattatgaaacttaggttttaggaaacaccttaagcgtcattttaatgaagcacaacattgatattttacatgaataataacgtttggtattttaaatatacttcaagggggtaataagccacaataactgtaccaaaaaaacttaaaaatggggacatattcatcccttgtgtgtgcatattttaccacttgttgacaagatacaattgtgacctactttgaggggatgaataacgacttatcactttaagacactttgcaaacatgttactaaaaaaaggtgcctagccaaggaaaaaaccattcacttggaattaaaattgtggatgtcacttcagagatgactttaacataaatgctgaaagttcattcacctcacaaatgtggcagttttctctgtggagaatggtggtctccgtggcagactggctctccaaattaaatgaaactcattgacagacctgggaccttttatgtgagtggacagacaagatcttggtttggcttcatgtactgttttctagagagagtgctacgaaaaacttatgatgcttttatgtgataaccaatataatgctttaatatgttaattctttgtgatgctatatacatagtttttatagttttatgaaaccactttgttaaacttatctggattttaagacacttgtaaacaaatggtttgttagtaaaattggggcattaagagttttacagagcaaataaagaagattttgacaaaagtc

SEQ ID NO: 190860 - DNA, 339 bp, Artificial Sequence
  derived and/or modified sequence
gcgtcgtcatccatgagaagaaggtgtccagcttcgaagtcttcctgaaggaggtgaccggcggcgttcaggcaccctttggggccgtcaggaacatctacaccccgcggactggccaccgaatccggaagctagaccagatccagagcgggggcaattacgtggctggaggccaggaagccttcaagaaactcaattacttggacataggagaaatcaagaaaagaccaatggaagttgttaatacagagctacatgttctctgattgaaatccatgggaaggttccctgtcaagtgagaagattctgagcgttgttaaataaatctttaccaaagct

SEQ ID NO: 190861 - DNA, 665 bp, Artificial Sequence
  derived and/or modified sequence
gtccaccttgattctgcccgtagcaggtgaacctggtgtggtgcgcgcactgcgggtcctgattggctgtgcacgccacggtgaaaaacttgagcgtctactccgagtcctgcaagctcctagtgtctcctctgggtggacgcctaggcgcacggccgttacttctctttcacctgtggattcgtcagtttctcgttcgtttcaggaggcgatcccgcgccctgggtgcggtgaggccgctgggacagcggaggtgcctcccgacgcgaagcagcgagctgaggcggcggccagcggggaagatgagcggcagcagcgccaggtccagccacctgtctcagcccgtcgtgaagagcgtgcttgtgtaccgcaacggggaccccttctacgcggggcgccgcgtcgtcatccatgagaagaaggtgtccagcttcgaagtcttcctgaaggaggtgaccggcggcgttcaggcaccctttggggccgtcaggaacatctacaccccgcggactggccaccgaatccggaagctagaccagatccagagcgggggcaattacgtggctggaggccaggaagccttcaagaaactcaattacttggacataggagaaatcaagaaaagaccaatggaagttgttaatacagagctacatgttctctga

SEQ ID NO: 190862 - protein, 759 aa, Artificial Sequence
  derived and/or modified sequence
MESSPFNRRQWTSLSLRVTAKELSLVNKNKSSAIVEIFSKYQKAAEETNMEKKRSNTENLSQHFRKGTLTVLKKKWENPGLGAESHTDSLRNSSTEIRHRADHPPAEVTSHAASGAKADQEEQIHPRSRLRSPPEALVQGRYPHIKDGEDLKDHSTESKKMENCLGESRHEVEKSEISENTDASGKIEKYNVPLNRLKMMFEKGEPTQTKILRAQSRSASGRKISENSYSLDDLEIGPGQLSSSTFDSEKNESRRNLELPRLSETSIKDRMAKYQAAVSKQSSSTNYTNELKASGGEIKIHKMEQKENVPPGPEVCITHQEGEKISANENSLAVRSTPAEDDSRDSQVKSEVQQPVHPKPLSPDSRASSLSESSPPKAMKKFQAPARETCVECQKTVYPMERLLANQQVFHISCFRCSYCNNKLSLGTYASLHGRIYCKPHFNQLFKSKGNYDEGFGHRPHKDLWASKNENEEILERPAQLANARETPHSPGVEDAPIAKVGVLAASMEAKASSQQEKEDKPAETKKLRIAWPPPTELGSSGSALEEGIKMSKPKWPPEDEISKPEVPEDVDLDLKKLRRSSSLKERSRPFTVAASFQSTSVKSPKTVSPPIRKGWSMSEQSEESVGGRVAERKQVENAKASKKNGNVGKTTWQNKESKGETGKRSKEGHSLEMENENLVENGADSDEDDNSFLKQQSPQEPKSLNWSSFVDNTFAEEFTTQNQKSQDVELWEGEVVKELSVEEQIKRNRYYDEDEDEE

SEQ ID NO: 190863 - protein, 678 aa, Artificial Sequence
  derived and/or modified sequence
MWQGCNCSQLSETAVDQEQLGVLTFILQRTTCLNVSADQEEQIHPRSRLRSPPEALVQGRYPHIKDGEDLKDHSTESKKMENCLGESRHEVEKSEISENTDASGKIEKYNVPLNRLKMMFEKGEPTQTKILRAQSRSASGRKISENSYSLDDLEIGPGQLSSSTFDSEKNESRRNLELPRLSETSIKDRMAKYQAAVSKQSSSTNYTNELKASGGEIKIHKMEQKENVPPGPEVCITHQEGEKISANENSLAVRSTPAEDDSRDSQVKSEVQQPVHPKPLSPDSRASSLSESSPPKAMKKFQAPARETCVECQKTVYPMERLLANQQVFHISCFRCSYCNNKLSLGTYASLHGRIYCKPHFNQLFKSKGNYDEGFGHRPHKDLWASKNENEEILERPAQLANARETPHSPGVEDAPIAKVGVLAASMEAKASSQQEKEDKPAETKKLRIAWPPPTELGSSGSALEEGIKMSKPKWPPEDEISKPEVPEDVDLDLKKLRRSSSLKERSRPFTVAASFQSTSVKSPKTVSPPIRKGWSMSEQSEESVGGRVAERKQVENAKASKKNGNVGKTTWQNKESKGETGKRSKEGHSLEMENENLVENGADSDEDDNSFLKQQSPQEPKSLNWSSFVDNTFAEEFTTQNQKSQDVELWEGEVVKELSVEEQIKRNRYYDEDEDEE

SEQ ID NO: 190864 - protein, 457 aa, Artificial Sequence
  derived and/or modified sequence
MEQKENVPPGPEVCITHQEGEKISANENSLAVRSTPAEDDSRDSQVKSEVQQPVHPKPLSPDSRASSLSESSPPKAMKKFQAPARETCVECQKTVYPMERLLANQQVFHISCFRCSYCNNKLSLGTYASLHGRIYCKPHFNQLFKSKGNYDEGFGHRPHKDLWASKNENEEILERPAQLANARETPHSPGVEDAPIAKVGVLAASMEAKASSQQEKEDKPAETKKLRIAWPPPTELGSSGSALEEGIKMSKPKWPPEDEISKPEVPEDVDLDLKKLRRSSSLKERSRPFTVAASFQSTSVKSPKTVSPPIRKGWSMSEQSEESVGGRVAERKQVENAKASKKNGNVGKTTWQNKESKGETGKRSKEGHSLEMENENLVENGADSDEDDNSFLKQQSPQEPKSLNWSSFVDNTFAEEFTTQNQKSQDVELWEGEVVKELSVEEQIKRNRYYDEDEDEE

SEQ ID NO: 190865 - protein, 111 aa, Artificial Sequence
  derived and/or modified sequence
MESSPFNRRQWTSLSLRVTAKELSLVNKNKSSAIVEIFSKYQKAAEETNMEKKRSNTENLSQHFRKGTLTVLKKKWENPGLGAESHTDSLRNSSTEIRHRADHPPAEVTSH

SEQ ID NO: 190866 - protein, 130 aa, Artificial Sequence
  derived and/or modified sequence
MESSPFNRRQWTSLSLRVTAKELSLVNKNKSSAIVEIFSKYQKAAEETNMEKKRSNTENLSQHFRKGTLTVLKKKWENPGLGAESHTDSLRNSSTEIRHRADHPPAEVTSHAASGAKADQEEQIHPRSRL

SEQ ID NO: 190867 - protein, 456 aa, Artificial Sequence
  derived and/or modified sequence
MEQKENVPPGPEVCITHQEGEKISANENSLAVRSTPAEDDSRDSQVKSEVQQPVHPKPLSPDSRASSLSESSPPKAMKFQAPARETCVECQKTVYPMERLLANQQVFHISCFRCSYCNNKLSLGTYASLHGRIYCKPHFNQLFKSKGNYDEGFGHRPHKDLWASKNENEEILERPAQLANARETPHSPGVEDAPIAKVGVLAASMEAKASSQQEKEDKPAETKKLRIAWPPPTELGSSGSALEEGIKMSKPKWPPEDEISKPEVPEDVDLDLKKLRRSSSLKERSRPFTVAASFQSTSVKSPKTVSPPIRKGWSMSEQSEESVGGRVAERKQVENAKASKKNGNVGKTTWQNKESKGETGKRSKEGHSLEMENENLVENGADSDEDDNSFLKQQSPQEPKSLNWSSFVDNTFAEEFTTQNQKSQDVELWEGEVVKELSVEEQIKRNRYYDEDEDEE

SEQ ID NO: 190868 - protein, 599 aa, Artificial Sequence
  derived and/or modified sequence
MENCLGESRHEVEKSEISENTDASGKIEKYNVPLNRLKMMFEKGEPTQTKILRAQSRSASGRKISENSYSLDDLEIGPGQLSSSTFDSEKNESRRNLELPRLSETSIKDRMAKYQAAVSKQSSSTNYTNELKASGGEIKIHKMEQKENVPPGPEVCITHQEGEKISANENSLAVRSTPAEDDSRDSQVKSEVQQPVHPKPLSPDSRASSLSESSPPKAMKKFQAPARETCVECQKTVYPMERLLANQQVFHISCFRCSYCNNKLSLGTYASLHGRIYCKPHFNQLFKSKGNYDEGFGHRPHKDLWASKNENEEILERPAQLANARETPHSPGVEDAPIAKVGVLAASMEAKASSQQEKEDKPAETKKLRIAWPPPTELGSSGSALEEGIKMSKPKWPPEDEISKPEVPEDVDLDLKKLRRSSSLKERSRPFTVAASFQSTSVKSPKTVSPPIRKGWSMSEQSEESVGGRVAERKQVENAKASKKNGNVGKTTWQNKESKGETGKRSKEGHSLEMENENLVENGADSDEDDNSFLKQQSPQEPKSLNWSSFVDNTFAEEFTTQNQKSQDVELWEGEVVKELSVEEQIKRNRYYDEDEDEE

SEQ ID NO: 190869 - DNA, 2280 bp, Artificial Sequence
  derived and/or modified sequence
atggaaagctctcccttcaaccgccgccagtggaccagcctgtctctccgcgtcaccgccaaggagctttcactggttaacaagaacaaatcttccgctatcgtggaaattttttccaaatatcaaaaggcagccgaagaaaccaatatggagaagaaacggtctaacacagaaaatctgtcccagcacttcagaaaaggaactttaaccgtgcttaagaagaaatgggaaaacccgggcctgggtgcagagagccatacagacagccttagaaatagtagcacagaaatccgacatcgtgccgatcacccgcccgcagaggttacctcccatgccgccagcggtgcaaaagcagaccaggaagagcagatccacccaagatcgagattaagatctccacctgaagcactcgtgcagggaaggtacccccacatcaaagatggtgaagatctcaaagatcattctactgagtcgaagaagatggaaaactgcctcggggagtcaagacacgaggtagaaaagtcggagatctccgagaacactgatgcctccggcaagatagaaaaatacaacgtcccacttaacaggcttaagatgatgtttgaaaagggtgaaccaactcagacaaagatcctgagggcacaatccaggtccgccagcggtaggaaaataagcgagaactcctattcccttgacgacctggaaattggccccggtcagctgtcttcgagtaccttcgacagcgaaaagaatgaaagcaggaggaacctggagctcccaagattgagtgagaccagcataaaagatcgcatggctaagtatcaagccgctgtgtccaaacagtcctcttccactaattacacgaacgagctaaaagccagtggcggcgagattaagatacataagatggagcagaaggagaacgtcccccctggccccgaagtgtgtatcacccatcaagaaggcgagaagatttccgccaatgaaaacagcctcgctgtgagaagcactcctgccgaagacgatagccgcgacagtcaggtgaagtcagaagttcagcagcctgtgcacccaaagccgctgtcacccgacagccgcgccagctcgctgagcgaatctagccccccaaaagctatgaagaaatttcaggccccagctcgggagacatgtgtggagtgccagaaaactgtgtatcccatggagaggttgctcgctaatcagcaggtgttccatatcagctgtttccggtgcagctattgtaacaataagctttccttgggtacatacgcctctctccatgggcgcatctattgtaagccgcactttaatcagctgtttaaatccaagggcaattatgatgagggcttcgggcatagacctcataaggacctgtgggcatccaaaaacgagaatgaagaaatattggagcgtcccgcccaactggccaacgccagagaaacaccgcactctccgggagtggaagacgcccccattgcaaaggtgggcgtattggccgcatctatggaggccaaagcctcttcacagcaagagaaagaagacaaacctgccgagacaaagaagctgagaatcgcttggccccctcccacagaactcggcagctccgggtctgctctcgaagagggaattaagatgtccaagcccaagtggcctcctgaggatgaaataagcaagcccgaggtcccagaggacgtagacctggatctgaagaaactacgaagatcttcttctctgaaagagcggagtagaccctttacagtagcggcatcttttcagtccaccagcgtgaaaagtccgaaaacggtgagcccacctatccgtaagggctggagcatgtctgagcagagtgaagaatccgtcggggggagagttgctgaacgaaagcaggtcgaaaacgccaaagcttctaagaagaacgggaacgtgggaaagaccacgtggcaaaacaaagaatctaaaggcgagacaggcaagcggtcaaaggagggccactccttagaaatggagaatgaaaacttggtggaaaacggagctgattctgacgaggatgataatagcttcttaaagcagcaatctccgcaagaacccaaatctttaaactggtcttcctttgtggataacaccttcgctgaagagtttacaactcagaatcagaaaagccaggatgttgaactgtgggagggtgaagtggtcaaagagctcagcgttgaagaacagattaagcggaatcggtactatgacgaggatgaggacgaagagtag

SEQ ID NO: 190870 - DNA, 2037 bp, Artificial Sequence
  derived and/or modified sequence
atgtggcagggatgcaattgcagccagctctccgagactgcagtggaccaagagcagctgggtgtgctgacttttattctgcaaaggaccacttgtctcaatgttagcgcagatcaggaggagcagatccacccaagatcgcgactcagatcccccccggaagcgctagtgcagggacgctacccccatataaaagatggcgaggacttgaaagaccacagcactgagtctaaaaaaatggaaaattgtctcggcgaatctcgccatgaagtagagaaaagcgaaatctcagagaatactgacgcaagcggaaaaattgaaaagtacaatgtccccctgaaccgcctgaagatgatgttcgagaagggggaacctactcaaactaaaattctgagagcgcagtctcgcagcgccagtgggcggaagatctccgagaactcttactcacttgacgatttggaaataggccccggccagctctccagcagcacttttgattcagagaaaaatgaaagcaggcgcaacttggaactgcctagactttccgagacctctattaaggatcggatggcgaaataccaggctgctgtcagtaagcagagttcttcaactaactacactaatgagctaaaagctagcggtggggaaatcaagatccacaagatggagcaaaaagagaacgttcccccgggccccgaggtgtgtatcacccatcaggaaggcgaaaagattagcgcgaacgagaattccctggccgtgcgtagcacccctgccgaggacgattctagggactctcaggtgaaatctgaagtgcaacaaccagtacacccaaagcctctctcgccagactcaagggcctccagtctgtcagagtcatcgccacccaaggctatgaaaaagttccaggcaccagcccgcgaaacgtgtgtggaatgccagaaaaccgtctaccccatggaaaggcttttagcaaatcagcaggttttccatataagctgctttagatgtagttattgtaacaataagttatccctcggaacttacgcctcacttcatgggaggatatactgtaaaccacatttcaaccagttgttcaagtcgaaggggaactatgacgaggggttcggacacaggccccacaaggacctctgggcaagcaagaatgagaacgaagaaattttggaacggccagcacagctggccaatgcccgcgagacccctcactctcccggggttgaagacgccccgatcgccaaggttggggtcctcgctgctagcatggaagccaaggctagctcccagcaagaaaaagaggacaagcctgcggagaccaagaaattgaggatcgcctggccccctcccaccgagctgggcagcagtggcagtgctttggaagaagggatcaagatgagcaagcccaagtggccaccggaagatgagatctctaaacccgaggtccctgaggacgtcgatctagaccttaaaaaactgaggagatcttcctcactgaaagagcgctcaaggcctttcaccgtggcggcatcgttccagtcaacatcagtgaagtcccccaaaaccgtctccccacctatccgaaaaggttggtcaatgtctgagcagtcagaagagtccgtgggagggcgggtggcggaaaggaaacaagtcgagaacgcgaaggcttcaaaaaagaatggtaacgtcgggaaaaccacatggcagaataaagagtcaaaaggagaaaccgggaagcggtcaaaggaggggcactccctggaaatggagaacgaaaatctcgtggaaaacggagcagattcagatgaggacgataacagctttcttaagcagcagtcaccgcaagaacctaagtccttaaactggagttcgtttgtggataataccttcgccgaggaattcacaactcagaaccagaagagccaggatgtggagctctgggaaggggaggtagtgaaggaactctccgtagaagagcaaatcaagaggaatcggtattacgacgaagacgaagacgaggaatag

SEQ ID NO: 190871 - DNA, 336 bp, Artificial Sequence
  derived and/or modified sequence
atggaaagctcaccatttaataggcgccaatggacatcgctgtccctacgggtaacggctaaagagctctcattagtaaacaaaaataaatcctcagcaatcgtggagattttctccaaataccagaaagccgccgaggagacaaatatggagaagaaaaggagcaataccgaaaacctctctcagcacttccggaaggggacgctcactgtgttgaagaaaaagtgggagaatccagggctcggcgcggagtcacacaccgactccctgcggaattcatctacagaaatacgccatcgcgccgaccatcctcctgcagaggtgacgtctcactag

SEQ ID NO: 190872 - DNA, 393 bp, Artificial Sequence
  derived and/or modified sequence
atggaatcttcaccctttaatcgccgacagtggactagcctgagcttgcgggtaacagctaaggaactgagcctggttaataagaacaaaagctcagccatcgttgagatattcagtaagtatcagaaggccgcagaggaaacaaacatggaaaaaaagaggtctaatactgagaatctgagtcagcattttcggaaaggtactctcaccgtcctgaagaaaaagtgggagaaccccggtctcggggccgaaagtcacacagattctttaagaaatagctctacagaaattcgacacagggccgaccatccacccgctgaggtgacttcacacgctgcaagcggcgccaaggctgaccaggaggaacagatccacccgaggtcgaggttgtag

SEQ ID NO: 190873 - DNA, 1800 bp, Artificial Sequence
  derived and/or modified sequence
atggagaattgtctcggtgaatctaggcacgaagtggagaagagtgagatctcagagaacactgatgcttctggcaaaatcgagaaatataacgtgcctctcaaccgactcaaaatgatgttcgaaaagggcgagccaacacaaacaaaaatccttcgggcccagtcccgaagtgccagcggcaggaaaatctccgagaacagttactctctggacgacctcgagatcggacccgggcaactaagttcaagcaccttcgacagcgagaaaaacgagtcccgacgcaacctcgaacttccccggctctcagagacctcgatcaaagacagaatggcaaagtatcaagcggctgtgtctaaacagtccagtagcactaactatacaaatgagctcaaagcttctggaggagagatcaagattcataagatggagcagaaagagaatgtcccccccggacctgaagtgtgtataactcaccaggaaggtgaaaaaatcagtgccaacgagaacagcctggcagtgagaagtacacctgccgaggatgatagccgcgattctcaggtgaagtcggaggtgcagcagccagtgcacccaaagccgctcagcccggactctcgagccagttcgctgtctgaatcatcaccccccaaggccatgaagaaatttcaggcccctgctcgcgagacttgcgttgagtgccagaagacagtgtaccctatggagcgattactagccaatcagcaggtctttcacattagttgctttcgctgtagctattgtaacaacaagctgtccttgggaacctacgcgagcctccatggtcgcatatactgtaaaccccattttaatcaactgtttaagtctaagggtaattacgatgagggatttggtcaccgcccacacaaggatctttgggcctcaaagaacgagaacgaggagattctggaacgccccgcccaattggccaacgcccgggagactccacattcaccaggtgtagaggacgctcctattgccaaggtgggagtgctagctgcaagtatggaggccaaggcctctagccagcaggagaaggaggacaaacctgccgagacaaaaaaactgcgtatcgcttggccgcctcccaccgaactgggctcctccgggtccgctctggaggagggtatcaaaatgagtaagccgaaatggcctcctgaagacgagattagcaagccggaagttcctgaagacgtcgaccttgacctaaaaaagctgagaagaagcagttctttaaaagagagatcacgcccgtttacagttgcggcatccttccagagcacctccgtcaaatcccctaagaccgtctctccccccatccgcaaggggtggagtatgagcgaacaaagtgaggaatcagtgggtggacgcgtcgcagaaagaaagcaggtggaaaatgcaaaggcaagcaaaaaaaatggcaacgttggaaaaacaacttggcagaacaaggagtctaaaggcgagaccggtaaacgttcaaaggaaggacactctctggagatggagaatgagaatctggtcgaaaacggcgccgactcggatgaagatgacaactcgttcctgaagcagcagtcaccccaggagcccaagtcacttaattggagctccttcgttgacaatacatttgcagaagaattcacgacacagaatcagaaatctcaggacgtcgagctgtgggagggagaagtggtgaaagagctgtccgtagaagagcagattaaacggaataggtattatgatgaagatgaggacgaagagtag

SEQ ID NO: 190874 - DNA, 2280 bp, Artificial Sequence
  derived and/or modified sequence
atggagagcagccccttcaacagacggcagtggaccagcctgagcctgcgggtgacagccaaggagctgagcctggtgaacaagaacaagagcagcgccatcgtggagatcttcagcaagtaccagaaggctgctgaggagaccaacatggagaagaagaggagcaacacagagaacctgagccagcacttcaggaagggcaccctgactgtgctgaagaagaagtgggagaaccctggcctgggcgctgagagccacacagacagcctgaggaacagcagcacagagatccgccacagagctgaccaccccccagctgaggtgaccagccacgccgccagcggggccaaggctgaccaggaggagcagatccaccccaggagccggctgcggagccccccagaggccctggtgcagggccgctacccccacatcaaggatggagaggacctgaaggaccacagcacagagagcaagaagatggagaactgcctgggggagagcagacatgaggtggagaagtctgagatcagtgaaaatacagatgccagcggcaagattgagaagtacaacgtgcccctgaaccggctgaagatgatgtttgagaagggggagcccacccagaccaagatcctgcgggcccagagccgcagcgccagcggcaggaagatcagcgagaacagctacagcctggatgacctggagatcggccctggccagctgagcagcagcacctttgacagcgagaagaatgaaagcagaagaaacctggagctgccccggctgtctgagaccagcatcaaggacaggatggccaagtaccaggccgctgtgtccaagcagagcagcagcaccaactacaccaatgagctgaaggccagcggcggggagatcaagatccacaagatggagcagaaggaaaatgtgcccccaggccctgaggtgtgcatcacccaccaggagggggagaagatcagcgccaatgaaaacagcctggccgtgcgcagcaccccagcagaagatgacagccgggacagccaggtgaagtctgaggtgcagcagcctgtgcaccccaagcccctgagcccagacagccgggccagcagcctgtctgagagcagcccccccaaggccatgaagaagttccaggccccagcccgggagacctgtgtggagtgccagaagacagtgtaccccatggagcggctgctggccaaccagcaggtgttccacatcagctgcttccgctgcagctactgcaacaacaagctgagcctgggcacctacgccagcctgcacggccgcatctactgcaagccccacttcaaccagctgttcaagagcaaaggaaattatgatgagggcttcggccaccggccccacaaggacctgtgggccagcaagaatgaaaatgaggagatcctggagaggcctgcccagctggccaatgcccgggagaccccccacagccctggggtggaggatgcccccatcgccaaggtgggcgtgctggccgcctccatggaggccaaggccagcagccagcaggagaaggaggacaagccagctgagaccaagaagctgcgcatcgcctggcccccacccacagagctgggcagcagcggcagcgccctggaggagggcatcaagatgagcaagcccaagtggcccccagaagatgagatcagcaagccagaggtgcctgaagatgtggacctggacctgaagaagctgcggcgcagcagcagcctgaaggagaggagccggcccttcaccgtggccgccagcttccagagcacctctgtgaagagccccaagacagtgagcccccccatcaggaagggctggagcatgtctgagcagagcgaggagagcgtgggcggccgggtggccgagaggaagcaggtggagaatgccaaggccagcaagaagaatggaaatgtgggcaagaccacctggcagaacaaggagagcaaaggagagaccgggaagaggagcaaggagggccacagcctggagatggagaatgaaaacctggtggagaatggagctgacagtgatgaagatgacaacagcttcctgaagcagcagagcccccaggagcccaagagcctgaactggagcagctttgtggacaacacctttgctgaggagttcaccacccagaaccagaagagccaggatgtggagctgtgggagggggaggtggtgaaggagctgtctgtggaggagcagatcaagaggaaccgctactatgatgaagatgaagatgaggagtag

SEQ ID NO: 190875 - DNA, 2037 bp, Artificial Sequence
  derived and/or modified sequence
atgtggcagggctgcaactgcagccagctgtctgaaacagctgtggaccaggagcagctgggcgtgctgaccttcatcctgcagaggaccacctgcctgaatgtgtctgctgaccaggaggagcagatccaccccaggagccggctgcggagccccccagaggccctggtgcagggccgctacccccacatcaaggatggagaggacctgaaggaccacagcacagagagcaagaagatggagaactgcctgggggagagcagacatgaggtggagaagtctgagatcagcgagaacacagatgccagcggcaagattgagaagtacaacgtgcccctgaaccggctgaagatgatgtttgagaagggggagcccacccagaccaagatcctgcgggcccagagccgcagcgccagcggcaggaagatcagtgaaaattcctacagcctggatgacctggagatcggccctggccagctgagcagcagcacctttgattctgagaagaatgaaagcagaagaaacctggagctgccccggctgtctgagaccagcatcaaggacaggatggccaagtaccaggccgctgtgtccaagcagagcagcagcaccaactacaccaatgagctgaaggccagcggcggggagatcaagatccacaagatggagcagaaggaaaatgtgcccccaggccctgaggtgtgcatcacccaccaggagggggagaagatcagcgccaatgaaaacagcctggccgtgcgcagcaccccagcagaagatgacagccgggacagccaggtgaagtctgaggtgcagcagcctgtgcaccccaagcccctgagcccagacagccgggccagcagcctgtctgagagcagcccccccaaggccatgaagaagttccaggccccagcccgggagacctgtgtggagtgccagaagacagtgtaccccatggagcggctgctggccaaccagcaggtgttccacatcagctgcttccgctgcagctactgcaacaacaagctgagcctgggcacctacgccagcctgcacggccgcatctactgcaagccccacttcaaccagctgttcaagagcaagggcaactatgatgagggcttcggccaccggccccacaaggacctgtgggccagcaagaatgaaaatgaggagatcctggagaggcctgcccagctggccaatgcccgggagaccccccacagccctggggtggaggatgcccccatcgccaaggtgggcgtgctggccgcctccatggaggccaaggccagcagccagcaggagaaggaggacaagccagctgagaccaagaagctgagaattgcctggcccccacccacagagctgggcagcagcggcagcgccctggaggagggcatcaagatgagcaagcccaagtggcccccagaagatgagatcagcaagccagaggtgcctgaagatgtggacctggacctgaagaagctgcggcgcagcagcagcctgaaggagaggagccggcccttcaccgtggccgccagcttccagagcacctctgtgaagagccccaagacagtgtccccacccatcaggaagggctggagcatgtctgagcagagcgaggagagcgtgggcggccgggtggccgagaggaagcaggtggagaatgccaaggccagcaagaagaatggaaatgtgggcaagaccacctggcagaacaaggagagcaagggggagaccgggaagaggagcaaggagggccacagcctggagatggagaatgaaaacctggtggagaatggagctgacagtgatgaagatgacaacagcttcctgaagcagcagagcccccaggagcccaagagcctgaactggagcagctttgtggacaacacctttgctgaggagttcaccacccagaaccagaagagccaggatgtggagctgtgggagggggaggtggtgaaggagctgtctgtggaggagcagatcaagaggaaccgctactatgatgaagatgaagatgaggagtag

SEQ ID NO: 190876 - DNA, 336 bp, Artificial Sequence
  derived and/or modified sequence
atggagagcagccccttcaacagacggcagtggaccagcctgagcctgcgggtgacagccaaggagctgagcctggtgaacaagaacaagagcagcgccatcgtggagatcttcagcaagtaccagaaggctgctgaggagaccaacatggagaagaagaggagcaacacagagaacctgagccagcacttcaggaagggcaccctgactgtgctgaagaagaagtgggagaaccctggcctgggcgctgagagccacacagacagcctgaggaacagcagcacagagatccgccacagagctgaccaccccccagctgaggtgaccagccactag

SEQ ID NO: 190877 - DNA, 393 bp, Artificial Sequence
  derived and/or modified sequence
atggagagcagccccttcaacagacggcagtggaccagcctgagcctgcgggtgacagccaaggagctgagcctggtgaacaagaacaagagcagcgccatcgtggagatcttcagcaagtaccagaaggctgctgaggagaccaacatggagaagaagaggagcaacacagagaacctgagccagcacttcaggaagggcaccctgactgtgctgaagaagaagtgggagaaccctggcctgggcgctgagagccacacagacagcctgaggaacagcagcacagagatccgccacagagctgaccaccccccagctgaggtgaccagccacgccgccagcggggccaaggctgaccaggaggagcagatccaccccaggagccggctgtag

SEQ ID NO: 190878 - DNA, 1800 bp, Artificial Sequence
  derived and/or modified sequence
atggagaactgcctgggggagagcagacatgaggtggagaagtctgagatcagtgaaaatacagatgccagcggcaagattgagaagtacaacgtgcccctgaaccggctgaagatgatgtttgagaagggggagcccacccagaccaagatcctgcgggcccagagccgcagcgccagcggcaggaagatcagcgagaacagctacagcctggatgacctggagatcggccctggccagctgagcagcagcacctttgacagcgagaagaatgaaagcagaagaaacctggagctgccccggctgtctgagaccagcatcaaggacaggatggccaagtaccaggccgctgtgtccaagcagagcagcagcaccaactacaccaatgagctgaaggccagcggcggggagatcaagatccacaagatggagcagaaggaaaatgtgcccccaggccctgaggtgtgcatcacccaccaggagggggagaagatcagcgccaatgaaaacagcctggccgtgcgcagcaccccagcagaagatgacagccgggacagccaggtgaagtctgaggtgcagcagcctgtgcaccccaagcccctgagcccagacagccgggccagcagcctgtctgagagcagcccccccaaggccatgaagaagttccaggccccagcccgggagacctgtgtggagtgccagaagacagtgtaccccatggagcggctgctggccaaccagcaggtgttccacatcagctgcttccgctgcagctactgcaacaacaagctgagcctgggcacctacgccagcctgcacggccgcatctactgcaagccccacttcaaccagctgttcaagagcaaaggaaattatgatgagggcttcggccaccggccccacaaggacctgtgggccagcaagaatgaaaatgaggagatcctggagaggcctgcccagctggccaatgcccgggagaccccccacagccctggggtggaggatgcccccatcgccaaggtgggcgtgctggccgcctccatggaggccaaggccagcagccagcaggagaaggaggacaagccagctgagaccaagaagctgcgcatcgcctggcccccacccacagagctgggcagcagcggcagcgccctggaggagggcatcaagatgagcaagcccaagtggcccccagaagatgagatcagcaagccagaggtgcctgaagatgtggacctggacctgaagaagctgcggcgcagcagcagcctgaaggagaggagccggcccttcaccgtggccgccagcttccagagcacctctgtgaagagccccaagacagtgagcccccccatcaggaagggctggagcatgtctgagcagagcgaggagagcgtgggcggccgggtggccgagaggaagcaggtggagaatgccaaggccagcaagaagaatggaaatgtgggcaagaccacctggcagaacaaggagagcaaaggagagaccgggaagaggagcaaggagggccacagcctggagatggagaatgaaaacctggtggagaatggagctgacagtgatgaagatgacaacagcttcctgaagcagcagagcccccaggagcccaagagcctgaactggagcagctttgtggacaacacctttgctgaggagttcaccacccagaaccagaagagccaggatgtggagctgtgggagggggaggtggtgaaggagctgtctgtggaggagcagatcaagaggaaccgctactatgatgaagatgaagatgaggagtag

SEQ ID NO: 190879 - DNA, 3706 bp, Artificial Sequence
  derived and/or modified sequence
ggggtccggggcggggccgcaggagcagtaggtgttagcagcttggtcgcgacaggtgcgctaggtagagcgccgggacctgtgacagggctggtagcagcgcagaggaaaggcggcttttagccaggtatttcagtgtctgtagacaagatggaatcatctccatttaatagacggcaatggacctcactatcattgagggtaacagccaaagaactttctcttgtcaacaagaacaagtcatcggctattgtggaaatattctccaagtaccagaaagcagctgaagaaacaaacatggagaagaagagaagtaacaccgaaaatctctcccagcactttagaaaggggaccctgactgtgttaaagaagaagtgggagaacccagggctgggagcagagtctcacacagactctctacggaacagcagcactgagattaggcacagagcagaccatcctcctgctgaagtgacaagccacgctgcttctggagccaaagctgaccaagaagaacaaatccaccccagatctagactcaggtcacctcctgaagccctcgttcagggtcgatatccccacatcaaggacggtgaggatcttaaagaccactcaacagaaagtaaaaaaatggaaaattgtctaggagaatccaggcatgaagtagaaaaatcagaaatcagtgaaaacacagatgcttcgggcaaaatagagaaatataatgttccgctgaacaggcttaagatgatgtttgagaaaggtgaaccaactcaaactaagattctccgggcccaaagccgaagtgcaagtggaaggaagatctctgaaaacagctattctctagatgacctggaaataggcccaggtcagttgtcatcttctacatttgactcggagaaaaatgagagtagacgaaatctggaacttccacgcctctcagaaacctctataaaggatcgaatggccaagtaccaggcagctgtgtccaaacaaagcagctcaaccaactatacaaatgagctgaaagccagtggtggcgaaatcaaaattcataaaatggagcaaaaggagaatgtgcccccaggtcctgaggtctgcatcacccatcaggaaggggaaaagatttctgcaaatgagaatagcctggcagtccgttccacccctgccgaagatgactcccgtgactcccaggttaagagtgaggttcaacagcctgtccatcccaagccactaagtccagattccagagcctccagtctttctgaaagttctcctcccaaagcaatgaagaagtttcaggcacctgcaagagagacctgcgtggaatgtcagaagacagtctatccaatggagcgtctcttggccaaccagcaggtgtttcacatcagctgcttccgttgctcctattgcaacaacaaactcagtctaggaacatatgcatctttacatggaagaatctattgtaagcctcacttcaatcaactctttaaatctaagggcaactatgatgaaggctttgggcacagaccacacaaggatctatgggcaagcaaaaatgaaaacgaagagattttggagagaccagcccagcttgcaaatgcaagggagacccctcacagcccaggggtagaagatgcccctattgctaaggtgggtgtcctggctgcaagtatggaagccaaggcctcctctcagcaggagaaggaagacaagccagctgaaaccaagaagctgaggatcgcctggccaccccccactgaacttggaagttcaggaagtgccttggaggaagggatcaaaatgtcaaagcccaaatggcctcctgaagacgaaatcagcaagcccgaagttcctgaggatgtcgatctagatctgaagaagctaagacgatcttcttcactgaaggaaagaagccgcccattcactgtagcagcttcatttcaaagcacctctgtcaagagcccaaaaactgtgtccccacctatcaggaaaggctggagcatgtcagagcagagtgaagagtctgtgggtggaagagttgcagaaaggaaacaagtggaaaatgccaaggcttctaagaagaatgggaatgtgggaaaaacaacctggcaaaacaaagaatctaaaggagagacagggaagagaagtaaggaaggtcatagtttggagatggagaatgagaatcttgtagaaaatggtgcagactccgatgaagatgataacagcttcctcaaacaacaatctccacaagaacccaagtctctgaattggtcgagttttgtagacaacacctttgctgaagaattcactactcagaatcagaaatcccaggatgtggaactctgggagggagaagtggtcaaagagctctctgtggaagaacagataaagagaaatcggtattatgatgaggatgaggatgaagagtgacaaattgcaatgatgctgggccttaaattcatgttagtgttagcgagccactgccctttgtcaaaatgtgatgcacataagcaggtatcccagcatgaaatgtaatttacttggaagtaactttggaaaagaattccttcttaaaatcaaaaacaaaacaaaaaaacacaaaaaacacattctaaatactagagataactttacttaaattcttcattttagcagtgatgatatgcataagtgctgtaaggcttgtaactggggaaatattccacctgataatagcccagattctactgtattcccaaaaggcaatattaaggtagacagatgattagtagtatattgttacacactattttggaattagagaacatacagaaggaatttaggggcttaaacattacgactgaatgcactttagtataaagggcacagtttgtatatttttaaatgaataccaatttaattttttagtatttacctgttaagagattatttagtctttaaattttttaggttaattttcttgctgtgatatatatgaggaatttactactttatgtcctgctctctaaactacatcctgaactcgacgtcctgaggtataatacaacagagcactttttgaggcaattgaaaaaccaacctacactcttcggtgcttagagagatctgctgtctcccaaataagcttttgtatctgccagtgaatttactgtactccaaatgattgctttcttttctggtgatatctgtgcttctcataattactgaaagctgcaatattttagtaataccttcgggatcactgtcccccatcttccgtgttagagcaaagtgaagagtttaaaggaggaagaagaaagaactgtcttacaccacttgagctcagacctctaaaccctgtatttcccttatgatgtcccctttttgagacactaatttttaaatacttactagctctgaaatatattgatttttatcacagtattctcagggtgaaattaaaccaactataggcctttttcttgggatgattttctagtcttaaggtttggggacattataaacttgagtacatttgttgtacacagttgatattccaaattgtatggatgggagggagaggtgtcttaagctgtaggcttttctttgtactgcatttatagagatttagctttaatattttttagagatgtaaaacattctgctttcttagtcttacctagtctgaaacatttttattcaataaagattttaattaaaatttgaa

SEQ ID NO: 190880 - DNA, 2198 bp, Artificial Sequence
  derived and/or modified sequence
ggatgctttctccatgtggcaaggctgtaactgttcacagctgtctgaaacagcagtggaccaggagcagcttggagttttaactttcattttacaaagaacaacatgtttgaatgtttcagcagaccaagaagaacaaatccaccccagatctagactcaggtcacctcctgaagccctcgttcagggtcgatatccccacatcaaggacggtgaggatcttaaagaccactcaacagaaagtaaaaaaatggaaaattgtctaggagaatccaggcatgaagtagaaaaatcagaaatcagtgaaaacacagatgcttcgggcaaaatagagaaatataatgttccgctgaacaggcttaagatgatgtttgagaaaggtgaaccaactcaaactaagattctccgggcccaaagccgaagtgcaagtggaaggaagatctctgaaaacagctattctctagatgacctggaaataggcccaggtcagttgtcatcttctacatttgactcggagaaaaatgagagtagacgaaatctggaacttccacgcctctcagaaacctctataaaggatcgaatggccaagtaccaggcagctgtgtccaaacaaagcagctcaaccaactatacaaatgagctgaaagccagtggtggcgaaatcaaaattcataaaatggagcaaaaggagaatgtgcccccaggtcctgaggtctgcatcacccatcaggaaggggaaaagatttctgcaaatgagaatagcctggcagtccgttccacccctgccgaagatgactcccgtgactcccaggttaagagtgaggttcaacagcctgtccatcccaagccactaagtccagattccagagcctccagtctttctgaaagttctcctcccaaagcaatgaagaagtttcaggcacctgcaagagagacctgcgtggaatgtcagaagacagtctatccaatggagcgtctcttggccaaccagcaggtgtttcacatcagctgcttccgttgctcctattgcaacaacaaactcagtctaggaacatatgcatctttacatggaagaatctattgtaagcctcacttcaatcaactctttaaatctaagggcaactatgatgaaggctttgggcacagaccacacaaggatctatgggcaagcaaaaatgaaaacgaagagattttggagagaccagcccagcttgcaaatgcaagggagacccctcacagcccaggggtagaagatgcccctattgctaaggtgggtgtcctggctgcaagtatggaagccaaggcctcctctcagcaggagaaggaagacaagccagctgaaaccaagaagctgaggatcgcctggccaccccccactgaacttggaagttcaggaagtgccttggaggaagggatcaaaatgtcaaagcccaaatggcctcctgaagacgaaatcagcaagcccgaagttcctgaggatgtcgatctagatctgaagaagctaagacgatcttcttcactgaaggaaagaagccgcccattcactgtagcagcttcatttcaaagcacctctgtcaagagcccaaaaactgtgtccccacctatcaggaaaggctggagcatgtcagagcagagtgaagagtctgtgggtggaagagttgcagaaaggaaacaagtggaaaatgccaaggcttctaagaagaatgggaatgtgggaaaaacaacctggcaaaacaaagaatctaaaggagagacagggaagagaagtaaggaaggtcatagtttggagatggagaatgagaatcttgtagaaaatggtgcagactccgatgaagatgataacagcttcctcaaacaacaatctccacaagaacccaagtctctgaattggtcgagttttgtagacaacacctttgctgaagaattcactactcagaatcagaaatcccaggatgtggaactctgggagggagaagtggtcaaagagctctctgtggaagaacagataaagagaaatcggtattatgatgaggatgaggatgaagagtgacaaattgcaatgatgctgggccttaaattcatgttagtgttagcgagccactgccctttgtcaaaatgtgatgcacataagcaggtatcccagcatgaaatgtaatttacttggaagtaactttggaaaagaattccttcttaaaatc

SEQ ID NO: 190881 - DNA, 3920 bp, Artificial Sequence
  derived and/or modified sequence
tgggtcgtaatctagaataccatcactaggtgactaagtcatactcacattcctttcattgacctggtggccataaattgtttcctcccatgcctaaagattcacagagaacagaaaagtactagattactacattattagcagactaatggtgggaaatgtctatagtcatcgacctctatgtttattttattttattttatttttttattttgagatggagtttcactcttgttccccaggctggagtgcagtggcgtgatctcggctcactgcaacctctgcctccctgattcaagcgattctcctgcctcagcctcccaagtaactgggattacaagtgtgcaccaccacacgtggctaattttttgtatttttagtagagacaggatttcaccatgttcgccaggctggtcttgaactcctgacctcaggcgatccacccgcctcagcttcccaaagtgctgggattacaggcgtgagccactgcacccaggttctatgttgattttagatgtaatagatgagttaattgtaatattcaccccagtgtcctttgcaaggaaaaaaatgcaattatccttattccttatgacaataaaatgcatgttcttttatgttgaggctctgttttgagaagtaaaataaattatgtctttagtacaatatatgaattgtatatggaaaaacatgctttttgaaagtcccaccaaaaaggtttctttatggtatcattaaatataatttcagtttttatatgtatacatcatccctgtctctctttccaggccgggcatttatatatgtatggtcagtatattttctattattggcacttggcatctcctttcccctgctccagaatggtcttttctgataaaactcacaagctttgcattaccacaagctctgctgctagaagagtgaatcacaagaatgttgtatgcttggggtgttctgtgtgcctgtgttgatgtgtctgtattctaatgagcaatccagttttacactagcatacagatatttaactctgaggtatgtgtccacaaagctgcttttgtcatttcactagtcagtgggttttgcttgtgagagttagggggttgatttgacccgaggcttcttagaagaattttttaacattccaagtttatctaatagatgtgctatgaagagaacagaatgatgggactttaaaaaaatttttacagttatttttattttgtagaatgagctgaaagccagtggtggcgaaatcaaaattcataaaatggagcaaaaggagaatgtgcccccaggtcctgaggtctgcatcacccatcaggaaggggaaaagatttctgcaaatgagaatagcctggcagtccgttccacccctgccgaagatgactcccgtgactcccaggttaagagtgaggttcaacagcctgtccatcccaagccactaagtccagattccagagcctccagtctttctgaaagttctcctcccaaagcaatgaagaagtttcaggcacctgcaagagagacctgcgtggaatgtcagaagacagtctatccaatggagcgtctcttggccaaccagcaggtgtttcacatcagctgcttccgttgctcctattgcaacaacaaactcagtctaggaacatatgcatctttacatggaagaatctattgtaagcctcacttcaatcaactctttaaatctaagggcaactatgatgaaggctttgggcacagaccacacaaggatctatgggcaagcaaaaatgaaaacgaagagattttggagagaccagcccagcttgcaaatgcaagggagacccctcacagcccaggggtagaagatgcccctattgctaaggtgggtgtcctggctgcaagtatggaagccaaggcctcctctcagcaggagaaggaagacaagccagctgaaaccaagaagctgaggatcgcctggccaccccccactgaacttggaagttcaggaagtgccttggaggaagggatcaaaatgtcaaagcccaaatggcctcctgaagacgaaatcagcaagcccgaagttcctgaggatgtcgatctagatctgaagaagctaagacgatcttcttcactgaaggaaagaagccgcccattcactgtagcagcttcatttcaaagcacctctgtcaagagcccaaaaactgtgtccccacctatcaggaaaggctggagcatgtcagagcagagtgaagagtctgtgggtggaagagttgcagaaaggaaacaagtggaaaatgccaaggcttctaagaagaatgggaatgtgggaaaaacaacctggcaaaacaaagaatctaaaggagagacagggaagagaagtaaggaaggtcatagtttggagatggagaatgagaatcttgtagaaaatggtgcagactccgatgaagatgataacagcttcctcaaacaacaatctccacaagaacccaagtctctgaattggtcgagttttgtagacaacacctttgctgaagaattcactactcagaatcagaaatcccaggatgtggaactctgggagggagaagtggtcaaagagctctctgtggaagaacagataaagagaaatcggtattatgatgaggatgaggatgaagagtgacaaattgcaatgatgctgggccttaaattcatgttagtgttagcgagccactgccctttgtcaaaatgtgatgcacataagcaggtatcccagcatgaaatgtaatttacttggaagtaactttggaaaagaattccttcttaaaatcaaaaacaaaacaaaaaaacacaaaaaacacattctaaatactagagataactttacttaaattcttcattttagcagtgatgatatgcataagtgctgtaaggcttgtaactggggaaatattccacctgataatagcccagattctactgtattcccaaaaggcaatattaaggtagacagatgattagtagtatattgttacacactattttggaattagagaacatacagaaggaatttaggggcttaaacattacgactgaatgcactttagtataaagggcacagtttgtatatttttaaatgaataccaatttaattttttagtatttacctgttaagagattatttagtctttaaattttttaggttaattttcttgctgtgatatatatgaggaatttactactttatgtcctgctctctaaactacatcctgaactcgacgtcctgaggtataatacaacagagcactttttgaggcaattgaaaaaccaacctacactcttcggtgcttagagagatctgctgtctcccaaataagcttttgtatctgccagtgaatttactgtactccaaatgattgctttcttttctggtgatatctgtgcttctcataattactgaaagctgcaatattttagtaataccttcgggatcactgtcccccatcttccgtgttagagcaaagtgaagagtttaaaggaggaagaagaaagaactgtcttacaccacttgagctcagacctctaaaccctgtatttcccttatgatgtcccctttttgagacactaatttttaaatacttactagctctgaaatatattgatttttatcacagtattctcagggtgaaattaaaccaactataggcctttttcttgggatgattttctagtcttaaggtttggggacattataaacttgagtacatttgttgtacacagttgatattccaaattgtatggatgggagggagaggtgtcttaagctgtaggcttttctttgtactgcatttatagagatttagctttaatattttttagagatgtaaaacattctgctttcttagtcttacctagtctgaaacatttttattcaataaagattttaattaaaatttgaa

SEQ ID NO: 190882 - DNA, 567 bp, Artificial Sequence
  derived and/or modified sequence
agatcagttatgctcttcggttgccaagagctgcaagtagtactttatttttcttttacttctggtaagctgtgaattagcagtactttattattatttttttttagttttcaagactcctggatcagaaacaaagtggtactttatatttttcactcttcaaataaggaaactgttgactcatttctaatctctcgtcttctggacaaaggtatttcagtgtctgtagacaagatggaatcatctccatttaatagacggcaatggacctcactatcattgagggtaacagccaaagaactttctcttgtcaacaagaacaagtcatcggctattgtggaaatattctccaagtaccagaaagcagctgaagaaacaaacatggagaagaagagaagtaacaccgaaaatctctcccagcactttagaaaggggaccctgactgtgttaaagaagaagtgggagaacccagggctgggagcagagtctcacacagactctctacggaacagcagcactgagattaggcacagagcagaccatcctcctgctgaagtgacaagccac

SEQ ID NO: 190883 - DNA, 583 bp, Artificial Sequence
  derived and/or modified sequence
aggtagagcgccgggacctgtgacagggctggtagcagcgcagaggaaaggcggcttttagccagttttcaagactcctggatcagaaacaaagtggtactttatatttttcactcttcaaataaggaaactgttgactcatttctaatctctcgtcttctggacaaaggtatttcagtgtctgtagacaagatggaatcatctccatttaatagacggcaatggacctcactatcattgagggtaacagccaaagaactttctcttgtcaacaagaacaagtcatcggctattgtggaaatattctccaagtaccagaaagcagctgaagaaacaaacatggagaagaagagaagtaacaccgaaaatctctcccagcactttagaaaggggaccctgactgtgttaaagaagaagtgggagaacccagggctgggagcagagtctcacacagactctctacggaacagcagcactgagattaggcacagagcagaccatcctcctgctgaagtgacaagccacgctgcttctggagccaaagctgaccaagaagaacaaatccaccccagatctagactca

SEQ ID NO: 190884 - DNA, 3254 bp, Artificial Sequence
  derived and/or modified sequence
agaccatcctcctgctgaagtgacaagccacgctgcttctggagccaaagctgaccaagaagaacaaatccaccccagatctagactcaggtcacctcctgaagccctcgttcagggtcgatatccccacatcaaggacggtgaggatcttaaagaccactcaacagaaagtaaaaaaatggaaaattgtctaggagaatccaggcatgaagtagaaaaatcagaaatcagtgaaaacacagatgcttcgggcaaaatagagaaatataatgttccgctgaacaggcttaagatgatgtttgagaaaggtgaaccaactcaaactaagattctccgggcccaaagccgaagtgcaagtggaaggaagatctctgaaaacagctattctctagatgacctggaaataggcccaggtcagttgtcatcttctacatttgactcggagaaaaatgagagtagacgaaatctggaacttccacgcctctcagaaacctctataaaggatcgaatggccaagtaccaggcagctgtgtccaaacaaagcagctcaaccaactatacaaatgagctgaaagccagtggtggcgaaatcaaaattcataaaatggagcaaaaggagaatgtgcccccaggtcctgaggtctgcatcacccatcaggaaggggaaaagatttctgcaaatgagaatagcctggcagtccgttccacccctgccgaagatgactcccgtgactcccaggttaagagtgaggttcaacagcctgtccatcccaagccactaagtccagattccagagcctccagtctttctgaaagttctcctcccaaagcaatgaagaagtttcaggcacctgcaagagagacctgcgtggaatgtcagaagacagtctatccaatggagcgtctcttggccaaccagcaggtgtttcacatcagctgcttccgttgctcctattgcaacaacaaactcagtctaggaacatatgcatctttacatggaagaatctattgtaagcctcacttcaatcaactctttaaatctaagggcaactatgatgaaggctttgggcacagaccacacaaggatctatgggcaagcaaaaatgaaaacgaagagattttggagagaccagcccagcttgcaaatgcaagggagacccctcacagcccaggggtagaagatgcccctattgctaaggtgggtgtcctggctgcaagtatggaagccaaggcctcctctcagcaggagaaggaagacaagccagctgaaaccaagaagctgaggatcgcctggccaccccccactgaacttggaagttcaggaagtgccttggaggaagggatcaaaatgtcaaagcccaaatggcctcctgaagacgaaatcagcaagcccgaagttcctgaggatgtcgatctagatctgaagaagctaagacgatcttcttcactgaaggaaagaagccgcccattcactgtagcagcttcatttcaaagcacctctgtcaagagcccaaaaactgtgtccccacctatcaggaaaggctggagcatgtcagagcagagtgaagagtctgtgggtggaagagttgcagaaaggaaacaagtggaaaatgccaaggcttctaagaagaatgggaatgtgggaaaaacaacctggcaaaacaaagaatctaaaggagagacagggaagagaagtaaggaaggtcatagtttggagatggagaatgagaatcttgtagaaaatggtgcagactccgatgaagatgataacagcttcctcaaacaacaatctccacaagaacccaagtctctgaattggtcgagttttgtagacaacacctttgctgaagaattcactactcagaatcagaaatcccaggatgtggaactctgggagggagaagtggtcaaagagctctctgtggaagaacagataaagagaaatcggtattatgatgaggatgaggatgaagagtgacaaattgcaatgatgctgggccttaaattcatgttagtgttagcgagccactgccctttgtcaaaatgtgatgcacataagcaggtatcccagcatgaaatgtaatttacttggaagtaactttggaaaagaattccttcttaaaatcaaaaacaaaacaaaaaaacacaaaaaacacattctaaatactagagataactttacttaaattcttcattttagcagtgatgatatgcataagtgctgtaaggcttgtaactggggaaatattccacctgataatagcccagattctactgtattcccaaaaggcaatattaaggtagacagatgattagtagtatattgttacacactattttggaattagagaacatacagaaggaatttaggggcttaaacattacgactgaatgcactttagtataaagggcacagtttgtatatttttaaatgaataccaatttaattttttagtatttacctgttaagagattatttagtctttaaattttttaggttaattttcttgctgtgatatatatgaggaatttactactttatgtcctgctctctaaactacatcctgaactcgacgtcctgaggtataatacaacagagcactttttgaggcaattgaaaaaccaacctacactcttcggtgcttagagagatctgctgtctcccaaataagcttttgtatctgccagtgaatttactgtactccaaatgattgctttcttttctggtgatatctgtgcttctcataattactgaaagctgcaatattttagtaataccttcgggatcactgtcccccatcttccgtgttagagcaaagtgaagagtttaaaggaggaagaagaaagaactgtcttacaccacttgagctcagacctctaaaccctgtatttcccttatgatgtcccctttttgagacactaatttttaaatacttactagctctgaaatatattgatttttatcacagtattctcagggtgaaattaaaccaactataggcctttttcttgggatgattttctagtcttaaggtttggggacattataaacttgagtacatttgttgtacacagttgatattccaaattgtatggatgggagggagaggtgtcttaagctgtaggcttttctttgtactgcatttatagagatttagctttaatattttttagagatgtaaaacattctgctttcttagtcttacctagtctgaaacatttttattcaataaagattttaattaaaatttgaa

SEQ ID NO: 190885 - DNA, 2280 bp, Artificial Sequence
  derived and/or modified sequence
atggagagcagccccttcaaccggcggcagtggaccagcctgagcttgcgcgtgacagctaaagagctatctttggtcaataagaacaaatcctcagccatcgtagaaatcttttcgaaatatcagaaagctgccgaggagactaacatggaaaaaaaaagaagcaacaccgagaatctgtcccaacatttccgcaaaggcactttaacagttttgaagaaaaagtgggagaaccctggcctcggcgcagaatcacacactgactcgctgcgcaacagctcaacggaaatcaggcaccgagctgatcatccacctgccgaagtgacctctcatgctgcctcaggagccaaggccgatcaggaagaacagatacacccccgtagccggcttcggtcccctcccgaggcactggtgcagggccgctatccacatatcaaagacggtgaggacctgaaagatcactctacagagagcaaaaagatggaaaattgtttaggggagagccggcatgaagtggaaaagagtgaaatttccgagaacaccgacgcatctggcaaaatcgagaaatacaatgtgcccctgaatcggctaaagatgatgtttgagaaaggagagcctacccaaacaaagatactccgggcgcagagcaggtctgcttccggccgaaagatatcagaaaatagctattccttggacgacttggaaatcgggccgggacaactgtcctcctcaacgtttgactcagaaaagaacgaatccaggcggaacctagaacttccccggctgtctgagacatccatcaaggatcgtatggctaaatatcaggcagcggtcagtaagcagtcttctagtaccaattacacgaatgagctaaaagcctcgggaggcgaaattaaaattcataagatggaacagaaggagaacgtgcccccggggcctgaagtctgcattacccatcaggaaggggagaaaatatcagcaaacgagaattctctggccgtgagatctacgcccgccgaggacgactcccgggactcacaggttaagtctgaggtgcagcagccggtgcatcccaagcctctatcccccgactccagggcaagctcattatcagaaagctcacctcccaaggcaatgaagaagtttcaagcaccggccagggagacatgtgtcgagtgtcagaagaccgtgtaccccatggagaggctactcgctaatcaacaggtcttccacatcagctgttttcgatgctcatactgtaataataagctgtctctcgggacttatgcgtcactgcacggacgcatatactgcaaaccacacttcaatcaactctttaagagcaagggcaactacgatgagggctttggacataggccacacaaagacctgtgggcatctaaaaatgagaatgaggaaattcttgagcgccctgctcagctcgctaatgctcgggaaaccccccactcacctggggtcgaagacgcacccatagcaaaggtaggcgttctcgcagcatcaatggaggcaaaggcttcctcccaacaggagaaggaagacaaacccgccgagacaaaaaaactcagaatcgcttggcctcccccaacagaactgggttcaagcggttcagcactagaagagggcattaagatgtctaaaccgaaatggccacccgaggacgagatcagtaaacctgaagttccggaagatgtggacctcgatctgaaaaagctgcggcgctcctcatcactcaaggagcgatctcggccattcactgtggccgcgagtttccagagcacatccgtgaagtcccctaaaaccgtaagtccccctataagaaagggttggagtatgtcggagcaaagcgaggagagcgtggggggacgggtcgcggagaggaagcaggtcgagaacgcaaaagcctctaagaagaatggtaacgtggggaagaccacatggcaaaacaaggagtcaaagggtgaaactggtaagcgctccaaggaggggcatagcctcgaaatggagaatgaaaatctcgtggaaaatggtgccgacagtgatgaagatgacaatagttttctgaaacaacagtcaccgcaggaaccaaaaagtctgaattggtccagttttgtagacaatacctttgctgaagaattcaccacacagaatcaaaaaagccaggacgtcgagctttgggagggggaagtggtcaaagagttgtctgtggaggaacagatcaaacggaacaggtactatgacgaagatgaggacgaggagtag

SEQ ID NO: 190886 - DNA, 2037 bp, Artificial Sequence
  derived and/or modified sequence
atgtggcagggctgcaactgcagccagctgagcgagaccgccgtggatcaggaacagctgggggtcctgactttcatccttcagagaaccacatgtctgaatgttagtgcagatcaggaagagcagatacacccccggtctagactgcggtctccccccgaggcgctggtccagggccggtatccacatattaaagacggggaagatttgaaagatcactctactgagtctaagaagatggaaaactgtttgggggaaagccggcatgaagtggagaaatcagagatatcagagaataccgatgccagcgggaagatcgaaaagtataatgttcccctaaacagactaaagatgatgtttgaaaaaggggagcctacgcaaaccaagattctccgcgcgcagtcaaggagtgcctccggtagaaagatttcggaaaacagttactctctggatgatttagagatcgggcccgggcagttgtcatccagtacctttgactctgagaaaaacgaatctcggagaaacctggagcttccccgcttatccgagacctcgattaaggacagaatggcaaagtaccaagcagcggtatctaaacaaagctcaagtacaaattataccaacgaactgaaagccagcggaggagaaatcaagatccacaaaatggagcagaaggaaaacgtaccaccggggcccgaagtgtgcatcacccaccaagagggggagaaaatcagtgccaacgaaaactcccttgccgtgagatctacacccgctgaagacgattctcgcgattcccaggtcaagagtgaggtgcaacaaccagttcatccaaagccactgtccccagacagtcgtgcatcatctttgagcgagagctccccacctaaggccatgaagaagttccaggcccctgccagggagacatgtgtggagtgtcagaaaacagtctatcctatggaacggctccttgctaaccaacaggtctttcatatctcttgcttcagatgctcatattgcaacaacaaattgtctcttggcacttacgctagcctgcacggcaggatttactgcaaaccccatttcaaccagctattcaagtcaaagggaaactatgacgagggattcggtcacaggcctcataaagacctctgggctagcaagaacgagaatgaggagatcttggagcggccggcccagctggctaacgcgagggagaccccccacagccctggcgttgaagacgccccaattgcaaaggtcggtgtgctcgccgcctccatggaagccaaagcctcgagccagcaggagaaggaggacaaacctgcagagaccaagaagttacgcatagcttggccgccccctacagagctgggaagctctggctccgccctggaggaagggattaagatgtccaagcccaagtggccaccggaagacgaaatttctaaacctgaggtgcccgaggacgttgatctcgacttaaaaaaactgcgtcgcagcagctcattgaaggaacgttcaaggcctttcacagtggctgcttcctttcagagcacgtccgtgaagagcccgaaaactgtgtctccccctatccgaaaaggttggagtatgagtgagcagtctgaggaaagcgtggggggacgcgtcgcagagaggaagcaggtggagaacgccaaggcctctaaaaagaacgggaatgtcggcaaaacaacttggcagaataaagaatccaagggagagactggaaagcgatccaaagaggggcattcactggaaatggagaacgagaacttggttgaaaacggagcagattcagatgaagatgataactcctttctgaagcaacagtcacctcaggagccgaagagtctgaactggagttctttcgtcgacaacactttcgctgaggagttcaccacccagaatcagaagtctcaagacgttgagttgtgggagggagaagtggtcaaagaactgtctgtcgaggaacagatcaagcgcaatcgatactacgacgaagacgaagatgaagagtag

SEQ ID NO: 190887 - DNA, 336 bp, Artificial Sequence
  derived and/or modified sequence
atggagagcagccccttcaaccggcggcagtggaccagcctgagccttagggtaaccgcgaaggaactctcgctcgtcaacaagaacaaatcttccgcgatcgtcgagattttctctaaataccagaaggcagctgaggagactaacatggaaaaaaaacggtccaacaccgagaatctgagtcagcacttccgcaagggcactctgacggttcttaagaagaagtgggaaaacccggggctcggggccgaaagtcatacggactcattacgaaatagcagtacagagatccgccatcgcgccgaccaccctcccgccgaagtcacatcacattag

SEQ ID NO: 190888 - DNA, 393 bp, Artificial Sequence
  derived and/or modified sequence
atggagagcagccccttcaaccggcggcagtggaccagcctgagccttcgggtgactgcaaaagagctgagcctagtaaacaaaaacaagtcgtcagctatcgtggaaatcttcagtaaatatcagaaagccgcagaagagacgaacatggagaagaaaagatcaaatacagagaacttgtcccaacattttcggaagggtacgctgaccgttctgaagaagaaatgggagaaccccggacttggcgccgaatcccatactgattcactgcgaaattcatcaaccgagattcggcaccgcgccgatcatccccctgcggaagttaccagccacgcagcatcgggcgccaaagcagatcaggaggaacaaattcacccccgttcccgcttgtag

SEQ ID NO: 190889 - DNA, 1800 bp, Artificial Sequence
  derived and/or modified sequence
atggagaactgcctgggcgagagccggcacgaggtggagaagagcgagatcagcgaaaacacagatgccagcggaaagatagaaaagtacaacgtgcccctgaacaggttgaaaatgatgtttgagaagggcgaaccaacccagactaagattctgcgcgcacagtctagatctgcctcaggccgtaaaatcagcgagaattcttactcactggacgatcttgaaatcggcccaggccagcttagttcttcaactttcgatagcgaaaaaaacgagtcccgccgaaatctagaactcccacggctaagtgagactagcattaaggaccggatggcaaaataccaggcagccgtttctaagcaatcaagcagcacaaactacaccaacgagctgaaagcctcaggcggcgagataaagattcacaagatggagcagaaggagaatgtgcctcccgggcccgaagtctgtatcacacatcaagagggagagaagatttccgccaacgaaaactcacttgctgtgagatcaaccccagctgaagacgacagtagggactcacaggtgaaatccgaagtacagcaaccagtgcaccctaagccgctgagtcctgacagcagagctagtagtctgtcagagtctagtccacccaaggctatgaagaagtttcaggcccctgcccgggagacatgcgtcgagtgccagaaaactgtgtatccaatggaacggcttctggcaaatcagcaggttttccacatctcttgtttccggtgctcttattgcaacaacaaactgtcactgggcacctatgctagcctgcatggccggatctattgcaagccccacttcaaccagctgttcaaaagcaaggggaattatgatgaggggtttggtcacagacctcacaaagatctctgggctagtaagaatgagaatgaagaaatactggaaaggcctgcccaacttgccaatgcgagggaaacccctcactcccctggtgtggaggacgcccccatagcgaaagtgggcgttcttgctgctagcatggaggctaaggcaagctctcagcaagagaaagaggacaaaccagcagaaacaaagaagctgcgcattgcttggcccccacctaccgagcttggcagttcaggaagcgccctggaggaaggcatcaaaatgtcgaagcccaagtggcctcctgaggacgagatcagtaagcctgaggtgcccgaggacgtcgacctggatctgaagaaactcagacgcagcagctctctgaaggagaggtcccggccctttaccgttgccgcatcctttcaatccacctcggtgaagtcacctaaaacagtttcaccgccaattcgaaaaggttggtccatgtccgagcagtctgaagagagtgtgggcgggcgggtggcggagagaaagcaagtggaaaatgctaaggcatccaagaagaatgggaatgtaggcaaaaccacctggcaaaataaggaaagcaagggggaaactgggaagagaagcaaggaggggcacagcctcgagatggaaaacgagaatttagtggagaatggagctgattccgacgaagatgataattcttttctgaaacagcaatctcctcaggaaccaaagtccctgaattggagtagctttgtggataataccttcgctgaagaatttactacccagaaccagaagagtcaagacgtcgagttatgggagggcgaggtcgtgaaagaactgtcggtggaagagcagataaaaagaaataggtattacgatgaggatgaggacgaggaatag

SEQ ID NO: 190890 - DNA, 2280 bp, Artificial Sequence
  derived and/or modified sequence
atggaaagctccccattcaacagaaggcagtggacctcactaagtctgcgtgtgactgctaaggagctctccctggtgaacaagaataagagcagtgccatcgtcgaaatcttctcgaagtatcagaaagctgctgaagagactaatatggaaaaaaagaggagcaatactgagaacttgagccaacacttccggaaggggactctgacagtgctgaagaagaaatgggaaaatccaggcctcggggcagagtctcacacagatagcttgcgtaactccagcacagaaattcgccacagggccgaccaccctcccgcagaggtgactagtcacgccgctagcggggctaaagccgatcaggaggaacagatccatcccagatcacgtctgcgatcacccccagaggccctggtgcagggaaggtatccacacatcaaggacggggaggacctgaaagaccactcaactgagagtaaaaaaatggagaattgcctcggtgagtccagacacgaggtggaaaaatctgagatcagcgagaacaccgatgcttccggcaagattgagaagtataatgtacccttgaacaggcttaaaatgatgttcgaaaaaggagagccgacacagaccaagatcctccgtgctcaaagccgatcagcctctggcaggaagatcagtgagaatagctactccctggacgatctcgaaattggcccaggccagctgtctagctcgactttcgacagcgaaaaaaacgaaagccgccgaaacctggaactgcccaggttgtcagagaccagcattaaagaccgcatggctaagtatcaggctgccgtaagtaagcagagcagctctactaactatacaaacgaactgaaggcctccgggggtgagatcaaaatccataaaatggagcagaaggagaatgttccccctggacccgaggtttgtataacacatcaagagggggagaagatttctgccaatgaaaactcactcgccgtacgatccacccctgccgaggatgacagcagagattcccaagttaaaagtgaggtacaacagcccgtgcatcctaaaccattaagtccagattctagagcctcgtcactaagcgaatccagtccacctaaggcaatgaagaaatttcaggctccagccagagagacatgcgtggaatgccagaagactgtgtatcccatggaaagacttctggccaaccagcaagtgttccacatttcctgtttcaggtgttcctattgtaataacaagctttccctgggaacttacgcttcactgcacgggcgaatctactgcaagccacacttcaatcagttatttaagagtaaaggcaattacgacgaaggattcgggcacagaccccataaagatctgtgggcaagtaaaaacgaaaacgaagaaattctggagcgtccagctcagctggccaatgctagagaaactccgcattcccccggagtggaagatgcaccaatcgcgaaggtgggtgtgttggctgcctctatggaagccaaagctagcagccagcaggagaaggaagacaaacccgctgaaacaaagaaactccggattgcttggcccccacccaccgagctggggtcaagcgggagtgccttagaggaggggataaagatgagcaaaccaaagtggccgccagaagatgagatctcgaagccagaagtgccggaagatgttgacttagacctgaaaaagctgcggcgaagcagttctctgaaggaacgatctcgaccatttacagttgcagcctccttccaaagtaccagtgttaagagtcctaaaaccgtgagtcccccaattcgcaagggttggtcaatgtccgaacagtccgaagaaagtgtcggcggacgagtagccgagcgaaagcaggttgagaatgctaaagcatctaaaaaaaacggcaacgtgggcaagacaacctggcagaacaaggaatccaagggcgaaacaggtaaacggagtaaagaggggcattcactggaaatggagaatgagaatctggtggagaacggggcagacagcgatgaggatgataattcttttctaaagcaacagtccccacaggaaccgaagtcgctgaactggtcatcatttgtcgataatacttttgccgaggaatttaccacacaaaaccagaaaagtcaagacgttgaattatgggaaggtgaggtggtaaaggagctctccgttgaggaacagatcaagcgtaaccgttattacgatgaagatgaagacgaggagtag

SEQ ID NO: 190891 - DNA, 2037 bp, Artificial Sequence
  derived and/or modified sequence
atgtggcaaggatgtaactgcagccaattgagtgaaactgccgtggaccaggaacaactgggagtgctcacttttatacttcagaggaccacttgtttaaatgtgtccgctgatcaggaggaacagatacatccccgttcccgccttaggtctccccctgaggcccttgtgcaggggagatatccccatatcaaagacggtgaagatttaaaggatcatagtacagagtccaagaaaatggaaaactgcctgggggagtcccgccatgaagtcgagaaatccgaaatcagcgaaaacacagacgcgagtggtaagatcgagaagtacaacgtacctctcaacagactcaaaatgatgttcgaaaaaggagagcccacccaaactaagatcttaagagcacagtctaggtcagcgagcggtcggaaaataagcgaaaactcgtactctctcgacgatctggaaatcggcccaggccaacttagtagctcaacattcgactccgaaaaaaacgagagccgtcgaaatctggagctgcctagacttagcgagactagcatcaaggacagaatggccaagtaccaggctgccgtatcaaaacaaagcagtagtacaaattacacaaacgagttaaaggccagtgggggtgaaataaagattcacaagatggaacagaaggaaaatgttccaccgggtcccgaagtgtgcattacacatcaagaaggagagaagatctctgcaaatgaaaattcattggctgtacggtctacacccgcagaagatgactctagagacagtcaggttaaaagcgaggtccagcaacccgtgcaccctaagccactttcccctgattctcgcgcttcgtccctgagtgagagctcccccccaaaggccatgaagaagttccaggcgcctgctcgagaaacctgcgttgagtgccagaaaacagtctacccaatggaaaggctgctggctaatcagcaggtgtttcacatttcctgcttccgttgtagttattgtaacaataaactgtctcttggaacctatgcctcccttcatggtcgtatctactgcaagccgcacttcaatcagttgttcaagagtaaagggaactatgatgagggatttggccatcgtccacacaaagacctttgggccagcaaaaatgagaacgaagagatcctcgagcgccctgcccagctggctaatgccagggagaccccccatagccccggtgttgaagatgctcctatcgctaaagtcggcgtgctggccgctagcatggaggctaaggccagttcgcagcaggaaaaggaggataagcccgcagagactaaaaagcttaggatcgcttggcctccgccaacagaactgggtagctccggctctgcacttgaggagggcataaaaatgtccaagccaaagtggcccccagaggatgaaataagcaaacccgaggtacctgaagatgtggacctggatctcaaaaagttacgcagatccagcagcctgaaggagcgctcacgtccctttactgtggccgcaagcttccagtcaacatctgtgaaatcccctaagactgtatcgcccccaatccgtaaggggtggagcatgtcagaacagtctgaagaaagtgtcggaggtagggtggctgaacgtaaacaggtcgaaaacgccaaggcctccaaaaagaatggcaacgtaggtaaaactacctggcagaataaagaatccaagggtgagacaggcaagcgctctaaagaggggcacagtctcgaaatggagaacgagaatctggtggaaaacggagccgacagtgatgaagacgataactcattcctcaagcagcaatctcctcaggagcctaagtctttaaactggtcatccttcgtcgacaataccttcgcggaagagttcacgactcaaaaccagaagtcccaggatgtcgagctgtgggagggcgaagtggtcaaggagctgtcagtggaggaacagatcaaacggaaccgctattacgatgaagacgaggacgaggagtag

SEQ ID NO: 190892 - DNA, 336 bp, Artificial Sequence
  derived and/or modified sequence
atggaaagcagtcctttcaaccgcaggcaatggacctctctcagcttgcgtgtgacagccaaggaattatccttagttaacaaaaacaaaagctcagccattgtggagatcttctcaaagtatcagaaagccgcagaagaaaccaacatggagaagaaaaggtcaaatactgaaaacctgtcgcagcactttcgcaaagggacccttactgtactgaaaaaaaaatgggagaacccaggtcttggtgctgaaagccacaccgattcactacggaatagcagcaccgaaatccggcaccgcgcagaccaccctccggcagaggtgaccagccactag

SEQ ID NO: 190893 - DNA, 393 bp, Artificial Sequence
  derived and/or modified sequence
atggaatcctccccttttaaccggaggcagtggacctcactctcactcagggtcaccgctaaagagctctcattagtgaataaaaataaatcaagcgccatcgttgagatcttcagcaagtaccaaaaggcagcggaagaaactaacatggagaaaaaaagatctaacactgagaacctttcgcagcattttcgcaaggggactctgacggtcctgaaaaaaaagtgggagaacccgggactgggggcagagagccacactgatagcttacgcaatagttcaacagaaattcggcatcgcgctgaccaccccccagcagaagtgacaagtcacgccgcatctggcgctaaagcggaccaggaagagcaaatccatccccgttcacgactttag

SEQ ID NO: 190894 - DNA, 1800 bp, Artificial Sequence
  derived and/or modified sequence
atggagaactgccttggggaatcccgtcacgaggtggaaaagtctgaaatctccgaaaatacagacgcctcagggaagattgagaagtataatgtgccgctgaacaggcttaagatgatgtttgaaaaaggtgagccaacacagacaaagatcttgagagcccaaagtcggtcagcctccggcaggaagatctcagagaattcctatagcttggacgacctggaaattgggccaggccaactgagttcttccacctttgacagtgagaaaaatgaatcccggcgtaatctcgaactacctcgcctctctgaaacttcaattaaagatcgcatggccaaataccaggcagctgtttccaaacagtccagcagcacaaactacacgaacgagctcaaggcgagcggtggcgagattaagatacacaagatggagcagaaagagaatgtcccccctggccctgaggtttgcatcacacaccaggagggcgagaagatctcagctaatgagaactctctggcagtcaggagcacccccgctgaggatgacagccgggactcccaggttaaatcagaagtccaacagccagtgcaccccaagccactgagtcctgacagtagagcgtcaagcctgtctgaatccagcccccctaaggctatgaagaaattccaggctccggcaagggaaacctgcgtcgagtgtcagaaaacggtgtaccctatggagcggttacttgctaatcagcaggtttttcacatatcgtgttttagatgtagttattgtaacaacaaactgtcactggggacttacgctagcctgcacggcaggatttattgcaagccacattttaaccagctgttcaaatccaaggggaattacgacgagggttttggacatcgaccacacaaagacctctgggcctctaaaaacgaaaacgaagagatcttggaaaggcctgcccaactcgccaacgcccgagagactcctcactctcccggtgtggaagatgctcccattgctaaggtcggcgtgttggcagcttccatggaggcaaaagccagctcacaacaggagaaggaggacaagcctgccgaaacgaaaaagctcaggattgcctggcctccgcctaccgagctgggaagcagcggcagtgcgctggaggagggaattaaaatgagcaagcccaagtggcctccagaagacgaaatctctaaacccgaagtgcccgaggatgtggatttagacctgaagaagctgaggcgaagctcatctctgaaggagcgctctagaccatttacagtggccgcaagctttcagagcaccagtgtgaaatccccgaaaacggtgtcacctcccatcaggaagggatggtcaatgagtgagcagagcgaggaatcggtcggcggtcgcgtggcggaaaggaaacaggtggagaatgcaaaggcatctaaaaaaaatggtaacgtcggcaagactacctggcagaataaagagtctaagggtgagactggcaagcggagtaaagaagggcacagtctggagatggagaatgagaacctcgtagagaatggggcagattccgatgaagacgataattcgtttctgaaacaacagagccctcaggaaccaaaatctctaaactggtcctcgtttgtcgataacaccttcgctgaggaattcaccacccaaaatcagaagtcgcaggacgttgagctctgggagggagaggtggtgaaagaactgtctgtcgaggagcagatcaagagaaatcggtattacgatgaagatgaggatgaggaatag

SEQ ID NO: 190895 - DNA, 2280 bp, Artificial Sequence
  derived and/or modified sequence
atggagagcagccccttcaacagaagacagtggaccagcctgagcctgagagtgaccgccaaggagctgagcctggtgaacaagaacaagagcagcgccatcgtggagatcttcagcaagtaccagaaggccgccgaggagaccaacatggagaagaagagaagcaacaccgagaacctgagccagcacttcagaaagggcaccctgaccgtgctgaagaagaagtgggagaaccccggcctgggcgccgagagccacaccgacagcctgagaaacagcagcaccgagatcagacacagagccgaccacccccccgccgaggtgaccagccacgccgccagcggcgccaaggccgaccaggaggagcagatccaccccagaagcagactgagaagcccccccgaggccctggtgcagggcagatacccccacatcaaggacggcgaggacctgaaggaccacagcaccgagagcaagaagatggagaactgcctgggcgagagcagacacgaggtggagaagagcgagatcagcgagaacaccgacgccagcggcaagatcgagaagtacaacgtgcccctgaacagactgaagatgatgttcgagaagggcgagcccacccagaccaagatcctgagagcccagagcagaagcgccagcggcagaaagatcagcgagaacagctacagcctggacgacctggagatcggccccggccagctgagcagcagcaccttcgacagcgagaagaacgagagcagaagaaacctggagctgcccagactgagcgagaccagcatcaaggacagaatggccaagtaccaggccgccgtgagcaagcagagcagcagcaccaactacaccaacgagctgaaggccagcggcggcgagatcaagatccacaagatggagcagaaggagaacgtgccccccggccccgaggtgtgcatcacccaccaggagggcgagaagatcagcgccaacgagaacagcctggccgtgagaagcacccccgccgaggacgacagcagagacagccaggtgaagagcgaggtgcagcagcccgtgcaccccaagcccctgagccccgacagcagagccagcagcctgagcgagagcagcccccccaaggccatgaagaagttccaggcccccgccagagagacctgcgtggagtgccagaagaccgtgtaccccatggagagactgctggccaaccagcaggtgttccacatcagctgcttcagatgcagctactgcaacaacaagctgagcctgggcacctacgccagcctgcacggcagaatctactgcaagccccacttcaaccagctgttcaagagcaagggcaactacgacgagggcttcggccacagaccccacaaggacctgtgggccagcaagaacgagaacgaggagatcctggagagacccgcccagctggccaacgccagagagaccccccacagccccggcgtggaggacgcccccatcgccaaggtgggcgtgctggccgccagcatggaggccaaggccagcagccagcaggagaaggaggacaagcccgccgagaccaagaagctgagaatcgcctggcccccccccaccgagctgggcagcagcggcagcgccctggaggagggcatcaagatgagcaagcccaagtggccccccgaggacgagatcagcaagcccgaggtgcccgaggacgtggacctggacctgaagaagctgagaagaagcagcagcctgaaggagagaagcagacccttcaccgtggccgccagcttccagagcaccagcgtgaagagccccaagaccgtgagcccccccatcagaaagggctggagcatgagcgagcagagcgaggagagcgtgggcggcagagtggccgagagaaagcaggtggagaacgccaaggccagcaagaagaacggcaacgtgggcaagaccacctggcagaacaaggagagcaagggcgagaccggcaagagaagcaaggagggccacagcctggagatggagaacgagaacctggtggagaacggcgccgacagcgacgaggacgacaacagcttcctgaagcagcagagcccccaggagcccaagagcctgaactggagcagcttcgtggacaacaccttcgccgaggagttcaccacccagaaccagaagagccaggacgtggagctgtgggagggcgaggtggtgaaggagctgagcgtggaggagcagatcaagagaaacagatactacgacgaggacgaggacgaggagtag

SEQ ID NO: 190896 - DNA, 2037 bp, Artificial Sequence
  derived and/or modified sequence
atgtggcagggctgcaactgcagccagctgagcgagaccgccgtggaccaggagcagctgggcgtgctgaccttcatcctgcagagaaccacctgcctgaacgtgagcgccgaccaggaggagcagatccaccccagaagcagactgagaagcccccccgaggccctggtgcagggcagatacccccacatcaaggacggcgaggacctgaaggaccacagcaccgagagcaagaagatggagaactgcctgggcgagagcagacacgaggtggagaagagcgagatcagcgagaacaccgacgccagcggcaagatcgagaagtacaacgtgcccctgaacagactgaagatgatgttcgagaagggcgagcccacccagaccaagatcctgagagcccagagcagaagcgccagcggcagaaagatcagcgagaacagctacagcctggacgacctggagatcggccccggccagctgagcagcagcaccttcgacagcgagaagaacgagagcagaagaaacctggagctgcccagactgagcgagaccagcatcaaggacagaatggccaagtaccaggccgccgtgagcaagcagagcagcagcaccaactacaccaacgagctgaaggccagcggcggcgagatcaagatccacaagatggagcagaaggagaacgtgccccccggccccgaggtgtgcatcacccaccaggagggcgagaagatcagcgccaacgagaacagcctggccgtgagaagcacccccgccgaggacgacagcagagacagccaggtgaagagcgaggtgcagcagcccgtgcaccccaagcccctgagccccgacagcagagccagcagcctgagcgagagcagcccccccaaggccatgaagaagttccaggcccccgccagagagacctgcgtggagtgccagaagaccgtgtaccccatggagagactgctggccaaccagcaggtgttccacatcagctgcttcagatgcagctactgcaacaacaagctgagcctgggcacctacgccagcctgcacggcagaatctactgcaagccccacttcaaccagctgttcaagagcaagggcaactacgacgagggcttcggccacagaccccacaaggacctgtgggccagcaagaacgagaacgaggagatcctggagagacccgcccagctggccaacgccagagagaccccccacagccccggcgtggaggacgcccccatcgccaaggtgggcgtgctggccgccagcatggaggccaaggccagcagccagcaggagaaggaggacaagcccgccgagaccaagaagctgagaatcgcctggcccccccccaccgagctgggcagcagcggcagcgccctggaggagggcatcaagatgagcaagcccaagtggccccccgaggacgagatcagcaagcccgaggtgcccgaggacgtggacctggacctgaagaagctgagaagaagcagcagcctgaaggagagaagcagacccttcaccgtggccgccagcttccagagcaccagcgtgaagagccccaagaccgtgagcccccccatcagaaagggctggagcatgagcgagcagagcgaggagagcgtgggcggcagagtggccgagagaaagcaggtggagaacgccaaggccagcaagaagaacggcaacgtgggcaagaccacctggcagaacaaggagagcaagggcgagaccggcaagagaagcaaggagggccacagcctggagatggagaacgagaacctggtggagaacggcgccgacagcgacgaggacgacaacagcttcctgaagcagcagagcccccaggagcccaagagcctgaactggagcagcttcgtggacaacaccttcgccgaggagttcaccacccagaaccagaagagccaggacgtggagctgtgggagggcgaggtggtgaaggagctgagcgtggaggagcagatcaagagaaacagatactacgacgaggacgaggacgaggagtag

SEQ ID NO: 190897 - DNA, 336 bp, Artificial Sequence
  derived and/or modified sequence
atggagagcagccccttcaacagaagacagtggaccagcctgagcctgagagtgaccgccaaggagctgagcctggtgaacaagaacaagagcagcgccatcgtggagatcttcagcaagtaccagaaggccgccgaggagaccaacatggagaagaagagaagcaacaccgagaacctgagccagcacttcagaaagggcaccctgaccgtgctgaagaagaagtgggagaaccccggcctgggcgccgagagccacaccgacagcctgagaaacagcagcaccgagatcagacacagagccgaccacccccccgccgaggtgaccagccactag

SEQ ID NO: 190898 - DNA, 393 bp, Artificial Sequence
  derived and/or modified sequence
atggagagcagccccttcaacagaagacagtggaccagcctgagcctgagagtgaccgccaaggagctgagcctggtgaacaagaacaagagcagcgccatcgtggagatcttcagcaagtaccagaaggccgccgaggagaccaacatggagaagaagagaagcaacaccgagaacctgagccagcacttcagaaagggcaccctgaccgtgctgaagaagaagtgggagaaccccggcctgggcgccgagagccacaccgacagcctgagaaacagcagcaccgagatcagacacagagccgaccacccccccgccgaggtgaccagccacgccgccagcggcgccaaggccgaccaggaggagcagatccaccccagaagcagactgtag

SEQ ID NO: 190899 - DNA, 1800 bp, Artificial Sequence
  derived and/or modified sequence
atggagaactgcctgggcgagagcagacacgaggtggagaagagcgagatcagcgagaacaccgacgccagcggcaagatcgagaagtacaacgtgcccctgaacagactgaagatgatgttcgagaagggcgagcccacccagaccaagatcctgagagcccagagcagaagcgccagcggcagaaagatcagcgagaacagctacagcctggacgacctggagatcggccccggccagctgagcagcagcaccttcgacagcgagaagaacgagagcagaagaaacctggagctgcccagactgagcgagaccagcatcaaggacagaatggccaagtaccaggccgccgtgagcaagcagagcagcagcaccaactacaccaacgagctgaaggccagcggcggcgagatcaagatccacaagatggagcagaaggagaacgtgccccccggccccgaggtgtgcatcacccaccaggagggcgagaagatcagcgccaacgagaacagcctggccgtgagaagcacccccgccgaggacgacagcagagacagccaggtgaagagcgaggtgcagcagcccgtgcaccccaagcccctgagccccgacagcagagccagcagcctgagcgagagcagcccccccaaggccatgaagaagttccaggcccccgccagagagacctgcgtggagtgccagaagaccgtgtaccccatggagagactgctggccaaccagcaggtgttccacatcagctgcttcagatgcagctactgcaacaacaagctgagcctgggcacctacgccagcctgcacggcagaatctactgcaagccccacttcaaccagctgttcaagagcaagggcaactacgacgagggcttcggccacagaccccacaaggacctgtgggccagcaagaacgagaacgaggagatcctggagagacccgcccagctggccaacgccagagagaccccccacagccccggcgtggaggacgcccccatcgccaaggtgggcgtgctggccgccagcatggaggccaaggccagcagccagcaggagaaggaggacaagcccgccgagaccaagaagctgagaatcgcctggcccccccccaccgagctgggcagcagcggcagcgccctggaggagggcatcaagatgagcaagcccaagtggccccccgaggacgagatcagcaagcccgaggtgcccgaggacgtggacctggacctgaagaagctgagaagaagcagcagcctgaaggagagaagcagacccttcaccgtggccgccagcttccagagcaccagcgtgaagagccccaagaccgtgagcccccccatcagaaagggctggagcatgagcgagcagagcgaggagagcgtgggcggcagagtggccgagagaaagcaggtggagaacgccaaggccagcaagaagaacggcaacgtgggcaagaccacctggcagaacaaggagagcaagggcgagaccggcaagagaagcaaggagggccacagcctggagatggagaacgagaacctggtggagaacggcgccgacagcgacgaggacgacaacagcttcctgaagcagcagagcccccaggagcccaagagcctgaactggagcagcttcgtggacaacaccttcgccgaggagttcaccacccagaaccagaagagccaggacgtggagctgtgggagggcgaggtggtgaaggagctgagcgtggaggagcagatcaagagaaacagatactacgacgaggacgaggacgaggagtag

SEQ ID NO: 190900 - protein, 519 aa, Artificial Sequence
  derived and/or modified sequence
MSYPQFGYPYSSAPQFLMATNSLSTCCESGGRTLADSGPAASAQAPVYCPVYESRLLATARHELNSAAALGVYGGPYGGSQGYGNYVTYGSEASAFYSLNSFDSKDGSGSAHGGLAPAAAAYYPYEPALGQYPYDRYGTMDSGTRRKNATRETTSTLKAWLQEHRKNPYPTKGEKIMLAIITKMTLTQVSTWFANARRRLKKENKMTWPPRNKCADEKRPYAEGEEEEGGEEEAREEPLKSSKNAEPVGKEEKELELSDLDDFDPLEAEPPACELKPPFHSLDGGLERVPAAPDGPVKEASGALRMSLAAGGGAALDEDLERARSCLRSAAAGPEPLPGAEGGPQVCEAKLGFVPAGASAGLEAKPRIWSLAHTATAAAAAATSLSQTEFPSCMLKRQGPAAPAAVSSAPATSPSVALPHSGALDRHQDSPVTSLRNWVDGVFHDPILRHSTLNQAWATAKGALLDPGPLGRSLGAGANVLTAPLARAFPPAVPQDAPAAGAARELLALPKAGGKPFCA

SEQ ID NO: 190901 - DNA, 2229 bp, Artificial Sequence
  derived and/or modified sequence
tcctgcttcgccctcccagcgcctagaagcctgcagctccggagcagtggccgcgccacgccggccccagcgcgcagaaccctgcaggccccgcccgtccgccccgggccgcgcccgccatgtcctacccgcagtttggatacccctactcctcggctccccagttcttgatggccaccaactccctgagcacgtgctgcgagtccggaggccgcacgctggcggactccgggcccgccgcctcggcccaggcgccggtctactgcccggtctacgagagccggctgctggccaccgcgcgccacgagctcaactcggccgcggcgctgggcgtctatgggggtccctatggcggatcgcagggctatggcaactacgtgacctacggctcggaggcgtccgccttctactcgctgaacagctttgattccaaggatggttcgggatctgcgcatgggggcctggcaccagccgctgccgcctactacccttacgagccagctctgggccagtacccctatgacaggtatggaaccatggacagcggcacgcggcgcaagaacgccacgcgcgagaccaccagcacgctcaaggcctggctgcaggagcaccgcaagaacccctaccccaccaagggcgagaagatcatgctggccatcatcaccaagatgaccctcacacaggtctccacctggttcgccaacgcgcgccggcgcctcaagaaggagaacaagatgacgtggccgccgcggaacaagtgcgcagacgagaagcggccctacgcggagggcgaggaggaggaggggggcgaggaggaggcgcgggaggagcccctcaagagctccaagaacgcagagcccgtgggcaaagaggagaaggagctggagcttagtgacttggacgacttcgacccgctggaagcagagccgccggcgtgcgagctgaagccgcccttccactccctggacggcggtctggagcgcgtccccgccgcgcccgacggcccggtcaaggaggcctcaggcgcgctccggatgtctctggccgcgggtggcggagctgctctggacgaggacctggagagggcccggagctgtctccgcagcgcggcggccgggccggagccactgccgggcgcagagggcggccctcaggtctgcgaggccaagctggggtttgtgccggcgggggcgtcggcaggcctggaggctaagccgcgcatctggtccctggcccacacagccaccgccgccgccgccgccgccacctccctgagccagactgagtttccgtcgtgcatgctcaagcgccaaggtcccgcggcccctgcggctgtgtcctccgcgcccgccacgtccccgtctgtggcccttccccactctggcgccctggacaggcaccaggactccccggtaaccagtctcagaaactgggtggacggggtcttccacgaccccatcctcaggcacagcactttgaaccaggcctgggccaccgccaagggcgccctcctggaccccgggcctctgggacgctcgctgggggcgggcgcgaacgtgctgactgcacccctggcccgcgcctttccgcctgccgtgccccaggacgccccagctgcaggcgccgccagggagctgctcgccctgcccaaggccggcggcaaacccttctgcgcctgaggcgggcgggtcccgagcccaggagggaacccgcgctcaggcggacggcgccgactcttttcactgagtttccagaggaagactagcgcggccaccgcgaagccgccaacccaccggagagggggcttctgaacttggactcctgggaacatggacaagcccggcgctgccacgccggggcctccaccgcctgggcctgagcctgaccgggccattcccaaatttgggacgcggaaggagaggctctcggagcagaagaggccagataccctgaagcataaagtttacgtcaaaagtttacatggagaaggcggttccgttctgaagcgtggtctgctgtcccctgggcgtgaggcctcctgggcctgtcgggcctccgatttcatcctcagcacgtaatgctcaccaacagcacttgcactgagttgactcttgcacactcttgactccataatatgatgctttttaagatgtatgttcacaccaataattgcctgcttcagaggctaatataacaaaaccaataaaaccgagtgatggtgaaaaaaaa

SEQ ID NO: 190902 - DNA, 1560 bp, Artificial Sequence
  derived and/or modified sequence
atgtcctaccctcagttcgggtatccctacagctccgcaccgcagttcttgatggccacgaacagcctgtccacctgctgcgaatctggtggccggaccctggccgatagcggcccagccgcttctgctcaggctccggtctattgccccgtgtatgaatcgcggttgttggccaccgccagacacgagttgaatagcgccgccgcgcttggagtgtatggaggaccttatggtgggtcccagggatacggcaactacgttacatacggatccgaggcgagtgctttctactctctgaattccttcgacagtaaggacgggtccgggagtgcccacggggggctcgcgcccgcagctgccgcctactacccttatgagcctgctctagggcagtatccatatgatcgctacggcacaatggactctgggacgcggaggaaaaacgctaccagagaaacgacatctactcttaaggcttggctgcaggagcatagaaaaaatccctacccgaccaagggggaaaaaatcatgctggccataataactaaaatgaccctaacgcaagtgagtacttggttcgcaaacgcacggagaagattgaagaaggagaacaaaatgacatggcctcctagaaacaagtgcgccgatgagaagaggccctacgcagagggtgaggaggaggagggaggcgaagaagaagcccgtgaggagccattaaaaagtagcaagaatgcagaaccggtcgggaaagaagaaaaagaacttgagctttccgacctggacgattttgaccccctggaagcagagccaccagcctgtgaattgaagcctcccttccacagcctggacggtgggcttgagagggtgcccgctgcaccggacggacctgtgaaagaggccagcggtgctttgcgtatgtcactggccgccggcggtggcgccgccctggatgaagacttggagagggcccggtcttgtctgcgcagcgccgccgctggacccgagccactgcctggggctgaagggggtccccaggtgtgcgaggccaagttgggttttgtgcctgctggagcctctgccggtctcgaagccaagccacgtatatggtcattagcgcataccgcgactgccgcagctgccgccgcaacatctttatctcagacagagttccctagttgtatgctgaagaggcagggacctgccgcgcctgcagcggttagctccgcaccagcaacatccccctctgtggctctccctcatagcggtgcacttgacaggcaccaggactccccagtcacatctctgagaaactgggtcgacggtgtgtttcacgacccgatcttgagacattccacattgaaccaggcctgggctacagctaaaggcgcgctgttggaccctggacccctgggacgttctctgggagctggagccaacgtgctgaccgcgccactagccagggcattcccaccagccgtgccccaagatgctccagccgccggcgctgcccgagaattgttggctcttcccaaggctgggggtaaacccttttgtgcctag

SEQ ID NO: 190903 - DNA, 1560 bp, Artificial Sequence
  derived and/or modified sequence
atgtcatacccacaatttggctacccctattcctccgcaccgcagttcttgatggcaaccaacagcttgtcgacgtgctgcgagtcagggggcaggacactcgccgacagcggaccagcggcctcagcccaagctccagtgtactgtcccgtgtacgagagtagactcttggccacagcacgacatgagttaaatagtgcagcggcactgggtgtctatggaggtccatatggaggcagtcagggctatggaaactacgtgacatacgggagtgaagcctccgcgttttattccctgaactcttttgattcaaaagacggttcaggtagcgctcatggtggccttgccccagccgcagcagcttattacccttacgaacccgccttaggccaatatccatacgaccgttacggcactatggatagcggcactaggagaaagaacgctaccagagaaacgacgagtacattgaaagcctggctacaggagcaccgcaaaaacccgtatcccactaaaggcgagaagataatgcttgccatcattaccaagatgaccctgacccaagtgtcgacgtggttcgccaatgcaaggaggcgtctaaaaaaagagaacaaaatgacttggccgccacgcaacaagtgtgcagatgaaaaaagaccttacgccgaaggggaagaggaagagggcggagaagaagaggcacgggaggaacccttgaagagtagtaaaaacgcagaaccagtaggaaaagaggaaaaagagctcgagttgagcgacctggatgatttcgatccactggaggcagaacctccagcctgtgaactcaagcccccttttcacagtctggacggaggactggagagggtgcccgccgcgccagacgggccagtgaaggaagcctcaggtgccctgagaatgtcccttgccgccgggggcggcgctgctttagacgaggatctggaaagagcacggagctgcctgaggtcggcagctgccgggccagagcctctaccaggcgctgaaggtggtcctcaggtttgtgaggcaaaactcgggtttgtgcccgccggagcttcagctggattagaggcaaaacccagaatttggtcacttgctcacactgctacagctgcagcagcggccgcaacatctctctcccagacagagtttccgtcttgcatgttaaagcggcaggggccggctgcccctgccgccgtttcctctgcacccgccacatcaccatccgtggccctgccccacagtggagcactggatcggcatcaggattcgccggtcacctccttaaggaattgggtggacggagtgtttcacgaccccatccttagacattcaacactgaatcaggcctgggccacagcgaaaggtgctctgctcgaccccgggcctctgggacgatctctgggggcgggtgccaacgtgttgaccgcacccttggctagagcctttcccccagcggtgcctcaggacgcgccggctgccggagctgctagggagctgcttgcccttccaaaagcaggcgggaagccgttttgtgcttag

SEQ ID NO: 190904 - DNA, 1560 bp, Artificial Sequence
  derived and/or modified sequence
atgagctatccccagttcggctacccctacagttccgctccccaatttctcatggccacaaattctttgagcacttgttgtgagtctggcggcagaaccctggctgactctggccctgcagcgagcgcacaggctccagtatactgtcccgtatacgaatccaggttgttggcgactgcccgacatgagctgaatagcgctgccgcactgggagtctatggaggaccctacggtgggtcccaagggtacgggaactacgtgacttatggaagcgaggccagcgctttttactcacttaactcattcgattctaaggacgggagtgggtctgcgcacggaggcctcgcgccagccgctgctgcgtactatccctacgaaccagccttgggtcaatacccttatgaccgctatggcaccatggactccggcacacgccgcaagaatgccaccagagaaaccacctcaaccctgaaagcctggctccaagagcacagaaagaatccttacccaaccaaaggggaaaaaatcatgctggctattatcactaagatgactttgacccaggtctcaacctggttcgctaacgcccgccgcagactgaagaaggagaataaaatgacatggccaccccggaacaagtgcgccgacgagaaacggccttacgccgagggggaagaggaggagggcggtgaagaagaggcccgggaagagcccctcaagtctagtaagaacgccgaacccgttgggaaagaggagaaggaactggagttgtccgacctggacgacttcgatcccctggaggccgagccacccgcttgtgagttgaaaccaccattccattcattggacggaggcctggaacgggtgccagccgcacctgacggacccgtgaaggaggcgagcggggccctcaggatgagcctcgctgccggcgggggcgccgcccttgacgaggacctcgagcgcgccagatcatgtttgcgtagcgcagcagccggtcccgaacccttgcctggagccgagggtggcccccaggtgtgtgaagccaagctaggtttcgtgcctgctggcgcatctgccggactggaggctaaaccgaggatctggtccttggcacatacagctaccgccgctgcagccgctgccacttctctctcccagactgagttcccctcttgcatgctgaaacgccaggggccggcggccccagctgccgtaagctctgcaccagccactagtccatctgtggcactcccccactccggagcacttgacagacatcaagactcgccagtcaccagcctgcggaactgggtggatggggtatttcatgatcccattttgaggcattctaccctcaatcaggcctgggctaccgccaagggcgctctgctcgacccgggccccctgggccggtcccttggcgccggggcgaacgtgttaacggctccgctggctcgagcattcccccccgccgtgcctcaggacgcccccgccgctggcgctgcacgtgagctcttggctttgccgaaagctggcgggaagcctttctgcgcatag

SEQ ID NO: 190905 - DNA, 2221 bp, Artificial Sequence
  derived and/or modified sequence
tcctgcttcgccctcccagcgcctagaagcctgcagctccggagcagtggccgcgccacgccggccccagcgcgcagaaccctgcaggccccgcccgtccgccccgggccgcgcccgccatgtcctacccgcagtttggatacccctactcctcggctccccagttcttgatggccaccaactccctgagcacgtgctgcgagtccggaggccgcacgctggcggactccgggcccgccgcctcggcccaggcgccggtctactgcccggtctacgagagccggctgctggccaccgcgcgccacgagctcaactcggccgcggcgctgggcgtctatgggggtccctatggcggatcgcagggctatggcaactacgtgacctacggctcggaggcgtccgccttctactcgctgaacagctttgattccaaggatggttcgggatctgcgcatgggggcctggcaccagccgctgccgcctactacccttacgagccagctctgggccagtacccctatgacaggtatggaaccatggacagcggcacgcggcgcaagaacgccacgcgcgagaccaccagcacgctcaaggcctggctgcaggagcaccgcaagaacccctaccccaccaagggcgagaagatcatgctggccatcatcaccaagatgaccctcacacaggtctccacctggttcgccaacgcgcgccggcgcctcaagaaggagaacaagatgacgtggccgccgcggaacaagtgcgcagacgagaagcggccctacgcggagggcgaggaggaggaggggggcgaggaggaggcgcgggaggagcccctcaagagctccaagaacgcagagcccgtgggcaaagaggagaaggagctggagcttagtgacttggacgacttcgacccgctggaagcagagccgccggcgtgcgagctgaagccgcccttccactccctggacggcggtctggagcgcgtccccgccgcgcccgacggcccggtcaaggaggcctcaggcgcgctccggatgtctctggccgcgggtggcggagctgctctggacgaggacctggagagggcccggagctgtctccgcagcgcggcggccgggccggagccactgccgggcgcagagggcggccctcaggtctgcgaggccaagctggggtttgtgccggcgggggcgtcggcaggcctggaggctaagccgcgcatctggtccctggcccacacagccaccgccgccgccgccgccgccacctccctgagccagactgagtttccgtcgtgcatgctcaagcgccaaggtcccgcggcccctgcggctgtgtcctccgcgcccgccacgtccccgtctgtggcccttccccactctggcgccctggacaggcaccaggactccccggtaaccagtctcagaaactgggtggacggggtcttccacgaccccatcctcaggcacagcactttgaaccaggcctgggccaccgccaagggcgccctcctggaccccgggcctctgggacgctcgctgggggcgggcgcgaacgtgctgactgcacccctggcccgcgcctttccgcctgccgtgccccaggacgccccagctgcaggcgccgccagggagctgctcgccctgcccaaggccggcggcaaacccttctgcgcctgaggcgggcgggtcccgagcccaggagggaacccgcgctcaggcggacggcgccgactcttttcactgagtttccagaggaagactagcgcggccaccgcgaagccgccaacccaccggagagggggcttctgaacttggactcctgggaacatggacaagcccggcgctgccacgccggggcctccaccgcctgggcctgagcctgaccgggccattcccaaatttgggacgcggaaggagaggctctcggagcagaagaggccagataccctgaagcataaagtttacgtcaaaagtttacatggagaaggcggttccgttctgaagcgtggtctgctgtcccctgggcgtgaggcctcctgggcctgtcgggcctccgatttcatcctcagcacgtaatgctcaccaacagcacttgcactgagttgactcttgcacactcttgactccataatatgatgctttttaagatgtatgttcacaccaataattgcctgcttcagaggctaatataacaaaaccaataaaaccgagtgatggtg

SEQ ID NO: 190906 - DNA, 2538 bp, Artificial Sequence
  derived and/or modified sequence
gaccgcggcgcctggggacgccggcgcgctccgctcgccaggtgctccgcctggaaatgtctccattagttgtcgccggctccccgctggagcgcgcgcgccgagcttccgcgcggagccctcgcgggctgccgggagcggcccagcgccaccgcaggtaggtgaggtcccccgctcccgcccccgccccggggttccgagacccctccccccttccgaggaggcggaggctccgcgcggccgccgaggggagcgggcggcggcggctgcggcgactccccggtgcgtcccgggctgcgagctgctccccgcggccccggcagccacacggcgcgggcgggagcttccccagctcagcgcctagaagcctgcagctccggagcagtggccgcgccacgccggccccagcgcgcagaaccctgcaggccccgcccgtccgccccgggccgcgcccgccatgtcctacccgcagtttggatacccctactcctcggctccccagttcttgatggccaccaactccctgagcacgtgctgcgagtccggaggccgcacgctggcggactccgggcccgccgcctcggcccaggcgccggtctactgcccggtctacgagagccggctgctggccaccgcgcgccacgagctcaactcggccgcggcgctgggcgtctatgggggtccctatggcggatcgcagggctatggcaactacgtgacctacggctcggaggcgtccgccttctactcgctgaacagctttgattccaaggatggttcgggatctgcgcatgggggcctggcaccagccgctgccgcctactacccttacgagccagctctgggccagtacccctatgacaggtatggaaccatggacagcggcacgcggcgcaagaacgccacgcgcgagaccaccagcacgctcaaggcctggctgcaggagcaccgcaagaacccctaccccaccaagggcgagaagatcatgctggccatcatcaccaagatgaccctcacacaggtctccacctggttcgccaacgcgcgccggcgcctcaagaaggagaacaagatgacgtggccgccgcggaacaagtgcgcagacgagaagcggccctacgcggagggcgaggaggaggaggggggcgaggaggaggcgcgggaggagcccctcaagagctccaagaacgcagagcccgtgggcaaagaggagaaggagctggagcttagtgacttggacgacttcgacccgctggaagcagagccgccggcgtgcgagctgaagccgcccttccactccctggacggcggtctggagcgcgtccccgccgcgcccgacggcccggtcaaggaggcctcaggcgcgctccggatgtctctggccgcgggtggcggagctgctctggacgaggacctggagagggcccggagctgtctccgcagcgcggcggccgggccggagccactgccgggcgcagagggcggccctcaggtctgcgaggccaagctggggtttgtgccggcgggggcgtcggcaggcctggaggctaagccgcgcatctggtccctggcccacacagccaccgccgccgccgccgccgccacctccctgagccagactgagtttccgtcgtgcatgctcaagcgccaaggtcccgcggcccctgcggctgtgtcctccgcgcccgccacgtccccgtctgtggcccttccccactctggcgccctggacaggcaccaggactccccggtaaccagtctcagaaactgggtggacggggtcttccacgaccccatcctcaggcacagcactttgaaccaggcctgggccaccgccaagggcgccctcctggaccccgggcctctgggacgctcgctgggggcgggcgcgaacgtgctgactgcacccctggcccgcgcctttccgcctgccgtgccccaggacgccccagctgcaggcgccgccagggagctgctcgccctgcccaaggccggcggcaaacccttctgcgcctgaggcgggcgggtcccgagcccaggagggaacccgcgctcaggcggacggcgccgactcttttcactgagtttccagaggaagactagcgcggccaccgcgaagccgccaacccaccggagagggggcttctgaacttggactcctgggaacatggacaagcccggcgctgccacgccggggcctccaccgcctgggcctgagcctgaccgggccattcccaaatttgggacgcggaaggagaggctctcggagcagaagaggccagataccctgaagcataaagtttacgtcaaaagtttacatggagaaggcggttccgttctgaagcgtggtctgctgtcccctgggcgtgaggcctcctgggcctgtcgggcctccgatttcatcctcagcacgtaatgctcaccaacagcacttgcactgagttgactcttgcacactcttgactccataatatgatgctttttaagatgtatgttcacaccaataattgcctgcttcagaggctaatataacaaaac

SEQ ID NO: 190907 - DNA, 1990 bp, Artificial Sequence
  derived and/or modified sequence
ggtgcgggctcggctgacgaccgcggcgcctggggacgccggcgcgctccgctcgccaggtgctccgcctggaaatgtctccattagttgtcgccggctccccgctggagcgcgcgcgccgagcttccgcgcggagccctcgcgggctgccgggagcggcccagcgccaccgcagcgcctagaagcctgcagctccggagcagtggccgcgccacgccggccccagcgcgcagaaccctgcaggccccgcccgtccgccccgggccgcgcccgccatgtcctacccgcagtttggatacccctactcctcggctccccagttcttgatggccaccaactccctgagcacgtgctgcgagtccggaggccgcacgctggcggactccgggcccgccgcctcggcccaggcgccggtctactgcccggtctacgagagccggctgctggccaccgcgcgccacgagctcaactcggccgcggcgctgggcgtctatgggggtccctatggcggatcgcagggctatggcaactacgtgacctacggctcggaggcgtccgccttctactcgctgaacagctttgattccaaggatggttcgggatctgcgcatgggggcctggcaccagccgctgccgcctactacccttacgagccagctctgggccagtacccctatgacaggtatggaaccatggacagcggcacgcggcgcaagaacgccacgcgcgagaccaccagcacgctcaaggcctggctgcaggagcaccgcaagaacccctaccccaccaagggcgagaagatcatgctggccatcatcaccaagatgaccctcacacaggtctccacctggttcgccaacgcgcgccggcgcctcaagaaggagaacaagatgacgtggccgccgcggaacaagtgcgcagacgagaagcggccctacgcggagggcgaggaggaggaggggggcgaggaggaggcgcgggaggagcccctcaagagctccaagaacgcagagcccgtgggcaaagaggagaaggagctggagcttagtgacttggacgacttcgacccgctggaagcagagccgccggcgtgcgagctgaagccgcccttccactccctggacggcggtctggagcgcgtccccgccgcgcccgacggcccggtcaaggaggcctcaggcgcgctccggatgtctctggccgcgggtggcggagctgctctggacgaggacctggagagggcccggagctgtctccgcagcgcggcggccgggccggagccactgccgggcgcagagggcggccctcaggtctgcgaggccaagctggggtttgtgccggcgggggcgtcggcaggcctggaggctaagccgcgcatctggtccctggcccacacagccaccgccgccgccgccgccgccacctccctgagccagactgagtttccgtcgtgcatgctcaagcgccaaggtcccgcggcccctgcggctgtgtcctccgcgcccgccacgtccccgtctgtggcccttccccactctggcgccctggacaggcaccaggactccccggtaaccagtctcagaaactgggtggacggggtcttccacgaccccatcctcaggcacagcactttgaaccaggcctgggccaccgccaagggcgccctcctggaccccgggcctctgggacgctcgctgggggcgggcgcgaacgtgctgactgcacccctggcccgcgcctttccgcctgccgtgccccaggacgccccagctgcaggcgccgccagggagctgctcgccctgcccaaggccggcggcaaacccttctgcgcctgaggcgggcgggtcccgagcccaggagggaacccgcgctcaggcggacggcgccgactcttttcactgagtttccagaggaagactagcgcggccaccgcgaagccgccaacccaccggagagggggcttctgaacttggactcctgggaacatgga

SEQ ID NO: 190908 - DNA, 1560 bp, Artificial Sequence
  derived and/or modified sequence
atgagctacccccagtttggctacccctacagcagcgccccccagttcctgatggccaccaacagcctgagcacctgctgtgagagcggcggccgcaccctggccgacagcggccctgctgccagcgcccaggcccctgtgtactgccctgtgtatgagagccggctgctggccacagcccggcatgagctgaacagcgctgctgccctgggcgtgtatggaggcccctatggaggcagccagggctacggcaactacgtgacctacggcagcgaggccagcgccttctacagcctgaacagctttgacagcaaggatggcagcggcagcgcccacggcggcctggccccagctgctgctgcctactacccctatgagcccgccctgggccagtacccctatgacagatatggcaccatggacagcggcaccaggaggaagaatgccacccgggagaccaccagcaccctgaaggcctggctgcaggagcacaggaagaacccctaccccaccaagggggagaagatcatgctggccatcatcaccaagatgaccctgacccaggtgtccacctggtttgccaatgcccggcggcggctgaagaaggagaacaagatgacctggcccccaagaaataaatgtgctgatgagaagaggccctatgcagagggggaggaggaggagggcggggaggaggaggcccgggaggagcccctgaagagcagcaagaatgctgagcctgtgggcaaggaggagaaggagctggagctgagtgacctggatgactttgaccccctggaggccgagcccccagcctgtgagctgaagccacccttccacagcctggatggcggcctggagcgggtgcctgctgccccagatggccctgtgaaggaggccagcggggccctgaggatgagcctggccgccggcggcggggccgccctggatgaggacctggagcgggcccggagctgcctgcggtctgctgctgctggccctgagcccctgcccggggctgagggcggcccccaggtgtgtgaggccaagctgggctttgtgcctgctggggccagcgctggcctggaggccaagccccgcatctggagcctggcccacacagccacagctgctgctgctgctgccaccagcctgagccagacagagttccccagctgcatgctgaagaggcagggccctgctgccccagctgctgtgagcagcgccccagccaccagccccagcgtggccctgccccacagcggggccctggacagacaccaggacagccctgtgaccagcctgaggaactgggtggatggagtcttccatgaccccatcctgcggcacagcaccctgaaccaggcctgggccacagccaagggggccctgctggaccccggccccctgggccgcagcctgggcgctggggccaacgtgctgacagcccccctggcccgggccttccccccagctgtgccccaggatgccccagctgctggggccgcccgggagctgctggccctgcccaaggccggcggcaagcccttctgtgcctag

SEQ ID NO: 190909 - DNA, 1560 bp, Artificial Sequence
  derived and/or modified sequence
atgagctacccccagttcggctacccctacagcagcgccccccagttcttaatggctaccaacagtctgagcacctgctgtgagtccggagggagaacattggctgacagcggcccagcagcctctgcgcaggcacctgtatactgcccagtgtacgaatcaagattattggccacggcacgtcacgagctgaacagcgccgctgcactgggcgtgtacggcggaccctacggaggctcacaggggtacggtaactatgtgacctatggcagcgaggccagcgcattctacagcttgaactcttttgattccaaggatggatcagggtcagcccacgggggactggcccccgctgcggccgcgtactacccgtatgagcctgcactaggtcagtacccctatgatcggtacggcacaatggactccggtacccggagaaagaatgccacacgggaaacgacctctaccctcaaggcgtggctgcaggagcaccgaaagaacccgtatccaaccaagggtgagaagattatgttggcgattattactaaaatgacattaacccaggtttctacctggttcgccaatgcacgtagacgccttaaaaaggagaataaaatgacctggcccccgcgaaataaatgtgccgatgaaaagcggccgtacgctgagggagaggaagaggaaggaggagaagaggaagcccgggaagagcccctgaaaagctctaagaatgcagagcccgtcggaaaggaggagaaagaactggagttgagcgatttggatgatttcgatcccttggaggcggagcctcctgcatgtgagttaaaacctccctttcactctttggacggcggcctggaaagggtgcccgcagccccggacggcccggtcaaggaagcgtcaggagcactgaggatgagtttggccgcaggagggggtgctgccttggatgaagacctcgagcgcgcgaggagttgcctgcgctctgcggccgcaggccccgagccgctacctggagctgagggagggcctcaggtctgtgaggcaaagctgggctttgtccctgcaggggcctccgctggtctggaggccaagcctaggatctggtcgctcgcacacacagccactgcagctgccgcggccgcaacatctctttcgcaaaccgagtttccctcttgcatgcttaagagacagggccctgctgcacccgccgcagtcagctccgcccctgctacatcaccatcagtggcccttccgcattctggcgcccttgatagacatcaggactcaccagttaccagcctgcgcaactgggtggacggagtgttccacgaccccattcttaggcatagcacactgaaccaggcgtgggccacagctaaaggtgccctgctagatccgggtccactgggacgttccctgggtgccggcgccaacgtgctgaccgccccactggccagagctttccctcctgctgtgccccaggacgcacccgcagcaggcgccgcaagagaactcctagccctgccaaaggctgggggcaagccgttctgcgcctag

SEQ ID NO: 190910 - DNA, 1560 bp, Artificial Sequence
  derived and/or modified sequence
atgagctacccccagttcggctacccctacagcagcgccccccagtttctaatggctacaaattctctgtcaacttgctgtgaatctggcggacggactcttgccgactcggggcccgcagccagcgcccaggccccagtatactgccccgtatatgagagtcgcttactcgcgacagcccgccacgaactgaatagcgcagccgccctaggcgtctacggagggccctacggtgggagtcaagggtacggcaactacgtgacctatggcagtgaagcttcagccttctattctctgaatagctttgacagcaaggacggcagcggctctgcccacggcggactggcacctgcggcagccgcctattatccctatgaaccagccctgggacagtatccttacgataggtatggcactatggatagcggtacaaggcggaagaatgcaacccgagagaccacttccactctgaaagcatggcttcaggagcatcggaagaatccatacccaactaagggtgagaaaattatgttagcgatcattactaagatgaccttaacccaggtatcgacttggtttgccaatgctcggcgccgacttaaaaaagaaaacaaaatgacctggccgcctagaaacaagtgcgccgacgaaaagaggccctatgctgagggggaggaagaagagggaggcgaggaggaggcccgggaggagcccctcaaaagctcgaagaatgctgagcccgtcgggaaggaagagaaggaactcgaattaagtgatctggacgactttgatcctctggaggctgagccacctgcatgcgaattgaaaccaccctttcacagcttggatggcggcctggaacgtgtgccagcggcacccgacggcccagtcaaggaggcatccggggctctgagaatgtccttggccgctggtggcggggcagcgttagatgaggatctagagagggcgagaagttgccttcggtcagccgccgctggacctgaaccactgcctggagccgaaggaggccctcaggtgtgcgaagcaaagcttgggttcgttcccgcgggggccagcgcgggactggaggctaagccccgtatctggagcctcgctcacactgcaactgcggccgccgcagctgccaccagcctgagccagactgagttccctagctgcatgctcaaacgtcaagggcccgcggctccagccgcagtttctagcgcccctgctacaagtcctagcgtggcactgcctcatagtggtgctcttgaccgacatcaggattccccagtgacatcattgcggaattgggtggatggagtgttccatgatcccattctgcggcacagtaccttgaaccaggcctgggcaacagcaaaaggagccttattggatccgggacctctcggccggagtcttggcgcaggcgctaatgtgctgaccgcccccctcgccagggcgtttcccccagctgttccacaggatgcgccagccgctggagcggcgcgggagctgctagcgcttcctaaggcaggaggtaagccattttgtgcatag

SEQ ID NO: 190911 - DNA, 1560 bp, Artificial Sequence
  derived and/or modified sequence
atgagctacccccagttcggctacccctacagcagcgccccccagtttctgatggccacaaacagcttgtccacttgttgtgaatccggtggcaggaccttggccgattcaggacctgctgcctctgcccaagcccctgtgtattgtcccgtttacgagagccgcctcctggccaccgcacgccatgagctgaatagtgctgccgctctcggcgtttacggcgggccttatggcggctcccaaggatatggcaattacgtcacgtacggctctgaggcctccgctttttattcgttaaacagcttcgatagcaaggacggtagcggaagcgcccacggcggccttgcacccgccgccgcagcctattacccctatgagccagccctgggtcaatacccatacgatagatacggcacaatggacagtggcacgagacgcaagaatgctaccagggagaccaccagcactcttaaggcatggctacaggaacacagaaagaacccatatccaactaagggagaaaagataatgcttgctatcataaccaagatgacactcacccaagtctcaacttggtttgccaacgctagaaggagactgaaaaaggaaaacaaaatgacttggccccctcgaaataaatgcgcagatgagaagcgtccgtatgctgaaggcgaagaggaggagggaggagaggaggaagcccgcgaagaaccactcaagtccagtaagaatgctgaacccgtcgggaaagaagagaaagaattggagctctctgacctggatgatttcgaccctctggaggccgaaccaccggcctgcgagttaaaacctccatttcactcacttgatggaggactggaacgtgtgcctgcggctcctgacggaccagtgaaggaggcctcgggtgccctgagaatgtcattggcagctggtgggggggccgctcttgatgaagacttggagcgcgcgcgaagttgtcttaggtccgccgctgccggccctgagccgttaccaggcgctgaagggggaccacaggtttgtgaggccaaacttggatttgtgccagccggggcgtctgcgggattggaggctaagccgaggatttggtccctagcccacaccgctacagctgccgccgcagctgctacgagtctttcccagacagaatttccatcctgtatgctgaaaagacaaggcccggcagctccagccgccgtttcaagcgcacctgcaacctcaccttcagtggctctgcctcattctggggctctcgataggcatcaggacagccccgtgacgtccctccgcaattgggtcgatggcgtcttccatgatccaatcttgaggcacagcacattgaatcaagcctgggcaaccgccaagggagctctgcttgatcccggtccactgggtcgctcattgggcgccggcgccaatgtcctgacagcccctctggcgagagcctttccccctgccgtgcctcaggacgccccagccgctggtgcagctcgagaactgcttgccctgcctaaggcaggtggcaaacctttttgcgcctag

SEQ ID NO: 190912 - DNA, 1560 bp, Artificial Sequence
  derived and/or modified sequence
atgagttatccccaatttggctacccctatagcagcgcccctcaatttcttatggccaccaattctctctctacatgttgtgagtctggcggacggactctcgccgatagcggtcctgccgcttcagcacaggcccctgtgtactgccctgtgtatgaaagccgtttgctggcaacagcgcgtcatgaattgaatagtgccgctgctctcggagtatatggaggcccttatggtgggtctcaaggatacggcaactacgtaacatacgggagcgaggccagtgctttttactctctgaattcattcgattctaaagacggctctgggagcgcccacggcggactggcccctgcagctgctgcatactatccttacgagcctgccttgggtcagtacccctatgatagatacggcacgatggatagcggtactcgtcgaaaaaatgccacaagagagacgacaagtacactgaaagcatggctccaggagcacaggaagaacccctaccccacaaagggagagaaaataatgctggctatcatcacaaagatgacactgactcaggtcagcacctggttcgccaatgctcgacgcaggctgaagaaagagaataagatgacatggccacccagaaataaatgcgctgatgagaaacgaccctatgctgagggagaggaggaagaaggcggtgaggaggaagctagggaagagccactgaaatcttccaaaaatgcagagcctgttgggaaggaggaaaaggagctagagttgagcgacctggacgattttgatcccctcgaagcagaacctcccgcatgtgagctaaagccaccttttcatagcctcgacggtgggcttgagcgggtgccagccgctccggatggccctgtgaaagaggcctccggcgcacttaggatgtccctggctgcaggcggaggagctgctctggacgaggaccttgaacgagcgaggtcttgcttgaggtctgccgcagcaggtcctgaacctctccctggagcggagggcggaccacaagtgtgtgaggctaagctggggtttgtgccagcgggagcatccgctggcctggaagccaagcccaggatctggtcactggcccacactgcaaccgccgctgccgctgctgccacctccctcagtcagacagagttccccagctgtatgctcaagaggcagggccctgcagcgccagctgccgtgtcctctgcgcctgctacatccccaagcgttgcactgcctcactctggcgctttggaccgacaccaggattcgcctgtcacatctctcaggaattgggttgacggagttttccacgaccccatcctgagacattctacacttaaccaagcctgggccactgccaaaggcgctctcctggatcccggacccctgggacggagtttaggagctggggcaaacgtccttaccgccccactcgcccgtgcttttccacccgcagtgccccaggacgcgcctgctgctggagctgctagggagttgctggctctgcccaaggccggaggcaaacctttctgtgcctag

SEQ ID NO: 190913 - DNA, 1560 bp, Artificial Sequence
  derived and/or modified sequence
atgtcctacccgcagtttggatatccatacagtagtgccccacaatttctcatggctacgaatagtctgtctacctgttgcgagagcgggggacggaccctcgcggactccgggccagcagcctcggcccaggcccctgtgtattgtcccgtctacgaaagtcggctgcttgctactgcccgacatgaactgaacagtgccgctgctctcggagtgtacggtgggccatatgggggttctcaagggtacggcaattacgtgacgtacggatcagaggctagcgccttttattccctcaacagcttcgactcaaaggacggcagcggcagtgcccacggaggccttgcccctgccgctgccgcttattacccctacgagccagcccttggccagtacccgtacgacaggtacgggactatggatagcggaacacgccgaaaaaacgccactcgtgagacaacctcaaccctgaaggcgtggctgcaagagcatagaaagaacccttatcctacaaagggggagaagattatgctggctatcatcaccaagatgacattgacacaggtaagcacctggtttgcaaacgcacgtcgccgactcaaaaaagaaaacaagatgacatggccaccccgaaataaatgcgcagacgaaaaacggccatacgcagaaggagaggaagaggaggggggtgaggaagaggccagagaggagcccctgaaatcctctaaaaatgccgaacctgttggtaaggaagaaaaggaactcgaactcagcgacttggacgacttcgacccgctggaagcggagccccctgcatgcgagctgaaacctccttttcacagtttggatggcggtcttgagcgggtgcccgcagcccctgacggaccggttaaggaggcatctggggctctccggatgtcactagccgctggcggaggtgccgcattggacgaagatctcgagcgcgctaggtcttgtcttcgctctgctgcagctggaccagagcctctcccaggcgctgaagggggtccccaggtgtgtgaagctaagctggggttcgtgcctgctggcgcttctgccggactcgaggccaagccccgaatttggtcactcgcccatacagctactgcagccgctgccgcagctacaagcttgagccagactgagttcccgagctgcatgctaaagaggcagggaccggcagcccctgcagctgtgtccagcgcccctgccacctctcctagcgtggccctccctcactcaggcgctctcgatcgtcaccaggacagccctgttaccagcctgcgtaattgggtggatggggtgtttcatgacccaatcctgcgccatagcacactcaatcaggcttgggctacagcaaagggagcccttttagaccccggacctttaggtagaagcctaggggctggcgctaacgtgctgacagcccctttggcacgggcatttcctcctgctgtacctcaggacgcccctgcagccggtgccgctcgagaactactcgcgcttcccaaagccggaggaaaacctttctgcgcgtag

SEQ ID NO: 190914 - DNA, 1560 bp, Artificial Sequence
  derived and/or modified sequence
atgtcttatccacagttcggctatccttatagttccgctccccagttcttgatggctacaaattcgctgtctacatgctgtgagagcgggggacggactcttgccgacagtggaccagctgcaagcgcccaggccccagtttactgccccgtttatgaatccaggctgcttgcaactgctcgccatgaactgaacagcgccgcagctctcggtgtgtatggcggaccctatggtggctcccaggggtatggcaactacgtcacatatggatctgaagccagcgcgttctattctctgaatagctttgacagtaaggatggaagcgggagcgcccatggtgggttggcgcctgccgcagcagcttactacccatacgagcccgctctgggccagtatccctatgaccgatacggcacaatggacagcgggactcggagaaaaaatgccacccgggagaccacgagtacactcaaagcatggctacaggaacacagaaagaacccgtaccccactaagggggagaaaattatgctggccatcatcacaaaaatgacactgacccaagtgtcaacctggttcgcaaatgccagaaggcgtctcaagaaggaaaacaaaatgacttggccgccacgtaataagtgtgcagacgagaaaaggccctacgctgaaggcgaggaggaggaaggaggagaggaggaagccagggaagagccacttaaatcatctaagaacgctgagcctgtaggaaaggaggaaaaggagttagaactttctgatctcgacgattttgaccctctcgaggctgaaccccctgcctgcgagctcaaacccccatttcactcactcgatgggggtctggagcgtgtcccagctgcacccgacggacctgtgaaagaagcatcaggcgctctacgcatgtcattggccgctggcggaggcgctgcgcttgatgaggacttggagcgcgcaagatcctgtttacgcagcgccgctgcaggtcctgaaccactcccaggtgctgagggaggtccgcaggtgtgcgaggccaagctgggctttgttccagccggtgctagcgccggattggaggctaagcctcgcatctggtctctcgctcacaccgctactgccgcagccgctgcagcaacgtcacttagccagaccgagttcccatcatgcatgcttaaacgtcaggggcctgctgccccagctgctgtctcatctgcgccagcaaccagcccttccgtcgctttaccccacagtggggctctcgataggcaccaggattcccctgttacttccttgaggaactgggtggatggtgtgtttcacgatcccatcttgcgccattccactttaaatcaggcatgggctacagccaaaggcgctcttttagaccctggccctttgggcaggtctttaggcgctggcgctaatgtcctcacggccccattggcaagggccttccctccggctgtcccccaggacgccccagctgccggagctgccagagaacttcttgccctgcctaaagcaggcggaaaaccattttgcgcatag

SEQ ID NO: 190915 - DNA, 1560 bp, Artificial Sequence
  derived and/or modified sequence
atgagctacccccagttcggctacccctacagcagcgccccccagttcctgatggccaccaacagcctgagcacctgctgcgagagcggcggcagaaccctggccgacagcggccccgccgccagcgcccaggcccccgtgtactgccccgtgtacgagagcagactgctggccaccgccagacacgagctgaacagcgccgccgccctgggcgtgtacggcggcccctacggcggcagccagggctacggcaactacgtgacctacggcagcgaggccagcgccttctacagcctgaacagcttcgacagcaaggacggcagcggcagcgcccacggcggcctggcccccgccgccgccgcctactacccctacgagcccgccctgggccagtacccctacgacagatacggcaccatggacagcggcaccagaagaaagaacgccaccagagagaccaccagcaccctgaaggcctggctgcaggagcacagaaagaacccctaccccaccaagggcgagaagatcatgctggccatcatcaccaagatgaccctgacccaggtgagcacctggttcgccaacgccagaagaagactgaagaaggagaacaagatgacctggccccccagaaacaagtgcgccgacgagaagagaccctacgccgagggcgaggaggaggagggcggcgaggaggaggccagagaggagcccctgaagagcagcaagaacgccgagcccgtgggcaaggaggagaaggagctggagctgagcgacctggacgacttcgaccccctggaggccgagccccccgcctgcgagctgaagccccccttccacagcctggacggcggcctggagagagtgcccgccgcccccgacggccccgtgaaggaggccagcggcgccctgagaatgagcctggccgccggcggcggcgccgccctggacgaggacctggagagagccagaagctgcctgagaagcgccgccgccggccccgagcccctgcccggcgccgagggcggcccccaggtgtgcgaggccaagctgggcttcgtgcccgccggcgccagcgccggcctggaggccaagcccagaatctggagcctggcccacaccgccaccgccgccgccgccgccgccaccagcctgagccagaccgagttccccagctgcatgctgaagagacagggccccgccgcccccgccgccgtgagcagcgcccccgccaccagccccagcgtggccctgccccacagcggcgccctggacagacaccaggacagccccgtgaccagcctgagaaactgggtggacggcgtgttccacgaccccatcctgagacacagcaccctgaaccaggcctgggccaccgccaagggcgccctgctggaccccggccccctgggcagaagcctgggcgccggcgccaacgtgctgaccgcccccctggccagagccttcccccccgccgtgccccaggacgcccccgccgccggcgccgccagagagctgctggccctgcccaaggccggcggcaagcccttctgcgcctag

SEQ ID NO: 190916 - protein, 441 aa, Artificial Sequence
  derived and/or modified sequence
MIIPSLEELDSLKYSDLQNLAKSLGLRANLRATKLLKALKGYIKHEARKGNENQDESQTSASSCDETEIQISNQEEAERQPLGHVTKTRRRCKTVRVDPDSQQNHSEIKISNPTEFQNHEKQESQDLRATAKVPSPPDEHQEAENAVSSGNRDSKVPSEGKKSLYTDESSKPGKNKRTAITTPNFKKLHEAHFKEMESIDQYIERKKKHFEEHNSMNELKQQPINKGGVRTPVPPRGRLSVASTPISQRRSQGRSCGPASQSTLGLKGSLKRSAISAAKTGVRFSAATKDNEHKRSLTKTPARKSAHVTVSGGTPKGEAVLGTHKLKTITGNSAAVITPFKLTTEATQTPVSNKKPVFDLKASLSRPLNYEPHKGKLKPWGQSKENNYLNQHVNRINFYKKTYKQPHLQTKEEQRKKREQERKEKKAKVLGMRRGLILAED

SEQ ID NO: 190917 - DNA, 1326 bp, Artificial Sequence
  derived and/or modified sequence
atgattataccatcactcgaagagttggacagcctgaagtactccgatttgcagaatttagctaagtccctaggtcttagggctaatctgagggccacaaaattactcaaggcattgaagggttatattaagcatgaagcgagaaaagggaatgagaaccaggatgagtcccagacctcggcctcatcgtgtgacgaaaccgagattcagatttctaatcaagaagaggccgagagacagccgctcggccatgtaacgaaaaccagaagacggtgtaagaccgtgagggtggatccggatagtcagcagaatcactctgagatcaagatcagcaaccctacagagtttcagaaccacgagaagcaggaaagtcaggatctacgggccaccgctaaggtaccatctcctcctgacgaacaccaggaggccgagaacgcagttagcagcggaaacagagactcgaaagtgccttctgaggggaagaagtcgctgtatactgatgagagttcgaagccaggcaaaaacaagcgcaccgctatcacaactcccaacttcaaaaagctacatgaggcccatttcaaggagatggagtccatagatcagtatatagaacggaaaaagaagcacttcgaagaacacaactctatgaacgagctaaaacaacaacctatcaacaagggtggtgtgagaaccccggtaccaccccggggacggctcagtgtcgccagcacccccattagtcagagaaggtctcagggaaggagttgtggacctgcctctcagagtaccctgggactaaaaggaagcctcaagagaagcgcaatttctgctgcaaaaaccggagtccgctttagcgccgcgaccaaagacaacgagcacaagaggtcccttactaagacaccagctagaaagtctgcccatgttacagtgagtggtgggacccccaagggcgaagcagtgttgggaacacataagctgaaaaccatcacaggaaactcggcagccgtgattacaccttttaaactgactaccgaggccactcagacccccgtgtccaataagaagcctgtctttgacctaaaagcctccttgtcacgcccgctgaattacgagccgcataaagggaaattaaagccctggggacagagcaaggagaataattacctaaaccagcacgtgaaccggatcaacttctataagaagacttataagcaaccccatctccagactaaggaggaacagaggaaaaaaagggagcaggagcgaaaggaaaagaaagcgaaggttctgggtatgaggcggggccttatcctggcagaagactag

SEQ ID NO: 190918 - DNA, 1326 bp, Artificial Sequence
  derived and/or modified sequence
atgatcatccccagcctggaggagctggacagcctgaagtacagcgacctgcagaacctggccaagagcctgggcctgcgggccaacctgcgggccaccaagctgctgaaggccctgaagggctacatcaagcatgaggccaggaaaggaaatgaaaaccaggatgagagccagaccagcgccagcagctgtgatgaaacagagatccagatcagcaaccaggaggaggccgagcggcagcccctgggccacgtgaccaagacccggcggcgctgcaagacagtgcgggtggaccctgacagccagcagaaccacagcgagatcaagatcagcaaccccacagagttccagaaccacgagaagcaggagagccaggacctgcgggccacagccaaggtgcccagccccccagatgagcaccaggaggccgagaatgctgtgagcagcggcaacagagacagcaaggtgcccagcgagggcaagaagagcctgtacacagatgagagcagcaagccaggcaagaacaagaggacagccatcaccacccccaacttcaagaagctgcacgaggcccacttcaaggagatggagagcattgaccagtacattgaaaggaagaagaagcactttgaggagcacaacagcatgaatgagctgaagcagcagcccatcaacaagggcggcgtgaggacccctgtgcccccccggggccgcctgtctgtggccagcacccccatcagccagaggaggagccagggccgcagctgtggccctgccagccagagcaccctgggcctgaagggcagcctgaagaggtctgccatctctgctgccaagacaggagtgcgcttctctgctgccaccaaggacaatgagcacaagaggagcctgaccaagaccccagccaggaagagcgcccacgtgacagtgtctgggggcacccccaagggggaggccgtgctgggcacccacaagctgaagaccatcaccggcaacagcgctgctgtgatcacccccttcaagctgaccacagaggccacccagacccctgtgagcaacaagaagcctgtgtttgacctgaaggccagcctgagccggcccctgaactatgagccccacaagggcaagctgaagccctggggccagagcaaagaaaacaactacctgaaccagcacgtgaaccgcatcaacttctacaagaagacctacaagcagccccacctgcagaccaaggaggagcagaggaagaagcgggagcaggagaggaaggagaagaaggccaaggtgctgggcatgagaagaggcctcatcctggccgaggactag

SEQ ID NO: 190919 - DNA, 1326 bp, Artificial Sequence
  derived and/or modified sequence
atgatcatccccagcctggaggagctggacagcctgaagtacagcgacctacagaatctcgccaaaagcctcgggctccgcgccaacttgagagcgactaaactactaaaggcactgaagggttatatcaagcacgaggctcgcaaggggaacgagaatcaggacgaaagccagactagtgcaagctcttgcgatgaaaccgagattcagatatcaaatcaggaggaggccgaacggcagcctctggggcacgtgaccaagacacgccggcgctgcaagacggtgcgcgtcgacccagattctcagcagaaccacagcgaaatcaagattagcaatcctactgagttccagaaccatgaaaaacaggaatcacaagatttgcgcgccaccgcaaaggtgcccagtccacctgacgagcatcaggaggcagaaaatgctgtgtcctctgggaatcgcgatagcaaagtgccatccgaaggaaagaagagcctgtataccgatgagtcctcaaagcccggtaaaaacaagcgaaccgccatcaccactccaaactttaagaagctgcatgaggctcactttaaagagatggagagcatagaccagtacatcgagcgcaagaagaaacattttgaagaacataattctatgaatgaactcaagcagcagcccatcaataagggtggcgtccgtacccccgtgcccccaagaggtcgcctttcagttgcatctacacccattagtcaacgaagatcacaaggccgctcgtgcggacctgcctcccagtccaccctgggtctgaaaggcagtttgaagagatccgctattagcgccgccaaaacgggggtgagattttcggcagccaccaaagacaacgagcacaaacggtccctcacaaagacacccgctcggaaatccgcccacgtcaccgtatcgggcgggacccccaaaggagaggcggtgttaggtacccacaaattaaaaaccatcaccggtaactctgctgccgtgattactccattcaagctgaccacggaagccacgcagactcccgtctccaacaaaaaacctgtcttcgatctcaaggcctcactgtccaggcctctcaattatgaacctcataagggaaagctgaaaccgtggggccagtcaaaagagaacaattacctgaatcaacacgtgaacaggattaatttttacaaaaaaacgtacaagcagccccacttacagacaaaggaggaacaacggaagaagcgagagcaagaacgcaaagaaaagaaagcaaaagtactgggaatgaggagaggcttaattcttgcagaggattag

SEQ ID NO: 190920 - DNA, 1629 bp, Artificial Sequence
  derived and/or modified sequence
aaagttaagagtggcgccagggatttgaaccgcgctgacgaagtttggtgatccatcttccgagtatcgccgggatttcgaatcgcgatgatcatcccctctctagaggagctggactccctcaagtacagtgacctgcagaacttagccaagagtctgggtctccgggccaacctgagggcaaccaagttgttaaaagccttgaaaggctacattaaacatgaggcaagaaaaggaaatgagaatcaggatgaaagtcaaacttctgcatcctcttgtgatgagactgagatacagatcagcaaccaggaagaagctgagagacagccacttggccatgtcaccaaaacaaggagaaggtgcaagactgtccgtgtggaccctgactcacagcagaatcattcagagataaaaataagtaatcccactgaattccagaatcatgaaaagcaggaaagccaggatctcagagctactgcaaaagttccttctccaccagacgagcaccaagaagctgagaatgctgtttcctcaggtaacagagattcaaaggtaccttcagaaggaaagaaatctctctacacagatgagtcatccaaacctggaaaaaataaaagaactgcaatcactactccaaactttaagaagcttcatgaagctcattttaaggaaatggagtccattgatcaatatattgagagaaaaaagaaacattttgaagaacacaattccatgaatgaactgaagcagcagcccatcaataagggaggggtcaggactccagtacctccaagaggaagactctctgtggcttctactcccatcagccaacgacgctcgcaaggccggtcttgtggccctgcaagtcagagtaccttgggtctgaaggggtcactcaagcgctctgctatctctgcagctaaaacgggtgtcaggttttcagctgctactaaagataatgagcataagcgttcactgaccaagactccagccagaaagtctgcacatgtgaccgtgtctgggggcaccccaaaaggcgaggctgtgcttgggacacacaaattaaagaccatcacggggaattctgctgctgttattaccccattcaagttgacaactgaggcaacgcagactccagtctccaataagaaaccagtgtttgatcttaaagcaagtttgtctcgtcccctcaactatgaaccacacaaaggaaagctaaaaccatgggggcaatctaaagaaaataattatctaaatcaacatgtcaacagaattaacttctacaagaaaacttacaaacaaccccatctccagacaaaggaagagcaacggaagaaacgcgagcaagaacgaaaggagaagaaagcaaaggttttgggaatgcgaaggggcctcattttggctgaagattaataattttttaacatcttgtaaatattcctgtattctcaacttttttccttttgtaaattttttttttttgctgtcatccccactttagtcacgagatctttttctgctaactgttcatagtctgtgtagtgtccatgggttcttcatgtgctatgatctctgaaaagacgttatcaccttaaagctcaaattctttgggatggtttttacttaagt

SEQ ID NO: 190921 - DNA, 1326 bp, Artificial Sequence
  derived and/or modified sequence
atgataattcccagccttgaggagctggattctcttaagtactcagatctccagaacttggccaagtctttgggcctccgagccaacctccgcgcaacgaaattgctaaaggctctaaaagggtacatcaagcacgaagcgagaaaaggcaatgagaaccaagatgaatcacagacttccgcatcttcctgtgatgagacagagatccagatttcaaaccaggaggaggctgaaagacagcctctcggtcacgtaacaaaaacacgaaggaggtgtaaaacggtacgcgtagaccctgatagccagcaaaaccactctgagatcaagatatcaaaccccaccgaattccagaatcatgaaaagcaggagagccaggacctgcgagccactgcaaaggttccctctccaccagacgaacatcaggaggcagaaaacgctgtttcttcaggaaatagggattcaaaagtgccttccgaaggcaaaaagagcctgtacaccgacgagtcctcaaaacctgggaagaacaaaaggaccgctattaccacccccaactttaaaaagctgcatgaagctcactttaaagaaatggaatctatagatcagtacatcgagcgtaaaaagaagcacttcgaggagcacaatagcatgaatgagctgaagcaacagcctattaataagggcggagtgagaaccccagtacctcctcgtggccgtctgagcgttgcttccacccctatctcgcagaggcgtagccaaggcaggtcatgcggccctgcctcccaaagtaccctgggcctgaaaggtagcttaaaaaggtctgccatatctgccgctaagacaggtgtgcgttttagcgccgctacaaaggacaacgaacataagcggagtcttactaagactcccgctcgcaagtctgcacacgtaaccgtctccggcggtacccccaagggcgaggctgtgctggggacacacaaactaaagactattaccgggaattcagccgcagtcataacaccttttaaactgacaacggaggccacacaaactccagttagcaataaaaagcccgtctttgatctgaaggcatctctgagcaggcctctgaattatgaacctcataaagggaagcttaagccctgggggcagtctaaagagaacaattacttaaaccagcacgtgaaccgaatcaatttctacaagaagacttacaaacagcctcacttgcagactaaggaagaacaaaggaaaaagcgggagcaggagaggaaggagaaaaaagctaaggtgctaggaatgaggcgcggtctgattcttgccgaagactag

SEQ ID NO: 190922 - DNA, 1326 bp, Artificial Sequence
  derived and/or modified sequence
atgatcatccccagcctggaggagctggacagcctgaagtacagcgacctgcagaacctggccaagagcctgggcctgagagccaacctgagagccaccaagctgctgaaggccctgaagggctacatcaagcacgaggccagaaagggcaacgagaaccaggacgagagccagaccagcgccagcagctgcgacgagaccgagatccagatcagcaaccaggaggaggccgagagacagcccctgggccacgtgaccaagaccagaagaagatgcaagaccgtgagagtggaccccgacagccagcagaaccacagcgagatcaagatcagcaaccccaccgagttccagaaccacgagaagcaggagagccaggacctgagagccaccgccaaggtgcccagcccccccgacgagcaccaggaggccgagaacgccgtgagcagcggcaacagagacagcaaggtgcccagcgagggcaagaagagcctgtacaccgacgagagcagcaagcccggcaagaacaagagaaccgccatcaccacccccaacttcaagaagctgcacgaggcccacttcaaggagatggagagcatcgaccagtacatcgagagaaagaagaagcacttcgaggagcacaacagcatgaacgagctgaagcagcagcccatcaacaagggcggcgtgagaacccccgtgccccccagaggcagactgagcgtggccagcacccccatcagccagagaagaagccagggcagaagctgcggccccgccagccagagcaccctgggcctgaagggcagcctgaagagaagcgccatcagcgccgccaagaccggcgtgagattcagcgccgccaccaaggacaacgagcacaagagaagcctgaccaagacccccgccagaaagagcgcccacgtgaccgtgagcggcggcacccccaagggcgaggccgtgctgggcacccacaagctgaagaccatcaccggcaacagcgccgccgtgatcacccccttcaagctgaccaccgaggccacccagacccccgtgagcaacaagaagcccgtgttcgacctgaaggccagcctgagcagacccctgaactacgagccccacaagggcaagctgaagccctggggccagagcaaggagaacaactacctgaaccagcacgtgaacagaatcaacttctacaagaagacctacaagcagccccacctgcagaccaaggaggagcagagaaagaagagagagcaggagagaaaggagaagaaggccaaggtgctgggcatgagaagaggcctgatcctggccgaggactag

SEQ ID NO: 190923 - protein, 297 aa, Artificial Sequence
  derived and/or modified sequence
MSAWAAASLSRAAARCLLARGPGVRAAPPRDPRPSHPEPRGCGAAPGRTLHFTAAVPAGHNKWSKVRHIKGPKDVERSRIFSKLCLNIRLAVKEGGPNPEHNSNLANILEVCRSKHMPKSTIETALKMEKSKDTYLLYEGRGPGGSSLLIEALSNSSHKCQADIRHILNKNGGVMAVGARHSFDKKGVIVVEVEDREKKAVNLERALEMAIEAGAEDVKETEDEEERNVFKFICDASSLHQVRKKLDSLGLCSVSCALEFIPNSKVQLAEPDLEQAAHLIQALSNHEDVIHVYDNIE

SEQ ID NO: 190924 - DNA, 894 bp, Artificial Sequence
  derived and/or modified sequence
atgagcgcctgggccgccgccagcctgagcagagccgccgccagatgcctgctggccagaggccccggcgtgagagccgccccccccagagaccccagacccagccaccccgagcccagaggctgcggcgccgcccccggcagaaccctgcacttcaccgccgccgtgcccgccggccacaacaagtggagcaaggtgagacacatcaagggccccaaggacgtggagagaagcagaatcttcagcaagctgtgcctgaacatcagactggccgtgaaggagggcggccccaaccccgagcacaacagcaacctggccaacatcctggaggtgtgcagaagcaagcacatgcccaagagcaccatcgagaccgccctgaagatggagaagagcaaggacacctacctgctgtacgagggcagaggccccggcggcagcagcctgctgatcgaggccctgagcaacagcagccacaagtgccaggccgacatcagacacatcctgaacaagaacggcggcgtgatggccgtgggcgccagacacagcttcgacaagaagggcgtgatcgtggtggaggtggaggacagagagaagaaggccgtgaacctggagagagccctggagatggccatcgaggccggcgccgaggacgtgaaggagaccgaggacgaggaggagagaaacgtgttcaagttcatctgcgacgccagcagcctgcaccaggtgagaaagaagctggacagcctgggcctgtgcagcgtgagctgcgccctggagttcatccccaacagcaaggtgcagctggccgagcccgacctggagcaggccgcccacctgatccaggccctgagcaaccacgaggacgtgatccacgtgtacgacaacatcgagtag

SEQ ID NO: 190925 - DNA, 894 bp, Artificial Sequence
  derived and/or modified sequence
atgtcagcttgggccgcagcctccttatcacgggccgccgcccgctgtctcctcgccagaggccccggtgtgcgagcagctcctccccgtgatcctaggccgtcacatccagagccacggggatgtggcgccgccccaggccgcacactccactttactgcagccgtaccagctggtcataacaaatggagcaaggtcagacacataaagggccccaaggatgttgagcgctccagaatcttttcaaagttatgcctaaacattaggctcgccgtgaaggaaggagggcctaacccagagcataactccaatttggcgaatatcctggaggtgtgccggagtaaacacatgccgaagtccaccatagagacagctctcaaaatggagaagtctaaagacacgtaccttctatatgagggcaggggaccaggcggctcatcactcctgatcgaagccctgagcaacagctctcataaatgccaggccgacatcagacacattctgaataaaaacggtggcgtaatggcggtgggcgcgcgacacagcttcgacaagaagggcgtcatcgtggtcgaagtcgaggacagggagaaaaaggccgtgaacttggagcgggcactcgaaatggcgatcgaggccggggccgaagatgtcaaagaaacagaggacgaggaggaaagaaatgtttttaaattcatctgtgatgccagttccctccaccaggtacgcaagaagctggatagtctgggactgtgcagtgtgagttgtgcactcgaatttattcctaattccaaagtccagttggctgaaccagacctcgaacaggctgcgcatctgatacaggccctgtctaaccacgaggatgtaattcatgtctacgacaacatcgagtag

SEQ ID NO: 190926 - DNA, 894 bp, Artificial Sequence
  derived and/or modified sequence
atgtctgcctgggccgccgccagcctgagcagagctgctgcccgctgcctgctggcccggggccctggggtgcgggccgccccaccccgggacccccggcccagccaccctgagccccggggctgtggggccgcccctggccgcaccctgcacttcaccgctgctgtgcctgctggccacaacaagtggagcaaggtgcgccacatcaagggccccaaggatgtggagaggagccgcatcttcagcaagctgtgcctgaacatccggctggccgtgaaggagggcggccccaaccctgagcacaacagcaacctggccaacatcctggaggtgtgccgcagcaagcacatgcccaagagcaccatcgagacagccctgaagatggagaagagcaaggacacctacctgctgtatgagggccggggccctgggggcagcagcctgctgattgaggccctgagcaacagcagccacaagtgccaggccgacatccgccacatcctgaacaagaatggaggagtgatggctgtgggcgcccggcacagctttgacaagaagggcgtgattgtggtggaggtggaggaccgggagaagaaggctgtgaacctggagcgggccctggagatggccattgaagctggagcagaagatgtgaaggagacagaagatgaggaggagagaaatgtgttcaagttcatctgtgatgccagcagcctgcaccaggtgaggaagaagctggacagcctgggcctgtgcagcgtgtcctgtgccctggagttcatccccaacagcaaggtgcagctggccgagccagacctggagcaggccgcccacctgatccaggccctgagcaaccatgaagatgtgattcatgtgtatgacaacatcgagtag

SEQ ID NO: 190927 - DNA, 894 bp, Artificial Sequence
  derived and/or modified sequence
atgagcgcctgggccgccgccagcctgagccgggccgccgcccggtgcttactcgcaagagggcctggcgtgcgggctgctccacctcgcgatcctagaccgagtcaccctgagccaagaggatgtggagcggcccctggcagaacgctgcatttcactgctgcagtcccagctgggcataacaagtggagcaaagtgcgccacataaaggggcccaaagacgtggagcgctctcgcatctttagcaagctctgtttaaacattagattggccgttaaggaaggcgggcccaacccagagcataatagtaatcttgccaatattttagaggtatgtcgttctaagcacatgcccaaatccacaatagagaccgctctcaagatggagaaatccaaggatacgtacttactctatgagggccggggaccaggcggaagcagcctgcttattgaagcactgtccaactcctcacacaaatgccaggcagatattcgccacatcctgaacaaaaacggcggggtcatggccgtcggagccagacatagtttcgacaaaaagggagtgatcgttgtagaagtcgaggaccgggagaaaaaggccgttaatctggaacgagctctggaaatggcaattgaggctggggcagaggatgttaaggaaactgaggacgaagaggagaggaacgtgtttaaattcatttgcgatgcgagctctttacatcaggtccgcaaaaagcttgattcccttggactctgtagcgtttcttgtgcactggagtttatccccaacagcaaggtgcagttagctgagccagaccttgagcaagcagctcatctgattcaggccctgtctaaccacgaggacgtgatccacgtttatgataatattgagtag

SEQ ID NO: 190928 - DNA, 894 bp, Artificial Sequence
  derived and/or modified sequence
atgtcagcttgggctgccgcatctctctcaagggctgctgccagatgtctgttagctcggggtcccggagtgcgggctgcccctccaagggacccccgaccaagccatcctgagccaaggggttgcggagccgctccaggccgaaccctccacttcacggccgcagtccctgctggccataacaaatggagcaaagtgagacacattaaggggcctaaagatgtggaacggtctagaatctttagcaagctctgtctcaacatcagactcgcggtgaaggaagggggaccgaaccctgaacataactccaacctagccaatatcctcgaggtgtgcagaagtaagcacatgcctaaaagtactatcgagacagctctgaagatggaaaaaagcaaagatacatatctgctgtacgagggtcgcggaccgggtgggtctagcctgctaatcgaggcactcagtaatagcagccataagtgccaagcagacatccgacacattctcaacaagaacggtggagttatggcagtgggagctcgtcactcctttgacaaaaagggagtgattgtagtcgaggtcgaggacagggaaaagaaggcagtcaacctcgaaagagcactggagatggccattgaagctggcgctgaggacgtgaaagagaccgaagacgaggaggagcggaacgtgttcaaatttatatgtgatgcatctagcctccaccaggtgagaaaaaaattagacagcctgggactgtgcagtgtgtcatgcgcgttagaatttatcccaaactctaaggtacaattggccgagcccgacctcgagcaggcagctcacctgattcaggctctttctaatcatgaggatgttattcatgtctatgataacatcgaatag

SEQ ID NO: 190929 - DNA, 1468 bp, Artificial Sequence
  derived and/or modified sequence
gtgctacgccatcaagggcccccagtcccgggtgccgcggggacagtgtagggtcattagctgttgagccgccccgggcgggcccaagcctttggatctcaggtgaccggcacaggcggccgcggggtccggaactgcttgttccggcagtggaagagacgcgccggcgttggccgctgctgctagcagcttgaaccccagggtcgggaccgatgtcggcttgggctgctgccagcctaagcagggccgctgcccgatgcttgctggcacgaggccccggggtcagggcggctcctccgcgcgacccccggccctcccaccccgagccccggggctgcggtgccgctccgggcaggacgctgcactttaccgcggctgtccccgccgggcacaacaagtggtccaaagtcaggcacatcaagggtccgaaggacgtcgaaaggagtcgcatcttctccaaactctgtttgaacatccgcctggcagtgaaagaaggaggccccaaccctgagcacaacagcaacctggccaatatcttagaggtgtgtcgcagcaaacatatgcccaagtcaacgattgagacagcactgaaaatggagaaatccaaggacacttatttgctgtatgagggtcgaggccctggtggctcttctctgctcatcgaggcattatctaacagtagccacaagtgccaagcagacattagacatatcctgaataagaatggaggagtgatggctgtaggagctcgtcactcttttgacaaaaagggggtgattgtggttgaagtggaggacagagagaagaaggctgtgaacctagagcgtgccctggagatggcaatcgaagcaggagctgaggatgtcaaggaaactgaagatgaagaagaaaggaacgtttttaaatttatttgtgatgcctcttcactgcaccaagtgaggaagaagctggactccctgggcctgtgttctgtgtcctgtgcactagagttcatccccaactcaaaggtgcagctggctgagcccgacctggaacaggccgcacatctcattcaggctctcagcaaccacgaggatgtgattcacgtctatgataacattgaataaccaggctacatgtgcccccgggttccttcctagaaatgtggcagcccattccagcacacaggcttctgcagcaatctctgagggtaaagccggtgggaggctcagcaggccaggaggcccaaggacaggacttgcgaccttgaagccaaaggaatctcacttgtggggcctccttgtcagctctgctgctgtctcagagccatctggatgagtgtcccgacaccctctcggatgcagggcaggaccacccagctggtcagactctgatgttgggtagctggcctctgtggggattgtaagtgccctgaggcgctctgtactagaaactgctcttaataataacggtgattattggttgctgc

SEQ ID NO: 190930 - protein, 339 aa, Artificial Sequence
  derived and/or modified sequence
MSPSPTALFCLGLCLGRVPAQSGPLPKPSLQALPSSLVPLEKPVTLRCQGPPGVDLYRLEKLSSSRYQDQAVLFIPAMKRSLAGRYRCSYQNGSLWSLPSDQLELVATGVFAKPSLSAQPGPAVSSGGDVTLQCQTRYGFDQFALYKEGDPAPYKNPERWYRASFPIITVTAAHSGTYRCYSFSSRDPYLWSAPSDPLELVVTGTSVTPSRLPTEPPSPVAEFSEATAELTVSFTNEVFTTETSRSITASPKESDSPAGPARQYYTKGNLVRICLGAVILIILAGFLAEDWHSRRKRLRHRGRAVQRPLPPLPPLPLTRKSNGGQDGGRQDVHSRGLCS

SEQ ID NO: 190931 - DNA, 471 bp, Artificial Sequence
  derived and/or modified sequence
atgaggggcgggggaggagtcccactcatccacttctcattgccagtgtgttctcccttcctctacctctcactgcccgaaccacaggcaaaacaccagagaagacctggatcagaacagggggcccatgtggcttcggttgatcatccacccgcctgtaccgctttaggggggcccagaaatgccaggccatccgccgggggcagtctctttacatcattgcaaccatcggaagacacaagcgagtggggtgcagagcctgccgacggtgaaaataagaatgacgacacattatacacgcctgatgacctttccattccgggtcacttcgtacctacagtatgtccagcagagaccctgggatgcagtcggctcgaattgtctgtgatcggctttgaagaaggcccctccatggggactgctgtcttccaacttcagtacctgctcgacctcctggggtccagactttag

SEQ ID NO: 190932 - DNA, 1020 bp, Artificial Sequence
  derived and/or modified sequence
atgagtccctcccctactgccctgttttgcctaggactgtgtctggggcgcgtaccagcccagagcgggccactgcccaagccttcccttcaggctttgccatctagcttggtgccccttgagaagcccgtgacgcttcgatgccagggacctcccggagtggatctgtatcgcctggagaagcttagttcctcacgctaccaagaccaggccgttctgttcattcccgccatgaaaaggagcctagcaggccgctatcgatgtagttatcagaatgggagcctgtggagtttacccagcgatcaactggagttggtggccaccggagtgttcgccaagcccagtctttccgcacaacctggaccagccgtttctagcggaggtgacgtgaccctacagtgccagaccagatatgggttcgatcaattcgccctctataaggagggtgatcctgctccctataagaatcctgagcggtggtaccgtgcatctttcccaattatcaccgttactgccgcccattctggtacttacaggtgctacagtttcagctcccgagatccttatctgtggtccgcaccgtctgatcccctagaactggtagtcacaggtactagtgttactccctcccggctgcctacagagcctccgtccccagtggcggagttttctgaggccaccgcagagctgacagtgtcgtttactaacgaggtgtttacgactgagacttccaggtcaatcacagcgtcccctaaggaaagcgacagtccagccggccccgctcgacagtactataccaagggtaaccttgtccggatatgtctgggcgccgtgatcttgataatcttggcgggatttttggcggaagactggcacagtcggcggaagcggctgaggcatcggggacgcgccgttcagcgccctctccctccactgccccccctgcctttgaccaggaagagcaatggcggacaagatggcgggcgtcaggatgtccattcacgagggctgtgcagctag

SEQ ID NO: 190933 - DNA, 1020 bp, Artificial Sequence
  derived and/or modified sequence
atgagccccagccccacagccctcttctgcctgggcctgtgcctgggccgggtgcctgcccagagcggccccctgcccaagcccagcctgcaggccctgcccagcagcctggtgcccctggagaagcctgtgaccctgcgctgccagggccccccaggagtggacctgtaccgcctggagaagctgagcagcagccgctaccaggaccaggccgtgctcttcatcccagccatgaagaggagcctggccggccgctaccgctgcagctaccagaatggcagcctgtggagcctgcccagcgaccagctggagctggtggccaccggggtgtttgccaagcccagcctgagcgcccagcccggccctgctgtgtcctctggaggagatgtgaccctgcagtgccagaccaggtatggctttgaccagtttgccctgtacaaggagggggaccctgccccctacaagaaccctgagcgctggtaccgggccagcttccccatcatcaccgtgacagctgcccacagcggcacctaccgctgctacagcttcagcagccgggacccctacctgtggagcgcccccagcgaccccctggagctggtggtgacaggcacctctgtgacccccagccggctgcccacagagccccccagccctgtggccgagttcagcgaggccacagctgagctgactgtgtccttcaccaatgaggtgttcaccacagagaccagccgcagcatcacagccagccccaaggagagtgacagccctgctggccctgcccggcagtactacaccaagggcaacctggtgcgcatctgcctgggcgctgtgatcctgatcatcctggccggcttcctggccgaggactggcacagcaggaggaagaggctgcggcaccggggccgggctgtgcagaggcccctgccccccctgccccccctgcccctgaccaggaagagcaatggaggccaggacggcggccggcaggatgtgcacagccggggcctgtgcagctag

SEQ ID NO: 190934 - DNA, 1020 bp, Artificial Sequence
  derived and/or modified sequence
atgagccccagccccaccgccctgttctgcctgggcctgtgcctgggtagagtacccgctcagagcggtccactgccaaaaccctcattacaggctctcccgtcgagcctggtgcctttagaaaagccggtcacactgcgctgccaagggcctccaggagtggacctctatcgtttggagaagctctctagctctaggtaccaagaccaggccgtcctctttattcccgccatgaaacgctccctagctggcaggtatcgatgctcctatcaaaatggcagcctatggagtcttcctagcgaccagctggaattggtcgcaacaggtgtattcgcgaaaccgagcctgtccgcccagcctggccccgcagtgtctagtggcggggatgttacactgcaatgccagacacgctatggattcgaccagttcgctctgtataaagagggcgatcctgccccctacaaaaacccagagagatggtacagggcatcgtttcctattattaccgtcaccgccgctcattcaggcacatatcggtgttactcattttctagtcgggatccttatctgtggtcggctccttctgatccgctagaattggtcgtcactggcacttctgtgacacccagtcgcctgccaacggaacctccctcgcctgtggcagagtttagtgaagccacagctgagctgaccgtatccttcactaacgaggtgtttacgacggagacttcaagatccatcaccgcttcccccaaagagtccgactctcccgcagggcctgcccgtcagtactatacaaaaggtaatctggtgcgcatctgtctcggcgccgtaatcttaattatcttggctgggttcctggcagaagactggcattcaaggcgtaagcggctgaggcacagaggccgtgcagtgcagcgtcctctgcctccattgcctcccctgcccctgacaagaaagtctaacggcggccaggacggtggcagacaggacgtgcacagtcggggactgtgctcctag

SEQ ID NO: 190935 - DNA, 1020 bp, Artificial Sequence
  derived and/or modified sequence
atgtccccatcgcccacagctctgttctgcttaggcttgtgcctgggaagagtgcccgctcagagtggaccactcccaaaaccctccctgcaagcccttccctcctccttggtacccctggagaagcctgttactcttagatgtcaaggacccccaggcgtggatctgtatcgcctggagaaattatcaagcagtcgctatcaggaccaggccgtactctttatcccagctatgaagagatccctcgctggcagatatcggtgcagctaccagaatggctctctctggagcttaccttcggaccagctggagctagtggctacaggggtgttcgccaagccatcgttatctgcgcaacccggacccgctgtgagttcaggcggagacgtgacactgcagtgccaaacccggtacgggttcgaccaatttgccctgtataaagagggggatccagctccttataaaaaccctgaaaggtggtacagagcgtcatttcctataatcacggtgactgcagcacactctggcacctacagatgctactccttctccagcagggacccctacctatggagcgcccctagcgacccactggaactggtggtcaccggcactagtgtgaccccctcccgattacccacagagcctccttctcctgtggccgagttcagcgaggccacagccgaactgaccgtgagctttaccaatgaagtttttacgactgagactagccgctctattactgcgagccctaaagaaagcgattctcccgcagggcctgcacgccaatactacacaaagggcaacttagttaggatctgccttggtgcagtgatcttaattatcttggccggatttcttgccgaggactggcactcgaggagaaaaagacttcggcacagaggaagagccgtacagaggcctctcccgccactgccccctcttcccctgacgcgcaagtctaacggcggtcaggatgggggaaggcaggacgtgcactccaggggcctgtgttcctag

SEQ ID NO: 190936 - DNA, 1020 bp, Artificial Sequence
  derived and/or modified sequence
atgagccccagccccaccgccctgttctgcctgggcctgtgcctgggcagagtgcccgcccagagcggccccctgcccaagcccagcctgcaggccctgcccagcagcctggtgcccctggagaagcccgtgaccctgagatgccagggcccccccggcgtggacctgtacagactggagaagctgagcagcagcagataccaggaccaggccgtgctgttcatccccgccatgaagagaagcctggccggcagatacagatgcagctaccagaacggcagcctgtggagcctgcccagcgaccagctggagctggtggccaccggcgtgttcgccaagcccagcctgagcgcccagcccggccccgccgtgagcagcggcggcgacgtgaccctgcagtgccagaccagatacggcttcgaccagttcgccctgtacaaggagggcgaccccgccccctacaagaaccccgagagatggtacagagccagcttccccatcatcaccgtgaccgccgcccacagcggcacctacagatgctacagcttcagcagcagagacccctacctgtggagcgcccccagcgaccccctggagctggtggtgaccggcaccagcgtgacccccagcagactgcccaccgagccccccagccccgtggccgagttcagcgaggccaccgccgagctgaccgtgagcttcaccaacgaggtgttcaccaccgagaccagcagaagcatcaccgccagccccaaggagagcgacagccccgccggccccgccagacagtactacaccaagggcaacctggtgagaatctgcctgggcgccgtgatcctgatcatcctggccggcttcctggccgaggactggcacagcagaagaaagagactgagacacagaggcagagccgtgcagagacccctgccccccctgccccccctgcccctgaccagaaagagcaacggcggccaggacggcggcagacaggacgtgcacagcagaggcctgtgcagctag

SEQ ID NO: 190937 - DNA, 597 bp, Artificial Sequence
  derived and/or modified sequence
atggatagcctgcagaagcaagatctccgaagacccaaaatacacggggcagtgcaagctagcccatatcaacctccaacgctcgcaagcttgcagaggttgctctgggtgagacaagccgcaacgctgaatcacatcgacgaagtgtggccgtcactcttcctgggagatgcttatgccgcccgagacaagtccaaactgattcaactcggcataacacatgtggtaaacgccgctgccggcaaatttcaagtcgacacgggtgcaaaattttaccgaggaatgtcactagagtattatggaattgaagccgatgataacccctttttcgacctgtccgtgtattttctgccagtcgctcgctatatccgcgccgcactttctgtgccgcaggggagagttcttgtgcattgtgcaatgggcgtctctaggtcggccaccctcgtgcttgcctttctaatgatttgcgaaaacatgaccctcgtagaagcaatccagacagttcaggcacaccggaacatttgtcctaatagcgggttcctgcgccagctacaggtgctcgacaacagactaggcagggagaccggtcgcttctag

SEQ ID NO: 190938 - DNA, 597 bp, Artificial Sequence
  derived and/or modified sequence
atggattcgctacagaaacaggatctcagacggcctaagattcatggtgccgtgcaggcctcgccttatcagccgcctacattagcctcgcttcagcgtctgttgtgggttcgccaagctgcgacactcaatcacatagacgaggtgtggccatccttgttcttgggggacgcatacgccgcccgtgacaagtccaaactgattcaacttggtataacgcacgtagtcaacgccgctgcgggcaagttccaagtagacacaggtgctaaattttatcgagggatgagcttggaatactatggcattgaagcagatgacaaccctttcttcgatctgagtgtttactttctgccagtcgcaaggtatattagggccgcgcttagtgtgccacaggggagggtcttagtgcactgtgcaatgggggttagccgctccgccaccctcgtccttgcgttcctaatgatctgcgaaaacatgactctggtggaagcgatacagacggtacaggctcacagaaacatctgtccgaatagcggatttctcagacaattgcaagtactagataacaggttggggcgggagactggtaggttctag

SEQ ID NO: 190939 - DNA, 597 bp, Artificial Sequence
  derived and/or modified sequence
atggacagcctgcagaagcaggacctgcggcggcccaagatccatggagctgtgcaggccagcccctaccagccccccaccctggccagcctgcagaggctgctgtgggtgcggcaggccgccaccctgaaccacattgatgaggtgtggcccagcctcttcctgggagatgcctatgctgcccgggacaagagcaagctgatccagctgggcatcacccacgtggtgaatgctgctgctgggaagttccaggtggacacaggagccaagttctaccggggcatgagcctggagtactacggcatcgaggctgatgacaaccccttctttgacctgtctgtgtacttcctgcctgtggcccgctacatccgggccgccctgtctgtgccccagggccgggtgctggtgcactgtgccatgggcgtgagccgcagcgccaccctggtgctggccttcctgatgatctgtgagaacatgaccctggtggaggccatccagacagtgcaggcccacaggaacatctgccccaacagcggcttcctgcggcagctgcaggtgctggacaaccggctgggccgggagaccggccgcttctag

SEQ ID NO: 190940 - DNA, 597 bp, Artificial Sequence
  derived and/or modified sequence
atggacagcctgcagaagcaggacctgcggcggcccaagatccacggcgccgtacaggcaagcccttatcaaccacctactctagcgagcctgcagcgactgctttgggtgcggcaggccgctacgttgaaccatatcgacgaggtttggcctagtctctttctgggcgacgcttacgcagccagagacaaatcgaaactgattcagcttggaattacccatgtagtgaatgccgctgcagggaagttccaggtcgatactggcgccaagttctaccgcggcatgtctcttgaatactacggcattgaagccgacgacaatcctttttttgacctatctgtatacttcctgccagttgccagatacattcgggccgccttgtcagtgccccagggccgggtgctggtgcactgtgccatgggcgtgtctcgcagcgcaacccttgttctggctttcctgatgatctgcgagaacatgaccctcgtagaagcaatccagacagtacaagcccacagaaacatttgcccgaactcaggctttctacggcagttgcaggtcctggacaatcggctcggccgcgagaccggcagattctag

SEQ ID NO: 190941 - DNA, 597 bp, Artificial Sequence
  derived and/or modified sequence
atggacagcctgcagaagcaggacctgcggcggcccaagatccacggcgctgttcaggcatccccataccagccacccactttagcttctctacagaggctgttatgggtcaggcaagctgctacgttaaaccatatcgacgaggtgtggcccagcctgtttctgggtgatgcctacgcggcgcgggacaaaagcaaactcatccagctggggatcacccacgtcgtgaacgcggccgccggcaaattccaggtcgacactggagccaagttctatcgggggatgtctctcgagtactacggtatagaagcagatgacaatccatttttcgacttatcagtttattttttgcctgtcgcgagatacattcgcgccgctctaagcgtccctcagggacgggtgctggtgcattgcgccatgggcgtctcccgttccgcaaccctggtgctggcattcctgatgatatgtgagaacatgaccctagttgaagcgattcagacggttcaggcacacaggaatatctgcccaaactccgggtttttaaggcagttgcaggtgctggataacagactgggcagggaaactggacgcttttag

SEQ ID NO: 190942 - DNA, 597 bp, Artificial Sequence
  derived and/or modified sequence
atggatagtctgcagaaacaagacttgaggcgtcctaaaattcacggagctgtgcaggccagtccgtaccagcctcccacattggcatcactacagcgactcctgtgggttcgccaggcagccacccttaaccacatcgatgaggtctggccatcacttttcctcggcgacgcctacgctgctcgggataaatcaaagctgatccagctcggaattacacacgtagtcaacgccgctgccggtaaattccaagtagacaccggcgctaaattttatagggggatgtctttagagtattatggtatcgaagcagatgacaacccattcttcgatcttagtgtttatttcctgcccgtggccaggtacatccgggcagccctgtctgttcctcaaggaagggtgctggtacactgtgctatgggcgtgtcccgtagcgcaacccttgtattggctttccttatgatttgtgagaacatgactcttgtggaggcgatacagactgttcaggcacatagaaatatttgcccgaattccggcttcctccgacagcttcaggtgctcgataatcgcttaggtcgtgaaaccggcagattctag

SEQ ID NO: 190943 - DNA, 597 bp, Artificial Sequence
  derived and/or modified sequence
atggattctctgcagaaacaggatctgcggagacctaagatccacggtgcagtgcaggcctccccttatcagcccccaaccctcgcatctcttcagcgcttgctgtgggtcagacaagccgcaacactcaatcacatcgacgaagtctggcctagtcttttcctgggcgatgcttatgccgctcgggataaatcaaagctgatccaactcggaatcacgcacgtggtcaacgccgcagcgggaaagttccaggtggacacaggggctaagttttatcggggaatgagcctggagtactacggcatcgaggctgatgacaacccattttttgacttatcagtctattttctgcccgtcgccaggtatattagggccgcactatcagtcccccaggggagagtattagtgcattgcgccatgggcgtctcgcggtcggcaaccctggtacttgcctttttaatgatttgtgagaatatgactttggtagaagccattcaaactgtgcaggcgcatagaaatatttgccccaactccggattccttcggcaactacaggtcctggacaacaggctgggacgcgagactggccgtttttag

SEQ ID NO: 190944 - DNA, 597 bp, Artificial Sequence
  derived and/or modified sequence
atggacagcctgcagaagcaggacctgagaagacccaagatccacggcgccgtgcaggccagcccctaccagccccccaccctggccagcctgcagagactgctgtgggtgagacaggccgccaccctgaaccacatcgacgaggtgtggcccagcctgttcctgggcgacgcctacgccgccagagacaagagcaagctgatccagctgggcatcacccacgtggtgaacgccgccgccggcaagttccaggtggacaccggcgccaagttctacagaggcatgagcctggagtactacggcatcgaggccgacgacaaccccttcttcgacctgagcgtgtacttcctgcccgtggccagatacatcagagccgccctgagcgtgccccagggcagagtgctggtgcactgcgccatgggcgtgagcagaagcgccaccctggtgctggccttcctgatgatctgcgagaacatgaccctggtggaggccatccagaccgtgcaggcccacagaaacatctgccccaacagcggcttcctgagacagctgcaggtgctggacaacagactgggcagagagaccggcagattctag

SEQ ID NO: 190945 - DNA, 908 bp, Artificial Sequence
  derived and/or modified sequence
tgttccgctcaggcagagtcctgcccctgcacccactcccccattcccggccccaggccatgccccaggatggactcactgcagaagcaggacctccggaggcccaagatccatggggcagtccaggcatctccctaccagccgcccacattggcttcgctgcagcgcttgctgtgggtccgtcaggctgccacactgaaccatatcgatgaggtctggcccagcctcttcctgggagatgcgtacgcagcccgggacaagagcaagctgatccagctgggaatcacccacgttgtgaatgccgctgcaggcaagttccaggtggacacaggtgccaaattctaccgtggaatgtccctggagtactatggcatcgaggcggacgacaaccccttcttcgacctcagtgtctactttctgcctgttgctcgatacatccgagctgccctcagtgttccccaaggccgcgtgctggtacactgtgccatgggggtaagccgctctgccacacttgtcctggccttcctcatgatctgtgagaacatgacgctggtagaggccatccagacggtgcaggcccaccgcaatatctgccctaactcaggcttcctccggcagctccaggttctggacaaccgactggggcgggagacggggcggttctgatctggcaggcagccaggatccctgacccttggcccaaccccaccagcctggccctgggaacagcaggctctgctgtttctagtgaccctgagatgtaaacagcaagtgggggctgaggcagaggcagggatagctgggtggtgacctcttagcgggtggatttccctgacccaattcagagattctttatgcaaaagtgagttcagtccatctctataataaaatattcatcgtcataaaga

SEQ ID NO: 190946 - protein, 220 aa, Artificial Sequence
  derived and/or modified sequence
MGNCAKRPWRRGPKDPLQWLGSPPRGSCPSPSSSPKEQGDPAPGVQGYSVLNSLVGPACIFLRPSIAATQLDRELRPEEIEELQVAFQEFDRDRDGYIGCRELGACMRTLGYMPTEMELIEISQQISGGKVDFEDFVELMGPKLLAETADMIGVRELRDAFREFDTNGDGRISVGELRAALKALLGERLSQREVDEILQDVDLNGDGLVDFEEFVRMMSR

SEQ ID NO: 190947 - DNA, 663 bp, Artificial Sequence
  derived and/or modified sequence
atgggtaattgtgccaaacggccctggcggcgcggtccaaaagacccactgcagtggcttggaagcccgcctcgcggcagttgccccagtccaagctcttctcccaaggagcagggagaccccgcccctggcgtacagggttactccgtgctgaacagcctggtagggcccgcttgtatctttctaaggcccagtatcgcagccacacagctcgatagggagttaaggccagaggagattgaagagctgcaggttgcattccaggaatttgatcgggaccgcgatggttatatcggatgccgggagcttggggcttgcatgcgcaccctggggtacatgccaactgagatggagttgattgagatttcccagcagatctcgggggggaaagtcgattttgaagacttcgtggagctgatgggacctaaactgctggcggagaccgccgatatgattggcgtgagggagctgcgagatgcatttagagagtttgatacgaatggtgacggacggatatcggtgggtgagctgcgcgctgccctaaaggcccttctgggagagcggctgtcccagcgcgaggttgatgagattctccaggacgtcgatctgaacggagacggtctagtggactttgaagagttcgttagaatgatgtcgcgctag

SEQ ID NO: 190948 - DNA, 663 bp, Artificial Sequence
  derived and/or modified sequence
atgggcaactgtgccaagaggccctggaggcggggccccaaggaccccctgcagtggctgggcagccccccccggggcagctgccccagccccagcagcagccccaaggagcagggcgaccctgcccctggggtgcagggctacagcgtgctgaacagcctggtgggccctgcctgcatcttcctgcggcccagcattgctgccacccagctggaccgggagctgcggcctgaggagattgaggagctgcaggtggccttccaggagtttgaccgggacagagatggctacatcggctgccgggagctgggcgcctgcatgaggaccctgggctacatgcccacagagatggagctgattgagatcagccagcagatcagcggcggcaaggtggactttgaggactttgtggagctgatgggccccaagctgctggccgagacagctgacatgattggagtgcgggagctgagagatgccttccgggagtttgacaccaatggagatggccgcatctctgtgggggagctgcgggccgccctgaaggccctgctgggggagcggctgagccagcgggaggtggatgagatcctgcaggatgtggacctgaatggagatggcctggtggactttgaggagtttgtgaggatgatgagcaggtag

SEQ ID NO: 190949 - DNA, 663 bp, Artificial Sequence
  derived and/or modified sequence
atgggcaactgcgccaagcggccctggcggcggggccccaaggaccctcttcagtggctaggctccccacccagaggatcatgccctagcccaagtagctctcctaaagagcaaggcgaccccgcccccggagtgcagggctactccgtgttgaattccctggttggcccggcttgcatctttctacggccgtcaattgctgccacccaactggatagagaactgcgccccgaggagattgaagaacttcaggtggcattccaagagttcgatagagacagagatggttatatcggctgtcgcgaactcggagcctgcatgcgcaccttgggctacatgccgaccgaaatggagctgattgagatctctcagcaaatcagtggtggcaaggtggattttgaagattttgtagaactcatggggcccaaactgctggccgagacagccgatatgataggcgtaagagaattgagagacgcattccgtgagtttgacactaacggagacggtagaatttctgtgggggaactgagggcagctcttaaggccctgctaggtgaacgcctgtctcagagagaggtggatgagattctgcaagacgtggacctcaatggggacggcttggtggactttgaggaatttgttagaatgatgtccaggtag

SEQ ID NO: 190950 - DNA, 663 bp, Artificial Sequence
  derived and/or modified sequence
atgggcaattgcgcgaaaaggccatggcgccgtggacctaaggacccactccagtggctgggttcacccccacggggatcctgtccatctcccagttcatccccaaaggagcagggtgaccctgccccaggggtccaggggtattcggtgctgaacagcctggttgggccagcttgcatcttccttcgaccttctattgctgctacccaactggatagggagcttcgacccgaagagatcgaagaacttcaggtcgctttccaggagtttgatagggatcgagatggctacatcgggtgccgagagctcggcgcttgcatgagaaccctgggctacatgcccactgaaatggagctgattgagatctctcagcaaatctccgggggaaaagtggactttgaggatttcgtcgagctgatggggccaaagctgctggctgagacggccgacatgatcggagtccgggaactgcgcgacgcgtttcgggagtttgacaccaatggggacgggaggatcagcgtgggagagctgagagcggcactgaaagccctgctgggggagagactctctcaacgtgaagtagacgaaattttgcaggacgtcgatcttaatggagatgggctggtggactttgaagaattcgtgagaatgatgtcccggtag

SEQ ID NO: 190951 - DNA, 925 bp, Artificial Sequence
  derived and/or modified sequence
aggcagcagcatccgccgaggcccacccgggccacccccggggttccaggcctggcatggttcagggcccatggggaactgtgccaagcggccctggcgccggggccctaaggaccccttgcagtggctcggctccccaccaaggggctcctgccccagccccagctccagccccaaggagcagggggaccccgcgccaggcgtccagggctactcggtgctcaacagcctggtggggcctgcctgcatcttcctgcggcccagcattgccgccacccaactcgaccgggagctgcggcccgaggagattgaagagctgcaggtcgccttccaggagtttgaccgagaccgggacggctacattggctgccgggagctgggtgcctgcatgcggaccctgggctacatgcccaccgagatggagctcatcgagatctcacaacaaatcagtggcggaaaggtggactttgaagacttcgtggagctgatgggccccaagctgctggcagagacggcagacatgatcggtgtccgggagctacgggacgccttccgggagttcgacaccaatggggacggccgcatcagcgtgggcgagctccgggcggccctcaaggccctgctgggggagcgcctcagccagcgggaggtggacgagatcctccaggacgtggacctcaatggggacggtctggtcgacttcgaagagtttgtgcgaatgatgtctcggtgagcctgtacagaagctggaggcagcataaaggactcaaggaccacagcctctgcccaccagcatgttccttgaagcccatcgcctctagcggggaccctcctttcctccccatcccacctgtgtgcagtgcccttgcctgccttcacccccaccaccacttctccaataaagccgcctggccttgtctctgtc

SEQ ID NO: 190952 - DNA, 663 bp, Artificial Sequence
  derived and/or modified sequence
atgggcaactgcgccaagagaccctggagaagaggccccaaggaccccctgcagtggctgggcagcccccccagaggcagctgccccagccccagcagcagccccaaggagcagggcgaccccgcccccggcgtgcagggctacagcgtgctgaacagcctggtgggccccgcctgcatcttcctgagacccagcatcgccgccacccagctggacagagagctgagacccgaggagatcgaggagctgcaggtggccttccaggagttcgacagagacagagacggctacatcggctgcagagagctgggcgcctgcatgagaaccctgggctacatgcccaccgagatggagctgatcgagatcagccagcagatcagcggcggcaaggtggacttcgaggacttcgtggagctgatgggccccaagctgctggccgagaccgccgacatgatcggcgtgagagagctgagagacgccttcagagagttcgacaccaacggcgacggcagaatcagcgtgggcgagctgagagccgccctgaaggccctgctgggcgagagactgagccagagagaggtggacgagatcctgcaggacgtggacctgaacggcgacggcctggtggacttcgaggagttcgtgagaatgatgagcagatag

SEQ ID NO: 190953 - protein, 356 aa, Artificial Sequence
  derived and/or modified sequence
MLEQIRRDIRDFRSSAGLDKVIVLWTANTERFCEVIPGLNDTAENLLRTIELGLEVSPSTLFAVASILEGCAFLNGSPQNTLVPGALELAWQHRVFVGGDDFKSGQTKVKSVLVDFLIGSGLKTMSIVSYNHLGNNDGENLSAPLQFRSKEVSKSNVVDDMVQSNPVLYTPGEEPDHCVVIKYVPYVGDSKRALDEYTSELMLGGTNTLVLHNTCEDSLLAAPIMLDLALLTELCQRVSFCTDMDPEPQTFHPVLSLLSFLFKAPLVPPGSPVVNALFRQRSCIENILRACVGLPPQNHMLLEHKMERPGPSLKRVGPVAATYPMLNKKGPVPAATNGCTGDANGHLQEEPPMPTT

SEQ ID NO: 190954 - protein, 558 aa, Artificial Sequence
  derived and/or modified sequence
MEAAAQFFVESPDVVYGPEAIEAQYEYRTTRVSREGGVLKVHPTSTRFTFRTARQVPRLGVMLVGWGGNNGSTLTAAVLANRLRLSWPTRSGRKEANYYGSLTQAGTVSLGLDAEGQEVFVPFSAVLPMVAPNDLVFDGWDISSLNLAEAMRRAKVLDWGLQEQLWPHMEALRPRPSVYIPEFIAANQSARADNLIPGSRAQQLEQIRRDIRDFRSSAGLDKVIVLWTANTERFCEVIPGLNDTAENLLRTIELGLEVSPSTLFAVASILEGCAFLNGSPQNTLVPGALELAWQHRVFVGGDDFKSGQTKVKSVLVDFLIGSGLKTMSIVSYNHLGNNDGENLSAPLQFRSKEVSKSNVVDDMVQSNPVLYTPGEEPDHCVVIKYVPYVGDSKRALDEYTSELMLGGTNTLVLHNTCEDSLLAAPIMLDLALLTELCQRVSFCTDMDPEPQTFHPVLSLLSFLFKAPLVPPGSPVVNALFRQRSCIENILRACVGLPPQNHMLLEHKMERPGPSLKRVGPVAATYPMLNKKGPVPAATNGCTGDANGHLQEEPPMPTT

SEQ ID NO: 190955 - DNA, 1677 bp, Artificial Sequence
  derived and/or modified sequence
atggaggctgccgcccagttttttgttgagagccccgacgtggtgtatggcccagaggcaattgaggcccagtacgagtaccgcaccacacgagtctcccgggagggaggagtactaaaagtgcatcctacatccaccagattcactttcaggaccgcccgacaggtccccaggctcggcgtgatgctcgtcggctggggcgggaacaatggctccacactcacagctgccgttctagcgaaccggctgcggctaagctggcccacccgaagcgggaggaaggaggccaactactatggctcacttactcaagccggtacggtctctttaggtttagacgcggagggacaggaagtgtttgtaccattcagtgccgtcctcccaatggtggcgcccaatgacttggtgtttgatggatgggatatctctagtcttaacctagccgaggcgatgaggagggcaaaagtgctcgattgggggctacaagagcagctgtggcctcacatggaggcgttgcgccctcgaccatccgtatacatccctgagtttatcgccgccaaccagagcgccagagccgataatttaattcccgggtctagggcccagcagctggaacaaattaggcgggatatcagagattttaggtccagtgctggcctagacaaggtcatcgtcttatggacagcaaacactgagaggttctgtgaagttattcctgggctaaatgacactgcagagaacctgctgcgaacgatagagctcggcctggaagtttctccctctaccctatttgccgtggccagtatattggaaggatgtgcttttctaaacgggtcccctcagaacaccctggtacccggggcactggagctcgcctggcagcacagagttttcgtaggcggagatgactttaaaagtggccagaccaaagtaaagtctgttctcgtggactttctcattggctccggccttaaaacaatgagcatcgttagctacaatcaccttggaaacaatgacggagaaaacctcagcgctcctttacagtttcgttctaaagaggtatccaaatcaaacgtggttgatgacatggtccaatcaaaccccgtactctatacaccaggtgaggagcctgatcattgtgtggtcatcaagtatgtgccatacgtaggggattcaaaaagggctttagatgagtatacctcagaactgatgttaggcggcacaaacacgctggtcctacataatacttgcgaggacagtctgttagctgcacctatcatgcttgatctggccttgttaacggagctgtgccagcgggtcagcttctgcaccgatatggacccggaaccgcagacattccaccctgtgctgtcactcctgtcgttcctgtttaaagcccccctggtcccacccgggagtcccgttgttaacgccttgtttcgtcagaggtcatgcatcgagaatatcctgcgcgcgtgtgtagggttgccacctcagaaccacatgctgttagaacacaagatggagcgccccgggccctcccttaagagagttggccccgttgccgcaacatatcctatgctgaacaagaagggtcccgtgccagcagcaacaaatggctgtaccggagacgcgaacggtcatctgcaggaggaacctcctatgcctaccacttag

SEQ ID NO: 190956 - DNA, 2420 bp, Artificial Sequence
  derived and/or modified sequence
acttccgccaggcggggacccgatggccacggtggctctgggttgtcgggcctcgaaccgggtctccagacgttgggcccctccctcccagcgcgggagaggcggggaagggggcggggcgggggaggggccgcagcgcttttctccggaggtcgcgcgcccgagagcccgcgctgtccgccgccgctgcctgagtcgactctgcgccgcccgccgcgatggaggccgccgcccagttcttcgtcgagagcccggacgtggtctacggccccgaggccatcgaggcgcaatacgagtaccggacgacgcgcgtcagccgcgagggtggcgttctcaaggtgcaccccacgtccacgcgcttcaccttccggaccgcccggcaggtgccccggctcggggtcatgcttgtcggctggggcgggaacaacggctccacactcaccgccgcggtgctggccaatcgactgcgtttgtcctggcccacgcgcagcggccgcaaggaggccaactactacggctcgctgactcaggcgggcaccgtgagcctgggcctggacgccgagggccaggaggtgttcgtacccttcagcgcggtgctgcccatggtggcgcccaacgacctcgtgttcgatggctgggacatctcgtcgctgaacctggccgaggcgatgcggcgcgcgaaggtgctggactgggggctgcaggagcaactgtggccgcacatggaggccctgcggccccggccttctgtttacatccccgaattcatcgcggccaaccagagcgcgcgcgcggacaacctcatcccaggctcgcgtgcgcagcagctggagcagatccgcagggacatccgagacttccggtctagcgcggggctggacaaagtcatagtgctgtggacggcgaacacggagcgcttctgtgaggtgattccaggcctcaacgacacagccgagaacctgctgcgcaccattgagctcggtctggaggtgtcgccctccacgctcttcgccgtggccagcatcctggagggctgtgccttcctcaatgggtctccgcagaacaccctggtgcccggagctcttgagctcgcgtggcagcaccgggtttttgtgggcggagatgacttcaagtcaggccagaccaaagtcaagtccgtgcttgtggacttcctcattggctccggcctcaagaccatgtccatcgtgagttacaaccacctgggcaacaacgatggggagaacctatcggcgccattgcagttccgctctaaggaggtgtccaagagcaacgtggtggacgacatggtgcagagcaacccagtgctctatacgcccggcgaagagcctgaccactgcgtggtcatcaagtatgtgccgtacgtgggtgacagcaagcgcgcgctggatgagtatacctcggagctgatgctgggcggaaccaacacactggtgctgcacaacacgtgtgaggactcgctgctggccgcacccatcatgctggacctagcgctgctgaccgagctgtgccagcgcgtgagcttctgcactgacatggaccccgagccgcagaccttccaccccgtgctgtccctgctcagcttcctcttcaaggcgccactagtgccgcccggcagcccggtggtcaatgcgcttttccgccagcgcagctgcatcgagaacatcctcagggcctgcgtggggctcccgccacagaaccacatgctcctggaacacaaaatggagcgcccagggcccagcctcaagcgagttggacccgtggctgccacctaccctatgttgaacaagaaaggaccggtacccgctgccaccaatggctgcaccggtgatgccaatgggcatctgcaagaggagcccccaatgcccaccacctgaggccccggtcacacagtttctcggctcttcctccccgctgccccccacgaccctaccttgaaggcccccacaaataaaggcgctgccactcagccctccttccacctggggttcttggggcctgtgacctgactctgcctccctctacttccccgactcttgagcgcccagcttcagtcccatcccctctgcccatggtcatcaccccaactcccagggagagcccagaacctggagcctcgctctgcccccagttctcaaaggtggggctagatgggggcggggacggaacaagaccacagggtggagagtgtggtggcagaaggccaaagagggaatctgagacaagctaccaaaaaccaaaaccagcttccatttatttatgggccccaccccctgacgtcctggggagaggggccccccaaagagcctttctctctgggacaaaatacaaatggcaggaagggtccatacagaaaagaacgtctctgaggtccttgcgtttttaataaaatggtaagagtc

SEQ ID NO: 190957 - DNA, 1677 bp, Artificial Sequence
  derived and/or modified sequence
atggaggccgccgcccagttctttgtggagagcccagatgtggtgtatggccctgaggccatcgaggcccagtatgagtaccgcaccaccagggtgtcccgggagggcggcgtgctgaaggtgcaccccaccagcacccgcttcaccttcagaacagcccggcaggtgccccggctgggcgtgatgctggtgggctggggcggcaacaacggcagcaccctgacagctgctgtgctggccaaccggctgcggctgtcctggcccaccaggagcggcaggaaggaggccaactactacggcagcctgacccaggccggcaccgtgtccctgggcctggatgctgagggccaggaggtgtttgtgcccttctctgctgtgctgcccatggtggccccaaatgacctggtgtttgatggctgggacatcagcagcctgaacctggccgaggccatgaggcgggccaaggtgctggactggggcctgcaggagcagctgtggccccacatggaggccctgcggccccggcccagcgtgtacatccctgagttcatcgccgccaaccagagcgcccgggctgacaacctgatccctggcagccgggcccagcagctggagcagatccggcgggacatccgggacttccgcagcagcgctggcctggacaaggtgattgtgctgtggacagccaacacagagcgcttctgtgaggtgattcctggcctgaatgacacagctgagaacctgctgcggaccatcgagctgggcctggaggtgagccccagcaccctgtttgctgtggccagcatcctggagggctgtgccttcctgaatggcagcccccagaacaccctggtgcctggggccctggagctggcctggcagcaccgggtgtttgtgggcggagatgacttcaagagcggccagaccaaggtgaagtctgtgctggtggacttcctgattggcagcggcctgaagaccatgagcatcgtgtcctacaaccacctgggcaacaatgatggagagaacctgagcgcccccctgcagttccgcagcaaggaggtgtccaagagcaatgtggtggatgacatggtgcagagcaaccctgtgctgtacaccccaggagaggagccagaccactgtgtggtgatcaagtatgtgccctacgtgggggacagcaagagggccctggatgagtacaccagcgagctgatgctgggcggcaccaacaccctggtgctgcacaacacctgtgaggacagcctgctggccgcccccatcatgctggacctggccctgctgacagagctgtgccagagggtgtccttctgcacagacatggaccctgagccccagaccttccaccctgtgctgagcctgctgtccttcctgttcaaggcccccctggtgcccccaggcagccctgtggtgaatgccctcttccggcagaggagctgcatcgagaacatcctgcgggcctgtgtgggcctgcccccccagaaccacatgctgctggagcacaagatggagaggcctggccccagcctgaagagggtgggccctgtggccgccacctaccccatgctgaacaagaagggccctgtgcctgctgccaccaacggctgcacaggagatgccaacggccacctgcaggaggagccccccatgcccaccacctag

SEQ ID NO: 190958 - DNA, 1677 bp, Artificial Sequence
  derived and/or modified sequence
atggaggccgccgcccagttcttcgtggagagccccgacgtggtgtacggccccgaagcgatcgaagcccagtatgaatatcgcacaactcgggtaagtcgcgaaggaggagttttgaaggtacatcccactagtacaaggttcacattccgcacagctcgccaggtgccacgactcggagtgatgctggtgggctggggaggcaacaatgggtctaccctaacagcagccgtcctggccaaccggctacgcctgtcctggcccacacggagtggaaggaaggaggcaaattactacgggtcactgactcaggcaggcacagtgtccttgggcctggatgctgagggtcaggaggtctttgttccattcagtgccgtattgcccatggtggctccaaatgacttagtattcgacgggtgggatatctctagcctgaatctggctgaagccatgcgcagagctaaggtgcttgattgggggctccaggagcagctgtggccacacatggaagcactgcgaccaagaccatcagtttacattccagagttcattgcggcaaaccagagtgccagagccgacaatctgatcccaggcagtagagcccagcaactggagcagattcggcgtgatattagagattttcgaagtagcgccgggctggacaaggtgatcgtcctgtggacagcaaacacggagaggttttgtgaagtgatccccggtctgaacgacacggcggagaatcttcttaggaccattgagctgggcctggaagtgagtccttctacactgttcgcagtggcaagtattctggaaggctgcgcctttctaaatggctccccccagaatacgctcgtgccaggcgcattagagctggcttggcagcaccgggtctttgtgggtggggatgatttcaagtctggccagactaaagtcaaatccgtgcttgttgatttcttaatcgggagtggcctgaaaaccatgtctattgtctcatacaaccatctgggcaacaacgacggagagaatctgtccgctcctctgcagttccggtccaaagaggtgtctaagtcgaacgtggtggacgacatggtgcagagcaatccagtgctgtacaccccaggggaagagcccgatcattgtgtcgtaataaagtacgtcccatacgtgggagactctaagcgagccttggacgagtacacaagcgagctgatgttgggaggtactaatacactggtgctgcacaatacttgcgaagattcactcttggccgccccgatcatgctggatctggctctactgacggagctttgccagcgagtatccttttgcacagacatggatcccgagccacagaccttccatcccgtgttgagcttgctcagcttcctgttcaaggccccacttgttccacccggctcccccgttgtcaatgctcttttccgccagagatcttgcattgagaacattctgagggcctgcgtgggactgccccctcagaaccacatgctcttagaacataagatggagcggccaggcccttcacttaagcgcgttgggcctgtggccgccacctacccaatgctgaataagaagggtccggttccagccgcaacgaacgggtgtacaggcgatgccaacggacatctccaggaggagccgcctatgccgactacttag

SEQ ID NO: 190959 - DNA, 1677 bp, Artificial Sequence
  derived and/or modified sequence
atggaagccgcagcccagttttttgtggagtcaccagacgtagtgtatggtccagaggccatcgaggcccagtacgagtacagaacgaccagggtgagccgcgagggaggagtgctcaaagttcatccgactagcacccggtttactttccggaccgcacggcaggtcccaagactcggggtgatgctcgtgggatggggcggtaacaacgggagcaccctgactgctgccgtgctggctaataggctacggctatcttggcctacgaggtcagggaggaaagaggctaactactacggatccctcactcaggccggaaccgtgtccctggggcttgatgcggaggggcaggaggtgtttgtgcccttctccgcagtcctgccaatggttgcacctaacgacttggtgtttgacggctgggacatatcgagcttaaacctggcagaagccatgcgaagagctaaggtgctggactggggcctgcaggaacagctgtggccacatatggaggccctgcgaccgagaccttccgtctatatcccggagtttattgccgcaaatcaatctgctcgtgccgataacctgatccctggatccagagctcagcagcttgaacagattcggagagatattagagacttcagatcttccgctggcttagacaaggtaatagtgctgtggaccgctaacaccgagcggttttgcgaagtgatccccggtttgaacgatacggctgaaaacttattgcggacgatcgagctgggcttggaggtaagcccatccactctatttgccgtggcttctatccttgagggttgtgcctttctgaacgggtcccctcagaacacgctggtcccaggggctcttgaactggcctggcagcacagggtctttgtaggaggagatgacttcaaatccggccagactaaggtaaagagcgttttggtagatttcctgatcggaagcggcttgaaaacaatgagcatagtgagctacaatcatctgggtaataatgacggagaaaacctgagcgctccgctgcagttcaggagcaaggaggtgtccaaaagcaacgtcgtggacgacatggtgcagtctaatccagtcttatatactcctggagaggagccagaccactgtgtggtaatcaaatacgtgccgtacgttggtgattccaagcgagcacttgatgaatatacaagtgagctaatgcttggtgggacaaataccttggttctgcataacacctgtgaagattccctgctcgcggcacccatcatgctggatctggccctcctgactgagctctgtcagcgtgtcagtttctgtacggacatggaccccgagcctcagacattccatccggtcctctctttgttaagttttctatttaaagccccacttgtcccacccggatcacccgtggtaaacgcactgttcagacagcgaagctgcattgagaacatcctgagggcctgtgtcggactgcctccacagaatcacatgttgcttgaacacaaaatggagaggccgggtccatccttgaagcgcgtggggcctgtggcggcaacctaccccatgctgaataaaaagggccctgtacccgcagccacaaacggttgcaccggcgatgccaatggccatctgcaagaagaaccacccatgcccactacgtag

SEQ ID NO: 190960 - DNA, 1677 bp, Artificial Sequence
  derived and/or modified sequence
atggaggccgccgcccagttcttcgtggagagccccgacgtggtgtacggccccgaggccatcgaggcccagtacgagtacagaaccaccagagtgagcagagagggcggcgtgctgaaggtgcaccccaccagcaccagattcaccttcagaaccgccagacaggtgcccagactgggcgtgatgctggtgggctggggcggcaacaacggcagcaccctgaccgccgccgtgctggccaacagactgagactgagctggcccaccagaagcggcagaaaggaggccaactactacggcagcctgacccaggccggcaccgtgagcctgggcctggacgccgagggccaggaggtgttcgtgcccttcagcgccgtgctgcccatggtggcccccaacgacctggtgttcgacggctgggacatcagcagcctgaacctggccgaggccatgagaagagccaaggtgctggactggggcctgcaggagcagctgtggccccacatggaggccctgagacccagacccagcgtgtacatccccgagttcatcgccgccaaccagagcgccagagccgacaacctgatccccggcagcagagcccagcagctggagcagatcagaagagacatcagagacttcagaagcagcgccggcctggacaaggtgatcgtgctgtggaccgccaacaccgagagattctgcgaggtgatccccggcctgaacgacaccgccgagaacctgctgagaaccatcgagctgggcctggaggtgagccccagcaccctgttcgccgtggccagcatcctggagggctgcgccttcctgaacggcagcccccagaacaccctggtgcccggcgccctggagctggcctggcagcacagagtgttcgtgggcggcgacgacttcaagagcggccagaccaaggtgaagagcgtgctggtggacttcctgatcggcagcggcctgaagaccatgagcatcgtgagctacaaccacctgggcaacaacgacggcgagaacctgagcgcccccctgcagttcagaagcaaggaggtgagcaagagcaacgtggtggacgacatggtgcagagcaaccccgtgctgtacacccccggcgaggagcccgaccactgcgtggtgatcaagtacgtgccctacgtgggcgacagcaagagagccctggacgagtacaccagcgagctgatgctgggcggcaccaacaccctggtgctgcacaacacctgcgaggacagcctgctggccgcccccatcatgctggacctggccctgctgaccgagctgtgccagagagtgagcttctgcaccgacatggaccccgagccccagaccttccaccccgtgctgagcctgctgagcttcctgttcaaggcccccctggtgccccccggcagccccgtggtgaacgccctgttcagacagagaagctgcatcgagaacatcctgagagcctgcgtgggcctgcccccccagaaccacatgctgctggagcacaagatggagagacccggccccagcctgaagagagtgggccccgtggccgccacctaccccatgctgaacaagaagggccccgtgcccgccgccaccaacggctgcaccggcgacgccaacggccacctgcaggaggagccccccatgcccaccacctag

SEQ ID NO: 190961 - protein, 261 aa, Artificial Sequence
  derived and/or modified sequence
MSTTTCQVVAFLLSILGLAGCIAATGMDMWSTQDLYDNPVTSVFQYEGLWRSCVRQSSGFTECRPYFTILGLPAMLQAVRALMIVGIVLGAIGLLVSIFALKCIRIGSMEDSAKANMTLTSGIMFIVSGLCAIAGVSVFANMLVTNFWMSTANMYTGMGGMVQTVQTRYTFGAALFVGWVAGGLTLIGGVMMCIACRGLAPEETNYKAVSYHASGHSVAYKPGGFKASTGFGSNTKNKKIYDGGARTEDEVQSYPSKHDYV

SEQ ID NO: 190962 - protein, 250 aa, Artificial Sequence
  derived and/or modified sequence
MSTTTCQVVAFLLSILGLAGCIAATGMDMWSTQDLYDNPVTSVFQYEGLWRSCVRQSSGFTECRPYFTILGLPAMLQAVRALMIVAIFALKCIRIGSMEDSAKANMTLTSGIMFIVSGLCAIAGVSVFANMLVTNFWMSTANMYTGMGGMVQTVQTRYTFGAALFVGWVAGGLTLIGGVMMCIACRGLAPEETNYKAVSYHASGHSVAYKPGGFKASTGFGSNTKNKKIYDGGARTEDEVQSYPSKHDYV

SEQ ID NO: 190963 - DNA, 786 bp, Artificial Sequence
  derived and/or modified sequence
atgagcaccaccacctgccaggtggtggccttcctgctgagcatcctgggcctggccggctgcatcgccgccaccggcatggacatgtggagcacccaggacctgtacgacaaccccgtgaccagcgtgttccagtacgagggcctgtggagaagctgcgtgagacagagcagcggcttcaccgagtgcagaccctacttcaccatcctgggcctgcccgccatgctgcaggccgtgagagccctgatgatcgtgggcatcgtgctgggcgccatcggcctgctggtgagcatcttcgccctgaagtgcatcagaatcggcagcatggaggacagcgccaaggccaacatgaccctgaccagcggcatcatgttcatcgtgagcggcctgtgcgccatcgccggcgtgagcgtgttcgccaacatgctggtgaccaacttctggatgagcaccgccaacatgtacaccggcatgggcggcatggtgcagaccgtgcagaccagatacaccttcggcgccgccctgttcgtgggctgggtggccggcggcctgaccctgatcggcggcgtgatgatgtgcatcgcctgcagaggcctggcccccgaggagaccaactacaaggccgtgagctaccacgccagcggccacagcgtggcctacaagcccggcggcttcaaggccagcaccggcttcggcagcaacaccaagaacaagaagatctacgacggcggcgccagaaccgaggacgaggtgcagagctaccccagcaagcacgactacgtgtag

SEQ ID NO: 190964 - DNA, 753 bp, Artificial Sequence
  derived and/or modified sequence
atgagcaccaccacctgccaggtggtggccttcctgctgagcatcctgggcctggccggctgcatcgccgccaccggcatggacatgtggagcacccaggacctgtacgacaaccccgtgaccagcgtgttccagtacgagggcctgtggagaagctgcgtgagacagagcagcggcttcaccgagtgcagaccctacttcaccatcctgggcctgcccgccatgctgcaggccgtgagagccctgatgatcgtggccatcttcgccctgaagtgcatcagaatcggcagcatggaggacagcgccaaggccaacatgaccctgaccagcggcatcatgttcatcgtgagcggcctgtgcgccatcgccggcgtgagcgtgttcgccaacatgctggtgaccaacttctggatgagcaccgccaacatgtacaccggcatgggcggcatggtgcagaccgtgcagaccagatacaccttcggcgccgccctgttcgtgggctgggtggccggcggcctgaccctgatcggcggcgtgatgatgtgcatcgcctgcagaggcctggcccccgaggagaccaactacaaggccgtgagctaccacgccagcggccacagcgtggcctacaagcccggcggcttcaaggccagcaccggcttcggcagcaacaccaagaacaagaagatctacgacggcggcgccagaaccgaggacgaggtgcagagctaccccagcaagcacgactacgtgtag

SEQ ID NO: 190965 - DNA, 3520 bp, Artificial Sequence
  derived and/or modified sequence
gagcagacaagtgcctcttgggcccgcttctctaacaaatgtaaaaataatgcccttgaaccaggagcgaaactgagctatctaaggaaaacactgtgagcaaatactgagagcctagggaaaccatctgattagaagagctcccctcaggagcgcgttagcttcacaccttcggcagcaggagggcggcagcttctcgcaggcggcagggcgggcggccaggatcatgtccaccaccacatgccaagtggtggcgttcctcctgtccatcctggggctggccggctgcatcgcggccaccgggatggacatgtggagcacccaggacctgtacgacaaccccgtcacctccgtgttccagtacgaagggctctggaggagctgcgtgaggcagagttcaggcttcaccgaatgcaggccctatttcaccatcctgggacttccagccatgctgcaggcagtgcgagccctgatgatcgtaggcatcgtcctgggtgccattggcctcctggtatccatctttgccctgaaatgcatccgcattggcagcatggaggactctgccaaagccaacatgacactgacctccgggatcatgttcattgtctcaggtctttgtgcaattgctggagtgtctgtgtttgccaacatgctggtgactaacttctggatgtccacagctaacatgtacaccggcatgggtgggatggtgcagactgttcagaccaggtacacatttggtgcggctctgttcgtgggctgggtcgctggaggcctcacactaattgggggtgtgatgatgtgcatcgcctgccggggcctggcaccagaagaaaccaactacaaagccgtttcttatcatgcctcaggccacagtgttgcctacaagcctggaggcttcaaggccagcactggctttgggtccaacaccaaaaacaagaagatatacgatggaggtgcccgcacagaggacgaggtacaatcttatccttccaagcacgactatgtgtaatgctctaagacctctcagcacgggcggaagaaactcccggagagctcacccaaaaaacaaggagatcccatctagatttcttcttgcttttgactcacagctggaagttagaaaagcctcgatttcatctttggagaggccaaatggtcttagcctcagtctctgtctctaaatattccaccataaaacagctgagttatttatgaattagaggctatagctcacattttcaatcctctatttctttttttaaatataactttctactctgatgagagaatgtggttttaatctctctctcacattttgatgatttagacagactccccctcttcctcctagtcaataaacccattgatgatctatttcccagcttatccccaagaaaacttttgaaaggaaagagtagacccaaagatgttattttctgctgtttgaattttgtctccccacccccaacttggctagtaataaacacttactgaagaagaagcaataagagaaagatatttgtaatctctccagcccatgatctcggttttcttacactgtgatcttaaaagttaccaaaccaaagtcattttcagtttgaggcaaccaaacctttctactgctgttgacatcttcttattacagcaacaccattctaggagtttcctgagctctccactggagtcctctttctgtcgcgggtcagaaattgtccctagatgaatgagaaaattattttttttaatttaagtcctaaatatagttaaaataaataatgttttagtaaaatgatacactatctctgtgaaatagcctcacccctacatgtggatagaaggaaatgaaaaaataattgctttgacattgtctatatggtactttgtaaagtcatgcttaagtacaaattccatgaaaagctcactgatcctaattctttccctttgaggtctctatggctctgattgtacatgatagtaagtgtaagccatgtaaaaagtaaataatgtctgggcacagtggctcacgcctgtaatcctagcactttgggaggctgaggaggaaggatcacttgagcccagaagttcgagactagcctgggcaacatggagaagccctgtctctacaaaatacagagagaaaaaatcagccagtcatggtggcctacacctgtagtcccagcattccgggaggctgaggtgggaggatcacttgagcccagggaggttggggctgcagtgagccatgatcacaccactgcactccagccaggtgacatagcgagatcctgtctaaaaaaataaaaaataaataatggaacacagcaagtcctaggaagtaggttaaaactaattctttaaaaaaaaaaaaaagttgagcctgaattaaatgtaatgtttccaagtgacaggtatccacatttgcatggttacaagccactgccagttagcagtagcactttcctggcactgtggtcggttttgttttgttttgctttgtttagagacggggtctcactttccaggctggcctcaaactcctgcactcaagcaattcttctaccctggcctcccaagtagctggaattacaggtgtgcgccatcacaactagctggtggtcagttttgttactctgagagctgttcacttctctgaattcacctagagtggttggaccatcagatgtttgggcaaaactgaaagctctttgcaaccacacaccttccctgagcttacatcactgcccttttgagcagaaagtctaaattccttccaagacagtagaattccatcccagtaccaaagccagataggccccctaggaaactgaggtaagagcagtctctaaaaactacccacagcagcattggtgcaggggaacttggccattaggttattatttgagaggaaagtcctcacatcaatagtacatatgaaagtgacctccaaggggattggtgaatactcataaggatcttcaggctgaacagactatgtctggggaaagaacggattatgccccattaaataacaagttgtgttcaagagtcagagcagtgagctcagaggcccttctcactgagacagcaacatttaaaccaaaccagaggaagtatttgtggaactcactgcctcagtttgggtaaaggatgagcagacaagtcaactaaagaaaaaagaaaagcaaggaggagggttgagcaatctagagcatggagtttgttaagtgctctctggatttgagttgaagagcatccatttgagttgaaggccacagggcacaatgagctctcccttctaccaccagaaagtccctggtcaggtctcaggtagtgcggtgtggctcagctgggtttttaattagcgcattctctatccaacatttaattgtttgaaagcctccatatagttagattgtgctttgtaattttgttgttgttgctctatcttattgtatatgcattgagtattaacctgaatgttttgttacttaaatattaaaaacactgttatcctaca

SEQ ID NO: 190966 - DNA, 985 bp, Artificial Sequence
  derived and/or modified sequence
gagagcctagggaaaccatctgattagaagagctcccctcaggagcgcgttagcttcacaccttcggcagcaggagggcggcagcttctcgcaggcggcagggcgggcggccaggatcatgtccaccaccacatgccaagtggtggcgttcctcctgtccatcctggggctggccggctgcatcgcggccaccgggatggacatgtggagcacccaggacctgtacgacaaccccgtcacctccgtgttccagtacgaagggctctggaggagctgcgtgaggcagagttcaggcttcaccgaatgcaggccctatttcaccatcctgggacttccagccatgctgcaggcagtgcgagccctgatgatcgtagccatctttgccctgaaatgcatccgcattggcagcatggaggactctgccaaagccaacatgacactgacctccgggatcatgttcattgtctcaggtctttgtgcaattgctggagtgtctgtgtttgccaacatgctggtgactaacttctggatgtccacagctaacatgtacaccggcatgggtgggatggtgcagactgttcagaccaggtacacatttggtgcggctctgttcgtgggctgggtcgctggaggcctcacactaattgggggtgtgatgatgtgcatcgcctgccggggcctggcaccagaagaaaccaactacaaagccgtttcttatcatgcctcaggccacagtgttgcctacaagcctggaggcttcaaggccagcactggctttgggtccaacaccaaaaacaagaagatatacgatggaggtgcccgcacagaggacgaggtacaatcttatccttccaagcacgactatgtgtaatgctctaagacctctcagcacgggcggaagaaactcccggagagctcacccaaaaaacaaggagatcccatctagatttcttcttgcttttgactcacagctggaagttagaaa

SEQ ID NO: 190967 - DNA, 786 bp, Artificial Sequence
  derived and/or modified sequence
atgtcgactactacgtgccaagtagttgcctttctgctgtcaattctcgggcttgctggctgcattgcagctactggcatggacatgtggagtactcaagatctctatgacaaccctgtgactagcgttttccagtatgaaggattgtggcggtcctgcgtacggcagtcgtctggtttcaccgagtgccgcccttacttcacaatcctaggactgccagctatgttacaggctgtgcgggcccttatgattgtgggcattgttttgggcgcgattggattactcgtgtctattttcgcattaaagtgcattcggatcggtagtatggaggatagcgccaaggctaacatgaccttgacgtccggtattatgttcattgtgtcagggctctgcgcgattgccggcgtgtcagtgtttgccaatatgctggtcacgaatttttggatgagcacagccaacatgtacaccggcatgggcgggatggttcagacagtgcagacgagatatacttttggagctgctttgttcgtgggttgggtggccggcggcctgacattgattggaggggtgatgatgtgcattgcgtgtcgcggactcgcaccagaagaaacaaattacaaagcagtcagctatcatgcaagtgggcactcagtagcgtacaagcctggcgggttcaaggccagcaccggcttcggatctaatacaaagaataaaaaaatttacgatgggggagcgcggaccgaggatgaggtgcagtcctacccgagtaaacacgattacgtgtag

SEQ ID NO: 190968 - DNA, 753 bp, Artificial Sequence
  derived and/or modified sequence
atgtcgacaaccacctgccaggtggtggcttttctgctgtcaattctgggcctggccgggtgtattgccgctaccggcatggacatgtggtcaacgcaagatctgtatgataatcctgttacctccgtattccagtatgagggattgtggaggtcctgcgtccgccagagctccggctttacagaatgcaggccgtatttcactatcctgggactgccagcaatgcttcaagccgtgcgagccttgatgatcgtcgcgatattcgctctgaagtgcatccgcattggctctatggaggattctgctaaagcaaatatgacactcacatcaggaattatgttcattgtgtccggcctgtgcgccatcgcaggagtgagcgtcttcgctaacatgctagtgactaacttctggatgtcaacagccaatatgtacaccgggatggggggcatggtgcagacagttcagactcgctacacgtttggcgcggcactgtttgtgggatgggtcgcaggaggcttgactctgattgggggcgtcatgatgtgcattgcctgccgtggtcttgctcctgaagagaccaattataaggcagtgtcctaccacgccagcggtcactctgtggcctataagcctggaggcttcaaggcatccacaggtttcggttccaatacaaaaaacaagaagatttacgatggcggagccaggacagaggatgaggtgcagtcataccctagtaagcacgattacgtctag

SEQ ID NO: 190969 - DNA, 786 bp, Artificial Sequence
  derived and/or modified sequence
atgagcaccaccacctgccaggtggtggccttcctgctgagcatcctgggcctggccggctgcatcgccgccaccggcatggacatgtggagcacccaggacctgtatgacaaccctgtgaccagcgtcttccagtatgagggcctgtggaggagctgtgtgcggcagagcagcggcttcacagagtgccggccctacttcaccatcctgggcctgcctgccatgctgcaggccgtgcgggccctgatgattgtgggcatcgtgctgggcgccatcggcctgctggtgtccatctttgccctgaagtgcatccgcatcggctccatggaggacagcgccaaggccaacatgaccctgaccagcggcatcatgttcatcgtgtctggcctgtgtgccatcgccggcgtgtctgtgtttgccaacatgctggtgaccaacttctggatgagcacagccaacatgtacacaggcatgggcggcatggtgcagacagtgcagacccgctacacctttggagctgccctgtttgtgggctgggtggccggcggcctgaccctgattggaggagtgatgatgtgcatcgcctgccggggcctggcccctgaggagaccaactacaaggctgtgtcctaccacgccagcggccacagcgtggcctacaagccaggcggcttcaaggccagcactggatttggcagcaacaccaagaacaagaagatctatgatggaggagccaggacagaagatgaggtgcagagctaccccagcaagcatgactatgtgtag

SEQ ID NO: 190970 - DNA, 753 bp, Artificial Sequence
  derived and/or modified sequence
atgagcaccaccacctgccaggtggtggccttcctgctgagcatcctgggcctggccggctgcatcgccgccaccggcatggacatgtggagcacccaggacctgtatgacaaccctgtgaccagcgtcttccagtatgagggcctgtggaggagctgtgtgcggcagagcagcggcttcacagagtgccggccctacttcaccatcctgggcctgcctgccatgctgcaggccgtgcgggccctgatgattgtggccatctttgccctgaagtgcatcagaattggctccatggaggacagcgccaaggccaacatgaccctgaccagcggcatcatgtttattgtgtctggcctgtgtgccatcgccggcgtgtctgtgtttgccaacatgctggtgaccaacttctggatgagcacagccaacatgtacacaggcatgggcggcatggtgcagacagtgcagacccgctacaccttcggggccgccctgtttgtgggctgggtggccggcggcctgaccctcatcggcggcgtgatgatgtgcatcgcctgccggggcctggcccctgaggagaccaactacaaggctgtgtcctaccacgccagcggccacagcgtggcctacaagccaggcggcttcaaggccagcacaggcttcggcagcaacaccaagaacaagaagatctatgatggaggagccaggacagaagatgaggtgcagagctaccccagcaagcatgactatgtgtag

SEQ ID NO: 190971 - DNA, 786 bp, Artificial Sequence
  derived and/or modified sequence
atgagcaccaccacctgccaggtggtggccttcctgctgagcatcctcgggctcgcgggttgtatagccgctaccggcatggatatgtggtccacacaggacttatacgacaatcccgtgacctctgtgtttcaatatgaaggtttatggaggtcttgcgtgcgtcagtccagcggattcacagagtgtaggccctactttaccattctgggcctgcctgcgatgcttcaagcagtgcgtgcacttatgatcgtggggatcgttttaggggccatagggctgctggtcagcatctttgcccttaaatgtatcagaataggcagcatggaagatagcgcaaaggcaaacatgactctgaccagcgggattatgtttatcgtatcagggctgtgtgctattgcgggagtctccgtgttcgccaatatgcttgtgacaaacttctggatgtctaccgctaatatgtacaccggtatgggagggatggtgcagacagtacagactagatacacattcggcgctgccctgtttgtgggttgggtggctgggggtttaacgctcatcggcggagtgatgatgtgcatagcatgtaggggccttgcccccgaagagactaattacaaggcagtatcataccacgcctctggacacagcgtcgcttacaaaccaggtggtttcaaggcctcaacagggtttggcagcaacaccaaaaataagaagatatacgatggcggggccagaacggaggacgaggtgcagtcttaccccagtaagcacgactatgtatag

SEQ ID NO: 190972 - DNA, 753 bp, Artificial Sequence
  derived and/or modified sequence
atgagcaccaccacctgccaggtggtggccttcctgctgagcatccttggcctggcaggctgtatcgcagctacgggcatggacatgtggagcacccaggacctttatgataaccctgtgaccagcgttttccaatacgagggcctctggcgatcctgtgtccgccaaagttcagggttcacagagtgccgcccttactttacaatcttgggcttgcccgcaatgttacaggccgtgagagcccttatgattgtcgctatattcgccctgaagtgtatcagaattggcagcatggaggatagtgccaaagccaatatgaccctcacctcagggatcatgttcatcgtgtccggcctgtgcgccattgcgggcgtgtccgtgttcgccaatatgctagtgactaacttctggatgtctactgccaacatgtacactggcatgggcgggatggttcagaccgtgcaaaccaggtatacgttcggtgccgctctgttcgtcgggtgggtggccggtggcctgaccttaataggcggagtgatgatgtgtatagcctgccgtggactggcccctgaggaaaccaattacaaggccgtgagctatcatgcgagcggccactctgtggcgtacaagccaggcggcttcaaggccagtaccgggttcggttccaatacaaaaaataagaaaatctatgatggcggcgcacgcacagaggatgaggtacagtcatacccttcgaaacatgattatgtctag

SEQ ID NO: 190973 - DNA, 786 bp, Artificial Sequence
  derived and/or modified sequence
atgtctacaactacatgtcaagtcgttgccttcttgctctccatcctcggactggctggttgtattgccgctactggaatggacatgtggagtacccaagacttgtatgacaatccagtgacctcagtcttccagtacgaagggttgtggcggagctgcgtgaggcagagttctggcttcacagagtgccgtccctactttactatactggggctgccagctatgctgcaggcagtccgggcactgatgattgttggaatcgtgctgggggcaatcggcctacttgtttccatctttgctctaaagtgcatccggattggctccatggaagatagtgcgaaggccaacatgaccttgacctcaggtattatgttcattgtctccgggctgtgcgcaatcgctggagtgtcagtttttgcgaatatgctcgtcacgaacttttggatgtccaccgccaacatgtatactggcatggggggtatggtgcagacggtgcagacaaggtatacttttggtgccgcactattcgtagggtgggtcgccggaggcttaacactcattgggggagtgatgatgtgtatcgcttgccgaggactggcccctgaagagacaaattacaaagctgtcagctatcacgcctctggacacagcgttgcatataagccaggaggctttaaggccagtacaggatttggaagtaacacgaaaaataagaagatctacgacgggggtgccagaaccgaagacgaagtccaaagttacccatcaaaacacgactacgtgtag

SEQ ID NO: 190974 - DNA, 753 bp, Artificial Sequence
  derived and/or modified sequence
atgtccactaccacatgccaggtcgtggccttcctgctcagcattcttggcttggcagggtgcatcgccgcaacaggcatggatatgtggagcacacaggatctgtacgataatcccgtgacaagtgtatttcagtatgagggtttgtggcgaagctgcgtccggcagagctcaggatttacggagtgtaggccctattttactatcttgggactgcctgcaatgctccaagcagtgcgggctttgatgatcgtggcaatctttgcactgaagtgcattcgaattggctctatggaggatagtgctaaggcgaacatgacactcacaagcgggatcatgttcatagtgtccggtctgtgtgcgattgctggagtatctgttttcgccaacatgctggttacgaacttttggatgtctacagcaaacatgtacaccggcatggggggtatggtgcagactgtacagactaggtatacttttggagccgctctgttcgtaggctgggtcgctggtggactcacccttatcgggggagtcatgatgtgtatcgcatgtcggggattggcaccggaggaaaccaactataaagccgtcagttaccatgctagcgggcattcggttgcctataagccaggcggattcaaggctagtactggatttggctccaacacaaagaacaaaaagatctatgacggtggcgcaagaacggaggacgaagtccagagttaccctagcaaacacgattacgtctag

SEQ ID NO: 190975 - protein, 341 aa, Artificial Sequence
  derived and/or modified sequence
MRKVVLITGASSGIGLALCKRLLAEDDELHLCLACRNMSKAEAVCAALLASHPTAEVTIVQVDVSNLQSVFRASKELKQRFQRLDCIYLNAGIMPNPQLNIKALFFGLFSRKVIHMFSTAEGLLTQGDKITADGLQEVFETNVFGHFILIRELEPLLCHSDNPSQLIWTSSRSARKSNFSLEDFQHSKGKEPYSSSKYATDLLSVALNRNFNQQGLYSNVACPGTALTNLTYGILPPFIWTLLMPAILLLRFFANAFTLTPYNGTEALVWLFHQKPESLNPLIKYLSATTGFGRNYIMTQKMDLDEDTAEKFYQKLLELEKHIRVTIQKTDNQARLSGSCL

SEQ ID NO: 190976 - protein, 111 aa, Artificial Sequence
  derived and/or modified sequence
MRKVVLITGASSGIGLALCKRLLAEDDELHLCLACRNMSKAEAVCAALLASHPTAEVTIVQVDVSNLQSVFRASKELKQRFQRLDCIYLNAGIMPNPQLNIKALFFGLFSS

SEQ ID NO: 190977 - protein, 306 aa, Artificial Sequence
  derived and/or modified sequence
MRKVVLITGASSGIGLALCKRLLAEDDELHLCLACRNMSKAEAVCAALLASHPTAEVTIVQVDVSNLQSVFRASKELKQRFQRLDCIYLNAGIMPNPQLNIKALFFGLFSRKVIHMFSTAEGLLTQGDKITADGLQEVFETNVFGHFILIRELEPLLCHSDNPSQLIWTSSRSARKSNFSLEDFQHSKGKEPYSSSKYATDLLSVALNRNFNQQLRFFANAFTLTPYNGTEALVWLFHQKPESLNPLIKYLSATTGFGRNYIMTQKMDLDEDTAEKFYQKLLELEKHIRVTIQKTDNQARLSGSCL

SEQ ID NO: 190978 - protein, 119 aa, Artificial Sequence
  derived and/or modified sequence
VVIRELEPLLCHSDNPSQLIWTSSRSARKSNFSLEDFQHSKGKEPYSSSKYATDLLSVALNRNFNQQLRFFANAFTLTPYNGTEALVWLFHQKPESLNPLIKYLSATTGFGRNYIMTQK

SEQ ID NO: 190979 - DNA, 1026 bp, Artificial Sequence
  derived and/or modified sequence
atgcgaaaagtggtcctgattacgggcgcaagcagcggcataggtctggctctgtgcaagcggcttcttgctgaagacgatgaactgcatctttgcctagcgtgtcgcaatatgtcaaaggccgaggccgtttgtgcggccctgctggccagtcaccctactgccgaagtgactattgtgcaggtggacgttagtaatctgcaaagtgtgttccgcgcctcaaaggagctgaagcagcgcttccaacgacttgattgtatttacctcaatgccggcatcatgccgaacccacaactgaacatcaaggcactgttcttcggactgttttctcgcaaagtgatccacatgtttagtacagccgaaggtctgcttacacaaggagacaaaattactgccgacggcttgcaagaggtgttcgaaacgaacgtgttcggtcattttattcttatccgggagctggaaccactgttgtgccacagtgataatccttcccagctgatctggacttcatccaggagcgcacgaaagtcgaatttcagtttagaagactttcagcactccaagggaaaggagccttacagcagcagcaagtacgcaacagatctgttatctgtggctttaaacagaaactttaaccagcagggcctgtactccaatgttgcctgtccaggaacagcactcacaaatctgacctacggtatactgccaccctttatctggacactgctcatgcctgctatcctgctactccgcttctttgcaaatgcgttcaccctcacaccctataacgggacagaagctttagtctggctctttcatcagaaacctgagagccttaatcctctgattaaatacctgtctgccactactggtttcggccggaattacatcatgacccagaagatggatctggacgaagacactgcagaaaagttttatcagaagctcttagaactcgagaaacacataagagtcaccattcagaagaccgataaccaggccagactctcagggagctgtctttag

SEQ ID NO: 190980 - DNA, 921 bp, Artificial Sequence
  derived and/or modified sequence
atgcgtaaagtggtcctgatcaccggcgcttcatcaggaatcggcttggcactgtgtaagagactacttgccgaggacgacgagctgcatttgtgcctcgcctgtcggaacatgtccaaggcggaagcggtgtgtgctgctctgctggcatcgcaccccacagcggaagtgacaatcgtgcaggtggatgttagtaatctccaatctgtgttccgtgctagcaaggagctgaagcagcggttccagaggctggactgcatctacctcaacgcgggcatcatgcctaatccccagctcaacattaaagctctgttcttcggactgtttagtaggaaggtcattcacatgttctcaacagcggaaggactgctcacccagggtgacaaaattactgctgatgggctccaggaggtgtttgagaccaacgtttttgggcactttatcctgatacgggaactggaacccctactgtgccattcagataatccctcccagctgatctggacatcttccagatcagcccgcaaatctaatttctccctcgaggatttccagcactcaaaggggaaagagccttacagttcttccaagtacgccacagatcttctatccgtcgccttaaaccgtaactttaaccagcaactgcggttttttgcaaacgcatttaccttgacaccctacaatgggacagaggccctggtgtggctctttcatcagaaacccgagtctctgaaccctctcattaagtacctctctgccaccacaggattcgggagaaattatatcatgacacagaagatggatctggatgaggatacggccgagaaattttaccagaagctcctcgagcttgagaaacatatccgggtaactatccaaaagactgataatcaagcacggctgtcaggctcctgtctttag

SEQ ID NO: 190981 - DNA, 360 bp, Artificial Sequence
  derived and/or modified sequence
gttgttattcgcgaactggagccattgctgtgccattccgataacccttctcagttgatctggacttcctcaagatctgctcgcaaatcaaacttttcactcgaagattttcagcactccaaagggaaggaaccgtacagctccagtaagtacgccactgatctactgtctgtggcactgaatagaaactttaaccagcagctgaggttcttcgccaacgctttcaccctcacaccatataatggtaccgaagccctggtgtggctatttcaccaaaagccagagtccctgaaccctctaatcaagtacctttcggccaccacggggttcggacgaaactacatcatgacgcaaaagtag

SEQ ID NO: 190982 - DNA, 1190 bp, Artificial Sequence
  derived and/or modified sequence
ttccgaaagcagcggcggtgtttgcttcactgcttggaagtgtgagtgcgcgaagatgcgaaaggtggttttgatcaccggggctagcagtggcattggcctggccctctgcaagcggctgctggcggaagatgatgagcttcatctgtgtttggcgtgcaggaacatgagcaaggcagaagctgtctgtgctgctctgctggcctctcaccccactgctgaggtcaccattgtccaggtggatgtcagcaacctgcagtcggtcttccgggcctccaaggaacttaagcaaaggtttcagagattagactgtatatatctaaatgctgggatcatgcctaatccacaactaaatatcaaagcacttttctttggcctcttttcaagaaaagtgattcatatgttctccacagctgaaggcctgctgacccagggtgataagatcactgctgatggacttcaggaggtgtttgagaccaatgtctttggccattttatcctgattcgggaactggagcctctcctctgtcacagtgacaatccatctcagctcatctggacatcatctcgcagtgcaaggaaatctaatttcagcctcgaggacttccagcacagcaaaggcaaggaaccctacagctcttccaaatatgccactgaccttttgagtgtggctttgaacaggaacttcaaccagcagggtctctattccaatgtggcctgtccaggtacagcattgaccaatttgacatatggaattctgcctccgtttatatggacgctgttgatgccggcaatattgctacttcgcttttttgcaaatgcattcactttgacaccatataatggaacagaagctctggtatggcttttccaccaaaagcctgaatctctcaatcctctgatcaaatatctgagtgccaccactggctttggaagaaattacattatgacccagaagatggacctagatgaagacactgctgaaaaattttatcaaaagttactggaactggaaaagcacattagggtcactattcaaaaaacagataatcaggccaggctcagtggctcatgcctataattccagcactttgggaggccaaggcagaaggatcacttgagaccaggagttcaagaccagcctgagaaacatagtgagcccttgtctctacaaaaagaaataaaaataa

SEQ ID NO: 190983 - DNA, 1386 bp, Artificial Sequence
  derived and/or modified sequence
gaaatcgtaggacttccgaaagcagcggcggtgtttgcttcactgcttggaagtgtgagtgcgcgaagatgcgaaaggtggttttgatcaccggggctagcagtggcattggcctggccctctgcaagcggctgctggcggaagatgatgagcttcatctgtgtttggcgtgcaggaacatgagcaaggcagaagctgtctgtgctgctctgctggcctctcaccccactgctgaggtcaccattgtccaggtggatgtcagcaacctgcagtcggtcttccgggcctccaaggaacttaagcaaaggtttcagagattagactgtatatatctaaatgctgggatcatgcctaatccacaactaaatatcaaagcacttttctttggcctcttttcaagaaaagtgattcatatgttctccacagctgaaggcctgctgacccagggtgataagatcactgctgatggacttcaggaggtgtttgagaccaatgtctttggccattttatcctgattcgggaactggagcctctcctctgtcacagtgacaatccatctcagctcatctggacatcatctcgcagtgcaaggaaatctaatttcagcctcgaggacttccagcacagcaaaggcaaggaaccctacagctcttccaaatatgccactgaccttttgagtgtggctttgaacaggaacttcaaccagcagcttcgcttttttgcaaatgcattcactttgacaccatataatggaacagaagctctggtatggcttttccaccaaaagcctgaatctctcaatcctctgatcaaatatctgagtgccaccactggctttggaagaaattacattatgacccagaagatggacctagatgaagacactgctgaaaaattttatcaaaagttactggaactggaaaagcacattagggtcactattcaaaaaacagataatcaggccaggctcagtggctcatgcctataattccagcactttgggaggccaaggcagaaggatcacttgagaccaggagttcaagaccagcctgagaaacatagtgagcccttgtctctacaaaaagaaataaaaataatagctgggtgtggtggcatgcgcatgtagtcccagctactcagaaggatgaggtgggaggatctcttgaggctgggaggcagaggttgcagtgagctgagattgtgccactgcactccagcctgggtgacagcgagaccctgtctcaaaatatgtatatatttaatatatatataaaaccagagctgacaatgacactctggaacattgcataccttctgtacattctggggtacatggatttctactgagttggataatatgcatttgtaataaactatgaactatg

SEQ ID NO: 190984 - DNA, 357 bp, Artificial Sequence
  derived and/or modified sequence
gttgtgattcgggaactggagcctctcctctgtcacagtgacaatccatctcagctcatctggacatcatctcgcagtgcaaggaaatctaatttcagcctcgaggacttccagcacagcaaaggcaaggaaccctacagctcttccaaatatgccactgaccttttgagtgtggctttgaacaggaacttcaaccagcagcttcgcttttttgcaaatgcattcactttgacaccatataatggaacagaagctctggtatggcttttccaccaaaagcctgaatctctcaatcctctgatcaaatatctgagtgccaccactggctttggaagaaattacattatgacccagaag

SEQ ID NO: 190985 - DNA, 1026 bp, Artificial Sequence
  derived and/or modified sequence
atgaggaaggtggtgctgatcaccggggccagcagcggcatcggcctggccctgtgcaagaggctgctggctgaagatgatgagctgcacctgtgcctggcctgcaggaacatgagcaaggccgaggccgtgtgtgccgccctgctggccagccaccccacagctgaggtgaccatcgtgcaggtggatgtgagcaacctgcagagcgtcttccgggccagcaaggagctgaagcagcgcttccagaggctggactgcatctacctgaatgccggcatcatgcccaacccccagctgaacatcaaggccctcttcttcggcctcttcagcaggaaggtgatccacatgttcagcacagctgagggcctgctgacccagggcgacaagatcacagcagatggcctgcaggaggtgtttgagaccaacgtgtttggccacttcatcctgatccgggagctggagcccctgctgtgccacagcgacaaccccagccagctgatctggaccagcagccgcagcgccaggaagagcaacttcagcctggaggacttccagcacagcaagggcaaggagccctacagcagcagcaaatatgccacagacctgctgtctgtggccctgaacagaaacttcaaccagcagggcctgtacagcaatgtggcctgccctggaacagccctgaccaacctgacctacggcatcctgccccccttcatctggaccctgctgatgcctgccatcctgctgctgcgcttctttgccaatgccttcaccctgaccccctacaatggaacagaggccctggtgtggctgttccaccagaagccagagagcctgaaccccctcatcaagtacctgagcgccaccaccggcttcggcaggaactacatcatgacccagaagatggacctggatgaggacacagctgagaagttctaccagaagctgctggagctggagaagcacatccgggtgaccatccagaagacagacaaccaggcccggctgagcggcagctgcctgtag

SEQ ID NO: 190986 - DNA, 921 bp, Artificial Sequence
  derived and/or modified sequence
atgaggaaggtggtgctgatcaccggggccagcagcggcatcggcctggccctgtgcaagaggctgctggctgaagatgatgagctgcacctgtgcctggcctgcaggaacatgagcaaggccgaggccgtgtgtgccgccctgctggccagccaccccacagctgaggtgaccatcgtgcaggtggatgtgagcaacctgcagagcgtcttccgggccagcaaggagctgaagcagcgcttccagaggctggactgcatctacctgaatgccggcatcatgcccaacccccagctgaacatcaaggccctcttcttcggcctcttcagcaggaaggtgatccacatgttcagcacagctgagggcctgctgacccagggcgacaagatcacagcagatggcctgcaggaggtgtttgagaccaacgtgtttggccacttcatcctgatccgggagctggagcccctgctgtgccacagcgacaaccccagccagctgatctggaccagcagccgcagcgccaggaagagcaacttcagcctggaggacttccagcacagcaagggcaaggagccctacagcagcagcaaatatgccacagacctgctgtctgtggccctgaacagaaacttcaaccagcagctgcgcttctttgccaatgccttcaccctgaccccctacaacggcacagaggccctggtgtggctgttccaccagaagccagagagcctgaaccccctcatcaagtacctgagcgccaccactggatttggaagaaactacatcatgacccagaagatggacctggatgaggacacagctgagaagttctaccagaagctgctggagctggagaagcacatccgggtgaccatccagaagacagacaaccaggcccggctgagcggcagctgcctgtag

SEQ ID NO: 190987 - DNA, 360 bp, Artificial Sequence
  derived and/or modified sequence
gtggtgatccgggagctggagcccctgctgtgccacagcgacaaccccagccagctgatctggaccagcagccgcagcgccaggaagagcaacttcagcctggaggacttccagcacagcaagggcaaggagccctacagcagcagcaaatatgccacagacctgctgtctgtggccctgaacagaaacttcaaccagcagctgcgcttctttgccaatgccttcaccctgaccccctacaatggaacagaggccctggtgtggctgttccaccagaagccagagagcctgaaccccctcatcaagtacctgagcgccaccaccggcttcggcaggaactacatcatgacccagaagtag

SEQ ID NO: 190988 - DNA, 1026 bp, Artificial Sequence
  derived and/or modified sequence
atgcggaaggtggtgctgatcaccggcgccagcagcggcatcggcctagcactgtgtaagcggcttttggccgaagatgatgagctccacctctgtttggcttgccgtaatatgtcaaaggcggaggcggtgtgcgccgccctactcgcttcacatccaaccgctgaagtgaccattgtgcaggtggacgtatccaacctgcaatccgtttttcgcgcaagtaaagagctgaagcagaggttccaaagactggactgtatctacctcaatgccggaattatgccaaacccgcagctgaatatcaaagctctgttctttgggctcttttcccgtaaagtgattcacatgttctccactgccgagggccttctaacccaaggcgataaaatcacagctgatggcctgcaggaggtttttgaaactaacgttttcgggcactttatacttatcagggaactggagccgctgctgtgccacagcgataatccgagccagttgatttggacatcctctcgatctgctaggaagtctaactttagtctggaggactttcaacattccaaaggaaaggaaccgtacagcagtagcaagtacgcaacagacctgctgagcgtcgctctgaatagaaattttaatcagcaggggctgtacagtaatgtggcttgtccgggaaccgccctgacaaatctgacttacgggattcttccacccttcatttggacactccttatgccggccatcttattgctgaggttcttcgcaaacgcatttaccctaacaccatacaatgggactgaagctctggtatggctctttcatcagaagcctgagagtctgaatcccttaattaagtatctgtctgctaccaccgggtttggccgaaactatattatgacacagaagatggacttggacgaagataccgcggagaagttttatcagaagctgttggagctcgagaaacatatccgggtaacaatccagaaaactgacaatcaagccaggctgtcaggcagttgcctgtag

SEQ ID NO: 190989 - DNA, 921 bp, Artificial Sequence
  derived and/or modified sequence
atgcggaaggtggtgctgatcaccggcgccagcagcggcatcggcctagctctgtgtaagaggctcctcgccgaggatgacgagcttcatctatgcttggcctgcagaaacatgagcaaggccgaagccgtgtgcgcagcacttctggcaagtcacccgacagctgaggttaccatcgtgcaggtcgatgtctctaacctccagtctgtgttcagggcatctaaggaacttaaacagagatttcagagactggactgtatctacctgaatgccggaataatgcctaacccccagcttaacataaaagctcttttttttggacttttcagcaggaaagtaattcacatgttcagcaccgccgagggcctgctgacgcagggagataagatcacagctgatggtctgcaagaagtattcgaaaccaacgtatttgggcattttatcctgattcgggagctcgaaccactgctgtgccattccgacaatccatctcagttgatctggactagctcacgatctgcgcgaaagagtaatttctccttagaggacttccagcactctaaggggaaggaaccttatagcagctctaaatatgcgacagacctactgtcggtagcccttaacaggaatttcaatcagcaactgagatttttcgccaacgctttcactctgacgccttataatgggacggaggcactggtgtggctcttccaccagaagcccgaaagcctgaaccccctaattaagtacctgtcagccacaacaggattcggtcgcaattatataatgacgcagaaaatggacctcgatgaggatactgccgaaaagttttaccaaaagctacttgagctcgagaaacacatccgtgtgacgattcagaaaactgataaccaggcccgtctgagcgggagctgcctgtag

SEQ ID NO: 190990 - DNA, 360 bp, Artificial Sequence
  derived and/or modified sequence
gtggtgatccgggagctggagcccctgctgtgccacagcgacaacccttcccagctgatctggactagcagccggagtgcccgcaagtcaaacttctctctggaggacttccagcactcaaagggaaaggaaccatacagctcatctaagtacgccacagacctgcttagtgtcgcacttaacagaaacttcaaccagcagcttagattttttgcgaatgcttttaccctgacaccatataacggcacagaagctctggtgtggctgttccaccagaagcccgaatctctcaatcccctcatcaaatacctgagtgcaacaactggctttgggcgtaactacatcatgacccagaagtag

SEQ ID NO: 190991 - DNA, 1026 bp, Artificial Sequence
  derived and/or modified sequence
atgcgcaaagtagttctaattacaggcgcttcctctggaatcggtctggcactgtgcaagaggctgcttgccgaagatgacgagttgcatttatgccttgcttgccgcaacatgtcaaaagctgaagctgtgtgtgcagcactgctcgcttcgcacccaaccgccgaggtgactatcgtgcaggttgacgtgtccaaccttcagtctgtgttccgcgcttctaaggagcttaaacagagattccagagactagactgcatctacctgaatgctgggattatgccaaacccacagttgaatatcaaggcactcttttttggcttgttttctagaaaagtgatccacatgttctccaccgcagaagggctcttgacccaaggagataagattaccgctgacggtctccaggaggtattcgagaccaacgtgttcgggcactttattctcatccgggagctggaacctctcttatgccacagcgacaacccttcacagctgatctggacatcctctcgcagtgccagaaagagcaatttttctctcgaagacttccagcattctaagggtaaagagccctattcatcttccaaatacgcaacagacctgctctccgttgccctgaatcggaacttcaatcaacagggtctttattccaacgtagcttgccccggaaccgcactcacaaacttgacctatggaatcctcccacccttcatctggactttgctcatgcccgcaatcctgctcctgcgtttttttgccaatgcgtttacactgacgccctataacggcacagaggcgctcgtctggttgttccatcaaaagcccgaaagtctgaatccgctgataaaatatctctctgcaactaccgggtttggaaggaattacattatgacccagaagatggacctagatgaagacactgccgagaagttctatcagaagctgcttgaattggagaaacatatcagggttaccatccagaaaaccgacaaccaggcccgattaagcggctcctgtttgtag

SEQ ID NO: 190992 - DNA, 921 bp, Artificial Sequence
  derived and/or modified sequence
atgagaaaggtagtacttataacaggggcttctagcggaatcggcctggcgttgtgtaaacgcttgctcgcagaggacgacgagctgcacctgtgtctggcatgccgaaacatgagcaaggcggaagccgtatgtgccgcactgctagcaagtcaccccaccgctgaagtgacgatcgtacaggtagatgtctcaaatctacaatcagtgttccgcgcttcaaaggaactcaaacagcggtttcaacgcctggactgcatttacctcaatgcgggaattatgcctaatccacaacttaatataaaggccctgtttttcgggctcttctcccgaaaggtgatccacatgttcagcaccgccgaaggcctcctgacccagggtgataagattaccgcggacggcctccaggaggtctttgaaacgaacgtttttggccatttcattttgatcagggaactggagcccctgctgtgtcacagtgacaacccaagccagctgatctggacctcctctcggagtgcaaggaagagtaatttctccctcgaagacttccagcattctaaaggaaaggagccctatagctcctctaaatacgctactgatctgttaagcgtggctctcaacagaaattttaaccagcagctccggtttttcgctaacgcgttcacacttacaccgtataatggcacggaggccctggtatggttatttcaccagaagccagagagcctcaatccactcattaaatacctgagtgctacaaccggctttgggaggaattacattatgacacagaagatggaccttgatgaagatactgctgaaaagttttatcagaaactgctagagctggaaaagcacattagagtgactatccagaagactgacaatcaagctcgattgtccggctcgtgcctgtag

SEQ ID NO: 190993 - DNA, 360 bp, Artificial Sequence
  derived and/or modified sequence
gtcgttattagggagttagagcctctcttatgtcatagtgataaccccagtcagcttatatggacctctagtagaagcgccagaaagagtaatttcagcctagaggattttcagcactcaaagggtaaggaaccatactctagctctaagtatgcaactgacctgctgagtgtggccctcaatcgaaactttaatcaacagttacggtttttcgcgaatgcttttacacttacaccatacaatggaactgaggcgttggtttggctgtttcatcaaaaacctgagtcgctgaatccactgatcaagtacttgagcgccacaacaggcttcggtaggaactatattatgacccagaaatag

SEQ ID NO: 190994 - DNA, 1026 bp, Artificial Sequence
  derived and/or modified sequence
atgagaaaggtggtgctgatcaccggcgccagcagcggcatcggcctggccctgtgcaagagactgctggccgaggacgacgagctgcacctgtgcctggcctgcagaaacatgagcaaggccgaggccgtgtgcgccgccctgctggccagccaccccaccgccgaggtgaccatcgtgcaggtggacgtgagcaacctgcagagcgtgttcagagccagcaaggagctgaagcagagattccagagactggactgcatctacctgaacgccggcatcatgcccaacccccagctgaacatcaaggccctgttcttcggcctgttcagcagaaaggtgatccacatgttcagcaccgccgagggcctgctgacccagggcgacaagatcaccgccgacggcctgcaggaggtgttcgagaccaacgtgttcggccacttcatcctgatcagagagctggagcccctgctgtgccacagcgacaaccccagccagctgatctggaccagcagcagaagcgccagaaagagcaacttcagcctggaggacttccagcacagcaagggcaaggagccctacagcagcagcaagtacgccaccgacctgctgagcgtggccctgaacagaaacttcaaccagcagggcctgtacagcaacgtggcctgccccggcaccgccctgaccaacctgacctacggcatcctgccccccttcatctggaccctgctgatgcccgccatcctgctgctgagattcttcgccaacgccttcaccctgaccccctacaacggcaccgaggccctggtgtggctgttccaccagaagcccgagagcctgaaccccctgatcaagtacctgagcgccaccaccggcttcggcagaaactacatcatgacccagaagatggacctggacgaggacaccgccgagaagttctaccagaagctgctggagctggagaagcacatcagagtgaccatccagaagaccgacaaccaggccagactgagcggcagctgcctgtag

SEQ ID NO: 190995 - DNA, 921 bp, Artificial Sequence
  derived and/or modified sequence
atgagaaaggtggtgctgatcaccggcgccagcagcggcatcggcctggccctgtgcaagagactgctggccgaggacgacgagctgcacctgtgcctggcctgcagaaacatgagcaaggccgaggccgtgtgcgccgccctgctggccagccaccccaccgccgaggtgaccatcgtgcaggtggacgtgagcaacctgcagagcgtgttcagagccagcaaggagctgaagcagagattccagagactggactgcatctacctgaacgccggcatcatgcccaacccccagctgaacatcaaggccctgttcttcggcctgttcagcagaaaggtgatccacatgttcagcaccgccgagggcctgctgacccagggcgacaagatcaccgccgacggcctgcaggaggtgttcgagaccaacgtgttcggccacttcatcctgatcagagagctggagcccctgctgtgccacagcgacaaccccagccagctgatctggaccagcagcagaagcgccagaaagagcaacttcagcctggaggacttccagcacagcaagggcaaggagccctacagcagcagcaagtacgccaccgacctgctgagcgtggccctgaacagaaacttcaaccagcagctgagattcttcgccaacgccttcaccctgaccccctacaacggcaccgaggccctggtgtggctgttccaccagaagcccgagagcctgaaccccctgatcaagtacctgagcgccaccaccggcttcggcagaaactacatcatgacccagaagatggacctggacgaggacaccgccgagaagttctaccagaagctgctggagctggagaagcacatcagagtgaccatccagaagaccgacaaccaggccagactgagcggcagctgcctgtag

SEQ ID NO: 190996 - DNA, 360 bp, Artificial Sequence
  derived and/or modified sequence
gtggtgatcagagagctggagcccctgctgtgccacagcgacaaccccagccagctgatctggaccagcagcagaagcgccagaaagagcaacttcagcctggaggacttccagcacagcaagggcaaggagccctacagcagcagcaagtacgccaccgacctgctgagcgtggccctgaacagaaacttcaaccagcagctgagattcttcgccaacgccttcaccctgaccccctacaacggcaccgaggccctggtgtggctgttccaccagaagcccgagagcctgaaccccctgatcaagtacctgagcgccaccaccggcttcggcagaaactacatcatgacccagaagtag

SEQ ID NO: 190997 - protein, 414 aa, Artificial Sequence
  derived and/or modified sequence
MAALRYAGLDDTDSEDELPPGWEERTTKDGWVYYANHTEEKTQWEHPKTGKRKRVAGDLPYGWEQETDENGQVFFVDHINKRTTYLDPRLAFTVDDNPTKPTTRQRYDGSTTAMEILQGRDFTGKVVVVTGANSGIGFETAKSFALHGAHVILACRNMARASEAVSRILEEWHKAKVEAMTLDLALLRSVQHFAEAFKAKNVPLHVLVCNAATFALPWSLTKDGLETTFQVNHLGHFYLVQLLQDVLCRSAPARVIVVSSESHRFTDINDSLGKLDFSRLSPTKNDYWAMLAYNRSKLCNILFSNELHRRLSPRGVTSNAVHPGNMMYSNIHRSWWVYTLLFTLARPFTKSMQQGAATTVYCAAVPELEGLGGMYFNNCCRCMPSPEAQSEETARTLWALSERLIQERLGSQSG

SEQ ID NO: 190998 - DNA, 1245 bp, Artificial Sequence
  derived and/or modified sequence
atggccgccctgagatacgccggcctggacgacaccgacagcgaggacgagctgccccccggctgggaggagagaaccaccaaggacggctgggtgtactacgccaaccacaccgaggagaagacccagtgggagcaccccaagaccggcaagagaaagagagtggccggcgacctgccctacggctgggagcaggagaccgacgagaacggccaggtgttcttcgtggaccacatcaacaagagaaccacctacctggaccccagactggccttcaccgtggacgacaaccccaccaagcccaccaccagacagagatacgacggcagcaccaccgccatggagatcctgcagggcagagacttcaccggcaaggtggtggtggtgaccggcgccaacagcggcatcggcttcgagaccgccaagagcttcgccctgcacggcgcccacgtgatcctggcctgcagaaacatggccagagccagcgaggccgtgagcagaatcctggaggagtggcacaaggccaaggtggaggccatgaccctggacctggccctgctgagaagcgtgcagcacttcgccgaggccttcaaggccaagaacgtgcccctgcacgtgctggtgtgcaacgccgccaccttcgccctgccctggagcctgaccaaggacggcctggagaccaccttccaggtgaaccacctgggccacttctacctggtgcagctgctgcaggacgtgctgtgcagaagcgcccccgccagagtgatcgtggtgagcagcgagagccacagattcaccgacatcaacgacagcctgggcaagctggacttcagcagactgagccccaccaagaacgactactgggccatgctggcctacaacagaagcaagctgtgcaacatcctgttcagcaacgagctgcacagaagactgagccccagaggcgtgaccagcaacgccgtgcaccccggcaacatgatgtacagcaacatccacagaagctggtgggtgtacaccctgctgttcaccctggccagacccttcaccaagagcatgcagcagggcgccgccaccaccgtgtactgcgccgccgtgcccgagctggagggcctgggcggcatgtacttcaacaactgctgcagatgcatgcccagccccgaggcccagagcgaggagaccgccagaaccctgtgggccctgagcgagagactgatccaggagagactgggcagccagagcggctag

SEQ ID NO: 190999 - DNA, 1245 bp, Artificial Sequence
  derived and/or modified sequence
atggccgccttacgctacgcagggctggacgacacagatagcgaggacgaattgccccctggatgggaagaacgcaccacaaaagacgggtgggtgtattatgccaaccatacggaggaaaaaactcagtgggagcaccctaagaccggaaagcgcaaacgcgtggcaggagatctcccctacggatgggagcaagaaaccgatgagaacggacaggttttcttcgttgaccacatcaacaaaaggacaacctatctcgacccgcggctcgcctttaccgtagatgataatcccaccaaaccaacgacacgccaacgctatgatggctccaccacggccatggagattctccaggggagggattttacagggaaggtcgtcgttgtgaccggtgcaaactcaggcattgggtttgagaccgcaaaatcttttgccttacacggggcacacgtgatcttggcctgccgtaatatggcccgggcgtctgaggctgtctcaagaatcttggaagagtggcacaaggctaaggtagaagctatgactctggacctggctctcctgcggagtgtgcagcactttgctgaggccttcaaggccaagaacgtaccactccacgttctggtgtgtaatgcagccaccttcgccctgccctggtccctcaccaaggatggccttgagacaaccttccaggtgaatcacctggggcacttttatctcgtccagcttctacaagatgtgttatgccgatctgccccggcccgcgtgatagtcgtctcgtctgagtcccacagatttaccgatattaacgacagtctagggaagctggattttagccgcttgtcccccaccaaaaatgattactgggctatgctggcctataataggtccaagctttgcaacattctctttagcaacgaacttcaccggagactgagccccaggggtgtcacgtccaacgctgtgcatcctggtaatatgatgtactccaatatccatagatcctggtgggtgtacaccttgctattcacactagcccgtccattcacaaagagtatgcagcagggcgcagcgaccacggtctattgcgccgcggtccctgagttggagggccttggcggcatgtacttcaataattgctgtagatgcatgccaagtccagaagcccagtctgaagaaacggcccgaacactttgggccctgtctgaaagactgatacaagagagactggggagccagagcggatag

SEQ ID NO: 191000 - DNA, 1245 bp, Artificial Sequence
  derived and/or modified sequence
atggccgccctgaggtatgcaggcctggatgacactgatagtgaggatgagttgccgcctggatgggaggaacgtaccacaaaggatggctgggtgtattacgctaaccatacagaagagaagacccagtgggaacaccctaaaacaggtaaacggaagagagtagccggggatttaccttatggatgggaacaggaaacagacgaaaatggccaggtgtttttcgtcgaccacatcaataagcggactacatacttggatccgagactcgcctttacagttgacgataaccctaccaaacccacaactcggcagcgctacgatggatctacaactgctatggaaatattgcagggaagagactttaccggtaaagtcgtcgtagtcacaggcgctaattcaggcatcggatttgagacagctaagtcattcgcattgcatggggctcatgttatactggcctgtagaaatatggcccgagcttccgaggccgtgagcagaattcttgaggagtggcataaggccaaagttgaggcaatgaccctcgatctggctttactgaggagtgtccaacatttcgccgaggcctttaaagctaagaatgtccccttacacgtcctggtatgcaacgccgcgacctttgctctaccctggtcacttacgaaagacggtctcgagaccacctttcaggtaaatcaccttggacatttttaccttgtgcagctgctccaggatgttttatgtcgctccgcccctgcacgggtgatcgtcgttagctcagagagccatcgtttcaccgacatcaacgattctctagggaagttggattttagtcgcttgagccctactaagaacgattactgggcgatgctcgcctataatcgatcaaagctgtgcaacatactgttttcgaatgaactgcaccggcgcctcagcccaaggggggtaactagcaacgcagtccacccaggtaatatgatgtatagcaatatccatcgatcctggtgggtttacactttactgtttaccctggccaggccattcacaaaaagcatgcagcagggcgcagctaccaccgtatattgtgccgcagtaccggagctggagggactgggcggaatgtatttcaataattgttgtagatgcatgcctagtcctgaagctcagtcggaagagacagccaggaccctgtgggctttgtctgagagactgatccaggaacgcctagggtctcagagcggctag

SEQ ID NO: 191001 - DNA, 1245 bp, Artificial Sequence
  derived and/or modified sequence
atggccgccctgcgctatgccggcctggatgacacagacagtgaagatgagctgcccccaggctgggaggagaggaccaccaaggatggctgggtgtactatgccaaccacacagaggagaagacccagtgggagcaccccaagacaggcaagaggaagagggtggccggggacctgccctacggctgggagcaggagacagatgaaaatggccaggtgttctttgtggaccacatcaacaagaggaccacctacctggacccccggctggccttcaccgtggatgacaaccccaccaagcccaccacccggcagagatatgatggcagcaccacagccatggagatcctgcagggccgggacttcaccgggaaggtggtggtggtgactggagccaacagcggcatcggctttgaaacagccaagagctttgccctgcatggagcccacgtgatcctggcctgcaggaacatggcccgggccagcgaggccgtgagccgcatcctggaggagtggcacaaggccaaggtggaggccatgaccctggacctggccctgctgcggtctgtgcagcactttgctgaggccttcaaggccaagaatgtgcccctgcacgtgctggtgtgcaatgctgccacctttgccctgccctggagcctgaccaaggatggcctggagaccaccttccaggtgaaccacctgggccacttctacctggtgcagctgctgcaggatgtgctgtgccgcagcgccccagcccgggtcatcgtggtgagcagcgagagccaccgcttcacagacatcaatgacagcctgggcaagctggacttcagccggctgagccccaccaagaatgactactgggccatgctggcctacaacagaagcaagctgtgcaacatcctcttcagcaatgagctgcaccggcggctgagcccccggggcgtgaccagcaatgctgtgcaccctggcaacatgatgtacagcaacatccaccgctcctggtgggtgtacaccctgctcttcaccctggcccggcccttcaccaagtccatgcagcagggcgccgccaccaccgtgtactgtgccgctgtgcctgagctggagggcctgggcggcatgtacttcaacaactgctgccgctgcatgcccagccctgaggcccagagcgaggagacagcccggaccctgtgggccctgtctgagcggctcatccaggagcggctgggcagccagagcggctag

SEQ ID NO: 191002 - DNA, 1095 bp, Artificial Sequence
  derived and/or modified sequence
atggcccgggccagcgaggccgtgagccggatcctggaggagtggcacaaggccaaggtcgaggccatgacgctggacctggcccttcttcgctctgtgcaacactttgccgaggcattcaaagctaagaatgtccctttgcacgtgttggtatgcaacgctgccactttcgcactgccttggagcctgacaaaagacggtctggaaactacattccaagtgaaccaccttggccatttctatttggtccagctcctgagaatgttttgtgccgcgcagctcctacctgtaagcctctggagcccacagagtcccattgatttacagatcctcacgaccccctgggaaaactggacctcagtcgcctctctgcaacagaaaacgaccatagggagatgttggctcattacgggccctagctcagcgacgtctagcagccctacgtcctgcacagtggcaccaactaggggtcacgttgagaggagcgcttcttggaaatatgatgtgctacaacattcaagccagctggtcggcgtgcacaccgcagtgtacctgggcgaggccttccatcaggtccacgccaccgggtcgtgccaccatcgcgtactgtgttgctgcccacgaactggcggctccgggcgtgacgtgctgcagcaactcctccctctgcacgcccttactcggagctctgagaggcgggacgggccggatccagtgggatccgagaggctaatacaagaacgcctcgcctcaccagcaaagtggtcgtctgaaaggatggggacccacacccgccctgtgtgcgtcccatccaggaagtgtcaaggcccactccctaacgtgccccctactcagattcggaaatccaagggcaacaagagctcacacaaccgggtcaagaatctcaaataccagtgggaggctggcaactcctgggggaaggtcagcctgttctggggctgggctcgacaccgtagcctctgtttccttgtcgtcgcttgccttaaagtcaaaacgtgtctggtttgccgctttcgtatatctctggaaaaacatcagcaatttagttttttctactgttataggattgcttag

SEQ ID NO: 191003 - DNA, 1245 bp, Artificial Sequence
  derived and/or modified sequence
atggccgccctgcggtacgccggcctggacgacaccgacagcgaggacgaactcccccctggttgggaggagaggactaccaaagacgggtgggtatactatgctaatcacaccgaagagaagactcaatgggaacatcccaagactggtaagagaaaacgagtggcgggcgacctcccctacggttgggaacaggaaacagacgaaaacggtcaggtattctttgtcgatcatatcaataagcggactacttacctggacccgcggctggcctttaccgtggatgataatcctactaaacccaccactagacagcggtacgatgggtctacgactgcgatggagatcctacaggggagagactttaccgggaaggtagtggtggtgacaggagctaactctggtatcggtttcgaaacagcaaagtcctttgctctgcacggggcacacgtgattttggcctgcagaaacatggcgcgagctagcgaagccgtcagtcgcatactagaggaatggcataaggccaaagtggaggccatgacccttgacttagcgctgctccgaagcgtacaacatttcgcagaggccttcaaagcaaagaatgttccacttcatgtcctagtctgtaacgctgcgacatttgccctgccttggagcctgaccaaagacggcctcgagactacttttcaagtgaatcacctcggtcatttttacctcgtgcagcttctacaggacgtcctgtgtagaagcgcccctgcccgggtgatcgtggtttcctcagaaagtcatcgctttactgatatcaacgacagcctcggaaaactggactttagccgcttatcacccaccaaaaatgactactgggccatgctggcctataaccgaagcaaactgtgtaatattctgttttcaaacgaacttcacagacggctctctcctcgtggtgtaaccagcaacgcagtgcaccctgggaacatgatgtatagtaacatccatcgtagctggtgggtctacacgttgctgttcaccctggcaagaccattcaccaagtccatgcagcagggcgccgcgactacggtctattgtgccgctgtgccagaactggaggggctgggggggatgtactttaacaactgctgtaggtgtatgccctcccccgaagcccagtccgaggagacggcccgcaccctttgggcgttatcagaacgtctaattcaagaacgcctcggctcccagagcgggtag

SEQ ID NO: 191004 - DNA, 1245 bp, Artificial Sequence
  derived and/or modified sequence
atggccgccctgcggtacgccggcctggacgacaccgacagcgaggatgagttgccgccaggttgggaggagcgaaccactaaagacggctgggtttactacgccaaccacacagaggagaagactcagtgggagcacccaaagaccggaaagcgaaagcgtgtagccggagatctgccttacgggtgggaacaggagacggatgaaaacggtcaggtcttctttgttgaccatataaataagcgcacgacttatttggatccacgactagcctttactgtggatgacaatcccactaaacccactactaggcagcgctatgatggctcgaccacagccatggaaattcttcagggtcgggatttcaccggaaaggtggttgtggtgacaggggccaatagtggaattgggttcgagacagcgaaatctttcgccctgcacggggcccatgtgatactcgcatgtcgtaatatggcaagggcatctgaggcagtttccaggatccttgaggaatggcacaaagcaaaggtggaggctatgacacttgacctggctctcctccgcagcgtgcagcacttcgcagaagcattcaaggctaagaatgtgccacttcatgttctcgtgtgcaacgctgctacctttgcattaccgtggtccctgactaaagatggcctggagacaacgttccaggtgaaccacctgggacatttctatctggtgcagcttctgcaggacgttttgtgccgtagtgcgcccgctagagttatagtcgtgtcttccgagagtcaccgtttcacagacattaatgattctctggggaagctcgatttcagccgtctgagtcccactaagaacgactattgggcaatgttagcctacaatcgctccaagttgtgcaacatactgttcagcaatgagctgcaccgcaggttgagcccccggggggtgacaagcaatgctgtacatcctggcaacatgatgtatagcaacatccaccgcagctggtgggtatacacactgctttttaccctcgcaagaccattcacaaaatccatgcagcagggggcagccacaaccgtctactgtgccgcagttccagagctagagggactgggtggaatgtatttcaacaactgttgcagatgcatgcctagccctgaggcccaatctgaggagactgcaaggacgctatgggccctcagtgagcgactgatccaggaaagactgggcagtcagagtggctag

SEQ ID NO: 191005 - DNA, 1095 bp, Artificial Sequence
  derived and/or modified sequence
atggccagggcatccgaggcggttagtcgaattcttgaagagtggcataaggccaaagtcgaggcaatgacccttgatcttgcactactgcgtagcgttcagcacttcgcagaggccttcaaggcaaaaaacgttcctcttcatgtcctggtgtgcaacgctgccacctttgccctgccctggagtttgacgaaggatggtttggaaacaactttccaggtaaatcacctcggacatttttacctcgtgcagctcctgcggatgttttgtgccgcacaactgctgccagtctcattgtggagtccgcagtccccaattgacctccagattttaactaccccatgggaaaactggacgtccgtcgcctctctacaacagaaaacaaccatcggcaggtgttggctgatcacaggccctagttcagcaacctcctcatcccccacctcctgtaccgtcgcccctacaagaggccacgtcgaacgaagcgcttcgtggaagtacgatgtcctccagcattcgagtcaactggttggcgtgcatactgctgtgtatctcggagaagcctttcatcaagtacatgctacaggctcatgtcaccacagggtgctttgctgttgtcctaggacaggtggtagcgggagagacgttttgcagcaactgcttcccctgcacgccctgacgagatcatccgagcggcgagacggacccgaccccgtcggtagcgaaaggctcatacaggaacggttagccagcccggcaaagtggagcagtgagagaatgggtactcatacgcgccctgtctgcgtgccaagcagaaaatgccaaggtcctctgcccaatgttcccccaacacagatccggaaaagtaagggcaataagagctcacataatcgggtgaagaacctgaaataccagtgggaggctggcaattcctggggcaaggtgagtcttttttggggctgggccaggcatcggtccctttgtttcctggtcgttgcttgcctcaaggttaaaacgtgcctggtgtgtaggttcaggatttccctggagaagcaccagcagttttcttttttttactgctacaggatcgcgtag

SEQ ID NO: 191006 - DNA, 1245 bp, Artificial Sequence
  derived and/or modified sequence
atggcggcactgaggtatgccggactggatgatactgacagcgaggatgagctgcccccaggatgggaagagcggactaccaaagatggctgggtgtattatgccaatcataccgaagaaaagactcaatgggagcaccctaagacgggaaagaggaagagagtcgcaggggacctaccttacggctgggaacaggagactgacgaaaacgggcaggtcttctttgtggaccacattaacaaaagaacgacctacctcgatcctagactcgccttcactgtggatgacaatcctactaaacctaccacccggcaacgatacgatggatccacaaccgccatggagattctacaggggagagattttacgggtaaggttgtcgttgtcaccggggcaaattccggcattggattcgagaccgccaagtcctttgcccttcacggggctcatgttatactcgcttgtcgcaacatggcgagagctagcgaggctgtgtcccgaatactcgaagagtggcataaggccaaagtagaggccatgactttagatcttgctctgcttaggagcgtccagcattttgctgaagccttcaaggcgaagaacgtgccacttcatgtactggtctgcaatgccgctacattcgctctgccttggagccttaccaaggatggtcttgagactactttccaggtgaatcacctgggacacttctatctcgtacagctcctccaggatgttctgtgcagaagcgcacccgctagggtcatcgtggttagttccgagtcacatcgctttactgacatcaacgactccttgggaaaacttgatttcagtcgcctctcacctactaagaatgactattgggccatgctggcatataacagatcaaaactatgcaacatcctgttttcaaacgagttgcatcgtcgactaagccctaggggagttacgtcaaatgcggtgcatccaggaaacatgatgtattcgaacatccatcgatcttggtgggtatacactttgctgttcactttggctagaccttttaccaaaagcatgcagcagggcgctgctacaacggtgtattgcgctgctgtacccgagctcgagggcctgggcggtatgtactttaacaactgctgtcgatgcatgcctagccccgaggctcagagtgaagaaaccgcgagaaccctctgggccctgtccgaaagactgatccaagagcgcctcggtagtcagagcggctag

SEQ ID NO: 191007 - DNA, 1245 bp, Artificial Sequence
  derived and/or modified sequence
atggcagcgctgcgatacgctgggcttgatgacaccgacagcgaagatgagctgcccccaggctgggaagagaggactactaaagatggctgggtttattatgccaatcacaccgaggaaaaaacccaatgggaacacccaaaaaccggaaaacgtaagcgagtcgctggcgacttaccatacggatgggaacaggaaaccgatgaaaacggccaggtgttctttgtggaccatatcaataagagaaccacctatctcgaccccaggctggcttttactgttgatgataatcccacgaaaccgaccacacgacagagatacgatggctctactacagctatggagatcctccaaggtagggattttacgggtaaagtggtggttgtgacaggtgccaactcaggcatcggattcgagacggccaaatctttcgcactccatggtgcccatgtcatcctagcgtgcagaaacatggctcgtgcctcagaagctgtaagtagaattctggaagagtggcataaggccaaagttgaagccatgacgttggacctcgcacttctccgcagcgtgcagcacttcgctgaagcattcaaggccaagaacgtgcctctgcatgtactagtgtgcaacgcggcaacgttcgctctgccatggtctctcaccaaggatggattggaaaccacttttcaggttaatcatctgggccatttctacctcgtgcagttgctccaggacgtcctgtgcaggtctgcccctgctagggtgatcgtcgtttctagcgagagtcaccggttcactgacataaacgacagcctgggaaagctggatttttcccgactaagccccacaaaaaacgattactgggccatgctggcctacaacaggagtaaactctgcaatattttattcagtaacgagctgcataggcggctttcaccaaggggagtgacttccaacgccgtccatccaggcaacatgatgtactccaatatccacaggtcctggtgggtatatacacttttgtttacactcgctcgaccattcacaaaatcaatgcagcagggtgccgctacaaccgtgtattgtgctgctgtaccagaactggaaggcctgggcggtatgtacttcaacaattgttgtagatgtatgccatctccggaagcccagtcggaggaaactgcccgaacactttgggccctgagtgagagactgattcaggagaggctcggttcacaaagtggttag

SEQ ID NO: 191008 - DNA, 1095 bp, Artificial Sequence
  derived and/or modified sequence
atggcaagggcgagtgaagcagtgtcacgcattttagaagaatggcataaagccaaggtagaagcaatgaccctggacctcgctctgctccgtagcgtgcagcattttgctgaagcattcaaggccaagaatgtgcctcttcatgtgcttgtgtgcaacgcagcaacttttgctctaccctggagtctcaccaaagatggcctggagaccacctttcaagtgaatcatctggggcacttctaccttgtccagctcctcaggatgttttgtgccgctcagctcctgcccgtgtcattgtggtctcctcagagtcccatcgatttacagatattaacgactccttgggaaaactggacttcagtcgcctctctccaacaaaaaacgactattgggcgatgctggcttataacaggtccaagctctgcaacatcctcttctccaacgagctgcaccgtcgcccccacgcggggtcacgtcgaacgcagtgcatcctggaaatatgatgtactccaacattcatcgcagctggtgggtgtacacactgctgtttaccttggcgaggcctttcaccaagtccatgcaacagggagctgccaccaccgtgtactgtgctgctgtcccagaactggagggtctgggagggatgtacttcaacaactgctgccgctgcatgccctcaccagaagctcagagcgaagagacggcccggaccctgtgggcagcgagaggctgatccaagaacggcttgccagtccggctaagtggagctcagagcggatgggcacacacacccgccctgtgtgtgtcccctcacgcaagtgccaggggccccttccaaatgtccctccaacacagatccgcaagagtaaaggaaataagagcagtcacaacagagtgaaaaatcttaagtaccaatgggaagcagggaattcctggggtaaagtatcacttttctggggctgggctaggcataggtctctttgctttctggtggtggcctgtttgaaagtaaaaacctgcttggtgtgtaggttccgtatctccctggagaagcaccagcaattctctttcttttactgttatagaatagcctga

SEQ ID NO: 191009 - DNA, 1370 bp, Artificial Sequence
  derived and/or modified sequence
gcagtgcgcaggcgtgagcggtcgggccccgacgcgcgcgggtctcgtttggagcgggagtgagttcctgagcgagtggacccggcagcgggcgataggggggccaggtgcctccacagtcagccatggcagcgctgcgctacgcggggctggacgacacggacagtgaggacgagctgcctccgggctgggaggagagaaccaccaaggacggctgggtttactacgccaatcacaccgaggagaagactcagtgggaacatccaaaaactggaaaaagaaaacgagtggcaggagatttgccatacggatgggaacaagaaactgatgagaacggacaagtgttttttgttgaccatataaataaaagaaccacctacttggacccaagactggcgtttactgtggatgataatccgaccaagccaaccacccggcaaagatacgacggcagcaccactgccatggaaattctccagggccgggatttcactggcaaagtggttgtggtcactggagctaattcaggaatagggttcgaaaccgccaagtcttttgccctccatggtgcacatgtgatcttggcctgcaggaacatggcaagggcgagtgaagcagtgtcacgcattttagaagaatggcataaagccaaggtagaagcaatgaccctggacctcgctctgctccgtagcgtgcagcattttgctgaagcattcaaggccaagaatgtgcctcttcatgtgcttgtgtgcaacgcagcaacttttgctctaccctggagtctcaccaaagatggcctggagaccacctttcaagtgaatcatctggggcacttctaccttgtccagctcctccaggatgttttgtgccgctcagctcctgcccgtgtcattgtggtctcctcagagtcccatcgatttacagatattaacgactccttgggaaaactggacttcagtcgcctctctccaacaaaaaacgactattgggcgatgctggcttataacaggtccaagctctgcaacatcctcttctccaacgagctgcaccgtcgcctctccccacgcggggtcacgtcgaacgcagtgcatcctggaaatatgatgtactccaacattcatcgcagctggtgggtgtacacactgctgtttaccttggcgaggcctttcaccaagtccatgcaacagggagctgccaccaccgtgtactgtgctgctgtcccagaactggagggtctgggagggatgtacttcaacaactgctgccgctgcatgccctcaccagaagctcagagcgaagagacggcccggaccctgtgggcgctcagcgagaggctgatccaagaacggcttggcagccagtccggctaa

SEQ ID NO: 191010 - DNA, 2482 bp, Artificial Sequence
  derived and/or modified sequence
gtcctggcccgaaactggatgcgcacgccccttccctgcggcggggaggctgacaaggctccgctctatctctagcgcctcggagcgctctccggctttgctgtctagcccggcggcagcgcgatctcttaggcactttcaccgccttcctctccaggccctgcccctttgacgccggccgtcgcgatattgcggagactggatttcagcttcgtggtcggcggagcggcccctggagggcgcagtgcgcaggcgtgagcggtcgggccccgacgcgcgcgggtctcgtttggagcgggagtgagttcctgagcgagtggacccggcagcgggcgataggggggccaggtgcctccacagtcagccatggcagcgctgcgctacgcggggctggacgacacggacagtgaggacgagctgcctccgggctgggaggagagaaccaccaaggacggctgggtttactacgccaatcacaccgaggagaagactcagtgggaacatccaaaaactggaaaaagaaaacgagtggcaggagatttgccatacggatgggaacaagaaactgatgagaacggacaagtgttttttgttgaccatataaataaaagaaccacctacttggacccaagactggcgtttactgtggatgataatccgaccaagccaaccacccggcaaagatacgacggcagcaccactgccatggaaattctccagggccgggatttcactggcaaagtggttgtggtcactggagctaattcaggaatagggttcgaaaccgccaagtcttttgccctccatggtgcacatgtgatcttggcctgcaggaacatggcaagggcgagtgaagcagtgtcacgcattttagaagaatggcataaagccaaggtagaagcaatgaccctggacctcgctctgctccgtagcgtgcagcattttgctgaagcattcaaggccaagaatgtgcctcttcatgtgcttgtgtgcaacgcagcaacttttgctctaccctggagtctcaccaaagatggcctggagaccacctttcaagtgaatcatctggggcacttctaccttgtccagctcctccaggatgttttgtgccgctcagctcctgcccgtgtcattgtggtctcctcagagtcccatcgatttacagatattaacgactccttgggaaaactggacttcagtcgcctctctccaacaaaaaacgactattgggcgatgctggcttataacaggtccaagctctgcaacatcctcttctccaacgagctgcaccgtcgcctctccccacgcggggtcacgtcgaacgcagtgcatcctggaaatatgatgtactccaacattcatcgcagctggtgggtgtacacactgctgtttaccttggcgaggcctttcaccaagtccatgcaacagggagctgccaccaccgtgtactgtgctgctgtcccagaactggagggtctgggagggatgtacttcaacaactgctgccgctgcatgccctcaccagaagctcagagcgaagagacggcccggaccctgtgggcgctcagcgagaggctgatccaagaacggcttggcagccagtccggctaagtggagctcagagcggatgggcacacacacccgccctgtgtgtgtcccctcacgcaagtgccagggctgggccccttccaaatgtccctccaacacagatccgcaagagtaaaggaaataagagcagtcacaacagagtgaaaaatcttaagtaccaatgggaagcagggaattcctggggtaaagtatcacttttctggggctgggctaggcataggtctctttgctttctggtggtggcctgtttgaaagtaaaaacctgcttggtgtgtaggttccgtatctccctggagaagcaccagcaattctctttcttttactgttatagaatagcctgaggtcccctcgtcccatccagctaccaccacggccaccactgcagccgggggctggccttctcctacttagggaagaaaaagcaagtgttcactgctccttgctgcattgatccaggagataattgtttcattcatcctgaccaagactgagccagcttagcaactgctggggagacaaatctcagaaccttgtcccagccagtgaggatgacagtgacacccagagggagtagaatacgcagaactaccaggtggcaaagtacttgtcatagactcctttgctaatgctatgcaaaaaattctttagagattataacaaatttttcaaatcattccttagataccttgaaaggcaggaagggaagcgtatatacttaagaatacacaggatattttggggggcagagaataaaacgttagttaatccctttgtctgtcaatcacagtctcagttctcttgctttcacattgtacttaaacctcctgctgtgcctcgcatcctatgcttaataaaagaacatgcttgaatatca

SEQ ID NO: 191011 - protein, 1312 aa, Artificial Sequence
  derived and/or modified sequence
MKALDEPPYLTVGTDVSAKYRGAFCEAKIKTAKRLVKVKVTFRHDSSTVEVQDDHIKGPLKVGAIVEVKNLDGAYQEAVINKLTDASWYTVVFDDGDEKTLRRSSLCLKGERHFAESETLDQLPLTNPEHFGTPVIGKKTNRGRRSNHIPEEESSSSSSDEDEDDRKQIDELLGKVVCVDYISLDKKKALWFPALVVCPDCSDEIAVKKDNILVRSFKDGKFTSVPRKDVHEITSDTAPKPDAVLKQAFEQALEFHKSRTIPANWKTELKEDSSSSEAEEEEEEEDDEKEKEDNSSEEEEEIEPFPEERENFLQQLYKFMEDRGTPINKRPVLGYRNLNLFKLFRLVHKLGGFDNIESGAVWKQVYQDLGIPVLNSAAGYNVKCAYKKYLYGFEEYCRSANIEFQMALPEKVVNKQCKECENVKEIKVKEENETEIKEIKMEEERNIIPREEKPIEDEIERKENIKPSLGSKKNLLESIPTHSDQEKEVNIKKPEDNENLDDKDDDTTRVDESLNIKVEAEEEKAKSGDETNKEEDEDDEEAEEEEEEEEEEEDEDDDDNNEEEEFECYPPGMKVQVRYGRGKNQKMYEASIKDSDVEGGEVLYLVHYCGWNVRYDEWIKADKIVRPADKNVPKIKHRKKIKNKLDKEKDKDEKYSPKNCKLRRLSKPPFQTNPSPEMVSKLDLTDAKNSDTAHIKSIEITSILNGLQASESSAEDSEQEDERGAQDMDNNGKEESKIDHLTNNRNDLISKEEQNSSSLLEENKVHADLVISKPVSKSPERLRKDIEVLSEDTDYEEDEVTKKRKDVKKDTTDKSSKPQIKRGKRRYCNTEECLKTGSPGKKEEKAKNKESLCMENSSNSSSDEDEEETKAKMTPTKKYNGLEEKRKSLRTTGFYSGFSEVAEKRIKLLNNSDERLQNSRAKDRKDVWSSIQGQWPKKTLKELFSDSDTEAAASPPHPAPEEGVAEESLQTVAEEESCSPSVELEKPPPVNVDSKPIEEKTVEVNDRKAEFPSSGSNSVLNTPPTTPESPSSVTVTEGSRQQSSVTVSEPLAPNQEEVRSIKSETDSTIEVDSVAGELQDLQSEGNSSPAGFDASVSSSSSNQPEPEHPEKACTGQKRVKDAQGGGSSSKKQKRSHKATVVNNKKKGKGTNSSDSEELSAGESITKSQPVKSVSTGMKSHSTKSPARTQSPGKCGKNGDKDPDLKEPSNRLPKVYKWSFQMSDLENMTSAERITILQEKLQEIRKHYLSLKSEVASIDRRRKRLKKKERESAATSSSSSSPSSSSITAAVMLTLAEPSMSSASQNGMSVECR

SEQ ID NO: 191012 - protein, 1153 aa, Artificial Sequence
  derived and/or modified sequence
MKALDEPPYLTVGTDVSAKYRGAFCEAKIKTAKRLVKVKVTFRHDSSTVEVQDDHIKGPLKVGAIVEVKNLDGAYQEAVINKLTDASWYTVVFDDGDEKTLRRSSLCLKGERHFAESETLDQLPLTNPEHFGTPVIGKKTNRGRRSNHIPEEESSSSSSDEDEDDRKQIDELLGKVVCVDYISLDKKKALWFPALVVCPDCSDEIAVKKDNILVRSFKDGKFTSVPRKDVHEITSDTAPKPDAVLKQAFEQALEFHKSRTIPANWKTELKEDSSSSEAEEEEEEEDDEKEKEDNSSEEEEEIEPFPEERENFLQQLYKFMEDRGTPINKRPVLGYRNLNLFKLFRLVHKLGGFDNIESGAVWKQVYQDLGIPVLNSAAGYNVKCAYKKYLYGFEEYCRSANIEFQMALPEKVVNKQCKECENVKEIKVKEENETEIKEIKMEEERNIIPREEKPIEDEIERKENIKPSLGSKKNLLESIPTHSDQEKEVNIKKPEDNENLDDKDDDTTRVDESLNIKVEAEEEKAKSGDETNKEEDEDDEEAEEEEEEEEEEEDEDDDDNNEEEEFECYPPGMKVQVRYGRGKNQKMYEASIKDSDVEGGEVLYLVHYCGWNVRYDEWIKADKIVRPADKNVPKIKHRKKIKNKLDKEKDKDEKYSPKNCKLRRLSKPPFQTNPSPEMVSKLDLTDAKNSDTAHIKSIEITSILNGLQASESSAEDSEQEDERGAQDMDNNGKEESKIDHLTNNRNDLISKEEQNSSSLLEENKVHADLVISKPVSKSPERLRKDIEVLSEDTDYEEDEVTKKRKDVKKDTTDKSSKPQIKRGKRRYCNTEECLKTGSPGKKEEKAKNKESLCMENSSNSSSDEDEEETKAKMTPTKKYNGLEEKRKSLRTTGFYSGFSEVAEKRIKLLNNSDERLQNSRAKDRKDVWSSIQGQWPKKTLKELFSDSDTEAAASPPHPAPEEGVAEESLQTVAEEESCSPSVELEKPPPVNVDSKPIEEKTVEVNDRKAEFPSSGSNSVLNTPPTTPESPSSVTVTEGSRQQSSVTVSEPLAPNQEEVRSIKSETDSTIEVDSVAGELQDLQSEGNSSPAGFDASVSSSSSNQPEPEHPEKACTGQKRVKDAQGGGSSSKKQKRSHKATVVNNKKKGKGILPH

SEQ ID NO: 191013 - protein, 655 aa, Artificial Sequence
  derived and/or modified sequence
MKALDEPPYLTVGTDVSAKYRGAFCEAKIKTAKRLVKVKVTFRHDSSTVEVQDDHIKGPLKVGAIVEVKNLDGAYQEAVINKLTDASWYTVVFDDGDEKTLRRSSLCLKGERHFAESETLDQLPLTNPEHFGTPVIGKKTNRGRRSNHIPEEESSSSSSDEDEDDRKQIDELLGKVVCVDYISLDKKKALWFPALVVCPDCSDEIAVKKDNILVRSFKDGKFTSVPRKDVHEITSDTAPKPDAVLKQAFEQALEFHKSRTIPANWKTELKEDSSSSEAEEEEEEEDDEKEKEDNSSEEEEEIEPFPEERENFLQQLYKFMEDRGTPINKRPVLGYRNLNLFKLFRLVHKLGGFDNIESGAVWKQVYQDLGIPVLNSAAGYNVKCAYKKYLYGFEEYCRSANIEFQMALPEKVVNKQCKECENVKEIKVKEENETEIKEIKMEEERNIIPREEKPIEDEIERKENIKPSLGSKKNLLESIPTHSDQEKEVNIKKPEDNENLDDKDDDTTRVDESLNIKVEAEEEKAKSGDETNKEEDEDDEEAEEEEEEEEEEEDEDDDDNNEEEEFECYPPGMKVQVRYGRGKNQKMYEASIKDSDVEGGEVLYLVHYCGWNVRYDEWIKADKIVRPADKNVPKIKHRKKIKNSVYKKKKKKKNK

SEQ ID NO: 191014 - DNA, 3939 bp, Artificial Sequence
  derived and/or modified sequence
atgaaagcacttgacgagcccccttatctgaccgtgggtaccgacgtaagtgctaagtaccggggagccttctgtgaagctaaaataaagactgcaaagcgtcttgtgaaagttaaagtcacatttcgtcacgactcgtccaccgttgaagttcaggatgaccatataaagggccccctcaaggtaggtgcaattgtcgaggtgaagaatctcgatggcgcctaccaggaggcagttataaataagctcaccgacgcgtcatggtacaccgtcgtctttgacgatggagacgaaaagaccctccgacgctctagcttgtgccttaagggcgagcgccatttcgccgaatccgagactctggatcagctacccctgaccaatcctgaacactttggaaccccggttattggtaagaagaccaaccgcggccgcagatctaatcacatacccgaagaagaatctagctccagcagttctgacgaagacgaggatgataggaagcagatcgatgagctgctgggcaaagtggtgtgcgttgactacatcagcctggacaaaaagaaggcactgtggtttcctgccttggtggtatgccctgactgctcagatgaaattgccgtgaaaaaagataacatactggtccgttccttcaaggacggaaaattcacatccgtgcctagaaaggatgtccacgagataaccagcgacactgctcccaaaccagacgccgtgctgaagcaggcctttgagcaggccttggagttccacaagagtaggacaatcccggctaactggaaaaccgagctgaaagaagactcttcctcttctgaagctgaggaggaggaggaggaggaagacgacgaaaaagagaaggaggataatagttccgaggaggaggaagaaattgagccatttcctgaggagcgcgaaaacttcctccagcagttgtacaaatttatggaagaccgggggactcccatcaacaagcgtcccgttttaggataccgcaacctgaatctcttcaagctgttccgattagtacataagctgggtgggttcgacaatatagagtccggtgctgtttggaagcaggtataccaggacctgggcattcctgtcttgaattctgccgccgggtacaatgtgaagtgtgcatataagaagtatctgtacggatttgaagaatattgtaggtcagcaaatattgaattccagatggcactgcctgaaaaagtagtgaacaagcaatgtaaggaatgcgagaacgttaaggaaatcaaagtgaaggaggagaacgagacagaaataaaggagattaagatggaggaagagagaaacatcattccccgtgaggaaaagccaattgaggatgagatagaacgaaaggagaacattaagccctcactaggcagcaagaaaaatctgctcgaatccatccctactcacagcgatcaggagaaggaagttaacataaagaaaccagaggataatgagaatctggacgataaagatgacgataccaccagagtggacgaatcgcttaatatcaaggtggaggctgaggaggagaaggctaagagtggcgacgaaaccaacaaggaggaggacgaggatgacgaagaagccgaagaggaggaagaggaggaagaggaagaagaggatgaggatgacgacgataataatgaagaggaggagttcgaatgctaccccccagggatgaaagtccaggtgcggtacggacgtggcaagaaccagaagatgtacgaagctagtatcaaggactcggatgtggaggggggtgaagttctgtatttggtgcactactgtggctggaatgtgcggtacgacgagtggatcaaggccgacaagatagttcgtcctgcagacaagaatgtacctaagataaaacataggaaaaagataaagaacaagttggacaaggaaaaggacaaggatgagaaatactctcccaaaaattgcaagctgcgaagattgagcaaaccaccttttcagaccaatccgtctcccgaaatggttagcaagctcgacctaactgacgccaagaatagcgataccgcccacattaagtcaatcgagatcacgtctatcctgaacggactgcaagccagcgagtccagtgccgaggatagcgaacaagaagacgagcggggtgcccaagatatggacaataacggaaaagaagaatcaaagatcgatcatctgacaaacaaccgtaatgacctgatcagtaaagaagagcagaattcttcttccttgttggaggagaataaagtccatgccgatttggtgatcagcaaacccgtttccaagagccctgaaaggctgaggaaagatatcgaagtcctgagcgaagacactgattacgaggaagacgaggtcaccaagaagagaaaggacgtcaagaaagacacgacggacaaatcatcaaagcctcagatcaaacgaggtaagagaaggtattgtaatacagaagagtgcctgaagacgggctccccaggcaagaaggaggagaaagcaaaaaacaaggaatcactatgcatggaaaacagttccaacagttcctctgatgaggacgaggaggagacaaaagctaaaatgacacccacgaaaaagtataatggccttgaggaaaagagaaagtcgttaaggaccacagggttctatagtggattctctgaggttgccgagaagagaataaagctgttaaataattccgacgaaagactccagaatagcagagctaaggacagaaaggatgtatggtctagcattcaggggcagtggccaaagaagaccttaaaggagctgttctccgactccgatacggaagcagccgcttccccccctcatcctgcacccgaagaaggggtcgccgaggaatctctgcagacagtagccgaggaggagtcgtgcagtccttccgtggagctggagaaaccccccccagtcaacgtggatagcaaacccatcgaggagaaaaccgtggaggtgaacgatcggaaggccgagtttcctagttccggcagcaattctgttcttaacacccctcccactacacctgaaagcccaagtagcgttacagtcaccgaggggtcaaggcagcagtcaagtgtgactgtgtcagagccccttgcccccaatcaggaagaggtacggtccattaagtccgaaaccgacagcaccattgaggtagatagcgtagctggagagctgcaggacctccagagcgaggggaactccagcccagccggattcgatgcatctgtgtcctcatctagctcaaaccagccagagccggaacatcctgagaaagcctgcaccggccagaaacgagtgaaggatgctcaggggggcgggagttcctcaaaaaagcagaaacgctctcacaaggctacggtggttaataacaagaagaagggaaagggcacgaacagtagcgactctgaagagctttccgctggggaatctattactaagtctcagcccgtgaagagtgtctctaccgggatgaaaagccatagtacgaaaagtcccgcccggacccaatctcccgggaagtgtggcaagaacggggataaggatcccgacctcaaagaaccttccaaccgactaccaaaagtgtacaaatggagttttcagatgtcagatctcgagaacatgacgtcagcggagcggatcaccatcctgcaggaaaagttgcaggaaatccgcaagcactacctatctctgaaatcggaggtggccagcatcgaccgtagacgtaagaggcttaagaagaaggagcgagaaagcgcagctacatcgagcagctcctcatccccctccagtagcagtatcaccgctgccgtgatgctcacactggccgagcccagtatgagctctgcctcccagaatggtatgagcgtggagtgtcgatag

SEQ ID NO: 191015 - DNA, 3939 bp, Artificial Sequence
  derived and/or modified sequence
atgaaggccctcgatgagcccccatacctgacagtcgggaccgacgtctccgcaaagtacagaggagccttttgcgaagccaagattaaaactgcaaagagacttgtgaaagtgaaagtaacgtttcgacacgattcttctactgttgaggtgcaggatgaccacattaaaggccctctgaaagtgggggctatcgtagaagttaaaaatctcgacggggcatatcaagaggccgtgataaataaacttaccgacgcctcttggtacaccgtggtttttgatgacggggatgagaagacgttgcgacggtcgagcctctgccttaaaggggaaagacacttcgctgaaagcgagacactggatcagttgccactgacaaatccagaacattttggcaccccagtcattggcaagaaaacaaatagaggcaggcgctcaaatcacatacccgaggaggagagttcaagctcatcctcagatgaggatgaagacgacaggaagcagattgacgaactgctcggcaaagtggtctgcgtcgactatatttctctagacaagaagaaagccttatggtttcccgctcttgtggtgtgtcccgattgttcggacgagatcgctgttaagaaagacaatatcctggtaaggtctttcaaggacggcaaattcacgtctgtccccagaaaggacgtacacgaaattaccagcgacaccgctcctaaaccagacgcagtgcttaagcaggccttcgagcaagctctcgaatttcacaagagtcgcacgattccagcgaattggaaaactgagctgaaagaggacagttcctcatctgaggcagaggaagaagaggaagaggaggatgacgagaaagagaaggaggataacagcagtgaagaggaagaggagatcgaacccttccctgaagaaagggagaactttttacaacagctttataaattcatggaggacaggggaacaccgataaacaaaagaccagtgctgggatacagaaatctgaatctttttaaactttttaggctggtgcataaactgggtggatttgacaatatcgagagcggcgcggtctggaagcaggtgtaccaggacctgggtattccggtcctaaactctgccgctggttataacgttaaatgcgcatataagaaatacctatatggattcgaggagtattgcaggagcgctaacattgaatttcagatggccctgcccgagaaggtggtcaataagcagtgtaaggaatgcgaaaacgtgaaagagattaaggttaaggaggagaacgagaccgaaattaaagagataaagatggaagaggaaagaaacatcatccctagggaggagaaaccaatcgaggacgagattgaacgcaaggagaatataaagccctcgctcggttccaagaagaacctcctcgagtcaataccaactcactctgatcaggagaaagaggtgaatattaagaagcctgaggataatgaaaacctggatgacaaagacgatgatacgaccagggtagatgaaagtctgaacatcaaagtggaagcagaggaggagaaagcgaagtcaggcgatgagactaataaagaagaggatgaggatgatgaagaggcagaggaagaagaggaggaagaagaagaggaggaagacgaagacgatgatgacaataatgaggaggaggagttcgaatgctatcctccaggtatgaaagtgcaggttagatatggcagggggaaaaatcaaaaaatgtatgaagcatccattaaagactccgacgtggagggcggcgaggtgctgtatttagtgcactactgtggttggaacgtacgctacgacgagtggattaaagccgacaaaatcgtacgccctgcagacaaaaacgtgccgaagatcaaacatcgaaaaaagatcaagaacaaactggacaaagaaaaagataaggatgagaagtactctccaaaaaactgcaagttgaggagactatccaagcccccattccagactaatcctagtcccgagatggtgtctaaactcgacctaacggacgctaagaattcggatactgcacacattaagtccattgagattaccagcatcctgaatggtttacaagcatctgagagctccgcggaggatagtgaacaggaagatgaaagaggcgcacaagacatggataataatggaaaggaggagagcaaaatcgatcacctgacaaataaccgcaacgatttgatctcaaaagaagagcagaattcctcctctctactggaagaaaataaagtgcatgccgacctggtcattagtaagcctgtttccaagagtccagaacgcctcagaaaagatatagaggtgctgtccgaggatacagattatgaggaagacgaggtcaccaaaaaacggaaagacgtgaaaaaagataccacagataagagctcaaagccacagatcaagagggggaaacggcgctattgtaatactgaggaatgtctcaaaacaggctcaccaggcaaaaaggaggagaaagccaaaaataaggagtccctgtgtatggaaaacagctccaactctagcagcgacgaggatgaagaagaaaccaaagctaagatgacgccaacaaaaaagtacaacggcctcgaggaaaagcgaaagagtctgaggacaaccggcttctattccggttttagcgaggttgcagagaaaaggataaagcttcttaataacagtgatgaaaggctacaaaacagtagagcgaaggaccgtaaggacgtgtggagctctattcaaggccagtggccaaagaagaccctcaaggaactgttcagtgatagcgatactgaggccgcggcctcaccgcctcatcccgctcccgaagagggcgtggcagaagagagtctccagaccgtggccgaagaggagagctgctcgccctcggttgagttagaaaaaccccctcccgtgaacgtcgattctaagcccatagaagagaaaacagtggaagtaaacgatcgcaaagctgagtttccttcaagcggatctaactctgtcctgaacaccccccccaccacacccgagagcccatcatctgtcactgtgactgagggatcccggcagcagagctccgtgaccgtgtccgagccgttggcgccgaatcaagaggaggtgcggagtataaagagtgagaccgactcgacaatcgaggtggactccgttgcgggcgagctccaggatctacagtcggagggcaactcttccccagctggctttgatgctagcgtcagttcgagctctagtaaccagcctgagccagagcaccccgaaaaggcctgcacaggccaaaaaagagtaaaagacgcacagggggggggatcatcctctaagaagcagaagcgcagtcacaaagctacagtagtgaataacaagaagaaaggcaagggaactaattccagcgactccgaggaactctctgcgggggaatcaatcacgaagagccagccagttaagagcgtcagtaccggaatgaagtcccattcaactaagtcccctgcgcgaacccagtcccccgggaagtgtggaaaaaacggcgacaaggatcctgacctgaaggagcccagcaatagactgccgaaggtctataagtggtcctttcaaatgagtgacctggaaaacatgacctcagctgagagaattaccattctccaggagaagctgcaggaaatccgtaaacactacttatcactgaaaagcgaagtagcttcaatcgataggaggagaaagcggctgaagaaaaaagaaagagaaagtgcggcaacttctagctctagctccagcccatcttcttcgtcaatcaccgctgcagttatgctgacccttgcagagccaagcatgtctagcgcgtcccagaacggcatgagtgtggaatgtcgttag

SEQ ID NO: 191016 - DNA, 3462 bp, Artificial Sequence
  derived and/or modified sequence
atgaaggcccttgatgagcccccatatcttacagtgggaacagacgtcagtgctaagtacagaggcgctttctgtgaggccaagattaaaactgccaaaaggctggtgaaggtgaaggtgaccttcagacacgacagttccacagtggaggtccaagatgatcatataaaaggaccattgaaggtgggagcaatcgtggaggtcaagaaccttgatggtgcttatcaggaagccgttataaataaactgaccgacgctagctggtacaccgttgtgttcgacgacggcgatgagaaaacactgcggcggagttctttgtgcctcaagggagagcggcacttcgctgagtccgagaccctggaccaactgccactgaccaatcccgaacactttggcaccccggttattgggaagaaaacaaatagaggaaggaggagcaatcacatcccagaggaggaatcatcctctagcagcagcgacgaagacgaagacgatcggaaacagatcgacgagctactggggaaagtcgtgtgtgtagactatatcagtctggataagaaaaaagctctgtggttccctgctctggtcgtctgtcctgactgtagcgacgagatcgctgtgaagaaagataacatcctcgtccgctcctttaaagatggcaaatttacaagtgtgccaagaaaggacgtgcacgagatcacaagcgatacggcacccaaaccagatgcggttcttaaacaggcatttgagcaagctctagagtttcacaagagccgtaccattcccgctaattggaagaccgagctgaaagaagatagctcttcttcagaggctgaagaagaggaagaggaagaagatgatgaaaaggagaaggaggacaatagttccgaagaggaggaggaaattgagccattccccgaagaaagggagaattttctccagcagttgtacaagttcatggaggacagggggaccccaattaataaacgacccgtgcttgggtacaggaacttaaatttattcaaactcttccgactggtgcacaaactgggggggtttgacaatattgaaagcggagccgtatggaagcaggtgtaccaggatctgggaatcccagtattaaatagcgccgccggttacaatgtgaagtgcgcctacaagaagtatctgtatgggtttgaagagtattgccgttctgccaatatcgagtttcagatggcactgcccgagaaggtggtcaataagcagtgcaaggagtgcgagaatgtcaaggaaattaaggtaaaagaagaaaacgaaacagagattaaagagatcaagatggaagaggaacggaatattatcccgcgagaagaaaaaccgatcgaagatgagattgagcggaaggaaaatataaaacctagtctgggcagcaaaaaaaacctgctcgaatcgatccctacccactctgatcaggagaaggaagtaaatatcaagaaacctgaggataatgaaaacctggatgacaaggatgacgacaccactcgcgtggatgagagcctgaacatcaaggttgaagcagaggaggagaaagccaagtctggcgatgagacaaataaggaagaggacgaggacgatgaagaagctgaagaggaagaggaggaggaggaggaggaggaggacgaagacgatgatgacaacaatgaggaggaagagttcgaatgctacccccccgggatgaaagtgcaggttagatacggtcgcggtaagaaccagaaaatgtatgaagcttctatcaaagattccgatgttgaaggaggcgaagttctctatttggtccattactgcggttggaatgtgcggtatgacgagtggatcaaggcagataagattgttagaccggcggacaagaacgtacccaaaattaagcaccgcaagaaaattaagaacaaactggataaagagaaagacaaggacgaaaagtactctccgaaaaattgcaaactcagaagacttagtaagcctccattccagacaaacccgtcccccgaaatggtgagtaagctcgatttaaccgatgcaaagaactccgacaccgcccacattaaaagcattgaaatcacctccattctcaacggattgcaggcctcagagagctccgctgaggactccgaacaggaggatgaaaggggtgctcaagatatggataataatgggaaagaagaatccaagattgaccacttaacgaacaacagaaacgacttgatttccaaagaggagcagaactcctccagcctcctagaggaaaataaagtgcacgcagatctcgtgatctccaaaccagtgagcaagagtcccgagagacttagaaaagacattgaagttttaagtgaagatactgattacgaagaagacgaagtcacgaagaagcgcaaggatgtgaaaaaagacactacagacaagagctcaaaacctcaaataaagcgcgggaagagaaggtattgcaacaccgaagagtgtcttaagacagggtctcccggaaaaaaagaggaaaaggctaagaacaaagagagcctctgcatggaaaacagttctaactcatcatcagacgaggatgaggaagaaacaaaggctaagatgacccccacgaagaagtataatggattggaggagaaacgcaaaagtcttcgtacaacagggttttactcaggcttctccgaggttgccgagaagaggatcaaactgcttaacaatagtgacgaaagactacagaactcacgcgctaaagatcgcaaggatgtctggtcatccatccagggacaatggccaaaaaaaactctcaaagagctgttcagtgatagcgacacagaagctgccgcatccccgcctcatcccgccccagaagaaggggtggctgaagagtctctgcaaactgtggcagaggaagaatcttgttctccatctgtagaactggagaagcccccacctgtcaatgtggattccaagcccatcgaagagaagacagtggaagtcaacgatcggaaggccgaatttccctcctccggttctaacagtgtattgaacacccccccaacaacccctgaaagcccttccagtgtgaccgtgaccgaagggagcaggcagcaatcaagcgtgacagttagtgagcccctcgcacctaaccaggaagaggtgagaagcatcaaaagtgaaactgactccaccatcgaggtggacagtgtggctggagagctacaggaccttcagagcgaaggcaacagtagcccagccggatttgacgccagcgtctcaagtagttcttcgaaccagcccgaaccagaacaccccgaaaaggcttgtacaggtcagaagagggtgaaagatgctcagggcggcggttcgtcaagtaaaaaacaaaagaggtctcacaaagccaccgttgtgaacaacaagaaaaaggggaaaggcattctgcctcactag

SEQ ID NO: 191017 - DNA, 1968 bp, Artificial Sequence
  derived and/or modified sequence
atgaaagcactggacgaacccccctaccttacagtaggcacagatgtgtcggctaaatatcgcggggctttttgcgaggcaaagataaaaactgccaagaggctcgtgaaagtgaaggtcactttcagacacgacagctcaacagtggaggtccaagacgaccacattaaagggcccctgaaagttggcgccatcgtggaagttaagaacttagatggagcttaccaggaggcagtaatcaacaaactaacagatgcctcttggtataccgtggtgtttgatgacggcgatgaaaagaccctgcgtcgctccagtctctgtctgaaaggagaacggcacttcgcagagtcggagacattggaccaactgccgctcaccaatcctgagcacttcgggactcccgtcatcggaaagaaaaccaatagagggcggagaagcaatcacattccagaagaagagagctcctcttcatcttccgatgaggacgaagatgaccgcaagcagattgacgaattgttaggcaaagtggtgtgcgtggattacatctctctggataagaagaaggctctctggttcccagccctggtggtgtgccctgattgctctgatgagatagccgtcaaaaaagataacattctggtgaggtcgtttaaagacggtaagtttaccagcgtgcctagaaaagacgtccacgagatcacctcagacacagccccgaagccggatgccgtccttaaacaggcattcgagcaggccctcgaatttcacaagtcccgaaccatccccgccaactggaagaccgaattaaaggaggattcttccagctctgaggcggaagaagaagaggaggaggaagatgacgaaaaagagaaggaagataatagtagcgaagaagaagaggagatcgagccctttccagaggagcgtgaaaattttctgcagcaactctacaaatttatggaagatagggggactccgatcaacaaaaggccggtccttggttatcgcaacctgaacctgttcaagttgtttagactggtgcacaaactaggaggttttgataacatagagtctggggccgtgtggaagcaggtttaccaggacctgggaatcccggtccttaactcggccgccggctataatgtcaagtgtgcttataagaagtatctgtacggattcgaagagtattgcagaagcgctaacatcgagtttcagatggcattacccgaaaaagtagtcaataaacagtgcaaagaatgtgagaatgttaaggagataaaagtaaaggaagagaatgaaacagagatcaaggagatcaagatggaggaagagaggaatattatccctcgggaagagaaacccatcgaggacgagatagagagaaaggaaaacattaaacctagtctcggctcaaagaagaacttgttggagtctataccaacacactccgaccaagaaaaggaagtgaacattaagaagcctgaagacaacgagaatctggatgataaggacgacgacaccactagggttgatgagagtctcaatataaaggtggaggctgaggaggagaaagccaagagcggcgacgagacaaacaaagaagaggacgaggatgatgaagaagctgaggaggaggaggaggaagaagaggaagaggaggatgaggatgatgacgacaataacgaggaggaggagttcgaatgctacccccctggcatgaaggtccaggtgagatatggtcgggggaagaaccagaaaatgtatgaagctagcatcaaggatagtgatgtcgagggtggtgaagttctttatctggtgcattattgcggctggaacgtcagatatgacgaatggatcaaggccgataaaatagtgagacctgcagacaaaaatgttcccaagatcaaacataggaagaagataaagaacagcgtttataagaagaaaaaaaaaaaaaaaaacaagtag

SEQ ID NO: 191018 - DNA, 3939 bp, Artificial Sequence
  derived and/or modified sequence
atgaaggccctggatgagcccccctacctgactgtgggcacagatgtgtctgccaagtacagaggagccttctgtgaggccaagatcaagacagccaagaggctggtgaaggtgaaggtgaccttcagacatgacagcagcacagtggaggtgcaggatgaccacatcaagggccccctgaaggtgggcgccatcgtggaggtgaagaacctggatggagcctaccaggaggccgtcatcaacaagctgacagatgcctcctggtacacagtggtgtttgatgatggagatgagaagaccctgcggcgcagcagcctgtgcctgaagggggagcggcactttgctgagagcgagaccctggaccagctgcccctgaccaaccctgagcacttcggcacccctgtgattggcaagaagaccaacagaggccgccgcagcaaccacatccctgaggaggagagcagcagcagcagcagtgatgaagatgaagatgacaggaagcagattgatgagctgctgggcaaggtggtgtgtgtggactacatcagcctggacaagaagaaggccctgtggttccctgccctggtggtgtgcccagactgcagtgatgaaattgctgtgaagaaggacaacatcctggtgcgctccttcaaggatggcaagttcacctctgtgcccaggaaggatgtgcatgagatcaccagtgacacagcccccaagccagatgctgtgctgaagcaggcctttgagcaggccctggagttccacaagagcaggaccatcccagccaactggaagacagagctgaaggaggacagcagcagcagcgaggccgaggaggaggaggaggaggaggatgatgagaaggagaaggaggacaacagcagcgaggaggaggaggagattgagcccttccctgaggagcgggagaacttcctgcagcagctgtacaagttcatggaggaccggggcacccccatcaacaagaggcctgtgctgggctacagaaacctgaacctcttcaagctgttccggctggtgcacaagctgggcggctttgacaacatcgagagcggggctgtgtggaagcaggtgtaccaggacctgggcatccctgtgctgaacagcgctgctggctacaacgtgaagtgtgcctacaagaagtacctgtatggctttgaggagtactgccgcagcgccaacatcgagttccagatggccctgcctgagaaggtggtgaacaagcagtgcaaggaatgtgaaaatgtgaaggagatcaaggtgaaggaggagaatgaaacagagatcaaggagatcaagatggaggaggagaggaacatcatcccccgggaggagaagcccattgaagatgaaattgaaagaaaagaaaacatcaagcccagcctgggcagcaagaagaacctgctggagagcatccccacccacagcgaccaggagaaggaggtgaacatcaagaagccagaagataatgaaaacctggatgacaaggatgatgacaccaccagggtggatgagagcctgaacatcaaggtggaggccgaggaggagaaggccaagtctggagatgagaccaacaaggaggaggatgaagatgatgaggaggccgaggaggaggaggaggaggaggaggaggaggaggatgaagatgatgatgacaacaatgaggaggaggagtttgagtgctacccacctggcatgaaggtgcaggtgcgctatggccggggcaagaaccagaagatgtatgaggccagcatcaaggacagtgatgtggagggcggggaggtgctgtacctggtgcactactgcggctggaatgtgcgctatgatgagtggatcaaggctgacaagatcgtgcggcctgctgacaagaatgtgcccaagatcaagcacaggaagaagatcaagaacaagctggacaaggagaaggacaaggatgagaagtacagccccaagaactgcaagctgcggcggctgagcaagccacccttccagaccaaccccagccctgagatggtgtccaagctggacctgacagatgccaagaacagcgacacagcccacatcaagagcattgagatcaccagcatcctgaatggcctgcaggccagcgagagcagcgcagaagattctgagcaggaggatgagcggggggcccaggacatggacaacaacgggaaggaggagagcaagattgaccacctgaccaacaacagaaatgacctgatcagcaaggaggagcagaacagcagcagcctgctggaggagaacaaggtgcatgctgacctggtgatcagcaagcctgtgtccaagagccctgagcggctgaggaaggacatcgaggtgctgtctgaggacacagattatgaagaagatgaggtgaccaagaagaggaaggatgtgaagaaggacaccacagacaagagcagcaagccccagatcaagaggggcaagaggcgctactgcaacacagaggagtgcctgaagacaggcagccctgggaagaaggaggagaaggccaagaacaaggagagcctgtgcatggagaacagcagcaacagcagcagtgatgaagatgaggaggagaccaaggccaagatgacccccaccaagaagtacaacggcctggaggagaagaggaagagcctgcggaccaccggcttctacagcggcttcagcgaggtggccgagaagaggatcaagctgctgaacaacagtgatgagcggctgcagaacagccgggccaaggacaggaaggatgtgtggagcagcatccagggccagtggcccaagaagaccctgaaggagctgttcagtgacagcgacacagaagctgctgccagccccccccacccagcccctgaggagggcgtggccgaggagagcctgcagacagtggccgaggaggagagctgcagccccagcgtggagctggagaagcccccacctgtgaatgtggacagcaagcccatcgaggagaagacagtggaggtgaatgacaggaaggccgagttccccagcagcggcagcaacagcgtgctgaacaccccacccaccaccccagagagccccagctctgtgacagtgacagagggcagccggcagcagagctctgtgacagtgtctgagcccctggcccccaaccaggaggaggtgcgcagcatcaagtcagaaacagacagcaccatcgaggtggacagcgtggccggggagctgcaggacctgcagagcgagggcaacagcagccctgctggctttgatgcctctgtgagcagcagcagcagcaaccagcctgagcctgagcaccctgagaaggcctgcaccggccagaagagggtgaaggatgcccagggcggcggcagcagcagcaagaagcagaagaggagccacaaggccaccgtggtgaacaacaagaagaagggcaagggcaccaacagcagtgacagcgaggagctgtctgctggggagagcatcaccaagagccagcctgtgaagtctgtgtccacaggcatgaagagccacagcaccaagagccctgcccggacccagagccctggaaaatgtgggaagaatggagacaaggaccctgacctgaaggagcccagcaaccggctgcccaaggtgtacaagtggagcttccagatgtctgacctggagaacatgaccagcgctgagcgcatcaccatcctgcaggagaagctgcaggagatcaggaagcactacctgagcctgaagtctgaggtggccagcattgacagaagaaggaagaggctgaagaagaaggagcgggagagcgctgccaccagcagcagcagcagcagccccagcagcagcagcatcacagctgctgtgatgctgaccctggccgagcccagcatgagcagcgccagccagaatggcatgtctgtggagtgcaggtag

SEQ ID NO: 191019 - DNA, 3462 bp, Artificial Sequence
  derived and/or modified sequence
atgaaggccctggatgagcccccctacctgactgtgggcacagatgtgtctgccaagtacagaggagccttctgtgaggccaagatcaagacagccaagaggctggtgaaggtgaaggtgaccttcagacatgacagcagcacagtggaggtgcaggatgaccacatcaagggccccctgaaggtgggcgccatcgtggaggtgaagaacctggatggagcctaccaggaggccgtcatcaacaagctgacagatgcctcctggtacacagtggtgtttgatgatggagatgagaagaccctgcggcgcagcagcctgtgcctgaagggggagcggcactttgctgagagcgagaccctggaccagctgcccctgaccaaccctgagcacttcggcacccctgtgattggcaagaagaccaacagaggccgccgcagcaaccacatccctgaggaggagagcagcagcagcagcagtgatgaagatgaagatgacaggaagcagattgatgagctgctgggcaaggtggtgtgtgtggactacatcagcctggacaagaagaaggccctgtggttccctgccctggtggtgtgcccagactgcagtgatgaaattgctgtgaagaaggacaacatcctggtgcgctccttcaaggatggcaagttcacctctgtgcccaggaaggatgtgcatgagatcaccagtgacacagcccccaagccagatgctgtgctgaagcaggcctttgagcaggccctggagttccacaagagcaggaccatcccagccaactggaagacagagctgaaggaggacagcagcagcagcgaggccgaggaggaggaggaggaggaggatgatgagaaggagaaggaggacaacagcagcgaggaggaggaggagattgagcccttccctgaggagcgggagaacttcctgcagcagctgtacaagttcatggaggaccggggcacccccatcaacaagaggcctgtgctgggctacagaaacctgaacctcttcaagctgttccggctggtgcacaagctgggcggctttgacaacatcgagagcggggctgtgtggaagcaggtgtaccaggacctgggcatccctgtgctgaacagcgctgctggctacaacgtgaagtgtgcctacaagaagtacctgtatggctttgaggagtactgccgcagcgccaacatcgagttccagatggccctgcctgagaaggtggtgaacaagcagtgcaaggaatgtgaaaatgtgaaggagatcaaggtgaaggaggagaatgaaacagagatcaaggagatcaagatggaggaggagaggaacatcatcccccgggaggagaagcccattgaagatgaaattgaaagaaaagaaaacatcaagcccagcctgggcagcaagaagaacctgctggagagcatccccacccacagcgaccaggagaaggaggtgaacatcaagaagccagaagataatgaaaacctggatgacaaggatgatgacaccaccagggtggatgagagcctgaacatcaaggtggaggccgaggaggagaaggccaagtctggagatgagaccaacaaggaggaggatgaagatgatgaggaggccgaggaggaggaggaggaggaggaggaggaggaggatgaagatgatgatgacaacaatgaggaggaggagtttgagtgctacccacctggcatgaaggtgcaggtgcgctatggccggggcaagaaccagaagatgtatgaggccagcatcaaggacagtgatgtggagggcggggaggtgctgtacctggtgcactactgcggctggaatgtgcgctatgatgagtggatcaaggctgacaagatcgtgcggcctgctgacaagaatgtgcccaagatcaagcacaggaagaagatcaagaacaagctggacaaggagaaggacaaggatgagaagtacagccccaagaactgcaagctgcggcggctgagcaagccacccttccagaccaaccccagccctgagatggtgtccaagctggacctgacagatgccaagaacagcgacacagcccacatcaagagcattgagatcaccagcatcctgaatggcctgcaggccagcgagagcagcgcagaagattctgagcaggaggatgagcggggggcccaggacatggacaacaacgggaaggaggagagcaagattgaccacctgaccaacaacagaaatgacctgatcagcaaggaggagcagaacagcagcagcctgctggaggagaacaaggtgcatgctgacctggtgatcagcaagcctgtgtccaagagccctgagcggctgaggaaggacatcgaggtgctgtctgaggacacagattatgaagaagatgaggtgaccaagaagaggaaggatgtgaagaaggacaccacagacaagagcagcaagccccagatcaagaggggcaagaggcgctactgcaacacagaggagtgcctgaagacaggcagccctgggaagaaggaggagaaggccaagaacaaggagagcctgtgcatggagaacagcagcaacagcagcagtgatgaagatgaggaggagaccaaggccaagatgacccccaccaagaagtacaacggcctggaggagaagaggaagagcctgcggaccaccggcttctacagcggcttcagcgaggtggccgagaagaggatcaagctgctgaacaacagtgatgagcggctgcagaacagccgggccaaggacaggaaggatgtgtggagcagcatccagggccagtggcccaagaagaccctgaaggagctgttcagtgacagcgacacagaagctgctgccagccccccccacccagcccctgaggagggcgtggccgaggagagcctgcagacagtggccgaggaggagagctgcagccccagcgtggagctggagaagcccccacctgtgaatgtggacagcaagcccatcgaggagaagacagtggaggtgaatgacaggaaggccgagttccccagcagcggcagcaacagcgtgctgaacaccccacccaccaccccagagagccccagctctgtgacagtgacagagggcagccggcagcagagctctgtgacagtgtctgagcccctggcccccaaccaggaggaggtgcgcagcatcaagtcagaaacagacagcaccatcgaggtggacagcgtggccggggagctgcaggacctgcagagcgagggcaacagcagccctgctggctttgatgcctctgtgagcagcagcagcagcaaccagcctgagcctgagcaccctgagaaggcctgcaccggccagaagagggtgaaggatgcccagggcggcggcagcagcagcaagaagcagaagaggagccacaaggccaccgtggtgaacaacaagaagaagggcaagggcatcctgccccactag

SEQ ID NO: 191020 - DNA, 1968 bp, Artificial Sequence
  derived and/or modified sequence
atgaaggccctggatgagcccccctacctgactgtgggcacagatgtgtctgccaagtacagaggagccttctgtgaggccaagatcaagacagccaagaggctggtgaaggtgaaggtgaccttcagacatgacagcagcacagtggaggtgcaggatgaccacatcaagggccccctgaaggtgggcgccatcgtggaggtgaagaacctggatggagcctaccaggaggccgtcatcaacaagctgacagatgcctcctggtacacagtggtgtttgatgatggagatgagaagaccctgcggcgcagcagcctgtgcctgaagggggagcggcactttgctgagagcgagaccctggaccagctgcccctgaccaaccctgagcacttcggcacccctgtgattggcaagaagaccaacagaggccgccgcagcaaccacatccctgaggaggagagcagcagcagcagcagtgatgaagatgaagatgacaggaagcagattgatgagctgctgggcaaggtggtgtgtgtggactacatcagcctggacaagaagaaggccctgtggttccctgccctggtggtgtgcccagactgcagtgatgaaattgctgtgaagaaggacaacatcctggtgcgctccttcaaggatggcaagttcacctctgtgcccaggaaggatgtgcatgagatcaccagtgacacagcccccaagccagatgctgtgctgaagcaggcctttgagcaggccctggagttccacaagagcaggaccatcccagccaactggaagacagagctgaaggaggacagcagcagcagcgaggccgaggaggaggaggaggaggaggatgatgagaaggagaaggaggacaacagcagcgaggaggaggaggagattgagcccttccctgaggagcgggagaacttcctgcagcagctgtacaagttcatggaggaccggggcacccccatcaacaagaggcctgtgctgggctacagaaacctgaacctcttcaagctgttccggctggtgcacaagctgggcggctttgacaacatcgagagcggggctgtgtggaagcaggtgtaccaggacctgggcatccctgtgctgaacagcgctgctggctacaacgtgaagtgtgcctacaagaagtacctgtatggctttgaggagtactgccgcagcgccaacatcgagttccagatggccctgcctgagaaggtggtgaacaagcagtgcaaggaatgtgaaaatgtgaaggagatcaaggtgaaggaggagaatgaaacagagatcaaggagatcaagatggaggaggagaggaacatcatcccccgggaggagaagcccattgaagatgaaattgaaagaaaagaaaacatcaagcccagcctgggcagcaagaagaacctgctggagagcatccccacccacagcgaccaggagaaggaggtgaacatcaagaagccagaagataatgaaaacctggatgacaaggatgatgacaccaccagggtggatgagagcctgaacatcaaggtggaggccgaggaggagaaggccaagtctggagatgagaccaacaaggaggaggatgaagatgatgaggaggccgaggaggaggaggaggaggaggaggaggaggaggatgaagatgatgatgacaacaatgaggaggaggagtttgagtgctacccacctggcatgaaggtgcaggtgcgctatggccggggcaagaaccagaagatgtatgaggccagcatcaaggacagtgatgtggagggcggggaggtgctgtacctggtgcactactgcggctggaatgtgcgctatgatgagtggatcaaggctgacaagatcgtgcggcctgctgacaagaatgtgcccaagatcaagcacaggaagaagatcaagaacagcgtgtacaagaagaagaagaagaagaagaacaagtag

SEQ ID NO: 191021 - DNA, 3939 bp, Artificial Sequence
  derived and/or modified sequence
atgaaggccctggacgagcccccctacctgaccgtgggcaccgacgtctcagccaagtacagaggtgccttctgcgaggccaagattaaaaccgccaagcgcctggtaaaggttaaagtcactttccgacatgattccagtacagtagaggttcaagacgatcatataaagggacctcttaaggttggtgccatcgtcgaagtcaagaatttggacggggcctaccaggaggcagttatcaacaagctcacagacgcgagctggtatactgtggtatttgatgacggcgacgagaagacactgcgtcgctcctctctatgccttaaaggggagcgacattttgccgagtccgaaaccctggatcagttacctctgactaatcctgagcactttggaacacccgttattgggaagaaaacgaacagaggtaggaggtcaaaccatatccctgaggaagaaagttcttctagtagctctgatgaagacgaggacgacaggaaacagattgacgagctccttggtaaagtcgtctgtgtcgactacatttccctggacaaaaaaaaggccctttggtttccagctttggtcgtttgtccagattgtagtgatgagatagccgtgaagaaagacaacatccttgttcgttctttcaaagacgggaagtttacgagtgtcccgcgtaaagatgtacacgagataacctctgatacagccccaaaaccagatgcagtccttaaacaggcgttcgagcaggcattggaattccataagtctagaacgatcccagcaaattggaagaccgaactgaaggaagactccagcagtagcgaggctgaagaagaggaagaggaggaagacgatgagaaggagaaagaagacaacagcagtgaggaagaggaagagatcgagcctttccctgaagagcgagagaattttctccaacaactctacaagtttatggaggacagagggacaccaattaataaacggccagtgctggggtacaggaacttaaatctttttaagctctttcgactagtacacaagctggggggattcgacaacatcgagtctggggccgtgtggaagcaggtctatcaagacctgggaatcccagtgttaaacagcgctgcaggctataatgttaagtgcgcctacaaaaaatatctctatggatttgaggaatactgccgcagcgcaaatatcgagttccagatggctctgcctgaaaaagtggtcaataagcagtgcaaggagtgtgagaatgtcaaggaaattaaggtcaaagaggaaaacgagactgagattaaggaaataaaaatggaagaagagagaaacatcatcccccgggaagagaaacccattgaggatgaaattgagcggaaggagaatatcaaaccatccttaggaagtaagaagaacttgctggagtctattccaacgcatagcgaccaagagaaagaggtgaatatcaaaaagcctgaggacaacgaaaaccttgatgataaggatgatgacacgacccgggtggacgagagtctgaacatcaaggtggaggcagaggaggagaaggccaagtctggggatgagactaacaaggaagaggatgaagacgacgaagaagctgaagaagaagaggaggaagaggaagaagaagaggacgaagacgatgatgacaacaacgaagaggaggaattcgagtgctatcccccaggcatgaaagttcaagtaaggtatggcagagggaaaaaccaaaaaatgtatgaggctagtataaaggactccgacgttgagggaggagaggtactgtacctagtccactactgcggctggaacgttcgttacgacgaatggatcaaggcggataagatcgtgcggcctgcggacaagaacgtacctaagatcaaacacagaaagaagataaagaacaagttagataaagaaaaagacaaggacgaaaagtacagtcccaaaaactgcaagctcaggagactgtccaagccccccttccagacgaatccttcaccggaaatggtcagcaagctggacttaactgacgctaagaactcagacacagcccatatcaagtcaattgaaattaccagcatacttaacggactgcaggctagcgagtcatccgctgaggactccgaacaggaggacgagcggggagcccaggatatggacaacaatggaaaggaggagtctaaaatcgatcacctgacaaacaaccgaaatgatttgataagcaaggaggagcaaaacagcagcagccttctggaagagaacaaggtgcacgctgacctggtgatttccaagcctgtgagtaagtctcctgagcggcttcgtaaggacatcgaagttttgtctgaggataccgactacgaagaagatgaggttaccaaaaagaggaaggacgtgaagaaggacaccaccgacaagagttccaaaccccagataaaacggggcaagaggcgctactgtaacactgaggagtgcctgaagactggatcacccggcaagaaagaagaaaaagccaagaacaaggaaagtctctgcatggagaatagttccaactccagctctgatgaagacgaggaggagacaaaagccaagatgactcctaccaagaagtacaatggacttgaggagaagcgcaaatccctgcggactactggattttactccgggttctcagaggtagccgagaagaggatcaaactactgaataactctgatgagcggctgcagaactccagggccaaggaccgcaaggacgtgtggagttctatccaaggccaatggcccaagaaaactttaaaggaactgttttctgactcagataccgaagccgcagcctccccaccacacccggcacctgaggaaggtgtggctgaggagtcacttcagaccgtagcagaggaggaaagctgcagcccatctgtggagcttgagaaacctccccctgtgaatgtagactccaagccaatcgaggagaagacagtcgaggttaatgacaggaaggcagaatttccttccagtgggtccaacagcgtgttaaatacccctcccactacacctgagtccccctcctccgtaaccgtaactgagggctctcggcagcagtcatctgtgacagtgtctgagcccctagctccgaatcaggaggaggtcagatctataaaaagtgaaaccgacagcactattgaggttgattccgtggctggcgagctccaggatctccagtcagaaggaaatagctcccccgccggctttgacgcatctgtcagtagctcttcctccaaccagccagaacctgagcatcccgaaaaggcctgcactggccagaagcgagtcaaggatgcccaaggcggcggatcaagttctaaaaagcaaaagaggtctcacaaagcgacagtcgtgaataacaagaaaaagggaaaaggaaccaactcgtcagatagcgaggagctgtcggcaggggagtcgataactaagagccagcctgtgaagtcagtgagtacaggaatgaaatcccacagtaccaagagcccagccaggactcaaagcccaggaaagtgcggtaaaaatggagataaggacccggatctgaaggagcccagcaataggctgcctaaggtctataaatggtcttttcagatgtccgatttggaaaacatgactagcgctgaaagaattactatcctccaggagaagcttcaagaaattcggaaacactacttgagcttgaaaagtgaggtcgcaagtatagatcggcgcagaaaacgtctgaagaagaaggagcgggaatcagccgccactagcagctcttcatcgtctccctccagctcctccattactgctgccgtcatgctgacgctggccgagccatccatgtcatcagccagccaaaatggcatgagtgtggagtgtcggtag

SEQ ID NO: 191022 - DNA, 3939 bp, Artificial Sequence
  derived and/or modified sequence
atgaaggccctggacgagcccccctacctgaccgtgggcaccgacgtgtctgccaagtaccgaggcgctttctgtgaggccaagatcaagaccgctaagagactcgtgaaagtaaaggtaaccttccgtcatgattcttcgaccgtggaagttcaggacgaccatataaaaggcccactgaaggtaggggccatagttgaggtcaaaaatctggatggggcttatcaggaagctgtgattaataagcttaccgacgcatcttggtacactgtggtattcgacgacggagacgaaaagacactgagaaggtcaagtctctgcctgaagggagaacgtcacttcgccgaatccgaaaccctagaccaactcccattgaccaatccagaacactttgggactccggtcataggtaagaaaaccaaccgcgggaggcgttcaaatcatatcccagaggaggagtcctcctcttcatcatcagacgaggacgaggacgatcgtaagcagattgatgaactgttggggaaagttgtttgcgttgattatatctctttagataagaagaaggccctgtggtttcccgctctggtagtgtgccctgactgtagtgatgagatcgcagtgaaaaaggacaatatactcgttcgcagtttcaaagacggtaaattcacgagcgtccctaggaaggatgtgcacgagatcactagtgatacagcacctaagccagacgccgtgcttaaacaggctttcgaacaggccctcgaattccacaaaagcaggaccatacctgcaaactggaaaaccgagcttaaggaggatagctcttcatctgaagctgaagaggaagaggaggaggaagatgacgagaaggaaaaagaagataactcctcggaagaagaggaagagattgaaccttttcccgaggaacgcgaaaattttctgcaacagctttataaatttatggaggatcgcggtacccctatcaataagcggcctgtgcttggttatcggaacctgaatctgttcaaactgtttcgcttagtgcacaagctaggtggctttgataacatcgaaagtggcgccgtgtggaaacaggtttaccaagacctgggtatccccgttctaaacagcgctgcgggatacaacgtaaaatgtgcctacaagaaatacctctatggcttcgaggagtactgtcgcagcgctaacatcgaattccagatggcgctgcccgagaaagtggtgaacaaacagtgcaaagaatgcgagaacgtgaaggagattaaggttaaggaagaaaatgagactgagataaaggaaatcaagatggaagaggagcgcaatatcatcccacgtgaggaaaagccaatagaagatgagatagagcgtaaggagaacatcaagccatccttgggttcaaagaaaaatctgctagagtctatcccgactcactccgatcaggaaaaggaggtgaacattaaaaagccggaggataatgaaaacttggacgacaaggacgacgacacaactcgggtcgatgaatccctgaatatcaaagtggaggcagaagaggagaaggctaaatctggggatgaaacgaacaaggaagaggatgaagacgatgaagaggccgaagaagaagaagaagaggaggaggaagaagaggacgaggacgacgacgataacaacgaggaagaagagttcgaatgttacccacccggtatgaaggttcaggtacgatacggacgaggaaaaaaccaaaagatgtatgaagcctctattaaagacagtgacgtagaaggcggcgaggtgctgtacctcgtgcattattgcggatggaatgtgcgttatgacgaatggattaaagctgacaagatcgtgcgcccagcggacaagaatgtccccaaaattaagcatcgcaaaaagattaagaataagcttgacaaggaaaaggacaaagacgaaaaatacagccctaagaactgcaagttgagaaggctgagtaaaccgccctttcagacgaaccctagccccgagatggtctccaagctggatctgactgacgcaaaaaactctgatacagcgcacatcaaatcgatcgagatcaccagtatcttgaatggactccaagctagcgagtcctctgcagaagattccgagcaggaggacgaacggggtgcccaagacatggacaataacggcaaagaggagtctaagatcgaccacctgactaacaatcgcaatgatttgatttctaaggaggagcagaacagttccagcctcctggaggagaacaaggtacacgccgatctcgtgatatctaaaccagtcagtaaaagcccagagagactccgaaaagatattgaagtactctccgaagataccgactatgaggaagacgaggtgacaaagaagaggaaggacgtgaagaaggataccacagacaaatcctccaagcctcagataaagcgaggcaagcgccggtactgcaatactgaagaatgtctgaagactggcagcccaggcaaaaaggaggagaaagccaaaaacaaggagtctctgtgcatggagaactcctcaaactcatcgtcggacgaggacgaagaggaaacgaaagccaaaatgacaccaacaaaaaagtataacggccttgaagagaaacgaaagtcactccgcaccaccggattctactctgggttttctgaggtggctgaaaaaagaatcaagctgcttaataacagtgacgaacgcctgcaaaattcgagagctaaagaccgcaaggatgtctggtctagcatccagggccagtggcctaagaaaaccctgaaagagctcttttctgattccgacacagaggccgccgccagccctccacacccagccccagaagaaggcgtggcagaggaaagcctgcagacggtggctgaggaagaatcctgttcgccctcagtggaacttgaaaagccaccacctgtcaacgttgactcgaaacccattgaagagaagactgtggaggtcaacgatcgaaaagccgagttcccttcatccggtagcaatagcgtgctgaacacgccccctacaacccccgagtcacctagctctgttaccgttactgagggcagccgccagcagtcctccgttactgtgtcagaacctctggcgcccaaccaggaagaggtgcgttctatcaaaagcgaaactgactctacaatagaagttgactctgttgccggcgaattgcaggacctgcagtctgagggtaattcttctcccgctggctttgatgcatccgtttcatcctctagcagcaaccaacctgagcccgagcaccccgagaaggcttgtaccggccagaagcgcgtcaaggatgctcagggtggaggcagctctagtaagaaacagaagcgatcgcacaaagcgactgtcgtcaataacaagaagaaaggcaagggcacaaatagctccgactccgaggaactcagcgccggggaatcgatcacaaagtctcagcccgtaaaatccgtgtccaccggcatgaagagccactcaacaaagtctcccgcccgcacgcaaagccccggaaaatgcggcaagaatggggataaggacccagacctgaaggaaccatccaaccgcttgcccaaagtgtataagtggtcattccaaatgtctgatctggaaaatatgacatccgctgagagaattaccattttacaagagaagctgcaggaaatacgcaaacattatctgtccctgaagtccgaagtggcttccattgacagacggcgcaagagactgaagaagaaagagagggaaagcgccgccacttctagctcatcttcatctcccagttccagcagtatcaccgcagctgtgatgctgaccctggctgaaccgagtatgtcttctgccagccagaacgggatgtctgtggagtgccggtag

SEQ ID NO: 191023 - DNA, 3462 bp, Artificial Sequence
  derived and/or modified sequence
atgaaggccctggacgagcccccctacctgaccgtgggcaccgacgtcagcgccaaatatcgcggggctttttgcgaggcaaagattaaaactgccaagagactcgtgaaggtgaaagtgactttccgtcacgactcaagcactgtggaggttcaggatgatcacatcaaagggcctcttaaggttggggcaatcgtcgaggtgaaaaatctggacggggcctaccaggaagcggtcatcaataagctcaccgacgccagctggtataccgtggtcttcgacgacggggatgaaaagacactgcgtcgcagcagcctttgtttaaagggcgagcgccatttcgctgagtccgagacacttgaccaacttccactaacgaatcccgagcacttcggcaccccagtgataggtaaaaagacaaatagaggacgtcgaagcaaccacatcccagaagaggagagcagttcctccagctccgacgaggacgaggatgatcgcaagcaaattgacgagctcctgggaaaggttgtgtgtgttgactacatctcattagataagaaaaaagctctgtggtttccagctttggtcgtctgtcctgactgctcagatgagatcgccgtgaaaaaagacaatatcctggtccggagttttaaggacggcaaatttacatcagtgccgagaaaggatgttcacgagatcacctccgataccgcacccaagccagacgccgtgctcaaacaggcttttgagcaggctctcgagtttcacaaatcccgtacaatacccgcgaattggaaaaccgagttgaaggaggattctagctcttcagaagctgaggaagaggaagaagaggaggacgatgaaaaagagaaggaggataactcatctgaagaagaggaggagatagaacctttccccgaagagagagaaaacttcctgcagcaactgtataaatttatggaggatagaggaacccctataaacaagcgccctgttttagggtatagaaacctgaacctttttaagctcttccgccttgtccataagctcggaggatttgacaacatcgaaagcggcgcagtctggaagcaggtttaccaggatcttgggatccccgtgctgaactccgccgcgggctataatgtgaagtgcgcatataaaaaatacctgtacggcttcgaggaatattgtaggagcgctaacatagaatttcagatggcgctgcccgaaaaggtcgtgaacaaacagtgtaaggaatgtgagaacgtgaaagagattaaagtaaaagaagaaaacgagacagagattaaagaaattaaaatggaggaggaaaggaatattataccccgagaggaaaaacccatagaagacgagattgagcggaaggagaacattaaacctagcctcgggagcaagaaaaaccttctggagtcgatacccacgcactcggatcaggagaaggaagtcaacatcaaaaaacccgaggataacgaaaatttggatgacaaagatgacgatacaaccagggtggatgaatccctgaatattaaagtcgaggccgaagaagaaaaagctaagtcaggcgacgaaaccaataaggaggaagatgaggatgatgaggaagctgaggaagaggaagaggaagaagaggaagaggaggatgaagacgatgacgataacaatgaagaggaggagttcgagtgctaccccccaggaatgaaggtccaagtccggtatgggcgcggcaagaatcaaaaaatgtatgaagcaagcattaaagactcggatgtagagggaggtgaggtgctttacctggtgcattattgtgggtggaacgtgcgatatgatgagtggataaaagctgacaagatagtgagaccagctgacaagaacgtcccaaaaatcaagcacagaaagaaaatcaaaaacaagctagataaagagaaggataaagatgagaagtacagtcccaagaactgtaaactgcgccggctcagcaagccaccctttcaaacaaatcccagtccagagatggtgtcaaagttggacttgacagatgctaaaaattccgacaccgcgcacataaagagcatcgagattacctccatcctgaatggtcttcaagcctcagaatcgtctgctgaggacagtgagcaggaagatgagagaggcgcccaggacatggacaataatggaaaagaagagagtaagatcgatcacctgacaaataacaggaacgatttgatttcaaaggaggagcaaaattcctcatccctgttggaagaaaacaaagtccatgccgatctcgtcattagtaagccagtgagcaagtctcccgagagactcagaaaggacattgaggtattatctgaagacactgactacgaggaggacgaggtgacgaaaaagaggaaggacgtaaaaaaggatactaccgacaaatcatccaaaccacaaatcaaacgcggtaaacgaagatattgtaatacagaagagtgcctcaaaaccggaagtccagggaagaaagaggagaaagctaaaaataaggagtctctgtgtatggaaaattcgtcaaattcaagttcagatgaggacgaggaggagactaaggccaagatgactcctacaaagaaatacaacggactggaggagaaacgcaagtcactgcggacaacaggattctatagtggcttcagcgaagtcgccgaaaagaggattaagttgctgaacaactccgatgaacggttacagaattcccgagcaaaagaccgcaaggatgtgtggagttccatccagggtcagtggcctaaaaagaccctgaaggagcttttctccgattccgacactgaggccgcagcctccccgccacatcccgcccctgaagaaggcgtggctgaagaatcccttcagacagtggctgaagaagagagctgctcacccagtgttgagctcgagaagcctccacctgttaatgtggattctaaacccatagaagaaaagactgtcgaagtgaatgatagaaaagccgaattcccctcgtctggtagtaattctgtgctcaatacaccgcccacaacgccagaatccccgagttcggttacggtaaccgaaggctcccgccagcagagtagcgtgactgtgtccgaacccctggcccctaaccaagaggaggtgcgtagtatcaagtccgaaacagattctacaatcgaagttgattcagttgctggagagctccaggacttacagagtgagggcaactctagtcccgccggttttgacgcatcagtcagtagctcttcttctaatcagcctgaacccgagcacccagagaaggcctgcactggccagaaacgggtcaaagacgcacagggtggaggctcttcatccaaaaagcagaaacggagtcacaaagctaccgtggttaataacaagaaaaaggggaagggcatccttccccattag

SEQ ID NO: 191024 - DNA, 1968 bp, Artificial Sequence
  derived and/or modified sequence
atgaaggccctggacgagcccccctacctgaccgtgggcaccgacgtgagcgcaaaataccgcggggcattttgtgaggcgaagatcaagactgccaagcggctcgtcaaggtgaaagtgacctttcgccacgattcctccactgtcgaagtgcaggacgatcacattaaggggccacttaaggtgggggctattgttgaggtgaagaaccttgatggcgcatatcaagaggccgtcatcaataagctaacggatgcttcttggtatactgttgtgtttgatgatggcgatgaaaaaacactgcggcggtcatctttgtgtctcaaaggggaaaggcactttgccgagtcagaaacgctggaccagctccctttgacaaatcctgagcacttcggaaccccagtgatcggtaagaaaacaaacaggggtagaagatcaaatcatatccctgaagaagagtcctctagcagcagctcagacgaagatgaggatgataggaaacagattgacgaactgctcggtaaggtagtatgcgttgactacatctcactggataagaagaaagccttgtggtttcccgctctagtggtgtgccctgactgcagtgatgagattgccgtgaagaaagacaacattcttgtgcggtcatttaaagatgggaagtttactagtgtgccaagaaaagatgtccatgagataacatctgacacggcacctaagccagatgctgtgctaaagcaggcattcgaacaagcactggagttccacaaatccaggaccatccccgcgaattggaaaaccgagctgaaagaagactctagttctagtgaggcagaggaagaggaggaagaggaagatgatgagaaagagaaagaagataactcgtccgaagaggaagaagaaatcgagcctttccccgaggaacgtgaaaacttcctacagcagttatacaaatttatggaggaccgggggactcctatcaataagcgaccggttctgggttaccgcaacttgaatcttttcaaactgtttcgactcgtccacaagttgggagggttcgataatatagaatctggcgctgtttggaagcaagtctaccaagacctcggtatccctgtgctcaatagcgccgccggttacaatgtgaaatgcgcctacaaaaagtacctgtacggattcgaggagtactgtcggtcggccaacatagagtttcaaatggcgctgcctgaaaaggttgttaataagcagtgtaaggagtgtgagaacgtgaaggagattaaagtgaaagaagaaaacgaaaccgaaatcaaagaaattaagatggaggaagagcgaaacatcatccccagagaagaaaagccgattgaagacgagatcgagcgcaaggagaacatcaaaccctcattgggtagcaagaagaatctgctggagtccattccaactcattccgatcaggagaaggaggtgaacataaagaaaccggaagacaatgagaacctcgatgataaagatgatgatacaacaagagtcgatgagtccctgaacatcaaggtggaggccgaggaggagaaagcaaagtctggtgatgaaaccaataaagaggaggatgaggatgacgaggaggccgaagaagaggaagaagaggaagaggaagaggaggacgaggacgacgatgataataatgaggaggaggaatttgagtgttacccccccggtatgaaggtccaggtgcgatatggcaggggcaagaatcaaaaaatgtatgaggcctctatcaaagattcagatgttgaaggaggggaagtgttatacctcgtacattactgcggttggaatgtgcgatacgacgagtggattaaggctgacaagattgtgcgacctgccgataaaaatgtgcccaagatcaagcatcgcaagaaaatcaagaacagcgtgtataaaaaaaagaagaaaaagaaaaacaaatag

SEQ ID NO: 191025 - DNA, 3939 bp, Artificial Sequence
  derived and/or modified sequence
atgaaagccctggatgagcccccttacctcactgtaggcacagacgtgagtgccaaataccgcggtgccttctgcgaggcgaagattaagaccgccaagcgtttggtgaaggtgaaggtgacctttagacacgacagttcgactgtggaggttcaagatgatcacattaagggtccgctgaaggtcggagctatcgtggaggttaaaaacctcgacggcgcataccaagaagctgtgattaataagcttactgatgccagttggtatacagtagtgttcgatgatggagacgaaaagactttgaggagaagctccctgtgcctcaaaggagaaagacatttcgccgaatctgaaaccctggaccaactgcctctgactaacccagaacacttcggtacaccagtcatcggtaagaagacgaataggggtcgtcgttccaaccacatcccggaagaagagtcatctagctcttccagcgacgaggacgaagacgatagaaagcagatcgatgagttactgggcaaggttgtctgcgttgactatatttctctagacaagaagaaggcgttatggttccctgctctcgtcgtgtgtccggactgttccgacgagatcgccgttaagaaagacaacatccttgtaagatcttttaaggacggcaagttcacctctgtgccacgcaaggatgtacatgagatcacaagcgacactgctccgaagccggacgctgtgctcaagcaggccttcgaacaggcactggaatttcacaagtcaaggacaatccccgctaactggaagacggagctgaaggaagactcctcctcgagcgaggccgaagaggaagaagaagaagaagacgatgaaaaagaaaaagaagataacagcagcgaagaggaggaagagatcgaaccgttccccgaggagcgggagaattttctacagcagttatacaagtttatggaggatagaggaactccaattaacaagaggccggtcttaggctatcgcaacctcaacctgtttaaattgttccggctcgtgcataagctcggcggtttcgacaacattgagtccggtgctgtgtggaagcaagtctatcaagatttaggtattccagtgctgaattctgcagccggatacaatgtgaaatgcgcctataaaaagtatctatacggttttgaagaatactgcagaagcgcaaacattgaatttcagatggctctgcccgaaaaagtggttaataagcagtgcaaagagtgtgagaatgtcaaggagatcaaggtcaaagaagagaatgagaccgaaatcaaagagattaaaatggaggaggagcgcaacataattcctcgagaggagaagcccattgaagatgaaattgagaggaaggaaaatattaagccaagcctgggttcaaaaaaaaacctgctggaaagcatccctacgcactccgatcaggaaaaggaagtgaacattaaaaaaccagaggacaacgagaacttggatgacaaggatgacgatactacccgagtggacgagtctctaaacatcaaagtggaggctgaagaagagaaagcaaagagcggagatgagacgaataaggaagaagacgaggatgatgaagaagccgaagaagaggaggaggaggaagaggaggaggaggatgaggatgacgatgataacaacgaggaggaggagtttgaatgctatcctcctggaatgaaagtccaagtgcgctatggtcgagggaaaaaccaaaaaatgtacgaagcctctatcaaagatagcgacgtagagggcggtgaagtcctctacctggtgcattactgcggatggaatgtccggtacgacgagtggataaaggccgataagattgtgagaccagcagataagaatgtaccaaagatcaagcacaggaaaaaaataaagaacaaactggataaggaaaaagacaaagacgagaagtactcccctaagaattgtaagttacgacggttgtcaaagcctccatttcaaacgaatccatccccagaaatggtaagcaaattggatctgacagatgccaagaatagtgacacagcgcatatcaagagcatagaaataacttccatcctgaacggcttgcaggcgtccgagtcaagtgcggaagattcggagcaggaggatgagcggggagctcaagacatggataataacggaaaagaggagtctaaaattgaccacctcaccaacaacaggaacgatctgatctctaaggaggaacaaaattctagttccctcctcgaggaaaacaaagtgcacgcagatcttgtgatttctaaacctgtgagcaagtctcccgaacgcttgcgcaaggacatcgaagtcctgtcagaggatacagattacgaagaggacgaggtgactaagaagaggaaggatgtcaaaaaagatacaacggataagtcctcaaagccacagataaaacggggaaaacgccgatattgcaacacagaagagtgtctcaagacaggatcaccagggaagaaagaagaaaaggcaaagaataaagagtccctgtgtatggaaaattcttcaaatagctcatctgatgaagacgaggaagagactaaagccaagatgaccccaacaaaaaagtataacggccttgaagagaagcgcaaaagccttagaacaacgggtttttatagcggattcagtgaggtggccgaaaaaagaattaagttactgaacaactctgatgagcggctgcagaacagccgagccaaagaccgaaaagatgtgtggagctccattcaaggacaatggccaaaaaagactctgaaagaattattctctgactctgataccgaagctgctgccagtccaccccatcccgctcccgaagaaggtgttgccgaagaatccctgcagaccgttgccgaggaggaatcttgcagcccaagcgttgaactggaaaaacccccacctgtcaacgtagatagtaagcctattgaagagaaaacagtggaagtgaacgaccggaaagccgagtttccttcgtctggttctaattccgtgctaaatactcccccaactacgcccgaaagtccatcctctgtgaccgtcactgaggggtcccgacagcagagtagtgtgaccgtctctgaaccactcgctcccaaccaggaggaggtgagatctatcaagagtgaaactgactctacgatcgaggtcgactcggtggccggtgagctgcaggacctgcagtctgaggggaatagctcaccagcaggcttcgacgcgtctgtgtccagcagtagttccaaccagccagaacctgaacatccagaaaaggcatgtactggccagaagcgcgtgaaggatgcccagggtggaggctcgagtagcaaaaagcaaaaacggagccataaggctacagtggttaacaataagaagaagggtaaaggtactaattcttccgattccgaggaactgagcgccggagagtctatcacgaaatcccagcctgtcaaatccgtgtctaccgggatgaagtcccattctacaaagagcccagcacgcactcagagtcccggaaagtgcggaaaaaacggggacaaagatcccgatctgaaggaaccaagcaacaggctgcccaaggtgtataagtggtcctttcagatgtctgaccttgagaacatgacatccgcagaaagaatcacaattctgcaggaaaaattacaggagattcggaagcactatctgtcactgaaatccgaggtcgccagcatcgaccgcagacggaagaggcttaagaaaaaagaacgtgagagcgccgctactagctcctcatcaagcagtccctcttcatcttccataacggctgccgtcatgcttacattggcagagccgtccatgagtagtgcctcacagaacgggatgagtgtggagtgtcgctag

SEQ ID NO: 191026 - DNA, 3939 bp, Artificial Sequence
  derived and/or modified sequence
atgaaggcactggatgagccgccatacctgactgtgggtaccgacgtgagcgctaagtaccggggagctttctgcgaggcaaaaatcaaaactgctaagcggctcgttaaggtgaaggtgactttccgccatgattccagcaccgtcgaggtgcaggacgatcatattaaaggcccactgaaggtgggtgcaattgtcgaggtaaagaacctcgatggcgcatatcaggaagccgttattaataagctgaccgatgcctcctggtacacggtggtgttcgatgacggcgatgagaaaacgctcaggaggtccagcctgtgtctaaaaggagagaggcattttgcagagagtgagacgctggatcagctgccactgacaaaccccgagcattttggcacaccggtaattgggaagaagacaaaccgcggtaggagatctaatcacatccctgaagaagagtcatcatcctcctctagtgatgaagacgaagatgaccggaagcagatcgatgagctgctgggtaaggtggtttgcgtcgattacatttctcttgacaaaaaaaaagcactgtggttccccgctcttgtggtttgccctgattgcagtgatgagatcgcagtgaagaaagacaacattctggtgcgcagttttaaggacggtaagtttacctccgtgcccagaaaggatgtccatgagatcaccagtgacactgcgcctaagcccgacgcagttctgaaacaggctttcgagcaagctctggagttccataagtctaggaccatccctgctaactggaagaccgaactgaaagaagacagtagttcctctgaggccgaagaggaggaggaggaagaggatgacgaaaaggagaaagaagacaacagctcagaggaggaggaagaaatagaacccttccctgaggaacgggaaaatttcttgcagcagctatataagttcatggaggaccggggaactccaatcaataagagacccgtccttgggtatagaaatctgaatctgtttaaactgttcagactcgtccataaactcggaggctttgataacattgaatcgggcgctgtttggaaacaggtctatcaggacctcgggatccctgtcctgaattccgccgctggctacaacgtcaaatgtgcatacaagaagtacctctacggttttgaggagtattgtcgctccgcaaatattgaatttcagatggctctccctgagaaagtcgttaataagcagtgcaaagagtgcgagaacgttaaggaaattaaggtcaaggaggagaacgagacggagataaaggaaattaagatggaggaggagaggaatattattcccagggaggagaagccaattgaagatgaaattgaacggaaagaaaacatcaaaccaagcctcgggtccaagaaaaacttgctcgagagcatcccaacccactccgaccaggaaaaagaagtgaatatcaaaaaaccggaggacaacgaaaacctagatgataaggatgacgatacaacacgcgtggacgaatccctaaatatcaaagttgaggcagaagaagaaaaagctaaatctggagacgaaacaaataaggaggaagacgaagatgacgaggaagccgaggaagaggaagaggaggaagaagaagaagaggacgaggacgacgatgacaacaacgaggaggaagaatttgagtgctacccccctggcatgaaagtccaggtccgctatggacgcggaaaaaatcagaaaatgtatgaggccagcattaaggattcagacgtggaagggggagaagtcctgtacctggtgcattactgtggctggaatgtgcgctatgacgagtggattaaagccgataaaatcgtgcggccagctgataaaaacgtgcccaaaataaagcaccgcaagaagattaagaacaaattagataaggaaaaagacaaagacgagaaatactcacctaagaactgcaagcttaggagactgtccaagccaccatttcagacaaacccatccccagaaatggtcagcaaactggacctgactgacgccaaaaatagcgataccgctcacatcaaaagcatcgagatcacatccattcttaatggactgcaggcttccgaaagctccgcagaagatagcgagcaagaagacgaacggggagctcaagatatggataataacggaaaagaagagtctaagatcgaccacctcaccaacaataggaacgacctgatttctaaggaagaacagaatagttccagtctgctcgaggagaacaaagtgcacgctgatctggtcatttcaaagcctgtgtctaaaagccccgaaagactgcggaaggacattgaggtcctatccgaagacaccgactacgaagaggatgaagtcacaaagaagagaaaggacgtgaaaaaagacaccactgacaaatcaagcaagccacagataaaacgcggaaagagaaggtattgcaacaccgaagagtgcctaaaaaccggatcgcctggaaaaaaggaggagaaagccaaaaacaaagagtccctatgtatggagaatagtagtaattcaagcagtgatgaggatgaagaggaaaccaaggctaaaatgactccaactaagaagtacaatggattggaggaaaaacggaaaagtctacggacgactgggttctactcagggttctcggaggtggccgaaaaaagaattaagctcctgaacaattctgacgagcggctccaaaattcccgagccaaagacagaaaggatgtttggtcgtcaatccagggacagtggcctaaaaaaactctgaaagagctgttctcagatagcgatacagaagccgctgcatcccctccccatccagccccagaggaaggtgtggcagaggagagcctacaaaccgtcgcagaggaagagagctgtagtcccagtgtcgagctagaaaaaccacctccagtgaacgtggactcaaagcccatcgaagagaagaccgtggaagtcaacgaccgcaaggccgaattcccctcttctggctccaacagcgtccttaacacacctccaaccactccagaatccccttccagcgtaactgtcaccgagggctcacgccagcagtcaagcgtgacagtgtctgaaccgcttgcgccaaatcaagaggaggtgcggtcgattaagtccgaaaccgacagcacaattgaagtcgacagtgtggcaggggagctccaggatttgcagagtgagggcaactcttcccccgcaggcttcgatgcctcagtgtcatcttcttcatcgaaccagccggagccggaacatcctgaaaaagcatgtaccggccaaaagcgcgtgaaagatgctcagggcggtggatcaagttcgaagaaacagaaacgctcccacaaggccacagtggttaacaataaaaagaagggaaagggcaccaattcttctgattctgaagaactatctgcgggagagagcattactaagagccagccggtcaagtccgtctctacaggcatgaagtctcattctactaagagtcccgctcgtactcaaagccctggcaagtgtgggaagaatggtgataaggaccctgacctcaaggagcctagtaatcgcttaccaaaggtgtacaagtggtcgttccagatgtctgatctggagaatatgacatctgctgaaaggattaccatcctgcaggaaaagctgcaggagatccgcaagcactacctatctctgaagagtgaggtggcctctatcgaccgacgtcgaaaacgtctgaaaaagaaggaacgggagagcgctgccacttcatcgtcaagctcatctccttcaagctcaagcattactgctgccgtgatgttgacattggccgagcctagcatgtccagtgccagtcagaacggcatgtctgtggaatgtcgctag

SEQ ID NO: 191027 - DNA, 3462 bp, Artificial Sequence
  derived and/or modified sequence
atgaaggccctggacgaacctccttaccttactgttggcactgatgtctcagccaaataccggggtgcattttgcgaggctaagattaaaactgccaaacgactcgtgaaggtgaaagtgacctttcggcacgattctagtaccgttgaagtacaggatgaccacattaagggtcccctcaaagtgggtgccattgtggaagttaaaaatctggacggcgcttaccaggaggctgtcataaataagctaacagacgcgagctggtataccgtggtgttcgatgacggagacgagaagactttgaggcgctcttccctgtgtcttaagggcgagcggcactttgccgaatccgaaaccctggaccagttgcccctgacaaatcccgagcacttcggaacacctgtgatcggtaaaaagactaatagagggaggcggtccaatcatatccctgaggaggaatcaagctcttcaagttccgacgaggacgaggacgataggaagcagatcgacgagctactgggaaaagtggtgtgcgtagattatatatctcttgataaaaagaaagctctttggtttccagcgctcgtcgtgtgtcctgactgcagtgatgaaatcgcagtgaaaaaggacaatatcctggtgaggagcttcaaggacggcaagtttacatccgtgccgcgaaaggatgtacatgaaattaccagcgacacagcacctaagccagacgcagtcttgaagcaggcttttgagcaggctttagaattccataagtcacgtacaattccagccaattggaaaaccgagttaaaggaagattccagctcaagtgaggcggaagaggaggaggaggaggaagacgacgagaaggagaaggaagacaacagtagcgaagaggaggaggagatcgaacctttcccagaggagagggagaacttcctgcagcagctgtacaaatttatggaggacaggggcacacccatcaataaacgccctgtgctaggatacaggaatctaaacttgttcaagctttttaggcttgtgcataagctcggcggattcgataatatcgagtctggcgctgtctggaaacaggtgtaccaagacttgggaatccctgtcctgaattcggccgctgggtacaacgtgaagtgtgcttacaaaaagtatctgtatggttttgaggaatactgtcgctctgcaaacattgagttccagatggcacttcccgagaaggtcgttaataagcagtgcaaggaatgtgagaatgttaaggagatcaaggttaaagaggagaacgaaactgagattaaggagatcaagatggaagaagaaagaaacatcatccctcgggaggagaagcctatagaagacgagattgagagaaaggagaacatcaagccctctctgggctctaaaaagaacctgctggaaagtattcccacacattccgaccaagagaaagaggtgaacattaaaaagcccgaggacaacgaaaatctggacgacaaggatgatgacactacacgggtcgacgagtctttgaatattaaagtcgaggcggaggaggaaaaggcaaagtccggggacgagacgaacaaagaagaggatgaagatgatgaggaagccgaagaggaagaagaggaagaggaggaagaagaggatgaggacgacgacgataacaacgaagaggaagagttcgaatgttacccaccgggaatgaaggtgcaggtgagatatggcagaggtaaaaatcagaagatgtatgaggccagtataaaagacagcgacgttgagggcggagaagtactttatctcgttcattactgtgggtggaacgtgcggtatgatgagtggatcaaggcagataagattgttagaccagcggacaaaaacgtgcccaaaatcaagcaccgtaagaagatcaaaaataaactcgataaggaaaaagacaaggatgagaaatattctccaaaaaactgcaaactgcggaggctcagtaagccccctttccagaccaatccttcgcctgaaatggtctcaaagctagatctcactgatgcaaagaactcggacactgctcacattaagtccatcgagatcacaagcattctaaacggactgcaagccagcgagagttccgcagaagactccgaacaggaggatgagaggggggctcaggacatggacaacaatggcaaggaggagtccaagattgatcatttgacaaataataggaacgacctcatctcaaaggaagagcagaatagtagttctttactcgaggaaaataaagttcacgctgatctggtgatatctaaacctgtgtctaaaagccccgaacgtctgcggaaggatatcgaagtactcagcgaagacacggactatgaggaggacgaggtgaccaaaaagcgtaaagatgtcaagaaagacacgaccgacaaaagctctaagccccaaataaagcgcggaaaacgacgctattgcaacaccgaggaatgtttgaagactggcagtccgggaaagaaggaagagaaggccaagaataaagagtctctttgtatggaaaactcatccaattccagctctgacgaggacgaagaagaaactaaggccaagatgacccccacgaagaagtacaatggactggaagagaagaggaaatccctgaggaccaccggcttctatagcgggttcagcgaggtggccgaaaagagaatcaagctgttgaataatagtgatgaacgcctgcagaatagccgcgcaaaggacagaaaggacgtctggtcatcgattcagggtcagtggccaaaaaaaacccttaaggagctgttctccgactccgatacagaagccgcagccagtcccccacatcctgccccagaagagggcgtcgctgaggaatcgcttcaaactgtcgctgaagaggagtcctgttccccctctgttgagcttgagaagccgcctcccgtcaacgtagactccaaaccgattgaagagaaaactgtggaggtaaatgaccgcaaagcggagtttccctcatccgggagcaatagcgtgcttaatacaccacctacaactcccgagagcccttcctctgtgacggtgactgaaggttctagacagcaaagttcagttactgtgtcagagcctctagcccctaaccaggaagaggtccgtagcattaagtccgagactgacagcaccattgaggtggatagtgtcgctggtgaactgcaagacctgcagagcgaaggtaatagcagtccggcaggattcgatgcgtctgtctcctcctctagcagcaaccagcccgagccagaacacccggagaaggcttgtaccggccagaagagggtgaaggacgcccaggggggaggctcctcgagtaagaaacagaagaggagtcataaagcgaccgtcgtcaataacaagaagaagggaaaggggattttaccacattag

SEQ ID NO: 191028 - DNA, 1968 bp, Artificial Sequence
  derived and/or modified sequence
atgaaagcactggatgaaccaccttacttgacagtgggaactgacgtgtccgctaaatacagaggagctttctgcgaggctaagattaaaacagctaagcgcctggtcaaggtcaaggtgactttcaggcacgacagttctactgtggaagtgcaagatgaccacattaagggccctctcaaagtgggggcaattgtggaggttaaaaatttggacggggcttatcaggaagccgttatcaacaaattgaccgacgcttcctggtacaccgtggtgtttgatgacggcgacgagaagacgctgagacggtcttccctgtgtctgaagggggaaagacattttgcggaatccgaaacacttgatcagctgccattaacaaacccagagcattttggcaccccagtgattggtaagaagactaatcggggacgcaggtctaaccacatcccagaggaggaatcaagctccagctcatccgacgaagatgaagacgatagaaaacagattgacgagctgttaggaaaagtggtttgcgtggactacattagcctcgataagaagaaggcgctctggtttccggcattggttgtctgtcctgactgcagcgatgagatcgcggtaaaaaaggataatatactggtacgttcttttaaagatgggaaattcacttctgtgcctagaaaggacgtgcacgagataactagtgatactgccccaaaaccagatgcagtgctgaagcaggcctttgagcaggctctcgaattccataagtctcgtactatcccagctaactggaagaccgagttgaaagaagattctagtagctctgaggccgaggaggaggaagaagaagaggacgacgaaaaggagaaggaagacaacagcagcgaagaggaagaagagattgaaccatttcccgaggaaagagaaaactttctacaacagctgtataaatttatggaggatcgtggcaccccgatcaacaaacgccctgtcttgggataccggaacctgaacctatttaagctctttcgactagttcacaagctgggaggcttcgataacattgaatccggggctgtgtggaagcaggtctatcaggaccttggcatacccgtgcttaactctgccgcagggtacaacgtcaaatgcgcatataaaaaatacctatatggcttcgaggagtactgtcgatccgcaaatatagagttccagatggctctacctgagaaggtcgttaataaacagtgcaaggaatgcgagaatgtcaaagaaattaaggtcaaggaggagaacgaaacggaaattaaggagataaaaatggaagaggagcgtaacataatacccagagaggagaaaccgatcgaggacgagattgagcgcaaagaaaatatcaaaccatccctcggtagcaagaaaaaccttttagagtccatacccacccacagcgatcaagagaaagaagtgaatatcaagaaaccagaggataatgaaaatcttgacgataaggacgatgacacaactagggtcgacgaatccctcaacatcaaggtggaagcagaagaggaaaaggccaaatctggagatgaaactaataaggaagaggatgaggacgacgaagaagctgaggaggaagaggaggaggaagaagaggaggaggatgaggatgatgatgataataacgaggaagaagaattcgaatgttatcctccaggcatgaaggtccaggtccggtatggccgtggcaaaaaccaaaaaatgtacgaggcttcaattaaggactcagacgtcgagggaggagaagttctgtacctggtgcattactgtgggtggaacgtacgctacgatgagtggatcaaagcggataaaatcgtgcggccagcagataaaaatgttcctaaaatcaagcacaggaaaaaaattaagaattctgtctacaaaaagaaaaaaaagaaaaaaaataagtag

SEQ ID NO: 191029 - DNA, 6067 bp, Artificial Sequence
  derived and/or modified sequence
aaagggggggaacctagagtcggtgggggggaagcgatgtttgcccgtcagtcgagtccggagtgaggagctcggtcgccgaagcggagggagactcttgagcttcatcttgccgccgccacggccaccgcctggacctttgcccggagggagctgcagagggtccatcgccgccgtcctctggagggcagcgcgattgggggcccggacctccagtccgggggggatttttcgtcgtccccctccccccaaccagggagcccgagcggccgccaaacaaaggtaccagtcgccgccgcgggaggaggaggagccggagcctctgcctcagcagccgctggacccgccgcccttcttccccatctctcccccgggcctgctggttttgggggggagaaggagagaggggactctggacgtgccagggtcagatctcgcctccgaggaaggtgcagctgaacctggtgttttagaggataccttggtcccagagtcatcatgaaggcccttgatgagcctccctatttgacagtgggcactgatgtgagtgctaaatacagaggagccttttgtgaagccaagatcaagacagcaaaaagacttgtcaaagtcaaggtgacatttagacatgattcttcaacagtggaagttcaggatgaccacataaagggcccactaaaggtaggagctattgtggaagtgaagaatcttgatggtgcatatcaggaagctgttatcaataaactaacagatgcgagttggtacactgtagtttttgatgacggagatgagaagacactgagacgatcttcactgtgcctgaaaggagagaggcattttgctgaaagtgaaacattagaccagctcccactcaccaaccctgagcattttggcactccagtcataggaaagaaaacaaatagaggaagaagatctaatcatataccagaggaagagtcttcatcatcctccagtgatgaagatgaggatgataggaaacagattgatgagctactaggcaaagttgtatgtgtagattacattagtttggataaaaagaaagcactgtggtttcctgcattggtggtttgtcctgattgtagtgatgagattgctgtaaaaaaggacaatattcttgttcgatctttcaaagatggaaaatttacttcagttccaagaaaagatgtccatgaaattactagtgacactgcaccaaagcctgatgctgttttaaagcaagcctttgaacaggcacttgaatttcacaaaagtagaactattcctgctaactggaagactgaattgaaagaagatagctctagcagtgaagcagaggaagaagaggaggaggaagatgatgaaaaagaaaaggaggataatagcagtgaagaagaagaagaaatagaaccatttccagaagaaagggagaactttcttcagcaattgtacaaatttatggaagatagaggtacacctattaacaaacgacctgtacttggatatcgaaatttgaatctctttaagttattcagacttgtacacaaacttggaggatttgataatattgaaagtggagctgtttggaaacaagtctaccaagatcttggaatccctgtcttaaattcagctgcaggatacaatgttaaatgtgcttataaaaaatacttatatggttttgaggagtactgtagatcagccaacattgaatttcagatggcattgccagagaaagttgttaacaagcaatgtaaggagtgtgaaaatgtaaaagaaataaaagttaaggaggaaaatgaaacagagatcaaagaaataaagatggaggaggagaggaatataataccaagagaagaaaagcctattgaggatgaaattgaaagaaaagaaaatattaagccctctctgggaagtaaaaagaatttattagaatctatacctacacattctgatcaggaaaaagaagttaacattaaaaaaccagaagacaatgaaaatctggatgacaaagatgatgacacaactagggtagatgaatccctcaacataaaggtagaagctgaggaagaaaaagcaaaatctggagatgaaacgaataaagaagaagatgaagatgatgaagaagcagaagaggaggaggaggaggaagaagaagaagaggatgaagatgatgatgacaacaatgaggaagaggagtttgagtgctatccaccaggcatgaaagtccaagtgcggtatggacgagggaaaaatcaaaaaatgtatgaagctagtattaaagattctgatgtcgaaggtggagaggtcctttacttggtgcattactgcggatggaatgtgagatacgatgaatggattaaagcagataaaatagtaagacctgctgataaaaatgtgccaaagataaaacatcggaagaaaataaagaataaattagacaaagaaaaagacaaagatgaaaaatactctccaaaaaactgtaaacttcggcgcttgtccaaaccaccatttcagacaaatccatctcctgaaatggtatccaaactggatctcactgatgccaaaaactctgatactgctcatattaagtccatagaaattacttcgatccttaatggacttcaagcttctgaaagttctgctgaagacagtgagcaggaagatgagagaggtgctcaagacatggataataatggcaaagaggaatctaagattgatcatttgaccaacaacagaaatgatcttatttcaaaggaggaacagaacagttcatctttgctagaagaaaacaaagttcatgcagatttggtaatatccaaaccagtgtcaaaatctccagaaagattaaggaaagatatagaagtattatccgaagatactgattatgaagaagatgaagtcacaaaaaagagaaaggatgtcaagaaggacacaacagataaatcttcaaaaccacaaataaaacgtggtaaaagaaggtattgcaatacagaagagtgtctaaaaactggatcacctggcaaaaaggaagagaaggccaagaacaaagaatcactttgcatggaaaacagtagcaacagctcttcagatgaagatgaagaagaaacaaaagcaaagatgacaccaactaagaaatacaatggtttggaggaaaaaagaaaatctctacggacaactggtttctattcaggattttcagaagtggcagaaaaaaggattaaacttttaaataactctgatgaaagacttcaaaacagcagggccaaagatcgaaaagatgtctggtcaagtattcagggacagtggcctaaaaaaacgctgaaagagcttttttcagactctgatactgaggctgcagcttccccaccgcatcctgccccagaggagggggtggcagaggagtcactgcagactgtggctgaagaggagagttgttcacccagtgtagaactagaaaaaccacctccagtcaatgtcgatagtaaacccattgaagaaaaaacagtagaggtcaatgacagaaaagcagaatttccaagtagtggcagtaattcagtgctaaatacccctcctactacacctgaatcgccttcatcagtcactgtaacagaaggcagccggcagcagtcttctgtaacagtatcagaaccactggctccaaaccaagaagaggttcgaagtatcaagagtgaaactgatagcacaattgaggtggatagtgttgctggggagctccaagacctccagtctgaagggaatagctcgccagcaggttttgatgccagtgtgagctcaagcagtagtaatcagccagaaccagaacatcctgaaaaagcctgtacaggtcagaaaagagtgaaagatgctcagggaggaggaagttcatcaaaaaagcagaaaagaagccataaagcaacagtggtaaacaacaaaaagaagggaaaaggcacaaatagtagtgatagtgaagaactttcagctggtgaaagtataactaagagtcagccagtcaaatcagtttccactggaatgaagtctcatagtaccaaatctcccgcaaggacgcagtctccaggaaaatgtggaaagaatggtgataaggatcctgatctcaaggaacccagtaatcgattacccaaagtttacaaatggagttttcagatgtcggacctggaaaatatgacaagtgccgaacgcatcacaattcttcaagaaaaacttcaagaaatcagaaaacattatctgtcattaaaatctgaagtagcttccattgatcggaggagaaagcgtttaaagaagaaagagagagaaagtgctgctacatcctcatcctcctcttcaccttcatccagttccataacagctgctgttatgttaactttagctgaaccgtcaatgtccagcgcatcacaaaatggaatgtcagttgagtgcaggtgacagcaggacttgctaaagcactttgcacttaatggctgttgagggccactttttttttatactgcacagtggcacaaaaaaatatcagacaagcactattttatatttaaaaattgtttcttgacaagctgacttggcacttaagtgcacttttttatgaagaaaaagtacaatgaactgcttttcctcaagcaataattgtttccaacttgtctgggaattgtgtgtctggtaactggaaggccttccactgtggcaaatggaggcttttcactgcctgtagagacaatacagtaagcatagttaaggggtgggtcagaacatgttaagataacttactgtatatgtattcccttgtattttgttaaagctggaacatttgatatttttccatttatttatgaaaaaatatgaacctattttcatttgtacaaggtaattgttttttaaagcaagtcaccttagggtggctttaattgtataagtcaagcacatgtaataaattcaaaacctgcagttaacaggatattagacatcaatcctggtaaccaaatattaaagattctctttaaaaaagactgaacatgtttacaggtttgaattaggctaaaaggtcttgcagtggcttttcatggcccttcaaattggaatggaactactgtactttgccatttttctataaatcagtatttttttttaattttgatatacattgtgtgaaaaaagaaaatggctaataaactgtattaaatcttaaacaatgtataaagattgtacttagccagttcaaagtgtatatttattcataatgaattataacagttatatttttgtgttttcttgtaaatgtttcttttcccttaaatacagataattcatttgtattgcttattttattatgagctacaacaaaaggacttcaggaacaagtaatgtattagtatggttcaagattgttgataggaactgtctcaaaaggatggtggttattttaaatataaatagctaatgggggtggtaggcctataaaattaaatgccttgtataaaatccaaaatgaatgcaaaattgttttcacttgtattgactttatgttgtatgattccaatctctgttctgtttggcacttgtatttaattcttcacctttgtaagacatttgtatattgtggatgtgttcattcaagctatttaatatctggcactgttaatacacagtactttattgtacagactgttttactgttttaattgtagttctgtgtactttttttggatggggctggcatgttttctttgtttcctggcaatacgacgtgggaatttcaatgcgttttgttgtagatgctaacgtgtcagaatcctttacattcaacttttctaagaaaagcattttcagtcttgtagtgtgtgcttacagtaactaattttgttgaaaatggtttcaagttattcaaatttgtacaggactgtaaagatttgttgacagcaaaatgttgaagaaaaaagcttatagaataaaagctataaagtatatattaggatctgcaaacaatgaagaattatgtaatatattgtacaaatgtaagcaaaggctctgaaataaaatgccatagtttgtgaatccttga

SEQ ID NO: 191030 - DNA, 5946 bp, Artificial Sequence
  derived and/or modified sequence
ggcggggccagatgttgatctcgctcccacttgtcgggtctgagcccggaacgggacgtgggcaggggctctgtggcgggccggtcctgcccgcggcccacaggccctcctggcccctcggtggcccccggccggcctctcgctcggacgcggcgcgtgggggcgcggattcgctcggccgggcgccgaggccctaggggagagcggccggccctgcgccggacgccgggcttgttgtgagtttcttctctgacagaaatggcgtcattgtcgtagacgggaaactccgtcgggtctcgacaatggggacgggaagctgccgagctgtgtgcagctgaacctggtgttttagaggataccttggtcccagagtcatcatgaaggcccttgatgagcctccctatttgacagtgggcactgatgtgagtgctaaatacagaggagccttttgtgaagccaagatcaagacagcaaaaagacttgtcaaagtcaaggtgacatttagacatgattcttcaacagtggaagttcaggatgaccacataaagggcccactaaaggtaggagctattgtggaagtgaagaatcttgatggtgcatatcaggaagctgttatcaataaactaacagatgcgagttggtacactgtagtttttgatgacggagatgagaagacactgagacgatcttcactgtgcctgaaaggagagaggcattttgctgaaagtgaaacattagaccagctcccactcaccaaccctgagcattttggcactccagtcataggaaagaaaacaaatagaggaagaagatctaatcatataccagaggaagagtcttcatcatcctccagtgatgaagatgaggatgataggaaacagattgatgagctactaggcaaagttgtatgtgtagattacattagtttggataaaaagaaagcactgtggtttcctgcattggtggtttgtcctgattgtagtgatgagattgctgtaaaaaaggacaatattcttgttcgatctttcaaagatggaaaatttacttcagttccaagaaaagatgtccatgaaattactagtgacactgcaccaaagcctgatgctgttttaaagcaagcctttgaacaggcacttgaatttcacaaaagtagaactattcctgctaactggaagactgaattgaaagaagatagctctagcagtgaagcagaggaagaagaggaggaggaagatgatgaaaaagaaaaggaggataatagcagtgaagaagaagaagaaatagaaccatttccagaagaaagggagaactttcttcagcaattgtacaaatttatggaagatagaggtacacctattaacaaacgacctgtacttggatatcgaaatttgaatctctttaagttattcagacttgtacacaaacttggaggatttgataatattgaaagtggagctgtttggaaacaagtctaccaagatcttggaatccctgtcttaaattcagctgcaggatacaatgttaaatgtgcttataaaaaatacttatatggttttgaggagtactgtagatcagccaacattgaatttcagatggcattgccagagaaagttgttaacaagcaatgtaaggagtgtgaaaatgtaaaagaaataaaagttaaggaggaaaatgaaacagagatcaaagaaataaagatggaggaggagaggaatataataccaagagaagaaaagcctattgaggatgaaattgaaagaaaagaaaatattaagccctctctgggaagtaaaaagaatttattagaatctatacctacacattctgatcaggaaaaagaagttaacattaaaaaaccagaagacaatgaaaatctggatgacaaagatgatgacacaactagggtagatgaatccctcaacataaaggtagaagctgaggaagaaaaagcaaaatctggagatgaaacgaataaagaagaagatgaagatgatgaagaagcagaagaggaggaggaggaggaagaagaagaagaggatgaagatgatgatgacaacaatgaggaagaggagtttgagtgctatccaccaggcatgaaagtccaagtgcggtatggacgagggaaaaatcaaaaaatgtatgaagctagtattaaagattctgatgtcgaaggtggagaggtcctttacttggtgcattactgcggatggaatgtgagatacgatgaatggattaaagcagataaaatagtaagacctgctgataaaaatgtgccaaagataaaacatcggaagaaaataaagaataaattagacaaagaaaaagacaaagatgaaaaatactctccaaaaaactgtaaacttcggcgcttgtccaaaccaccatttcagacaaatccatctcctgaaatggtatccaaactggatctcactgatgccaaaaactctgatactgctcatattaagtccatagaaattacttcgatccttaatggacttcaagcttctgaaagttctgctgaagacagtgagcaggaagatgagagaggtgctcaagacatggataataatggcaaagaggaatctaagattgatcatttgaccaacaacagaaatgatcttatttcaaaggaggaacagaacagttcatctttgctagaagaaaacaaagttcatgcagatttggtaatatccaaaccagtgtcaaaatctccagaaagattaaggaaagatatagaagtattatccgaagatactgattatgaagaagatgaagtcacaaaaaagagaaaggatgtcaagaaggacacaacagataaatcttcaaaaccacaaataaaacgtggtaaaagaaggtattgcaatacagaagagtgtctaaaaactggatcacctggcaaaaaggaagagaaggccaagaacaaagaatcactttgcatggaaaacagtagcaacagctcttcagatgaagatgaagaagaaacaaaagcaaagatgacaccaactaagaaatacaatggtttggaggaaaaaagaaaatctctacggacaactggtttctattcaggattttcagaagtggcagaaaaaaggattaaacttttaaataactctgatgaaagacttcaaaacagcagggccaaagatcgaaaagatgtctggtcaagtattcagggacagtggcctaaaaaaacgctgaaagagcttttttcagactctgatactgaggctgcagcttccccaccgcatcctgccccagaggagggggtggcagaggagtcactgcagactgtggctgaagaggagagttgttcacccagtgtagaactagaaaaaccacctccagtcaatgtcgatagtaaacccattgaagaaaaaacagtagaggtcaatgacagaaaagcagaatttccaagtagtggcagtaattcagtgctaaatacccctcctactacacctgaatcgccttcatcagtcactgtaacagaaggcagccggcagcagtcttctgtaacagtatcagaaccactggctccaaaccaagaagaggttcgaagtatcaagagtgaaactgatagcacaattgaggtggatagtgttgctggggagctccaagacctccagtctgaagggaatagctcgccagcaggttttgatgccagtgtgagctcaagcagtagtaatcagccagaaccagaacatcctgaaaaagcctgtacaggtcagaaaagagtgaaagatgctcagggaggaggaagttcatcaaaaaagcagaaaagaagccataaagcaacagtggtaaacaacaaaaagaagggaaaaggcacaaatagtagtgatagtgaagaactttcagctggtgaaagtataactaagagtcagccagtcaaatcagtttccactggaatgaagtctcatagtaccaaatctcccgcaaggacgcagtctccaggaaaatgtggaaagaatggtgataaggatcctgatctcaaggaacccagtaatcgattacccaaagtttacaaatggagttttcagatgtcggacctggaaaatatgacaagtgccgaacgcatcacaattcttcaagaaaaacttcaagaaatcagaaaacattatctgtcattaaaatctgaagtagcttccattgatcggaggagaaagcgtttaaagaagaaagagagagaaagtgctgctacatcctcatcctcctcttcaccttcatccagttccataacagctgctgttatgttaactttagctgaaccgtcaatgtccagcgcatcacaaaatggaatgtcagttgagtgcaggtgacagcaggacttgctaaagcactttgcacttaatggctgttgagggccactttttttttatactgcacagtggcacaaaaaaatatcagacaagcactattttatatttaaaaattgtttcttgacaagctgacttggcacttaagtgcacttttttatgaagaaaaagtacaatgaactgcttttcctcaagcaataattgtttccaacttgtctgggaattgtgtgtctggtaactggaaggccttccactgtggcaaatggaggcttttcactgcctgtagagacaatacagtaagcatagttaaggggtgggtcagaacatgttaagataacttactgtatatgtattcccttgtattttgttaaagctggaacatttgatatttttccatttatttatgaaaaaatatgaacctattttcatttgtacaaggtaattgttttttaaagcaagtcaccttagggtggctttaattgtataagtcaagcacatgtaataaattcaaaacctgcagttaacaggatattagacatcaatcctggtaaccaaatattaaagattctctttaaaaaagactgaacatgtttacaggtttgaattaggctaaaaggtcttgcagtggcttttcatggcccttcaaattggaatggaactactgtactttgccatttttctataaatcagtatttttttttaattttgatatacattgtgtgaaaaaagaaaatggctaataaactgtattaaatcttaaacaatgtataaagattgtacttagccagttcaaagtgtatatttattcataatgaattataacagttatatttttgtgttttcttgtaaatgtttcttttcccttaaatacagataattcatttgtattgcttattttattatgagctacaacaaaaggacttcaggaacaagtaatgtattagtatggttcaagattgttgataggaactgtctcaaaaggatggtggttattttaaatataaatagctaatgggggtggtaggcctataaaattaaatgccttgtataaaatccaaaatgaatgcaaaattgttttcacttgtattgactttatgttgtatgattccaatctctgttctgtttggcacttgtatttaattcttcacctttgtaagacatttgtatattgtggatgtgttcattcaagctatttaatatctggcactgttaatacacagtactttattgtacagactgttttactgttttaattgtagttctgtgtactttttttggatggggctggcatgttttctttgtttcctggcaatacgacgtgggaatttcaatgcgttttgttgtagatgctaacgtgtcagaatcctttacattcaacttttctaagaaaagcattttcagtcttgtagtgtgtgcttacagtaactaattttgttgaaaatggtttcaagttattcaaatttgtacaggactgtaaagatttgttgacagcaaaatgttgaagaaaaaagcttatagaataaaagctataaagtatatattaggatctgcaaacaatgaagaattatgtaatatattgtacaaatgtaagcaaaggctctgaaataaaatgccatagtttgtgaatccttga

SEQ ID NO: 191031 - DNA, 3957 bp, Artificial Sequence
  derived and/or modified sequence
aaagggggggaacctagagtcggtgggggggaagcgatgtttgcccgtcagtcgagtccggagtgaggagctcggtcgccgaagcggagggagactcttgagcttcatcttgccgccgccacggccaccgcctggacctttgcccggagggagctgcagagggtccatcgccgccgtcctctggagggcagcgcgattgggggcccggacctccagtccgggggggatttttcgtcgtccccctccccccaaccagggagcccgagcggccgccaaacaaaggtaccagtcgccgccgcgggaggaggaggagccggagcctctgcctcagcagccgctggacccgccgcccttcttccccatctctcccccgggcctgctggttttgggggggagaaggagagaggggactctggacgtgccagggtcagatctcgcctccgaggaaggtgcagctgaacctggtgttttagaggataccttggtcccagagtcatcatgaaggcccttgatgagcctccctatttgacagtgggcactgatgtgagtgctaaatacagaggagccttttgtgaagccaagatcaagacagcaaaaagacttgtcaaagtcaaggtgacatttagacatgattcttcaacagtggaagttcaggatgaccacataaagggcccactaaaggtaggagctattgtggaagtgaagaatcttgatggtgcatatcaggaagctgttatcaataaactaacagatgcgagttggtacactgtagtttttgatgacggagatgagaagacactgagacgatcttcactgtgcctgaaaggagagaggcattttgctgaaagtgaaacattagaccagctcccactcaccaaccctgagcattttggcactccagtcataggaaagaaaacaaatagaggaagaagatctaatcatataccagaggaagagtcttcatcatcctccagtgatgaagatgaggatgataggaaacagattgatgagctactaggcaaagttgtatgtgtagattacattagtttggataaaaagaaagcactgtggtttcctgcattggtggtttgtcctgattgtagtgatgagattgctgtaaaaaaggacaatattcttgttcgatctttcaaagatggaaaatttacttcagttccaagaaaagatgtccatgaaattactagtgacactgcaccaaagcctgatgctgttttaaagcaagcctttgaacaggcacttgaatttcacaaaagtagaactattcctgctaactggaagactgaattgaaagaagatagctctagcagtgaagcagaggaagaagaggaggaggaagatgatgaaaaagaaaaggaggataatagcagtgaagaagaagaagaaatagaaccatttccagaagaaagggagaactttcttcagcaattgtacaaatttatggaagatagaggtacacctattaacaaacgacctgtacttggatatcgaaatttgaatctctttaagttattcagacttgtacacaaacttggaggatttgataatattgaaagtggagctgtttggaaacaagtctaccaagatcttggaatccctgtcttaaattcagctgcaggatacaatgttaaatgtgcttataaaaaatacttatatggttttgaggagtactgtagatcagccaacattgaatttcagatggcattgccagagaaagttgttaacaagcaatgtaaggagtgtgaaaatgtaaaagaaataaaagttaaggaggaaaatgaaacagagatcaaagaaataaagatggaggaggagaggaatataataccaagagaagaaaagcctattgaggatgaaattgaaagaaaagaaaatattaagccctctctgggaagtaaaaagaatttattagaatctatacctacacattctgatcaggaaaaagaagttaacattaaaaaaccagaagacaatgaaaatctggatgacaaagatgatgacacaactagggtagatgaatccctcaacataaaggtagaagctgaggaagaaaaagcaaaatctggagatgaaacgaataaagaagaagatgaagatgatgaagaagcagaagaggaggaggaggaggaagaagaagaagaggatgaagatgatgatgacaacaatgaggaagaggagtttgagtgctatccaccaggcatgaaagtccaagtgcggtatggacgagggaaaaatcaaaaaatgtatgaagctagtattaaagattctgatgtcgaaggtggagaggtcctttacttggtgcattactgcggatggaatgtgagatacgatgaatggattaaagcagataaaatagtaagacctgctgataaaaatgtgccaaagataaaacatcggaagaaaataaagaataaattagacaaagaaaaagacaaagatgaaaaatactctccaaaaaactgtaaacttcggcgcttgtccaaaccaccatttcagacaaatccatctcctgaaatggtatccaaactggatctcactgatgccaaaaactctgatactgctcatattaagtccatagaaattacttcgatccttaatggacttcaagcttctgaaagttctgctgaagacagtgagcaggaagatgagagaggtgctcaagacatggataataatggcaaagaggaatctaagattgatcatttgaccaacaacagaaatgatcttatttcaaaggaggaacagaacagttcatctttgctagaagaaaacaaagttcatgcagatttggtaatatccaaaccagtgtcaaaatctccagaaagattaaggaaagatatagaagtattatccgaagatactgattatgaagaagatgaagtcacaaaaaagagaaaggatgtcaagaaggacacaacagataaatcttcaaaaccacaaataaaacgtggtaaaagaaggtattgcaatacagaagagtgtctaaaaactggatcacctggcaaaaaggaagagaaggccaagaacaaagaatcactttgcatggaaaacagtagcaacagctcttcagatgaagatgaagaagaaacaaaagcaaagatgacaccaactaagaaatacaatggtttggaggaaaaaagaaaatctctacggacaactggtttctattcaggattttcagaagtggcagaaaaaaggattaaacttttaaataactctgatgaaagacttcaaaacagcagggccaaagatcgaaaagatgtctggtcaagtattcagggacagtggcctaaaaaaacgctgaaagagcttttttcagactctgatactgaggctgcagcttccccaccgcatcctgccccagaggagggggtggcagaggagtcactgcagactgtggctgaagaggagagttgttcacccagtgtagaactagaaaaaccacctccagtcaatgtcgatagtaaacccattgaagaaaaaacagtagaggtcaatgacagaaaagcagaatttccaagtagtggcagtaattcagtgctaaatacccctcctactacacctgaatcgccttcatcagtcactgtaacagaaggcagccggcagcagtcttctgtaacagtatcagaaccactggctccaaaccaagaagaggttcgaagtatcaagagtgaaactgatagcacaattgaggtggatagtgttgctggggagctccaagacctccagtctgaagggaatagctcgccagcaggttttgatgccagtgtgagctcaagcagtagtaatcagccagaaccagaacatcctgaaaaagcctgtacaggtcagaaaagagtgaaagatgctcagggaggaggaagttcatcaaaaaagcagaaaagaagccataaagcaacagtggtaaacaacaaaaagaagggaaaaggcattttaccccac

SEQ ID NO: 191032 - DNA, 2463 bp, Artificial Sequence
  derived and/or modified sequence
aaagggggggaacctagagtcggtgggggggaagcgatgtttgcccgtcagtcgagtccggagtgaggagctcggtcgccgaagcggagggagactcttgagcttcatcttgccgccgccacggccaccgcctggacctttgcccggagggagctgcagagggtccatcgccgccgtcctctggagggcagcgcgattgggggcccggacctccagtccgggggggatttttcgtcgtccccctccccccaaccagggagcccgagcggccgccaaacaaaggtaccagtcgccgccgcgggaggaggaggagccggagcctctgcctcagcagccgctggacccgccgcccttcttccccatctctcccccgggcctgctggttttgggggggagaaggagagaggggactctggacgtgccagggtcagatctcgcctccgaggaaggtgcagctgaacctggtgttttagaggataccttggtcccagagtcatcatgaaggcccttgatgagcctccctatttgacagtgggcactgatgtgagtgctaaatacagaggagccttttgtgaagccaagatcaagacagcaaaaagacttgtcaaagtcaaggtgacatttagacatgattcttcaacagtggaagttcaggatgaccacataaagggcccactaaaggtaggagctattgtggaagtgaagaatcttgatggtgcatatcaggaagctgttatcaataaactaacagatgcgagttggtacactgtagtttttgatgacggagatgagaagacactgagacgatcttcactgtgcctgaaaggagagaggcattttgctgaaagtgaaacattagaccagctcccactcaccaaccctgagcattttggcactccagtcataggaaagaaaacaaatagaggaagaagatctaatcatataccagaggaagagtcttcatcatcctccagtgatgaagatgaggatgataggaaacagattgatgagctactaggcaaagttgtatgtgtagattacattagtttggataaaaagaaagcactgtggtttcctgcattggtggtttgtcctgattgtagtgatgagattgctgtaaaaaaggacaatattcttgttcgatctttcaaagatggaaaatttacttcagttccaagaaaagatgtccatgaaattactagtgacactgcaccaaagcctgatgctgttttaaagcaagcctttgaacaggcacttgaatttcacaaaagtagaactattcctgctaactggaagactgaattgaaagaagatagctctagcagtgaagcagaggaagaagaggaggaggaagatgatgaaaaagaaaaggaggataatagcagtgaagaagaagaagaaatagaaccatttccagaagaaagggagaactttcttcagcaattgtacaaatttatggaagatagaggtacacctattaacaaacgacctgtacttggatatcgaaatttgaatctctttaagttattcagacttgtacacaaacttggaggatttgataatattgaaagtggagctgtttggaaacaagtctaccaagatcttggaatccctgtcttaaattcagctgcaggatacaatgttaaatgtgcttataaaaaatacttatatggttttgaggagtactgtagatcagccaacattgaatttcagatggcattgccagagaaagttgttaacaagcaatgtaaggagtgtgaaaatgtaaaagaaataaaagttaaggaggaaaatgaaacagagatcaaagaaataaagatggaggaggagaggaatataataccaagagaagaaaagcctattgaggatgaaattgaaagaaaagaaaatattaagccctctctgggaagtaaaaagaatttattagaatctatacctacacattctgatcaggaaaaagaagttaacattaaaaaaccagaagacaatgaaaatctggatgacaaagatgatgacacaactagggtagatgaatccctcaacataaaggtagaagctgaggaagaaaaagcaaaatctggagatgaaacgaataaagaagaagatgaagatgatgaagaagcagaagaggaggaggaggaggaagaagaagaagaggatgaagatgatgatgacaacaatgaggaagaggagtttgagtgctatccaccaggcatgaaagtccaagtgcggtatggacgagggaaaaatcaaaaaatgtatgaagctagtattaaagattctgatgtcgaaggtggagaggtcctttacttggtgcattactgcggatggaatgtgagatacgatgaatggattaaagcagataaaatagtaagacctgctgataaaaatgtgccaaagataaaacatcggaagaaaataaagaactccgtctacaaaaaaaaaaaaaaaaaaaagaataag

SEQ ID NO: 191033 - DNA, 3939 bp, Artificial Sequence
  derived and/or modified sequence
atgaaggccctggacgagcccccctacctgaccgtgggcaccgacgtgagcgccaagtacagaggcgccttctgcgaggccaagatcaagaccgccaagagactggtgaaggtgaaggtgaccttcagacacgacagcagcaccgtggaggtgcaggacgaccacatcaagggccccctgaaggtgggcgccatcgtggaggtgaagaacctggacggcgcctaccaggaggccgtgatcaacaagctgaccgacgccagctggtacaccgtggtgttcgacgacggcgacgagaagaccctgagaagaagcagcctgtgcctgaagggcgagagacacttcgccgagagcgagaccctggaccagctgcccctgaccaaccccgagcacttcggcacccccgtgatcggcaagaagaccaacagaggcagaagaagcaaccacatccccgaggaggagagcagcagcagcagcagcgacgaggacgaggacgacagaaagcagatcgacgagctgctgggcaaggtggtgtgcgtggactacatcagcctggacaagaagaaggccctgtggttccccgccctggtggtgtgccccgactgcagcgacgagatcgccgtgaagaaggacaacatcctggtgagaagcttcaaggacggcaagttcaccagcgtgcccagaaaggacgtgcacgagatcaccagcgacaccgcccccaagcccgacgccgtgctgaagcaggccttcgagcaggccctggagttccacaagagcagaaccatccccgccaactggaagaccgagctgaaggaggacagcagcagcagcgaggccgaggaggaggaggaggaggaggacgacgagaaggagaaggaggacaacagcagcgaggaggaggaggagatcgagcccttccccgaggagagagagaacttcctgcagcagctgtacaagttcatggaggacagaggcacccccatcaacaagagacccgtgctgggctacagaaacctgaacctgttcaagctgttcagactggtgcacaagctgggcggcttcgacaacatcgagagcggcgccgtgtggaagcaggtgtaccaggacctgggcatccccgtgctgaacagcgccgccggctacaacgtgaagtgcgcctacaagaagtacctgtacggcttcgaggagtactgcagaagcgccaacatcgagttccagatggccctgcccgagaaggtggtgaacaagcagtgcaaggagtgcgagaacgtgaaggagatcaaggtgaaggaggagaacgagaccgagatcaaggagatcaagatggaggaggagagaaacatcatccccagagaggagaagcccatcgaggacgagatcgagagaaaggagaacatcaagcccagcctgggcagcaagaagaacctgctggagagcatccccacccacagcgaccaggagaaggaggtgaacatcaagaagcccgaggacaacgagaacctggacgacaaggacgacgacaccaccagagtggacgagagcctgaacatcaaggtggaggccgaggaggagaaggccaagagcggcgacgagaccaacaaggaggaggacgaggacgacgaggaggccgaggaggaggaggaggaggaggaggaggaggaggacgaggacgacgacgacaacaacgaggaggaggagttcgagtgctacccccccggcatgaaggtgcaggtgagatacggcagaggcaagaaccagaagatgtacgaggccagcatcaaggacagcgacgtggagggcggcgaggtgctgtacctggtgcactactgcggctggaacgtgagatacgacgagtggatcaaggccgacaagatcgtgagacccgccgacaagaacgtgcccaagatcaagcacagaaagaagatcaagaacaagctggacaaggagaaggacaaggacgagaagtacagccccaagaactgcaagctgagaagactgagcaagccccccttccagaccaaccccagccccgagatggtgagcaagctggacctgaccgacgccaagaacagcgacaccgcccacatcaagagcatcgagatcaccagcatcctgaacggcctgcaggccagcgagagcagcgccgaggacagcgagcaggaggacgagagaggcgcccaggacatggacaacaacggcaaggaggagagcaagatcgaccacctgaccaacaacagaaacgacctgatcagcaaggaggagcagaacagcagcagcctgctggaggagaacaaggtgcacgccgacctggtgatcagcaagcccgtgagcaagagccccgagagactgagaaaggacatcgaggtgctgagcgaggacaccgactacgaggaggacgaggtgaccaagaagagaaaggacgtgaagaaggacaccaccgacaagagcagcaagccccagatcaagagaggcaagagaagatactgcaacaccgaggagtgcctgaagaccggcagccccggcaagaaggaggagaaggccaagaacaaggagagcctgtgcatggagaacagcagcaacagcagcagcgacgaggacgaggaggagaccaaggccaagatgacccccaccaagaagtacaacggcctggaggagaagagaaagagcctgagaaccaccggcttctacagcggcttcagcgaggtggccgagaagagaatcaagctgctgaacaacagcgacgagagactgcagaacagcagagccaaggacagaaaggacgtgtggagcagcatccagggccagtggcccaagaagaccctgaaggagctgttcagcgacagcgacaccgaggccgccgccagccccccccaccccgcccccgaggagggcgtggccgaggagagcctgcagaccgtggccgaggaggagagctgcagccccagcgtggagctggagaagcccccccccgtgaacgtggacagcaagcccatcgaggagaagaccgtggaggtgaacgacagaaaggccgagttccccagcagcggcagcaacagcgtgctgaacaccccccccaccacccccgagagccccagcagcgtgaccgtgaccgagggcagcagacagcagagcagcgtgaccgtgagcgagcccctggcccccaaccaggaggaggtgagaagcatcaagagcgagaccgacagcaccatcgaggtggacagcgtggccggcgagctgcaggacctgcagagcgagggcaacagcagccccgccggcttcgacgccagcgtgagcagcagcagcagcaaccagcccgagcccgagcaccccgagaaggcctgcaccggccagaagagagtgaaggacgcccagggcggcggcagcagcagcaagaagcagaagagaagccacaaggccaccgtggtgaacaacaagaagaagggcaagggcaccaacagcagcgacagcgaggagctgagcgccggcgagagcatcaccaagagccagcccgtgaagagcgtgagcaccggcatgaagagccacagcaccaagagccccgccagaacccagagccccggcaagtgcggcaagaacggcgacaaggaccccgacctgaaggagcccagcaacagactgcccaaggtgtacaagtggagcttccagatgagcgacctggagaacatgaccagcgccgagagaatcaccatcctgcaggagaagctgcaggagatcagaaagcactacctgagcctgaagagcgaggtggccagcatcgacagaagaagaaagagactgaagaagaaggagagagagagcgccgccaccagcagcagcagcagcagccccagcagcagcagcatcaccgccgccgtgatgctgaccctggccgagcccagcatgagcagcgccagccagaacggcatgagcgtggagtgcagatag

SEQ ID NO: 191034 - DNA, 3462 bp, Artificial Sequence
  derived and/or modified sequence
atgaaggccctggacgagcccccctacctgaccgtgggcaccgacgtgagcgccaagtacagaggcgccttctgcgaggccaagatcaagaccgccaagagactggtgaaggtgaaggtgaccttcagacacgacagcagcaccgtggaggtgcaggacgaccacatcaagggccccctgaaggtgggcgccatcgtggaggtgaagaacctggacggcgcctaccaggaggccgtgatcaacaagctgaccgacgccagctggtacaccgtggtgttcgacgacggcgacgagaagaccctgagaagaagcagcctgtgcctgaagggcgagagacacttcgccgagagcgagaccctggaccagctgcccctgaccaaccccgagcacttcggcacccccgtgatcggcaagaagaccaacagaggcagaagaagcaaccacatccccgaggaggagagcagcagcagcagcagcgacgaggacgaggacgacagaaagcagatcgacgagctgctgggcaaggtggtgtgcgtggactacatcagcctggacaagaagaaggccctgtggttccccgccctggtggtgtgccccgactgcagcgacgagatcgccgtgaagaaggacaacatcctggtgagaagcttcaaggacggcaagttcaccagcgtgcccagaaaggacgtgcacgagatcaccagcgacaccgcccccaagcccgacgccgtgctgaagcaggccttcgagcaggccctggagttccacaagagcagaaccatccccgccaactggaagaccgagctgaaggaggacagcagcagcagcgaggccgaggaggaggaggaggaggaggacgacgagaaggagaaggaggacaacagcagcgaggaggaggaggagatcgagcccttccccgaggagagagagaacttcctgcagcagctgtacaagttcatggaggacagaggcacccccatcaacaagagacccgtgctgggctacagaaacctgaacctgttcaagctgttcagactggtgcacaagctgggcggcttcgacaacatcgagagcggcgccgtgtggaagcaggtgtaccaggacctgggcatccccgtgctgaacagcgccgccggctacaacgtgaagtgcgcctacaagaagtacctgtacggcttcgaggagtactgcagaagcgccaacatcgagttccagatggccctgcccgagaaggtggtgaacaagcagtgcaaggagtgcgagaacgtgaaggagatcaaggtgaaggaggagaacgagaccgagatcaaggagatcaagatggaggaggagagaaacatcatccccagagaggagaagcccatcgaggacgagatcgagagaaaggagaacatcaagcccagcctgggcagcaagaagaacctgctggagagcatccccacccacagcgaccaggagaaggaggtgaacatcaagaagcccgaggacaacgagaacctggacgacaaggacgacgacaccaccagagtggacgagagcctgaacatcaaggtggaggccgaggaggagaaggccaagagcggcgacgagaccaacaaggaggaggacgaggacgacgaggaggccgaggaggaggaggaggaggaggaggaggaggaggacgaggacgacgacgacaacaacgaggaggaggagttcgagtgctacccccccggcatgaaggtgcaggtgagatacggcagaggcaagaaccagaagatgtacgaggccagcatcaaggacagcgacgtggagggcggcgaggtgctgtacctggtgcactactgcggctggaacgtgagatacgacgagtggatcaaggccgacaagatcgtgagacccgccgacaagaacgtgcccaagatcaagcacagaaagaagatcaagaacaagctggacaaggagaaggacaaggacgagaagtacagccccaagaactgcaagctgagaagactgagcaagccccccttccagaccaaccccagccccgagatggtgagcaagctggacctgaccgacgccaagaacagcgacaccgcccacatcaagagcatcgagatcaccagcatcctgaacggcctgcaggccagcgagagcagcgccgaggacagcgagcaggaggacgagagaggcgcccaggacatggacaacaacggcaaggaggagagcaagatcgaccacctgaccaacaacagaaacgacctgatcagcaaggaggagcagaacagcagcagcctgctggaggagaacaaggtgcacgccgacctggtgatcagcaagcccgtgagcaagagccccgagagactgagaaaggacatcgaggtgctgagcgaggacaccgactacgaggaggacgaggtgaccaagaagagaaaggacgtgaagaaggacaccaccgacaagagcagcaagccccagatcaagagaggcaagagaagatactgcaacaccgaggagtgcctgaagaccggcagccccggcaagaaggaggagaaggccaagaacaaggagagcctgtgcatggagaacagcagcaacagcagcagcgacgaggacgaggaggagaccaaggccaagatgacccccaccaagaagtacaacggcctggaggagaagagaaagagcctgagaaccaccggcttctacagcggcttcagcgaggtggccgagaagagaatcaagctgctgaacaacagcgacgagagactgcagaacagcagagccaaggacagaaaggacgtgtggagcagcatccagggccagtggcccaagaagaccctgaaggagctgttcagcgacagcgacaccgaggccgccgccagccccccccaccccgcccccgaggagggcgtggccgaggagagcctgcagaccgtggccgaggaggagagctgcagccccagcgtggagctggagaagcccccccccgtgaacgtggacagcaagcccatcgaggagaagaccgtggaggtgaacgacagaaaggccgagttccccagcagcggcagcaacagcgtgctgaacaccccccccaccacccccgagagccccagcagcgtgaccgtgaccgagggcagcagacagcagagcagcgtgaccgtgagcgagcccctggcccccaaccaggaggaggtgagaagcatcaagagcgagaccgacagcaccatcgaggtggacagcgtggccggcgagctgcaggacctgcagagcgagggcaacagcagccccgccggcttcgacgccagcgtgagcagcagcagcagcaaccagcccgagcccgagcaccccgagaaggcctgcaccggccagaagagagtgaaggacgcccagggcggcggcagcagcagcaagaagcagaagagaagccacaaggccaccgtggtgaacaacaagaagaagggcaagggcatcctgccccactag

SEQ ID NO: 191035 - DNA, 1968 bp, Artificial Sequence
  derived and/or modified sequence
atgaaggccctggacgagcccccctacctgaccgtgggcaccgacgtgagcgccaagtacagaggcgccttctgcgaggccaagatcaagaccgccaagagactggtgaaggtgaaggtgaccttcagacacgacagcagcaccgtggaggtgcaggacgaccacatcaagggccccctgaaggtgggcgccatcgtggaggtgaagaacctggacggcgcctaccaggaggccgtgatcaacaagctgaccgacgccagctggtacaccgtggtgttcgacgacggcgacgagaagaccctgagaagaagcagcctgtgcctgaagggcgagagacacttcgccgagagcgagaccctggaccagctgcccctgaccaaccccgagcacttcggcacccccgtgatcggcaagaagaccaacagaggcagaagaagcaaccacatccccgaggaggagagcagcagcagcagcagcgacgaggacgaggacgacagaaagcagatcgacgagctgctgggcaaggtggtgtgcgtggactacatcagcctggacaagaagaaggccctgtggttccccgccctggtggtgtgccccgactgcagcgacgagatcgccgtgaagaaggacaacatcctggtgagaagcttcaaggacggcaagttcaccagcgtgcccagaaaggacgtgcacgagatcaccagcgacaccgcccccaagcccgacgccgtgctgaagcaggccttcgagcaggccctggagttccacaagagcagaaccatccccgccaactggaagaccgagctgaaggaggacagcagcagcagcgaggccgaggaggaggaggaggaggaggacgacgagaaggagaaggaggacaacagcagcgaggaggaggaggagatcgagcccttccccgaggagagagagaacttcctgcagcagctgtacaagttcatggaggacagaggcacccccatcaacaagagacccgtgctgggctacagaaacctgaacctgttcaagctgttcagactggtgcacaagctgggcggcttcgacaacatcgagagcggcgccgtgtggaagcaggtgtaccaggacctgggcatccccgtgctgaacagcgccgccggctacaacgtgaagtgcgcctacaagaagtacctgtacggcttcgaggagtactgcagaagcgccaacatcgagttccagatggccctgcccgagaaggtggtgaacaagcagtgcaaggagtgcgagaacgtgaaggagatcaaggtgaaggaggagaacgagaccgagatcaaggagatcaagatggaggaggagagaaacatcatccccagagaggagaagcccatcgaggacgagatcgagagaaaggagaacatcaagcccagcctgggcagcaagaagaacctgctggagagcatccccacccacagcgaccaggagaaggaggtgaacatcaagaagcccgaggacaacgagaacctggacgacaaggacgacgacaccaccagagtggacgagagcctgaacatcaaggtggaggccgaggaggagaaggccaagagcggcgacgagaccaacaaggaggaggacgaggacgacgaggaggccgaggaggaggaggaggaggaggaggaggaggaggacgaggacgacgacgacaacaacgaggaggaggagttcgagtgctacccccccggcatgaaggtgcaggtgagatacggcagaggcaagaaccagaagatgtacgaggccagcatcaaggacagcgacgtggagggcggcgaggtgctgtacctggtgcactactgcggctggaacgtgagatacgacgagtggatcaaggccgacaagatcgtgagacccgccgacaagaacgtgcccaagatcaagcacagaaagaagatcaagaacagcgtgtacaagaagaagaagaagaagaagaacaagtag

SEQ ID NO: 191036 - protein, 1170 aa, Artificial Sequence
  derived and/or modified sequence
MAEEEVAKLEKHLMLLRQEYVKLQKKLAETEKRCALLAAQANKESSSESFISRLLAIVADLYEQEQYSDLKIKVGDRHISAHKFVLAARSDSWSLANLSSTKELDLSDANPEVTMTMLRWIYTDELEFREDDVFLTELMKLANRFQLQLLRERCEKGVMSLVNVRNCIRFYQTAEELNASTLMNYCAEIIASHWDDLRKEDFSSMSAQLLYKMIKSKTEYPLHKAIKVEREDVVFLYLIEMDSQLPGKLNEADHNGDLALDLALSRRLESIATTLVSHKADVDMVDKSGWSLLHKGIQRGDLFAATFLIKNGAFVNAATLGAQETPLHLVALYSSKKHSADVMSEMAQIAEALLQAGANPNMQDSKGRTPLHVSIMAGNEYVFSQLLQCKQLDLELKDHEGSTALWLAVQHITVSSDQSVNPFEDVPVVNGTSFDENSFAARLIQRGSHTDAPDTATGNCLLQRAAGAGNEAAALFLATNGAHVNHRNKWGETPLHTACRHGLANLTAELLQQGANPNLQTEEALPLPKEAASLTSLADSVHLQTPLHMAIAYNHPDVVSVILEQKANALHATNNLQIIPDFSLKDSRDQTVLGLALWTGMHTIAAQLLGSGAAINDTMSDGQTLLHMAIQRQDSKSALFLLEHQADINVSRTQDGETALQLAIRNQLPLVVDAICTRGADMSVPDEKGNPPLWLALANNLEDIASTLVRHGCDATCWGPGPGGCLQTLLHRAIDENNEPTACFLIRSGCDVNSPRQPGANGEGEEEARDGQTPLHLAASWGLEETVQCLLEFGANVNAQDAEGRTPIHVAISSQHGVIIQLLVSHPDIHLNVRDRQGLTPFACAMTFKNNKSAEAILKRESGAAEQVDNKGRNFLHVAVQNSDIESVLFLISVHANVNSRVQDASKLTPLHLAVQAGSEIIVRNLLLAGAKVNELTKHRQTALHLAAQQDLPTICSVLLENGVDFAAVDENGNNALHLAVMHGRLNNIRVLLTECTVDAEAFNLRGQSPLHILGQYGKENAAAIFDLFLECMPGYPLDKPDADGSTVLLLAYMKGNANLCRAIVRSGARLGVNNNQGVNIFNYQVATKQLLFRLLDMLSKEPPWCDGSYCYECTARFGVTTRKHHCRHCGRLLCHKCSTKEIPIIKFDLNKPVRVCNICFDVLTLGGVS

SEQ ID NO: 191037 - DNA, 3513 bp, Artificial Sequence
  derived and/or modified sequence
atggccgaggaggaggtggccaagctggagaagcacctgatgctgctgagacaggagtacgtgaagctgcagaagaagctggccgagaccgagaagagatgcgccctgctggccgcccaggccaacaaggagagcagcagcgagagcttcatcagcagactgctggccatcgtggccgacctgtacgagcaggagcagtacagcgacctgaagatcaaggtgggcgacagacacatcagcgcccacaagttcgtgctggccgccagaagcgacagctggagcctggccaacctgagcagcaccaaggagctggacctgagcgacgccaaccccgaggtgaccatgaccatgctgagatggatctacaccgacgagctggagttcagagaggacgacgtgttcctgaccgagctgatgaagctggccaacagattccagctgcagctgctgagagagagatgcgagaagggcgtgatgagcctggtgaacgtgagaaactgcatcagattctaccagaccgccgaggagctgaacgccagcaccctgatgaactactgcgccgagatcatcgccagccactgggacgacctgagaaaggaggacttcagcagcatgagcgcccagctgctgtacaagatgatcaagagcaagaccgagtaccccctgcacaaggccatcaaggtggagagagaggacgtggtgttcctgtacctgatcgagatggacagccagctgcccggcaagctgaacgaggccgaccacaacggcgacctggccctggacctggccctgagcagaagactggagagcatcgccaccaccctggtgagccacaaggccgacgtggacatggtggacaagagcggctggagcctgctgcacaagggcatccagagaggcgacctgttcgccgccaccttcctgatcaagaacggcgccttcgtgaacgccgccaccctgggcgcccaggagacccccctgcacctggtggccctgtacagcagcaagaagcacagcgccgacgtgatgagcgagatggcccagatcgccgaggccctgctgcaggccggcgccaaccccaacatgcaggacagcaagggcagaacccccctgcacgtgagcatcatggccggcaacgagtacgtgttcagccagctgctgcagtgcaagcagctggacctggagctgaaggaccacgagggcagcaccgccctgtggctggccgtgcagcacatcaccgtgagcagcgaccagagcgtgaaccccttcgaggacgtgcccgtggtgaacggcaccagcttcgacgagaacagcttcgccgccagactgatccagagaggcagccacaccgacgcccccgacaccgccaccggcaactgcctgctgcagagagccgccggcgccggcaacgaggccgccgccctgttcctggccaccaacggcgcccacgtgaaccacagaaacaagtggggcgagacccccctgcacaccgcctgcagacacggcctggccaacctgaccgccgagctgctgcagcagggcgccaaccccaacctgcagaccgaggaggccctgcccctgcccaaggaggccgccagcctgaccagcctggccgacagcgtgcacctgcagacccccctgcacatggccatcgcctacaaccaccccgacgtggtgagcgtgatcctggagcagaaggccaacgccctgcacgccaccaacaacctgcagatcatccccgacttcagcctgaaggacagcagagaccagaccgtgctgggcctggccctgtggaccggcatgcacaccatcgccgcccagctgctgggcagcggcgccgccatcaacgacaccatgagcgacggccagaccctgctgcacatggccatccagagacaggacagcaagagcgccctgttcctgctggagcaccaggccgacatcaacgtgagcagaacccaggacggcgagaccgccctgcagctggccatcagaaaccagctgcccctggtggtggacgccatctgcaccagaggcgccgacatgagcgtgcccgacgagaagggcaacccccccctgtggctggccctggccaacaacctggaggacatcgccagcaccctggtgagacacggctgcgacgccacctgctggggccccggccccggcggctgcctgcagaccctgctgcacagagccatcgacgagaacaacgagcccaccgcctgcttcctgatcagaagcggctgcgacgtgaacagccccagacagcccggcgccaacggcgagggcgaggaggaggccagagacggccagacccccctgcacctggccgccagctggggcctggaggagaccgtgcagtgcctgctggagttcggcgccaacgtgaacgcccaggacgccgagggcagaacccccatccacgtggccatcagcagccagcacggcgtgatcatccagctgctggtgagccaccccgacatccacctgaacgtgagagacagacagggcctgacccccttcgcctgcgccatgaccttcaagaacaacaagagcgccgaggccatcctgaagagagagagcggcgccgccgagcaggtggacaacaagggcagaaacttcctgcacgtggccgtgcagaacagcgacatcgagagcgtgctgttcctgatcagcgtgcacgccaacgtgaacagcagagtgcaggacgccagcaagctgacccccctgcacctggccgtgcaggccggcagcgagatcatcgtgagaaacctgctgctggccggcgccaaggtgaacgagctgaccaagcacagacagaccgccctgcacctggccgcccagcaggacctgcccaccatctgcagcgtgctgctggagaacggcgtggacttcgccgccgtggacgagaacggcaacaacgccctgcacctggccgtgatgcacggcagactgaacaacatcagagtgctgctgaccgagtgcaccgtggacgccgaggccttcaacctgagaggccagagccccctgcacatcctgggccagtacggcaaggagaacgccgccgccatcttcgacctgttcctggagtgcatgcccggctaccccctggacaagcccgacgccgacggcagcaccgtgctgctgctggcctacatgaagggcaacgccaacctgtgcagagccatcgtgagaagcggcgccagactgggcgtgaacaacaaccagggcgtgaacatcttcaactaccaggtggccaccaagcagctgctgttcagactgctggacatgctgagcaaggagcccccctggtgcgacggcagctactgctacgagtgcaccgccagattcggcgtgaccaccagaaagcaccactgcagacactgcggcagactgctgtgccacaagtgcagcaccaaggagatccccatcatcaagttcgacctgaacaagcccgtgagagtgtgcaacatctgcttcgacgtgctgaccctgggcggcgtgagctag

SEQ ID NO: 191038 - DNA, 3513 bp, Artificial Sequence
  derived and/or modified sequence
atggctgaggaggaagtcgccaagttagaaaagcacctgatgttattgagacaggagtatgtgaaactccagaaaaaactagcagaaactgagaagaggtgtgccctgctagcggcacaggccaataaagagagcagtagcgagagctttatcagccggctgctcgccatcgtcgctgatctgtatgagcaagagcagtatagtgaccttaaaattaaagtcggcgaccgccacatctccgctcacaaatttgttctggccgctcgctctgattcttggagtctcgctaatctctcctccactaaggaactggacctgtccgacgctaacccagaagtaacaatgaccatgctgcgctggatttatacagatgaattggagttccgtgaggacgatgttttcctgaccgaattaatgaagttggcaaataggttccagcttcaattgctgcgggagcgctgcgagaagggagtgatgagcctcgtaaatgtgcggaactgcatccgcttctaccaaaccgcagaagagttaaacgccagcacactgatgaactattgcgcggaaattattgcttcacactgggacgatctgcgtaaagaggacttctctagcatgagcgcccaactactgtacaagatgatcaaatcaaaaaccgagtaccctctgcacaaggcgataaaggttgaacgcgaggacgtggtgtttctataccttatcgaaatggatagtcagctgccgggcaaactaaacgaggccgaccacaacggggatctggccttggatctagccttgagcagaagactggagagtatcgccacaacgttggtgtcccataaggccgacgtggacatggtcgataaatccggctggtctctccttcacaaaggcatccagcgcggagatcttttcgccgccacatttctcattaaaaatggggccttcgttaacgctgccactctgggggcccaagaaaccccccttcatctagtggccctatatagtagtaaaaagcactcagcagatgttatgagcgagatggcacaaatcgcagaggccctgctgcaagccggcgctaatccaaatatgcaggactccaaaggccgcacccctttacacgtcagcattatggccggaaacgaatacgttttctcacaactcctccagtgcaaacagttagatcttgagcttaaggatcacgagggcagtaccgccctgtggttggcagtacaacacattacagtgtcttccgatcagtccgtgaatccatttgaggacgtccccgtggtaaatggcacctcttttgacgaaaatagcttcgctgcccggctgatccagagaggatctcacacggacgccccagatactgccacaggaaactgcttactgcagagagctgcaggcgcggggaatgaagccgcagctcttttcctcgccactaacggggcccacgtaaatcaccgaaataagtggggggaaacccctttacacaccgcctgtagacatgggctggctaatctgacagccgaactgctacagcagggagctaaccccaacctgcagaccgaggaggccctacctctccctaaagaggccgcaagccttacctccctcgctgatagtgtacacctgcaaacacctcttcacatggccatcgcctacaaccatcccgacgtggtatctgtgatcctggagcagaaggcgaacgctctgcacgccacaaataatctccaaattataccagatttctccctaaaggatagcagggatcagacagttctcggcctggctctctggacaggcatgcataccatcgctgcacagcttcttggcagcggcgccgccatcaatgacactatgtctgatgggcagaccctgctgcatatggccattcagagacaagatagtaagagcgccctttttttactggagcatcaagccgatatcaacgtgtctcggacacaggatggtgaaactgccctgcagcttgctattaggaaccagctgcccttggtggtagatgcgatctgtacaagaggagccgatatgtctgtcccagacgaaaagggtaatcctccactctggctggccttggccaacaacctggaggacatagcttccactctggtgcgtcacggctgcgatgcgacctgttgggggcctggacccgggggctgcctgcagaccttgctgcatcgcgctattgatgagaataacgagcctactgcatgttttctcatcagaagtggttgcgacgtgaatagtcccaggcagcccggtgccaacggcgagggggaagaggaggcccgggacgggcagacacccctccacctggccgccagttggggtctcgaagagacagtccagtgcttactggaatttggtgccaacgtgaacgcccaagacgccgagggccgcacccctatccacgtcgcgatctctagtcagcatggagtgatcatccagttgttggtcagccaccccgacattcacctcaacgtgagagaccgtcagggactcacacccttcgcttgtgctatgaccttcaaaaacaataagagtgcagaggctatcctaaaaagagagtcgggtgctgccgagcaggttgacaacaagggccgcaacttcctgcatgtcgccgttcaaaattctgatatcgagtccgtcctctttctgatctcagtgcatgctaatgtaaatagcagagtgcaggatgctagtaagctgacaccactgcaccttgctgtgcaggctgggtcagagattatcgtgcggaaccttctgctggcaggcgcaaaggtcaacgagctgacgaagcacagacaaactgccctccatctggccgctcagcaggatctccctacaatctgttccgtgttactggaaaacggtgttgattttgctgctgtggatgaaaatggtaataacgcgcttcacctggctgtgatgcacggacgacttaacaacatcagagttctgctgacagagtgtacggtggacgcagaagccttcaacctgcgcggacaaagcccgctgcacatattaggacaatacggcaaagaaaacgcggccgcaatttttgacctgtttttggagtgtatgcccggctacccactggacaagcccgacgctgatggttccacggtcctgttgctggcctacatgaagggtaacgccaacctgtgcagagctatagtacggagcggcgccaggctgggggttaacaataaccaaggtgtcaacatatttaattatcaggtggccaccaaacagctcctattccgcctccttgacatgttgtccaaagaacccccatggtgcgacggcagctactgctacgagtgtactgctcggtttggggtaacaaccagaaaacatcactgtaggcattgcggcagacttttatgccataagtgctctaccaaggagatcccaatcattaagttcgatctaaataaaccagtccgggtgtgcaacatatgcttcgacgtgttgactcttggtggggtctcatag

SEQ ID NO: 191039 - DNA, 3513 bp, Artificial Sequence
  derived and/or modified sequence
atggctgaggaagaggtagcaaaacttgaaaagcatctcatgctcctccgacaggaatacgtgaaactgcaaaagaaattagctgagacagagaagcgttgcgcactgctggcagcacaagctaacaaagaatcaagcagcgaatcattcatctctcggctgctggcgattgtagctgacctgtacgagcaagagcagtactctgacttgaagatcaaagtgggtgacagacatatctctgcccacaagtttgtgctggctgctcggagcgatagttggagcctagctaatctttcttcaacaaaagagctggacctgagcgacgccaacccggaggtaacgatgacaatgctcaggtggatatacactgatgagttggaattccgtgaggacgacgtgttcctaaccgagctgatgaagctggctaaccgcttccagttgcaactgctgagggagcggtgtgaaaaaggcgttatgtctctggtcaacgtgcggaattgcatacgtttttatcagacagctgaagagttgaatgccagcaccttaatgaattactgtgctgagatcatcgctagccactgggacgacttacggaaggaggatttctcttcaatgagcgcacagctactctacaaaatgatcaaaagcaagaccgaatacccactgcataaagccattaaggtagagcgtgaggatgtggtcttcctgtacctgatcgaaatggacagtcagctccctggtaagctgaacgaggccgatcataacggtgatctcgccctcgatttggctttgtcacgccgcctggagagcatcgcaaccaccctcgtctctcataaggcagatgtggatatggtcgataaatcagggtggtctttgctccataagggaatccagaggggagacctgtttgcagctacctttctaatcaagaacggagctttcgtcaacgctgctaccctgggagcgcaagaaactccactgcatttagtggcgctctattcatctaagaagcatagcgccgacgtgatgtcagaaatggcacagatcgctgaggcactgttgcaggcaggcgcgaatcccaacatgcaggatagtaagggccgcactcccctccacgtgtccataatggccggcaatgagtatgtgttcagtcagctgcttcagtgtaaacagctcgacctagaactgaaggaccatgagggttctaccgcattatggctcgccgtccagcatattacagtcagtagcgaccagagcgtgaacccctttgaagatgtgcctgttgttaacgggacatcattcgacgagaacagcttcgccgctcgcttgattcagcgcggaagtcacaccgatgcccccgatacagcaacagggaactgtcttctccagagagcagccggagccgggaatgaggcggctgccctgttcctcgccacgaatggggctcatgtgaatcatagaaataagtggggagaaactccccttcacacggcttgtaggcacggcctcgcaaaccttacagcagaactcctgcagcagggagctaaccccaacttgcaaacagaggaggcgttgcccttaccgaaagaagcggcatctctcacgtccctggcagatagtgtacacctgcaaacgcctttacacatggctattgcttataatcatcccgacgtagtgtcagtcatattggagcagaaagccaatgcactacatgccacaaacaatctgcagatcattccggacttttctctaaaggattcaagggatcagacagtgctcggactggccctgtggactggtatgcacacaatcgccgctcagctcctaggcagcggggccgccatcaatgacactatgtctgatggccagaccttattacacatggcaattcagcgacaggactcaaagtcagcgctgtttttgctggaacaccaggctgatatcaacgtctcaaggacccaggacggagaaaccgctctccaactggcaatcaggaaccagctgccgcttgtggtagatgcaatctgcactagaggagctgacatgagcgtgcctgacgagaaggggaatccaccgctgtggttggctctcgctaacaatttggaagacatcgcctcaactcttgtccgacacggctgtgatgctacctgctggggacctggccctggcggttgcttacagactcttctgcaccgggcaattgacgagaacaatgagcccactgcctgcttcctgatccggtcaggctgtgatgttaacagcccgagacagcccggggccaacggcgagggggaggaggaagcccgcgacggtcaaacaccactccatttggctgcatcatggggcttagaggaaacagtgcaatgtttgcttgaatttggtgctaatgtgaatgctcaggacgcagaaggcagaacacccatccacgtggctatctctagccagcacggcgtgatcattcaactgttggtctctcacccagacattcacttgaacgtgagagacagacaaggcctgacacctttcgcctgtgcgatgacattcaaaaataataaatcggctgaagcgatactcaagagggaatcaggagcggcagagcaagttgacaataagggcagaaacttccttcacgtcgctgtgcagaattcagatatagaatcagtactgtttctgattagtgtccacgcaaatgtcaactctagggtacaggatgcatctaagctgacccccctgcatctcgcggtacaggccggaagtgagattatagtgcggaacctgcttcttgctggcgccaaagtcaacgagctgaccaagcatagacagactgcccttcacctggctgcacagcaggatctgcctacgatttgcagtgtgctgttggaaaatggtgtagactttgcagccgtggatgaaaacggaaacaacgcccttcacctggccgtgatgcatggccgacttaataatatacgcgtactacttaccgaatgcactgttgacgctgaggctttcaacctccggggccaaagtcctcttcatatcctcggccagtacggaaaggaaaacgccgcagcaatctttgacctctttctggagtgcatgcccggctatcctttagacaaaccagacgcagacggaagcaccgtgcttctgctggcttacatgaagggtaacgccaatctgtgtagagcgatagtgaggagtggcgctcgcctgggggtgaataataaccagggtgtaaacattttcaattatcaggtggcaacgaagcaactgctcttcaggctcctcgatatgctgtccaaagagcctccctggtgtgacggctcttattgttacgagtgtactgctcggttcggtgtgactacaagaaaacaccactgccgccattgcgggcggttgctttgccacaaatgcagcaccaaggagatcccaatcattaagttcgatctgaataagccagtgagagtttgtaatatctgttttgacgtgttaaccttgggcggcgtctcgtag

SEQ ID NO: 191040 - DNA, 3513 bp, Artificial Sequence
  derived and/or modified sequence
atggccgaggaggaggtggccaagctggagaagcacctgatgctgctgcggcaggagtatgtgaagctgcagaagaagctggccgagacagagaagagatgtgccctgctggccgcccaggccaacaaggagagcagcagcgagagcttcatcagccggctgctggccatcgtggccgacctgtatgagcaggagcagtacagcgacctgaagatcaaggtgggggacagacacatcagcgcccacaagtttgtgctggccgcccggagtgacagctggagcctggccaacctgagcagcaccaaggagctggacctgagtgatgccaaccctgaggtgaccatgaccatgctgcgctggatctacacagatgagctggagttccgggaggatgatgtgttcctgacagagctgatgaagctggccaaccgcttccagctgcagctgctgcgggagcgctgtgagaagggcgtgatgagcctggtgaatgtgaggaactgcatccgcttctaccagacagctgaggagctgaatgccagcaccctgatgaactactgtgccgagatcatcgccagccactgggatgacctgaggaaggaggacttcagctccatgtctgcccagctgctgtacaagatgatcaagagcaagacagagtaccccctgcacaaggccatcaaggtggagagagaagatgtggtgttcctgtacctgattgagatggacagccagctgcccgggaagctgaatgaggccgaccacaatggagacctggccctggacctggccctgagccggcggctggagagcatcgccaccaccctggtgagccacaaggcagatgtggacatggtggacaagagcggctggagcctgctgcacaagggcatccagagaggagacctgtttgctgccaccttcctgatcaagaatggagcctttgtgaatgctgccaccctgggcgcccaggagacccccctgcacctggtggccctgtacagcagcaagaagcacagcgcagatgtgatgtctgagatggcccagattgctgaggccctgctgcaggccggggccaaccccaacatgcaggacagcaagggccgcacccccctgcacgtgtccatcatggctggaaatgaatatgtgttcagccagctgctgcagtgcaagcagctggacctggagctgaaggaccacgagggcagcacagccctgtggctggccgtgcagcacatcaccgtgtccagtgaccagagcgtgaacccctttgaagatgtgcctgtggtgaatggcaccagctttgatgagaacagctttgctgcccggctcatccagaggggcagccacacagatgccccagacacagccactggaaactgcctgctgcagagagctgctggagctggaaatgaggccgccgccctcttcctggccaccaacggggcccacgtgaaccacaggaacaagtggggcgagacccccctgcacacagcctgcagacatggcctggccaacctgacagctgagctgctgcagcagggcgccaaccccaacctgcagacagaggaggccctgcccctgcccaaggaggccgccagcctgaccagcctggccgacagcgtgcacctgcagacccccctgcacatggccatcgcctacaaccacccagatgtggtgtctgtcatcctggagcagaaggccaatgccctgcacgccaccaacaacctgcagatcatcccagacttcagcctgaaggacagccgggaccagacagtgctgggcctggccctgtggacaggcatgcacaccatcgccgcccagctgctgggcagcggggccgccatcaatgacaccatgtctgatggccagaccctgctgcacatggccatccagaggcaggacagcaagagcgccctcttcctgctggagcaccaggccgacatcaacgtgtccaggacccaggatggagaaacagccctgcagctggccatccggaaccagctgcccctggtggtggatgccatctgcaccagaggagctgacatgtctgtgcctgatgagaagggcaacccccccctgtggctggccctggccaacaacctggaggacatcgccagcaccctggtgagacatggctgtgatgccacctgctggggccctggccctgggggctgcctgcagaccctgctgcaccgggccattgatgagaacaatgagcccacagcctgcttcctgatccgcagcggctgtgatgtgaacagcccccggcagcccggggccaatggagagggggaggaggaggccagagatggccagacccccctgcacctggccgcctcctggggcctggaggagaccgtgcagtgcctgctggagtttggagccaacgtgaatgcccaggatgctgagggccgcacccccatccacgtggccatcagcagccagcacggcgtcatcatccagctgctggtgagccacccagacatccacctgaatgtgcgggaccggcagggcctgaccccatttgcctgtgccatgaccttcaagaacaacaagtctgctgaggccatcctgaagcgggagagcggggctgctgagcaggtggacaacaagggcaggaacttcctgcacgtggccgtgcagaacagcgacattgaatctgtgctcttcctgatctctgtgcacgccaacgtgaacagccgggtgcaggatgccagcaagctgacccccctgcacctggccgtgcaggccggcagcgagatcatcgtgaggaacctgctgctggccggggccaaggtgaatgagctgaccaagcaccggcagacagccctgcacctggccgcccagcaggacctgcccaccatctgcagcgtgctgctggagaatggagtggactttgctgctgtggatgaaaatggaaataatgccctgcacctggccgtgatgcacggccgcctgaacaacatccgggtgctgctgacagaatgtactgtggatgctgaggccttcaacctgcggggccagagccccctgcacatcctgggccagtatggcaaggaaaatgctgctgccatctttgacctcttcctggagtgcatgcctggctaccccctggacaagccagatgctgatggcagcacagtgctgctgctggcctacatgaagggaaatgccaacctgtgccgggccatcgtgcgcagcggggcccggctgggcgtgaacaacaaccagggcgtgaacatcttcaactaccaggtggccaccaagcagctgctcttccggctgctggacatgctgagcaaggagcccccctggtgtgatggcagctactgctatgaatgtacagcccgcttcggcgtgaccaccaggaagcaccactgccgccactgcggccgcctgctgtgccacaagtgcagcaccaaggagatccccatcatcaagtttgacctgaacaagcctgtgcgggtgtgcaacatctgctttgatgtgctgaccctgggcggcgtgtcctag

SEQ ID NO: 191041 - DNA, 3513 bp, Artificial Sequence
  derived and/or modified sequence
atggccgaggaggaggtggccaagctggagaagcacctgatgctgctgaggcaagagtacgtcaagttgcagaaaaagctggcggagacagaaaaacgctgtgcgcttctcgcggcgcaagccaacaaagagtccagctccgaaagttttatctctaggctgctggctatcgtagccgatctgtatgagcaagaacaatactccgacttaaagatcaaagttggggacagacacatttccgcccacaagtttgtgctggcggccaggagcgactcgtggagcctggccaatctgtcctccacaaaagagctggatctcagcgatgccaaccccgaggtaaccatgaccatgctccggtggatctacaccgacgaactggaatttcgggaggatgacgtgttcctgacagagctgatgaagctggctaatcggtttcagctgcaacttctgagggaacgatgtgaaaagggagtgatgtcccttgttaatgttaggaactgcatccggttctaccagactgcggaggaactgaacgcaagtacgctgatgaactactgcgccgaaattatcgcttcacactgggatgatctgaggaaggaagatttttcttcgatgtccgctcagctgctctacaaaatgattaagtcaaaaacagagtacccgcttcacaaggccataaaggtcgagcgggaagacgttgtctttctgtaccttatagagatggattcccaacttcccggtaagctcaatgaggccgaccataatggtgacttagctctggatctggctctgagcagacgccttgaatccattgctaccactttggtaagtcacaaggcggatgtggatatggtggataaatctggatggagtcttttacacaaaggcatccaaagaggcgacctgtttgccgcaacatttctgatcaagaacggcgcctttgtgaacgcggccactctcggtgcacaggagactcctctgcatctggttgccttgtactcaagcaaaaaacactccgccgacgtgatgagcgaaatggctcagatcgccgaggctcttctccaagccggggctaatccaaatatgcaggacagcaagggacgaactccacttcatgtttctattatggctggcaatgagtacgtgttctcccagttgctgcagtgcaagcagctggatctggagctaaaagatcatgaaggaagtacggctctgtggctcgctgtgcagcatataaccgtgagttccgatcagtctgtgaacccgtttgaggatgtgcccgttgtgaatggaactagtttcgatgaaaacagcttcgctgccagactcattcagcgtggcagtcacacagatgctccagatacggctaccgggaactgcctgctccagagggccgcgggagctggaaacgaagcggcggccttgtttctggcgaccaatggcgcccatgtgaatcataggaacaagtggggcgagacacctctccacaccgcctgtcggcatggactagccaacttgacggcagagctcttacagcagggggccaaccctaatttacagactgaggaggctctgcctttgcccaaggaggccgccagtctcaccagtttggcagacagcgtccacctccagactcccctccacatggctatagcatacaatcatccagacgttgtgagcgtcatcctggaacagaaggcgaacgccctccacgctacaaataacctccaaattatacccgatttctcactgaaggacagtagagatcaaactgtcctgggccttgctttgtggacgggcatgcatacaatcgcagctcaactgctgggatccggcgctgctattaacgataccatgagtgatggtcagacactactccacatggctatccagcgtcaggactcgaaatccgctctgttcttgctggagcatcaggcggacattaatgtctcgcgaacgcaggatggcgagaccgctcttcagctcgctataaggaaccagctgcctctggtggttgacgcgatttgcacaaggggagccgatatgagcgttccagacgaaaagggtaacccgccactgtggctagcactcgcaaacaacttagaggatattgcctctacactggtgcgccacgggtgtgacgccacctgctggggcccaggtcccggggggtgcctgcaaactttactgcaccgggcaattgatgagaataatgagccgaccgcctgttttctgatccgctctggttgtgatgtaaactctccccgtcagcccggagcgaatggcgagggcgaggaagaggcccgagatggccagactcctctacatcttgcagcaagctggggattggaagaaaccgtgcaatgcttgctggagtttggagcaaacgtcaacgctcaagacgcggagggcagaaccccaatacacgtagcaatttctagtcaacatggggtaattattcagctactggtctcacaccccgatattcacctgaatgtgagggacaggcaaggcctgacacctttcgcatgcgccatgacgttcaaaaacaacaaaagtgcggaggccattctgaagcgcgaatctggcgccgccgagcaggtggacaacaagggcaggaatttccttcacgtggccgtccagaactccgacattgagtccgtcctgttcctcatcagtgtgcatgccaatgtcaatagtagagtgcaagacgcaagcaagcttacaccgctgcatctagccgtccaggccggaagcgagatcatcgtgagaaatctgctactggccggcgctaaggtcaacgaactgacaaaacataggcagacagccctacatctggcagcacagcaggacctgcctacaatctgtagcgtgctcctcgaaaacggagtagactttgccgctgtcgacgaaaacggcaataacgccttacatcttgccgtgatgcacgggaggcttaacaatataagggttctgctcacagagtgtacagtcgatgctgaggcctttaacctcagaggtcagagccctctgcatatcctcgggcagtatggcaaagaaaacgcggcagctatttttgaccttttcctagagtgcatgcctggatatccactcgacaagccagatgcagacggctccacagtattgttactggcatatatgaaggggaatgctaacctttgtcgggcgatcgtgagatcaggcgcccgactgggcgttaataataaccagggagtgaatattttcaattaccaggtcgctacaaagcagctcctttttcggctgctggatatgttgtccaaggaacctccctggtgcgatggaagttactgctatgagtgcacagcccgcttcggcgttacgactcggaagcatcactgcagacattgcggaagacttttatgccacaaatgttcaaccaaagagattcccatcataaaatttgacctgaataagccagtgagagtctgtaatatttgtttcgatgtacttactttaggtggcgtgtcatag

SEQ ID NO: 191042 - DNA, 3513 bp, Artificial Sequence
  derived and/or modified sequence
atggccgaggaggaggtggccaagctggagaagcacctgatgctgctaagacaagagtatgtgaagctccagaaaaagctagccgagacagagaaaagatgcgccctgctggcggcccaggctaacaaggaatcaagctcagaatccttcatctcccgccttctggctatagtggctgacttgtatgaacaggaacagtacagcgacctgaaaataaaagttggggaccgtcacataagtgcccacaagtttgtacttgctgcccgttctgacagctggagcctcgctaatctgagcagtaccaaggagctggacctctcggacgccaatcctgaagtaaccatgacaatgctgagatggatttacactgatgaactggagttccgcgaggacgatgtgttcctaacagaacttatgaaactggcgaataggttccagctccagctacttagagaacgatgcgagaagggtgttatgtcccttgtaaacgtgcgcaattgcatccgattttatcaaaccgccgaggagctgaatgcaagtactctcatgaattactgcgctgagatcattgccagccactgggacgatctccgcaaggaggattttagctctatgtccgcgcagctgctgtataagatgataaaatccaagacagagtaccctctgcataaggccatcaaggttgagagagaagacgtggtatttctgtacttaattgagatggacagtcagttaccgggcaagctcaatgaagcagatcacaacggcgacttagccctggatctggccctgtctcgtcgcttagagagtatcgcaaccaccctcgtgtcccataaggctgatgtcgatatggtggacaaatcagggtggtcacttctgcacaagggcatccaacgcggcgatctcttcgcagcgacttttttgatcaagaatggtgcatttgttaacgcagcaacactgggggctcaagaaacaccacttcacttggtggctctctactccagcaaaaaacacagtgccgatgtaatgagcgagatggcccagatcgccgaagctctgctgcaagccggagctaacccgaatatgcaggacagcaaagggagaactcctctccacgtgtcaatcatggccggtaatgagtacgtttttagccagctgctccagtgcaaacagttggacctcgagctgaaggaccacgaagggtctacagctttatggctggcagtccagcatattactgtctcatcggaccagagcgttaatcccttcgaagacgtccccgtggtcaacgggacttctttcgatgaaaactcattcgcagctcgcctgattcagagagggtcgcatacagatgcacctgatacagcaaccggcaattgtctgctgcagcgggctgccggggccggtaatgaagctgccgccctcttcctggccactaacggagctcatgtgaaccaccggaacaagtggggggagacccccctgcacaccgcatgtcggcacgggctagcaaacctaactgcggagctgcttcagcagggggcgaaccctaacctgcagaccgaagaggccttgccgttgcctaaagaggccgcttcacttacatccctggcagattccgttcatttgcagacaccactgcacatggccatcgcctataaccatcccgatgtggtatccgtcatcctggagcagaaagcgaacgcccttcacgcgaccaataacctccagattattcctgatttttctctcaaggactcgcgcgaccagaccgttctgggactcgccctgtggactgggatgcacaccatcgctgcccaactcctcggtagcggtgcagcaatcaacgataccatgagtgatggacagaccttgctgcatatggcaatacaacgccaggatagtaagtcagccctgtttctgctggagcaccaggccgatatcaacgttagtcgaacgcaggatggcgaaaccgccttgcaactggccattcgtaaccagctcccactggtggtagacgcaatctgtaccagaggtgccgacatgtccgtgcccgacgagaaaggaaacccaccactgtggttggctctggccaataacctagaggatatagcctcaactcttgtaagacacggctgcgacgccacgtgttgggggcctgggcctggtggatgcttgcaaacactcctgcatcgggccatagacgagaacaatgaacccaccgcatgcttcctaatcaggagtggctgtgacgtcaattctccaagacaaccaggcgcaaatggcgagggtgaggaggaagcccgagacggccaaacacccctgcacctggccgccagttgggggctcgaggaaacagtccaatgcctgctcgaatttggggccaatgttaatgctcaggacgccgaaggaaggacacctatacacgtagcgatttcctctcagcacggcgtgattatccaactgctggtcagccaccccgatatacatttgaatgtccgagaccggcaaggcctgacccccttcgcgtgtgcgatgaccttcaaaaataacaagagcgctgaggccatcttgaaaagagaaagtggtgcagccgaacaggtcgacaataagggcagaaacttcttacatgtggcagtgcagaatagcgatatcgagtcagtgttgtttctcatcagcgtacacgccaatgttaactcaagagtgcaggacgcaagcaagctcacccccctccacctggccgtgcaggcgggatctgagatcatcgttcggaatctccttctcgcaggcgcaaaggtgaacgaactcaccaaacatcgacaaacagccttgcaccttgccgcccagcaggacctgcccaccatctgttctgtcctactggagaacggcgttgacttcgctgccgtggacgagaacggaaacaacgcactacatcttgcagtgatgcacgggcgtctcaataatatccgggtactgttaacggaatgtaccgtcgacgctgaggcctttaaccttcggggacaatctccacttcatattctgggccagtatggtaaagagaacgccgcggccatcttcgatctcttcctcgaatgtatgcccgggtacccactggataaacccgacgctgatggtagtaccgttctcctgctggcttacatgaaggggaatgccaacctatgccgagccattgtgagatcgggagctcgcctcggtgtgaataataaccaaggcgttaacattttcaactaccaggttgcaacaaagcagctccttttccggctgctggatatgctctccaaggagccaccttggtgtgacgggtcttactgttacgagtgcacagcaaggttcggagttacaacaaggaagcaccattgtcgacactgtgggcgtctgttatgtcacaaatgctcgacgaaggaaattcccatcattaagtttgatctcaataagccagtgagagtctgcaacatatgttttgacgtgctcaccctgggcggtgtctcctag

SEQ ID NO: 191043 - DNA, 7959 bp, Artificial Sequence
  derived and/or modified sequence
gcacttctcgcgaggttgcaggcagtgccgggccagacatggcggaagaggaggtggccaagttggagaagcacttgatgcttctgcggcaggagtatgtcaagctgcagaagaagctggcggagacagagaagcgctgcgctctcttggctgcgcaggcaaacaaggagagcagcagcgagtccttcatcagccgtctgctggccatcgtggcagacctctacgagcaggagcagtacagcgatctgaagataaaggttggggacaggcacatcagtgctcacaagtttgtcctggcagcccgcagtgacagctggagtctggctaacttgtcttccactaaagagttggacctgtcagatgctaatcctgaggtgacgatgacaatgcttcgctggatctatacagatgagctggagttcagagaggatgatgtgttcctgactgaactgatgaaactagcaaatcggtttcagctacagctcctcagggagagatgtgagaagggtgttatgtctctagtgaatgtcaggaactgtattcgcttctaccagacggcagaggagctgaatgccagcacactgatgaactactgtgcagaaattattgcaagtcattgggacgacctgaggaaggaggatttcagcagcatgagcgctcagttgttatacaaaatgatcaaatccaagacagagtacccgctacataaagccatcaaagtggagagagaagacgtggtcttcctgtatctgattgaaatggattcccagctccctgggaagctgaatgaagcggatcataacggagatctggcattagatctagccctctcacgacgactggagagtattgccaccacgctggttagtcacaaagctgatgtggacatggtggacaagagtggctggagcttgttacacaaaggaatccaaagaggagatctctttgctgccactttcctcattaagaatggggcctttgtcaacgctgctacactgggtgcccaggagacaccactgcaccttgtggccttgtacagttcaaagaaacactcagcagatgtgatgtctgagatggcgcagattgcagaggcccttctgcaggctggtgccaaccccaacatgcaggacagcaaggggaggactcctttacatgtgtccatcatggccgggaatgaatatgtgttcagtcagctgctgcagtgcaaacaactagatttagaactcaaagaccacgagggcagcacggctctgtggctggcagtgcagcatatcacagtgtcttctgaccagtctgtgaaccccttcgaagatgtccccgtggtaaatgggacttcatttgatgagaacagctttgcagccagactcatccagcgcggcagccacacagacgcacctgacacggcgacaggaaactgtttactacagcgggcagctggagcaggaaacgaggcagcagctcttttcctggcaaccaacggtgcccatgtcaaccacagaaacaagtggggagaaaccccgttgcacacagcgtgtcggcatggcctggccaacctcacggcagagctcctgcagcaaggcgccaacccaaacctgcagacggaggaagctctgcctctgccaaaggaggccgcatccctgaccagcttggcggacagcgtccatctgcagacgccactgcacatggcgatcgcctataaccatccggatgtggtgtctgtcatcctggagcagaaagccaatgctcttcatgccaccaacaacttgcagatcattccggacttcagcctcaaagattcccgagaccagactgtgctgggcctggcattatggactggcatgcacacgatcgcagcccagctgctgggctctggagccgccatcaatgacaccatgtcggatgggcagacgctactgcacatggccatacagcggcaggacagcaagagcgcactcttcctgctggagcaccaggcagatataaatgtcagcaggactcaggacggggagacagccctccagctggccatcagaaaccagcttccactcgtagttgatgccatatgcacccgaggagctgacatgtctgtgccagatgagaaggggaaccccccgctgtggcttgcattggcaaacaatctggaggacatcgcatccactctggtcagacatggctgtgatgccacatgctggggtccgggacctggtgggtgccttcagacgctcctgcacagagccattgatgaaaacaacgagcccaccgcctgctttcttattcgcagtggctgtgacgtgaacagtcccagacaaccaggcgccaatggagaaggagaggaagaggctagagatgggcagacccctttgcatttggcagcctcttgggggctggaagagacagtacagtgtcttctggagtttggtgccaacgtgaacgcacaggatgcagaaggaagaacccccatccacgtggccatcagcagccaacacggtgtcatcattcagctgttggtttctcaccccgatatccatttgaatgtacgagacagacaagggctgaccccgtttgcctgtgccatgactttcaagaacaacaagtcagccgaggccattctcaaacgagagtccggggctgctgagcaggtggataacaagggccggaatttccttcatgtggcagttcagaactctgatattgaaagtgtgctgttcctgatcagtgtccacgctaatgtgaattcaagagtccaggatgcctccaagttgacccccctgcacctcgctgtccaagcaggctcagaaattattgtccgcaatttgcttcttgcgggagccaaagtgaacgaattaaccaagcatcgccagactgccctccatcttgctgcccagcaggacctgcccaccatctgctcagtcctcctagagaatggcgtggactttgctgccgtggatgagaatggaaacaatgctcttcatcttgctgtcatgcacggccggctcaacaacatccgggttctcctgacagagtgcacagtggacgccgaagcctttaatctcagaggccagtcaccactgcacattttgggacaatatggcaaggagaatgcagcggccatctttgatctcttcctagaatgcatgccggggtatcctctggacaagccggatgcagacggcagcacggtgctgctcctggcatacatgaaagggaacgccaacttgtgccgcgccatcgtccggtcgggggctcgcctcggggtgaataacaaccagggagtcaacatcttcaactaccaggtcgccaccaagcagctcctgttccgactgctggatatgctgtccaaggagcctccgtggtgtgacggctcctactgctatgagtgcactgccaggttcggagtcaccactcgcaaacaccactgtcgtcactgcggacgtcttctttgccataaatgctcgaccaaggagattcctattataaagtttgatctgaacaagcctgtgcgggtttgcaacatttgttttgatgtactgactctgggtggggtttcttagtgagccccccggagggtccaggccacgtccttggtcacctccccagcagctgctctgctcaccagcctgaccccacccagagcaggagctggcgggtgtcttcctgcggcaatagactggaacgattaaggaccatggtgtgatagatcccatttcaaatgattccatatgattgtcagtgtgtgtgtcagactgtgatcgatttcactagatgtctcactcatcagaccaggccattgggcctaagtggtaaatgtgattaggaattagacctctccccattctgctagcaacatacagggacacttggaaaaccatttccccttccagtagcttggtgtccatcccagagcattcatgaagtcttcccgcctgggctgactgatgaggcagagcctctcagcgtaggaagctggctgcttaatgagctggctttactctagggtaagtggctgtggacttttctgcacagtgttttcataaagataataggatcctcttgccctgaagtctttttttctttttacgctaagctgtatttttagtgagctaccccttttaaaaaggtgaaatctttcttaacagggttcaaagatgagagctgaaaaatcgtggccttaacaactgaaagctttacagtgttcatgctactgaggtgtcaggagtgcagctgggccgcttgacacctcgtagcagccgtctcattctctcgtcttgctgcgtcctgtctgtggagtcctcagtcactctgctgttggagagtgctggaggaaatgcacttttactgtgctgcactttttatagagctgcattgtcggtgattccaatttaaaaatccatattcaaaaataccctcacacatccctgcatcagtgattctaatgatcagctttgactggacctcagctcacacgaatctccaaggaaaaactctacagagcatcttttagagcaagagattcatacaggccaagtgatgagagggggagtcaccaaggcttcagccccaagggcatctccagcctcaggccggcaggtcctatgtccttgacacaaatgcttcttgctgaaatcctccctagtgatgctgcgagtgctgttggtcccagttctgtgtagcttgccctgccccatgaagggccaccagccaagggccctggccacgtgtgcgccaccttactttggaagtctctggcttgtgtgctggatgaggctgccagaacttgttgggcgttcatcgctgttagtacatatattaaccgtgaggtgttaaacttttcttttgaaggtttggccagtttctaaaaaatgcacatttaaagagaagcatctaccacggctttaaaacaaaacaactctgagatgaacaatatgtgttatactcagagattaacaatctcaatcatacatactgattctttcagacatttaataaccactacatttttttgcattaatgaagtttgactatatgtgtaaagggactaaatatttttgcaacagcctgttctttgttcattcttttctggatagtgtgtcctctgtattgcggtagatttatacattctgttgcctaaatatgtgtgtaaaatgagctgataaactggagtactacttaaaaaaaagtctgtgatttataagatgtatatgctttctatgtgaatataagcttgtgcacaatgtttaaaagaaaaacaatgaattagaagagatcccccgtcccccagtctgacatatttcatacagaatgtttaaaagaaaaactctgctagtcttggcaaacatttggccatgtgaggcatgtggtcagtttccattttctattacctggaaagggccataaggaagcaggcagggcttaggtagcttggttacctaagttagaaagtaagagaatcatgattcggatatgaattgaagtggttggtacatggatacctgttctttaaaaggaatgtgggagatgagtcaagggtgaggccgattgttctgcccatgccctaccataccaatttcaataacaatcttgcctgtcattgcactcagaatcttaagatcatgtttcaaatatgttgattcaaacttgcttctaagcctgagtccagggatagcaatggtactgaccagctatggactgggagaacattgagtcctgttttccattggcttcagggcgcatccatgtggatataggaaaagcctctttccacagacttaggaagccccccgaccacgcggacgctcgctgggctgcactcagcaggctgcttgagtgggagctgactccaacatgccctgccctggctgggactaggcatgcttccagcccttcccgtgctctccctgctgtcaacacttgcgtacaaacctgcctagctgttgtaagttttcatcagtagcttaagtactagtagcaaaaacttaaattcattcagaaagttgccacttctgaatgagtagagcaggaaaagtaaactttactgaaacataatttgctgcaacagtcaacattgttatgctgaatgtgctctcaactgccctttgctcatcgccagatttattatccagtgtattcctaacagtcttttgttgtcgttgtttttaaaacaaaggtacggaccatgtgctatatataaatcgaatggcttaaactaatttgctatgatcctctaacaccgaaatttcccataaacttaagtgcctacacttaggacttttgaactttcagtcatctttttcgtggtgtctcactgaacgatgtgttagaacatgtgttccatttggagttttgggcctgtgcacggtcaaccccaattaccaatttagttgaggctggattcgattgctcagttcacctgccacgttctctccaaggagtggggtctacgtgacctttagtcctctacctcagagccccgagtcatttctgaccaccccgttctgtgtcctcactcttgtccctgaatgggtccctgtgtggatctcagtgtgtgtgtggtttctccactcctccccgctcatgtcccacacctgccatattgaaccgtttctgcactaatcttctccacgggcacggagtggagggaacgtcttgggaaaggggagagcttgacctccatctaggtttcttttatctggagaaaaagaacacttttgaactatgtaatgcttcaccctgaaaggcaagctaacgctaacttcccaggtgacagtagcaggaacaaggaagggtaatgtttccatgacagacacttgcttcccttgggacaagtcccagaagaactacctgaagcaccaaagctccccaccccagcctggtggcagaggaagcaggtggcaccaactcaccaaagggacttgggagccaccttctcactctgtggaagtactttagtgagagctgactggcaagataaaaaccctgaaattcccagaagttacagatgccttaaagactttctttggaagatcattgcctgtactattccttttttgtgtggcataaataatatattaacctgttacaactgacaacattggttttctgcagctagggagtcttgagtcgagactgctcgccttgatgacttgctcttttttggcagatgtgtggagttggctgttacgacatccctgtgtgatcccagaggaggggcagtagctgggcagaaactgcaggcacacatttgggtggatcacctggcttccagccccttcggggtggtgctcagtgtggggtgatggtatcatagaggaccacggcgcttatcagcattgtttctttggagtctgtgtaatggaatgtatttttcaaatactgatatttgcattttctgtaacaattccttataataaaatgaagtaaaattgtgcatttaaagtggaaactttaataagacatttgtagttacttctaatgcagaagtaccaataagcattaaaaacaaattttagaaaactcctgacgtgaataagtttcttgaccagctgccctccagaaagtttgaattccaacatttttcaggaacatgctgttgacagcagtaaaagtagctattttatgtatgtatttttaatttttaaaagtttcagtaggtttttggggttcaggtggtgtttggttacgtgaggttctttagcggtgatttccaggattttggggcacccatcacccaagcagtgtacactggacccttttatccctcaccccaaccctttcccctgagcccccaaagtccactgtatcattcttaatgcctttacgtcctcatggcttagctcccgaaaagtagttattttaaacatactagctgcctgaacttactgtgcccttggcccagatttcagctcatagcaccgagcgtgatcactgaggcagtctcagtcaccgtcacctgacccctctgaa

SEQ ID NO: 191044 - DNA, 5033 bp, Artificial Sequence
  derived and/or modified sequence
agtgccgggccagacatggcggaagaggaggtggccaagttggagaagcacttgatgcttctgcggcaggagtatgtcaagctgcagaagaagctggcggagacagagaagcgctgcgctctcttggctgcgcaggcaaacaaggagagcagcagcgagtccttcatcagccgtctgctggccatcgtggcagacctctacgagcaggagcagtacagcgatctgaagataaaggttggggacaggcacatcagtgctcacaagtttgtcctggcagcccgcagtgacagctggagtctggctaacttgtcttccactaaagagttggacctgtcagatgctaatcctgaggtgacgatgacaatgcttcgctggatctatacagatgagctggagttcagagaggatgatgtgttcctgactgaactgatgaaactagcaaatcggtttcagctacagctcctcagggagagatgtgagaagggtgttatgtctctagtgaatgtcaggaactgtattcgcttctaccagacggcagaggagctgaatgccagcacactgatgaactactgtgcagaaattattgcaagtcattgggacgacctgaggaaggaggatttcagcagcatgagcgctcagttgttatacaaaatgatcaaatccaagacagagtacccgctacataaagccatcaaagtggagagagaagacgtggtcttcctgtatctgattgaaatggattcccagctccctgggaagctgaatgaagcggatcataacggagatctggcattagatctagccctctcacgacgactggagagtattgccaccacgctggttagtcacaaagctgatgtggacatggtggacaagagtggctggagcttgttacacaaaggaatccaaagaggagatctctttgctgccactttcctcattaagaatggggcctttgtcaacgctgctacactgggtgcccaggagacaccactgcaccttgtggccttgtacagttcaaagaaacactcagcagatgtgatgtctgagatggcgcagattgcagaggcccttctgcaggctggtgccaaccccaacatgcaggacagcaaggggaggactcctttacatgtgtccatcatggccgggaatgaatatgtgttcagtcagctgctgcagtgcaaacaactagatttagaactcaaagaccacgagggcagcacggctctgtggctggcagtgcagcatatcacagtgtcttctgaccagtctgtgaaccccttcgaagatgtccccgtggtaaatgggacttcatttgatgagaacagctttgcagccagactcatccagcgcggcagccacacagacgcacctgacacggcgacaggaaactgtttactacagcgggcagctggagcaggaaacgaggcagcagctcttttcctggcaaccaacggtgcccatgtcaaccacagaaacaagtggggagaaaccccgttgcacacagcgtgtcggcatggcctggccaacctcacggcagagctcctgcagcaaggcgccaacccaaacctgcagacggaggaagctctgcctctgccaaaggaggccgcatccctgaccagcttggcggacagcgtccatctgcagacgccactgcacatggcgatcgcctataaccatccggatgtggtgtctgtcatcctggagcagaaagccaatgctcttcatgccaccaacaacttgcagatcattccggacttcagcctcaaagattcccgagaccagactgtgctgggcctggcattatggactggcatgcacacgatcgcagcccagctgctgggctctggagccgccatcaatgacaccatgtcggatgggcagacgctactgcacatggccatacagcggcaggacagcaagagcgcactcttcctgctggagcaccaggcagatataaatgtcagcaggactcaggacggggagacagccctccagctggccatcagaaaccagcttccactcgtagttgatgccatatgcacccgaggagctgacatgtctgtgccagatgagaaggggaaccccccgctgtggcttgcattggcaaacaatctggaggacatcgcatccactctggtcagacatggctgtgatgccacatgctggggtccgggacctggtgggtgccttcagacgctcctgcacagagccattgatgaaaacaacgagcccaccgcctgctttcttattcgcagtggctgtgacgtgaacagtcccagacaaccaggcgccaatggagaaggagaggaagaggctagagatgggcagacccctttgcatttggcagcctcttgggggctggaagagacagtacagtgtcttctggagtttggtgccaacgtgaacgcacaggatgcagaaggaagaacccccatccacgtggccatcagcagccaacacggtgtcatcattcagctgttggtttctcaccccgatatccatttgaatgtacgagacagacaagggctgaccccgtttgcctgtgccatgactttcaagaacaacaagtcagccgaggccattctcaaacgagagtccggggctgctgagcaggtggataacaagggccggaatttccttcatgtggcagttcagaactctgatattgaaagtgtgctgttcctgatcagtgtccacgctaatgtgaattcaagagtccaggatgcctccaagttgacccccctgcacctcgctgtccaagcaggctcagaaattattgtccgcaatttgcttcttgcgggagccaaagtgaacgaattaaccaagcatcgccagactgccctccatcttgctgcccagcaggacctgcccaccatctgctcagtcctcctagagaatggcgtggactttgctgccgtggatgagaatggaaacaatgctcttcatcttgctgtcatgcacggccggctcaacaacatccgggttctcctgacagagtgcacagtggacgccgaagcctttaatctcagaggccagtcaccactgcacattttgggacaatatggcaaggagaatgcagcggccatctttgatctcttcctagaatgcatgccggggtatcctctggacaagccggatgcagacggcagcacggtgctgctcctggcatacatgaaagggaacgccaacttgtgccgcgccatcgtccggtcgggggctcgcctcggggtgaataacaaccagggagtcaacatcttcaactaccaggtcgccaccaagcagctcctgttccgactgctggatatgctgtccaaggagcctccgtggtgtgacggctcctactgctatgagtgcactgccaggttcggagtcaccactcgcaaacaccactgtcgtcactgcggacgtcttctttgccataaatgctcgaccaaggagattcctattataaagtttgatctgaacaagcctgtgcgggtttgcaacatttgttttgatgtactgactctgggtggggtttcttagtgagccccccggagggtccaggccacgtccttggtcacctccccagcagctgctctgctcaccagcctgaccccacccagagcaggagctggcgggtgtcttcctgcggcaatagactggaacgattaaggaccatggtgtgatagatcccatttcaaatgattccatatgattgtcagtgtgtgtgtcagactgtgatcgatttcactagatgtctcactcatcagaccaggccattgggcctaagtggtaaatgtgattaggaattagacctctccccattctgctagcaacatacagggacacttggaaaaccatttccccttccagtagcttggtgtccatcccagagcattcatgaagtcttcccgcctgggctgactgatgaggcagagcctctcagcgtaggaagctggctgcttaatgagctggctttactctagggtaagtggctgtggacttttctgcacagtgttttcataaagataataggatcctcttgccctgaagtctttttttctttttacgctaagctgtatttttagtgagctaccccttttaaaaaggtgaaatctttcttaacagggttcaaagatgagagctgaaaaatcgtggccttaacaactgaaagctttacagtgttcatgctactgaggtgtcaggagtgcagctgggccgcttgacacctcgtagcagccgtctcattctctcgtcttgctgcgtcctgtctgtggagtcctcagtcactctgctgttggagagtgctggaggaaatgcacttttactgtgctgcactttttatagagctgcattgtcggtgattccaatttaaaaatccatattcaaaaataccctcacacatccctgcatcagtgattctaatgatcagctttgactggacctcagctcacacgaatctccaaggaaaaactctacagagcatcttttagagcaagagattcatacaggccaagtgatgagagggggagtcaccaaggcttcagccccaagggcatctccagcctcaggccggcaggtcctatgtccttgacacaaatgcttcttgctgaaatcctccctagtgatgctgcgagtgctgttggtcccagttctgtgtagcttgccctgccccatgaagggccaccagccaagggccctggccacgtgtgcgccaccttactttggaagtctctggcttgtgtgctggatgaggctgccagaacttgttgggcgttcatcgctgttagtacatatattaaccgtgaggtgttaaacttttcttttgaaggtttggccagtttctaaaaaatgcacatttaaagagaagcatctaccacggctttaaaacaaaacaactctgagatgaacaatatgtgttatactcagagattaacaatctcaatcatacatactgattctttcagacatttaataaccactacatttttttgcattaatgaagtttgactatatgtgtaaagggactaaatatttttgcaacagcc

SEQ ID NO: 191045 - DNA, 3513 bp, Artificial Sequence
  derived and/or modified sequence
atggccgaggaggaggttgccaaactcgagaagcatctaatgcttctgcggcaggagtatgtcaagctccagaaaaaattagccgaaacagagaaacgttgcgccctccttgccgctcaagcaaacaaggaatcttcttccgagtcctttatatcaaggctgctggcgatcgtcgccgatctatacgagcaggagcagtattctgaccttaagattaaggtgggcgaccgccacatttcagcccataaattcgttttagcagctcgttccgacagttggtctcttgcaaaccttagtagcactaaggaactcgacctgtcagacgctaacccagaagtgacgatgactatgctgcggtggatctacactgacgaactggagttccgcgaagatgacgtatttctcacagagttgatgaagctagcaaatcgatttcagttacagcttctacgagagcgttgcgaaaagggtgtgatgtcacttgtgaatgttagaaattgtatcagattttaccaaacagcagaagagctcaatgcctcaacccttatgaactactgcgccgaaattatcgcatcacattgggacgatctacggaaggaggacttcagttcaatgtcggcgcagctcttgtacaaaatgatcaaaagcaaaaccgagtatcccttgcacaaagccattaaggtggagagagaagatgtggtgtttctatatcttatcgaaatggatagccagctccccggtaagctgaatgaggcagaccacaacggcgacctggcccttgatctggccctttcccgaagattggagtctatcgcaaccaccctggtgtctcataaagccgatgtagacatggtggataagagcggctggtctctgctgcataagggcatacagaggggagatctctttgccgcaacttttcttatcaagaatggggcttttgttaacgccgctaccttgggcgcacaggagacaccactccatttggttgccctgtattcctcaaaaaaacacagcgccgacgtgatgagcgaaatggcacagattgccgaggccctcctgcaggcaggtgctaatccgaacatgcaggatagcaaggggcgaaccccccttcacgtgtcaatcatggcaggtaacgagtacgtcttctcacagctgctgcagtgcaaacaactagacctcgagctgaaggatcacgaaggcagcacagcactgtggctcgccgtgcagcacataacagtgagctccgatcagtctgtcaacccgtttgaggacgtgccggttgtgaatggcacaagcttcgacgagaacagttttgcagctcgtctgattcaacgagggtctcacacagatgcacccgacactgccaccgggaactgcctgctgcagcgagctgctggggcaggcaacgaggctgcagctctgtttcttgctactaacggcgctcacgtgaatcaccgcaataagtggggggagaccccccttcataccgcatgtcgacacggacttgccaacctcacagctgaattgctgcagcagggcgcaaacccaaacttgcaaacagaggaagcactccccttgcccaaggaggcggcttcactgacctctctcgcagattcagtccacctacagaccccactgcatatggccatagcctacaaccaccctgacgtggtctccgtgatacttgagcagaaagcaaacgctctgcacgccacaaacaatctccagatcatcccagatttctccctcaaagactctcgagaccagaccgtcttgggcctggccctgtggactggtatgcataccatcgcggctcaactgttaggtagcggagctgcgattaacgacaccatgtcggatggccaaacactcctccacatggctattcagaggcaagatagcaagtctgctcttttccttctggagcaccaggccgacatcaacgtttcgcgaacacaggacggagagaccgcactgcagctggccattaggaaccagctcccgctagtggtggacgctatctgtactcgcggagccgatatgtccgtccccgatgagaaaggcaaccctcccctctggttggcattggcgaacaacctggaagacattgcctctacattagtccggcacggctgtgacgcgacctgctgggggcctggacctggtggttgcttacagaccttgctgcaccgggctatagacgaaaataacgaaccaacagcgtgttttctaatccggtctgggtgtgatgtcaacagcccaaggcagcccggtgccaacggagagggagaggaggaagccagagacggacaaactcctctgcatctggccgctagctggggcctggaagaaacagtccagtgcctgctggaattcggtgcgaacgtcaacgcgcaagatgcggaaggtagaacaccgatccacgttgccatttccagccaacatggtgttatcatccagctgttagtcagtcatcccgatatacaccttaatgtgagggatcgtcagggactgaccccattcgcgtgcgctatgacctttaaaaataacaagtccgcagaagcaatcctgaaacgcgagtcgggagcggctgagcaagttgacaacaaaggaaggaattttctacatgttgcagtgcagaattctgacattgaaagcgtgctgtttctcattagcgtgcatgctaacgtgaacagtagagtgcaagacgcgagtaagctgactcctctccaccttgctgtgcaagcgggatctgagatcatcgttcgaaaccttcttctcgctggagccaaagtcaacgagctgacaaagcacaggcagactgccctgcacttggccgcacagcaggatctgccaacaatctgctccgtacttctggagaatggtgtggacttcgcggctgtagatgaaaacggtaataacgccctacatctagcagtaatgcacgggagactcaataacattagagtgttgttgaccgaatgcacagtggatgcggaagctttcaacctgcggggacagagccccttacatattctgggtcaatatgggaaggagaatgccgctgcaatttttgaccttttcctggagtgtatgcccggttatcccctggacaagcccgatgccgatggctctactgtcttactcctggcctatatgaaaggaaacgccaatctctgtcgcgcaatcgttaggagtggagcaagattgggggtcaacaataatcagggagtgaatatattcaactaccaagtggcaaccaaacagctgctcttccgactcctggatatgttgagcaaggagcccccatggtgcgatgggagttactgctatgaatgtaccgcaaggtttggcgttactaccagaaagcaccactgtagacactgtggacgcctgctctgccacaaatgcagtacaaaagagatacccatcattaaattcgatctgaataaacctgtcagggtgtgtaatatctgctttgacgtgctcactctgggtggcgtgagttag

SEQ ID NO: 191046 - DNA, 3513 bp, Artificial Sequence
  derived and/or modified sequence
atggctgaagaagaagtggctaagctggagaagcaccttatgttgttgaggcaagagtacgtgaagctgcagaaaaagctggctgagacagagaaaaggtgcgccctcttggctgcccaagcaaataaagaaagcagttctgagagctttattagccgtctgctcgcaattgtggccgatctttatgagcaggaacagtattctgatctcaaaatcaaggtcggagaccggcatatcagcgcccacaagtttgtactggctgctcgaagcgattcttggagtcttgcaaatttatccagtaccaaggagctggatctctcagatgctaaccctgaggtgacaatgaccatgctgcggtggatttataccgatgaactcgaattccgggaggacgatgtcttcctgaccgaactcatgaagctggctaaccggttccagctccagctgcttcgcgaacgttgtgaaaagggcgtgatgtcgttggtgaatgtccgaaactgcatcaggttctaccagaccgcagaagaactgaacgctagcactctcatgaactactgtgccgagatcatcgcctcacattgggatgatcttcgaaaggaagacttctcaagtatgagcgcacagcttctctataagatgattaagagcaaaaccgaataccccttgcataaagccatcaaggtcgagcgcgaagatgtggttttcctctacctgattgagatggattcccagctgcccggaaagcttaacgaggccgatcacaacggagatctcgcccttgatctggcgctgtcacgtcgccttgagagcatcgccactacacttgtaagccacaaagcagatgttgatatggtcgacaagagtggatggtctttgctccataaggggattcaaaggggtgacctcttcgcggcaactttcttgataaaaaacggcgcattcgtcaacgccgctaccttgggcgctcaggagacccccctccatctggtggcactgtattcatccaaaaaacactctgctgacgtgatgagtgagatggcacagattgctgaggcgctcttacaggcaggggctaatcctaatatgcaagactccaagggacgcacaccactgcacgtctctattatggcgggaaacgagtatgtcttcagccagctgctacaatgtaagcaacttgaccttgagctgaaggatcacgagggctccacagcactgtggttagccgttcagcatattaccgtgtcctcagaccaaagcgttaacccctttgaggacgttcctgtggtgaatggtaccagttttgatgagaatagcttcgctgcgaggctgatccaaagaggctcacataccgatgcccctgacaccgcaacaggcaactgcttgcttcagcgcgcagccggagccggaaacgaggccgctgccctgtttctggctactaacggcgctcacgtgaaccaccgtaacaagtggggagagactccattgcacactgcgtgtcgtcatggactcgctaacctcaccgccgagttgcttcagcagggggctaacccaaatttgcaaaccgaagaagcattgccacttccgaaggaggccgcttccttgactagtctggccgactcagtgcatctgcagacacccctgcatatggccattgcttacaaccatcccgacgttgtaagcgtcattctggagcagaaggccaatgccctgcacgccacgaacaacctgcaaatcatccccgatttctcgttaaaggactcacgggatcagaccgtactcggcttagctttatggacaggcatgcacactatcgcggcacagctcttgggatccggagccgcaattaacgatactatgagcgacggacagaccctgttgcacatggccatacagcgtcaggactccaagtcggcgctgttcctcctggaacaccaggcagacataaatgtctcccgcacccaagacggagaaacagcgttgcagctggctatacgaaatcaactgccactcgtcgttgacgccatctgcaccagaggggcagacatgagcgttccagacgagaaagggaatcctcccttatggctggctttggccaacaatcttgaagatatcgccagtaccctggtgcggcatggatgtgatgcaacgtgctggggcccaggaccaggcggttgcctgcagacattgctccaccgcgctattgacgaaaataacgaaccaacagcttgtttcctcattagaagtggctgcgacgtgaactcacccaggcagccgggtgctaacggcgaaggggaggaggaagcacgggacgggcagacccctctgcacctggctgcaagctggggtttggaagaaaccgtgcagtgtctgctcgaattcggagcaaatgtgaatgctcaggatgctgaagggcgaacacccatacacgttgcaatctcctcccagcacggcgtgatcattcaacttcttgtcagtcacccagatatccacctgaacgtccgagatcggcagggactcacaccctttgcatgtgcaatgacatttaagaacaacaagtctgccgaggccattcttaagagggagtcaggggctgccgaacaagtggataacaagggccgtaatttccttcatgttgccgtacagaacagtgacatcgaaagcgtgttatttctgatatccgtgcacgcaaacgtcaattctcgagtgcaagacgcatccaaactgactccactgcatctggccgtgcaagctggatctgaaataattgtcaggaacctgctgttagctggagctaaggtgaatgaactcacaaagcatagacaaaccgctctgcatctggccgctcagcaggacctccccaccatttgcagtgtcctcctggagaacggtgttgattttgcagcggtggatgagaacgggaataacgcactgcatctggccgttatgcacggtcggctgaacaacatcagggtcctgcttactgaatgcactgtagacgccgaagcattcaatttgcgcggtcagagtccattgcatattttgggccagtacgggaaggagaatgctgctgctattttcgatcttttcttagagtgtatgcccggatatcctctagacaagcccgacgcagatggttcaactgtgctattactggcctacatgaaagggaacgctaacctatgcagggccatcgtccggagtggggcaaggctgggtgtgaacaataaccagggcgtcaacatttttaattatcaagtggccaccaaacagcttctgtttcgcctactggatatgttatcgaaggagcccccatggtgcgatggctcttactgctacgagtgtaccgctagatttggcgtaaccacacggaagcaccactgcaggcactgcgggcgattgctgtgccacaaatgttctactaaggagattccaatcattaaattcgacttgaataaacccgtaagggtgtgcaatatttgtttcgatgttctcacgctgggtggtgtgtcttag

SEQ ID NO: 191047 - protein, 326 aa, Artificial Sequence
  derived and/or modified sequence
MSEEFEANTMDSLVDMPFATVDIQDDCGITDEPQINLKRSQENEWVKSDQVKKRKKKRKDYQPNYFLSIPITNKEIIKGIKILQNAIIQQDERLAKAMVSDGSFHITLLVMQLLNEDEVNIGIDALLELKPFIEELLQGKHLTLPFQGIGTFGNQVGFVKLAEGDHVNSLLEIAETANRTFQEKGILVGESRSFKPHLTFMKLSKSPWLRKNGVKKIDPDLYEKFISHRFGEEILYRIDLCSMLKKKQSNGYYHCESSIVIGEKNGGEPDDAELVRLSKRLVENAVLKAVQQYLEETQNKNKPGEGSSVKTEAADQNGNDNENNRK

SEQ ID NO: 191048 - protein, 348 aa, Artificial Sequence
  derived and/or modified sequence
MERPEAGGINSNECENVSRKKKMSEEFEANTMDSLVDMPFATVDIQDDCGITDEPQINLKRSQENEWVKSDQVKKRKKKRKDYQPNYFLSIPITNKEIIKGIKILQNAIIQQDERLAKAMVSDGSFHITLLVMQLLNEDEVNIGIDALLELKPFIEELLQGKHLTLPFQGIGTFGNQVGFVKLAEGDHVNSLLEIAETANRTFQEKGILVGESRSFKPHLTFMKLSKSPWLRKNGVKKIDPDLYEKFISHRFGEEILYRIDLCSMLKKKQSNGYYHCESSIVIGEKNGGEPDDAELVRLSKRLVENAVLKAVQQYLEETQNKNKPGEGSSVKTEAADQNGNDNENNRK

SEQ ID NO: 191049 - DNA, 981 bp, Artificial Sequence
  derived and/or modified sequence
atgagcgaggagttcgaggccaacaccatggacagcctggtggacatgcccttcgccaccgtggacatccaggacgactgcggcatcaccgacgagccccagatcaacctgaagagaagccaggagaacgagtgggtgaagagcgaccaggtgaagaagagaaagaagaagagaaaggactaccagcccaactacttcctgagcatccccatcaccaacaaggagatcatcaagggcatcaagatcctgcagaacgccatcatccagcaggacgagagactggccaaggccatggtgagcgacggcagcttccacatcaccctgctggtgatgcagctgctgaacgaggacgaggtgaacatcggcatcgacgccctgctggagctgaagcccttcatcgaggagctgctgcagggcaagcacctgaccctgcccttccagggcatcggcaccttcggcaaccaggtgggcttcgtgaagctggccgagggcgaccacgtgaacagcctgctggagatcgccgagaccgccaacagaaccttccaggagaagggcatcctggtgggcgagagcagaagcttcaagccccacctgaccttcatgaagctgagcaagagcccctggctgagaaagaacggcgtgaagaagatcgaccccgacctgtacgagaagttcatcagccacagattcggcgaggagatcctgtacagaatcgacctgtgcagcatgctgaagaagaagcagagcaacggctactaccactgcgagagcagcatcgtgatcggcgagaagaacggcggcgagcccgacgacgccgagctggtgagactgagcaagagactggtggagaacgccgtgctgaaggccgtgcagcagtacctggaggagacccagaacaagaacaagcccggcgagggcagcagcgtgaagaccgaggccgccgaccagaacggcaacgacaacgagaacaacagaaagtag

SEQ ID NO: 191050 - DNA, 1047 bp, Artificial Sequence
  derived and/or modified sequence
atggagagacccgaggccggcggcatcaacagcaacgagtgcgagaacgtgagcagaaagaagaagatgagcgaggagttcgaggccaacaccatggacagcctggtggacatgcccttcgccaccgtggacatccaggacgactgcggcatcaccgacgagccccagatcaacctgaagagaagccaggagaacgagtgggtgaagagcgaccaggtgaagaagagaaagaagaagagaaaggactaccagcccaactacttcctgagcatccccatcaccaacaaggagatcatcaagggcatcaagatcctgcagaacgccatcatccagcaggacgagagactggccaaggccatggtgagcgacggcagcttccacatcaccctgctggtgatgcagctgctgaacgaggacgaggtgaacatcggcatcgacgccctgctggagctgaagcccttcatcgaggagctgctgcagggcaagcacctgaccctgcccttccagggcatcggcaccttcggcaaccaggtgggcttcgtgaagctggccgagggcgaccacgtgaacagcctgctggagatcgccgagaccgccaacagaaccttccaggagaagggcatcctggtgggcgagagcagaagcttcaagccccacctgaccttcatgaagctgagcaagagcccctggctgagaaagaacggcgtgaagaagatcgaccccgacctgtacgagaagttcatcagccacagattcggcgaggagatcctgtacagaatcgacctgtgcagcatgctgaagaagaagcagagcaacggctactaccactgcgagagcagcatcgtgatcggcgagaagaacggcggcgagcccgacgacgccgagctggtgagactgagcaagagactggtggagaacgccgtgctgaaggccgtgcagcagtacctggaggagacccagaacaagaacaagcccggcgagggcagcagcgtgaagaccgaggccgccgaccagaacggcaacgacaacgagaacaacagaaagtag

SEQ ID NO: 191051 - DNA, 2799 bp, Artificial Sequence
  derived and/or modified sequence
gaaaaaagaaaatgtcagaggaatttgaagccaatactatggattctctggtagacatgccatttgctactgtagatattcaggatgactgtggaatcactgatgaacctcaaataaatttgaagagaagtcaagaaaatgaatgggtcaagagtgatcaagtaaagaagaggaaaaaaaagagaaaagattatcaacccaactatttcctgtccattccaatcaccaacaaagagattataaaaggaattaagatcctgcagaatgcaataatacaacaagatgagcgactggccaaagcaatggtcagtgatggttcctttcatattaccctgctggtgatgcaattattaaatgaagatgaagtaaacattggtattgatgctcttttggaattgaaaccattcatagaagaactcctccagggaaaacatttgactttgccctttcaagggattggtacttttggaaatcaggttggatttgtgaagctggcagaaggagatcatgtaaactcacttttggagatagcagagactgcaaataggacatttcaagaaaaaggcatcctggtaggagagagcagaagttttaaacctcatttgaccttcatgaagttgtcaaaatcaccgtggctccgtaagaatggagtgaaaaaaatagatcctgatttatatgaaaagtttatcagtcacagatttggagaagaaatattatatcgcatagatctttgctccatgctgaagaaaaaacaaagtaatggttattatcactgtgaatcttccattgtgattggtgaaaagaacggaggggagcccgatgacgctgaactagtaaggctcagtaagaggctggtggagaacgcggtgctcaaggctgtccagcagtatctggaggaaacacagaataaaaacaagccgggggaggggagctctgtgaaaaccgaagcagctgatcagaatggcaatgacaatgagaacaacaggaaatgagcccggaacgcaggcccccatgtctctgtgcaaagcctccctgcttccctctgctgagtctagggactgacttgcagcgtgctgtttaagttaagtttctctggtgcaatctgtgaagattgcctaatacttttcatgatcgatgtgttcgcattgctgaaacacaacagaagaaaaatggagtgctgggactggcagaggaaattaattgatgaaagaagaatggcccaagtttcattcgccctcagccacgcacaagggaaagggaactttgggttatgcctcctggacgcaaattaaaggccgagaaagaggccttgccatcaatggaatactgccatttatattgcttagcagggcatttgactactttatctgaggccagaactctcacacacagctatcaagtgctaagtttaaaataatcactgttggaattgtcatctgtacaattagtccataatgtttcatgtttgtcctaagtgtgctgttgctatgcagtgtgatctttatttatagtaaattatgtttcatgtaaatgatatatttttggtgaaatgcaaccttttctataaaatgtgggcaacattttaaagtttttttaaaatcctattttgataagtcagtatgccatatttaatgaaatgttattatataatttttttttcttaggcaagaaacctattggaattcgagacttaattaatgaagctttgcatcgagaaacgatgggtctgaagtccaaagtgaaacagataaaggaacttttattaaagcctgagactcaggccagaattaggagggagctttttgaaggaagacttattaacaacagtaattcagcaaatgacgttgatttcagcacaactttgacataagctctacattgcgattgtgacaacatagcttatgaaatcttttcagcttattaagtagctctttggtaaacaccaaagaagtttctgatagtgtctgcacaacagcaaaccaacatttggtgaggaattagcaatttcttgccaaagaaaattgattctgcccaattattttttgagctacacttgtgttttagaatatctgtttctgtaatattgagagttattttatagaaatgatttcttaattagctgttgtgagatatttctcgggtccttgcagaaaaaaacatacagactgtgaacaaatcattcacaaacagaataaaacagagccaacaacagtattttaagggtcacttgcctcctgttgacacaattgttgctaaatcaaaagaagcgttgtccaggtgtgtctacatctagtgttacttttaatgagaatttgaatgtttattgaacaatagtacttgaatgaacatttataaatgtaattattgcgatcactggttaagaatgttttatatatccttataatatttttcactgatcaaaatgttgttctgctttttcatttcttaaggaatacatgtttgggatttttattttttacgtgtccgaagataagctccaggtcttatcgtatcccttgccatctgaacttgtttgcactgcttctgtttgaaagagcatcttgaaaaacttccccggtatgatgattgttggtaacaactttttctatagtcattgatggagtagatcatgatggaggggaaatcactggagatcaaatatgtaaaatcatttcaaatataaaatccagtttactcatggattttagctattttttcactgggtaaattatactacatttatttacaaatgagtttatgcattttcatggctcttaataaacatattgttttcccttg

SEQ ID NO: 191052 - DNA, 2954 bp, Artificial Sequence
  derived and/or modified sequence
gccctggcctccgcctcggcctcgcctccagccccgggacgcggcccgccaccgccgctgccgccagcccagacgcgccgcccgcatgcgccgcgaccatggagcgccccgaagcgggaggaattaattccaatgagtgtgaaaatgtatcaagaaaaaagaaaatgtcagaggaatttgaagccaatactatggattctctggtagacatgccatttgctactgtagatattcaggatgactgtggaatcactgatgaacctcaaataaatttgaagagaagtcaagaaaatgaatgggtcaagagtgatcaagtaaagaagaggaaaaaaaagagaaaagattatcaacccaactatttcctgtccattccaatcaccaacaaagagattataaaaggaattaagatcctgcagaatgcaataatacaacaagatgagcgactggccaaagcaatggtcagtgatggttcctttcatattaccctgctggtgatgcaattattaaatgaagatgaagtaaacattggtattgatgctcttttggaattgaaaccattcatagaagaactcctccagggaaaacatttgactttgccctttcaagggattggtacttttggaaatcaggttggatttgtgaagctggcagaaggagatcatgtaaactcacttttggagatagcagagactgcaaataggacatttcaagaaaaaggcatcctggtaggagagagcagaagttttaaacctcatttgaccttcatgaagttgtcaaaatcaccgtggctccgtaagaatggagtgaaaaaaatagatcctgatttatatgaaaagtttatcagtcacagatttggagaagaaatattatatcgcatagatctttgctccatgctgaagaaaaaacaaagtaatggttattatcactgtgaatcttccattgtgattggtgaaaagaacggaggggagcccgatgacgctgaactagtaaggctcagtaagaggctggtggagaacgcggtgctcaaggctgtccagcagtatctggaggaaacacagaataaaaacaagccgggggaggggagctctgtgaaaaccgaagcagctgatcagaatggcaatgacaatgagaacaacaggaaatgagcccggaacgcaggcccccatgtctctgtgcaaagcctccctgcttccctctgctgagtctagggactgacttgcagcgtgctgtttaagttaagtttctctggtgcaatctgtgaagattgcctaatacttttcatgatcgatgtgttcgcattgctgaaacacaacagaagaaaaatggagtgctgggactggcagaggaaattaattgatgaaagaagaatggcccaagtttcattcgccctcagccacgcacaagggaaagggaactttgggttatgcctcctggacgcaaattaaaggccgagaaagaggccttgccatcaatggaatactgccatttatattgcttagcagggcatttgactactttatctgaggccagaactctcacacacagctatcaagtgctaagtttaaaataatcactgttggaattgtcatctgtacaattagtccataatgtttcatgtttgtcctaagtgtgctgttgctatgcagtgtgatctttatttatagtaaattatgtttcatgtaaatgatatatttttggtgaaatgcaaccttttctataaaatgtgggcaacattttaaagtttttttaaaatcctattttgataagtcagtatgccatatttaatgaaatgttattatataatttttttttcttaggcaagaaacctattggaattcgagacttaattaatgaagctttgcatcgagaaacgatgggtctgaagtccaaagtgaaacagataaaggaacttttattaaagcctgagactcaggccagaattaggagggagctttttgaaggaagacttattaacaacagtaattcagcaaatgacgttgatttcagcacaactttgacataagctctacattgcgattgtgacaacatagcttatgaaatcttttcagcttattaagtagctctttggtaaacaccaaagaagtttctgatagtgtctgcacaacagcaaaccaacatttggtgaggaattagcaatttcttgccaaagaaaattgattctgcccaattattttttgagctacacttgtgttttagaatatctgtttctgtaatattgagagttattttatagaaatgatttcttaattagctgttgtgagatatttctcgggtccttgcagaaaaaaacatacagactgtgaacaaatcattcacaaacagaataaaacagagccaacaacagtattttaagggtcacttgcctcctgttgacacaattgttgctaaatcaaaagaagcgttgtccaggtgtgtctacatctagtgttacttttaatgagaatttgaatgtttattgaacaatagtacttgaatgaacatttataaatgtaattattgcgatcactggttaagaatgttttatatatccttataatatttttcactgatcaaaatgttgttctgctttttcatttcttaaggaatacatgtttgggatttttattttttacgtgtccgaagataagctccaggtcttatcgtatcccttgccatctgaacttgtttgcactgcttctgtttgaaagagcatcttgaaaaacttccccggtatgatgattgttggtaacaactttttctatagtcattgatggagtagatcatgatggaggggaaatcactggagatcaaatatgtaaaatcatttcaaatataaaatccagtttactcatggattttagctattttttcactgggtaaattatactacatttatttacaaatgagtttatgcattttcatggctcttaataaacatattgttttcccttgtt

SEQ ID NO: 191053 - DNA, 981 bp, Artificial Sequence
  derived and/or modified sequence
atgagcgaggaattcgaggctaacactatggattctctggtggacatgccctttgctacggttgacatccaggacgattgcggtattaccgatgagccccaaattaatctgaagagaagccaggaaaacgagtgggtcaagtccgaccaggttaaaaagcggaagaagaagcggaaagactaccagcctaactatttcctttcaatcccgatcacaaacaaggagattatcaaaggaattaaaatactgcaaaacgccatcatacagcaggatgaaagacttgccaaggctatggtgtcagacggctcgttccacattaccctgctggtgatgcaactgctaaacgaggatgaagtcaatattgggatcgatgcccttcttgagcttaaacccttcatcgaggagctcctgcagggcaagcacctcacacttcccttccaaggtataggaacatttggaaatcaggtgggcttcgtgaagctggctgaaggcgatcacgttaacagcctcctggagattgccgagaccgcaaacagaacgttccaggaaaagggaatcttagttggagagagccgtagttttaagccacaccttactttcatgaagctctcgaagtcgccctggctgcgtaagaatggtgtgaaaaaaatcgatcccgacttgtacgaaaaattcatatcccacaggttcggcgaagagatactgtataggattgatctctgttcaatgctgaaaaagaaacaatccaacggatattatcactgtgagagcagtattgtcatcggggagaaaaacggcggcgagcccgatgacgccgaattagtgcggctttcaaaacgactggtagaaaatgcggtgctcaaggctgttcagcagtacttagaggaaacgcagaacaaaaacaaaccaggcgaaggatcgagcgtcaaaaccgaagcggccgatcagaatggcaatgacaatgagaataataggaagtag

SEQ ID NO: 191054 - DNA, 1047 bp, Artificial Sequence
  derived and/or modified sequence
atggaaagaccagaagcagggggaatcaattcaaacgaatgcgagaacgtttcccgtaagaaaaagatgtctgaggaatttgaagccaacacaatggacagcctagtcgacatgcccttcgccacggtcgacattcaggacgattgcggcatcacagacgagccccagattaacctgaagcgttcccaggagaacgagtgggtgaagtccgatcaggtgaagaagagaaagaagaaaaggaaagattatcagccaaattatttcctgtccattcctatcactaacaaggagattatcaaaggaatcaagatactccaaaacgcaatcattcaacaggatgagcgtcttgccaaagccatggtttctgatggttcatttcacatcactcttttggtgatgcagcttttaaacgaggacgaggtgaacatcggcatagatgccctgcttgaattgaaaccgttcatagaggaactgctgcaggggaagcatctcacactgccatttcaaggaatcggtacatttggcaaccaggtgggtttcgtgaaactggcagaaggggatcacgttaatagtttgcttgagatcgccgagacagccaatagaaccttccaggaaaagggaattttagtcggtgagagccggagtttcaagccacaccttacctttatgaagttatcaaaaagcccctggctacgcaagaacggcgtgaagaaaatcgatcctgatctatacgaaaaattcattagtcatcggttcggcgaggagattctctatcgcatcgatctttgcagcatgctgaaaaagaaacagtccaacgggtattaccattgcgagtcgagtatcgtaattggcgaaaaaaacggtggtgagcccgatgacgccgagctcgttcgcttgtcaaagagacttgtggagaatgcagttttaaaggctgtgcagcaatacttggaggaaactcaaaacaagaataaacccggagagggatcttcagtcaaaaccgaggctgcagatcagaatggtaatgataacgaaaacaaccgcaagtag

SEQ ID NO: 191055 - DNA, 981 bp, Artificial Sequence
  derived and/or modified sequence
atgtctgaggagtttgaggccaacaccatggacagcctggtggacatgccctttgccaccgtggacatccaggatgactgtggcatcacagatgagccccagatcaacctgaagaggagccaggagaatgagtgggtgaagagtgaccaggtgaagaagaggaagaagaagaggaaggactaccagcccaactacttcctgagcatccccatcaccaacaaggagatcatcaagggcatcaagatcctgcagaatgccatcatccagcaggatgagcggctggccaaggccatggtgtctgatggcagcttccacatcaccctgctggtgatgcagctgctgaatgaagatgaggtgaacattggaattgatgccctgctggagctgaagcccttcatcgaggagctgctgcagggcaagcacctgaccctgcccttccagggcatcggcaccttcggcaaccaggtgggctttgtgaagctggccgagggggaccacgtgaacagcctgctggagattgctgagacagccaacagaaccttccaggagaagggcatcctggtgggggagagccgctccttcaagccccacctgaccttcatgaagctgagcaagagcccctggctgaggaagaatggagtgaagaagattgatcctgacctgtatgagaagttcatcagccacagatttggagaggagatcctgtacagaattgacctgtgcagcatgctgaagaagaagcagagcaatggctactaccactgtgagagcagcatcgtgattggagagaagaatggaggagagccagatgatgctgagctggtgcggctgagcaagaggctggtggagaatgctgtgctgaaggctgtgcagcagtacctggaggagacccagaacaagaacaagccaggagagggcagctctgtgaagacagaagctgctgaccagaatggaaatgacaatgaaaacaacaggaagtag

SEQ ID NO: 191056 - DNA, 1047 bp, Artificial Sequence
  derived and/or modified sequence
atggagaggcctgaggccggcggcatcaacagcaatgaatgtgaaaatgtgtccaggaagaagaagatgtctgaggagtttgaggccaacaccatggacagcctggtggacatgccctttgccaccgtggacatccaggatgactgtggcatcacagatgagccccagatcaacctgaagaggagccaggagaatgagtgggtgaagagtgaccaggtgaagaagaggaagaagaagaggaaggactaccagcccaactacttcctgagcatccccatcaccaacaaggagatcatcaagggcatcaagatcctgcagaatgccatcatccagcaggatgagcggctggccaaggccatggtgtctgatggcagcttccacatcaccctgctggtgatgcagctgctgaatgaagatgaggtgaacattggaattgatgccctgctggagctgaagcccttcatcgaggagctgctgcagggcaagcacctgaccctgcccttccagggcatcggcaccttcggcaaccaggtgggctttgtgaagctggccgagggggaccacgtgaacagcctgctggagattgctgagacagccaacagaaccttccaggagaagggcatcctggtgggggagagccgctccttcaagccccacctgaccttcatgaagctgagcaagagcccctggctgaggaagaatggagtgaagaagattgatcctgacctgtatgagaagttcatcagccacagatttggagaggagatcctgtacagaattgacctgtgcagcatgctgaagaagaagcagagcaatggctactaccactgtgagagcagcatcgtgattggagagaagaatggaggagagccagatgatgctgagctggtgcggctgagcaagaggctggtggagaatgctgtgctgaaggctgtgcagcagtacctggaggagacccagaacaagaacaagccaggagagggcagctctgtgaagacagaagctgctgaccagaatggaaatgacaatgaaaacaacaggaagtag

SEQ ID NO: 191057 - DNA, 981 bp, Artificial Sequence
  derived and/or modified sequence
atgagcgaggagttcgaggccaacaccatggacagcctggtggacatgccatttgccaccgtagacattcaggatgactgcggaattacagatgagccccagattaatctgaaacgctcgcaggaaaacgaatgggtgaaaagcgaccaggtcaaaaagaggaagaaaaagaggaaagattatcagcccaactacttcctgtccatcccaataaccaataaagagatcatcaagggtatcaagatcttacagaatgctataattcaacaggacgagcgcctggccaaggctatggtgtctgacggcagtttccacatcaccctgctcgtcatgcaactgctcaacgaggatgaggtaaacattggaattgacgccctgctggagttgaagcccttcatcgaggagcttctgcagggtaagcacctcaccctcccgttccagggcatcggcacattcggaaaccaggtgggcttcgtcaaactcgcggagggcgatcacgttaattcccttttggagatcgctgaaacggcgaatcggaccttccaagagaaggggatacttgttggtgagagtagatcctttaaacctcacctcacatttatgaaactgagcaagagtccttggcttcgtaaaaatggggtgaaaaagatcgaccctgacctgtatgaaaagtttatttcccatcgtttcggcgaggaaatcttgtatcgcatcgacctatgctccatgttgaaaaaaaagcagtccaacggctattatcattgtgagtcgagcattgtgattggcgaaaaaaatgggggtgaacccgatgacgccgagctggtgcggcttagtaaacgcctagtcgagaacgccgtgctgaaggccgtacagcaatatcttgaggaaacccagaacaagaacaaacccggtgagggctccagcgtgaaaacagaagccgccgatcagaacggcaacgataatgagaacaatagaaagtag

SEQ ID NO: 191058 - DNA, 1047 bp, Artificial Sequence
  derived and/or modified sequence
atggagcggcccgaggccggcggcatcaacagcaacgagtgcgagaatgtatcacgcaagaaaaaaatgagcgaagagtttgaggctaataccatggattctctcgtggatatgccgttcgccacagtcgacatccaggacgactgcggtatcaccgatgagccacagattaatttaaaaaggagccaagagaatgaatgggtgaaaagcgatcaagtgaaaaagaggaagaaaaaacgaaaggactatcagcccaattattttttgagtatacctataacaaacaaagaaattataaaaggaataaagatcctgcagaacgccattatccagcaggacgaacgactggccaaagctatggtgagcgacgggtcattccacatcactctccttgtcatgcagctgttaaatgaagacgaggtgaacattgggatcgacgctctgctcgagttaaagcctttcatcgaagagttgttacaaggaaaacacttaacattaccatttcaggggatcggaaccttcgggaaccaagtcggatttgtaaagctggctgagggagaccatgtgaacagcttgctcgagattgctgagaccgctaatcggacattccaggaaaaaggcattctggtgggtgagagtcgaagttttaagccccacttgaccttcatgaagctgtctaaaagcccatggttaaggaaaaacggggtcaaaaagattgatcccgatctgtacgagaaatttattagccatcggtttggtgaggaaattctgtacagaatagacctttgcagcatgctgaagaaaaagcaaagtaatggttactaccactgcgaatctagtattgtaatcggggagaaaaatggtggcgagcctgacgatgcagagttggtgcgcctgtccaaacgcctcgtcgaaaacgccgtactgaaggcggtgcaacaatacctcgaagagacccagaataagaataaacctggagaaggtagctctgtcaaaaccgaagctgcagaccagaacggcaacgacaatgagaacaatcgaaagtag

SEQ ID NO: 191059 - DNA, 981 bp, Artificial Sequence
  derived and/or modified sequence
atgtcagaggaatttgaagccaatacgatggatagcctggtcgatatgcctttcgctacagtggatattcaagacgattgtggaattactgatgagccacagatcaacctgaagcggtctcaggagaatgaatgggtgaagtcggaccaagtgaagaagagaaagaagaagcgcaaagattaccagcctaattactttttgtcgatcccgataacaaacaaggagatcataaagggtataaagatcctccagaacgctattattcagcaggacgagcgactggctaaagccatggtgtcagacgggtccttccatatcacactcctcgtgatgcagctactcaacgaagacgaggtgaacattgggatcgatgcactgttagagctgaaaccatttatcgaagagctgcttcagggtaagcatcttaccctcccttttcagggcatcgggacctttggtaaccaggtgggcttcgtcaagttagcagagggagatcacgttaatagtttactggagatcgccgagactgcaaataggacctttcaggaaaagggtattcttgtcggagagtctaggagctttaaaccccacttaacattcatgaaattatccaagagcccgtggctgagaaagaatggcgtgaaaaagattgaccctgatctgtatgaaaaatttattagccatagatttggggaagagatcctctacaggatcgatctctgttctatgttgaagaagaaacagagcaatggctattatcactgcgaaagttccattgtcatcggagaaaagaacggcggagagcctgacgacgccgagctagtgagactgtccaaacgcctagtggagaacgcggtgctgaaggccgtgcagcaatacttagaagaaacacagaacaagaataagcccggtgaggggtctagcgtcaagaccgaagcggctgatcagaacgggaatgacaatgagaataaccgcaagtag

SEQ ID NO: 191060 - DNA, 1047 bp, Artificial Sequence
  derived and/or modified sequence
atggagcgcccagaggccggaggtattaatagcaacgaatgtgagaacgttagccgcaagaagaagatgagtgaggagttcgaagctaatacgatggactctttggtcgacatgcccttcgcgacggtggatatccaggacgattgtggcattacagatgaaccacaaattaatctgaagcgctcccaggagaacgagtgggtgaaatcagaccaagtgaagaagaggaagaagaagaggaaagactatcagcctaattacttcctctcgatcccaataactaacaaggagatcattaagggtattaaaattctacaaaatgcaatcatccagcaagatgaaaggctggccaaggcaatggtatcagacggtagtttccacattacgttattggtcatgcagttattgaacgaagacgaagtgaacatcgggattgacgcactgctcgaacttaaaccattcattgaggaactgctgcaaggtaaacatctgacactgccgtttcagggtatcggaacattcggtaaccaagttggcttcgtcaagctggcagaaggggaccatgtcaattccctgctggaaatagccgagacggctaataggacctttcaggagaagggtatcctggtgggggaatcaaggtcatttaagcctcacctcacctttatgaaactcagtaagagcccttggttaaggaagaatggagtgaagaagattgaccccgacttgtacgaaaagtttatctcacaccggttcggtgaggagattctctatcggattgacctgtgcagcatgttgaagaaaaaacaatcaaacggctattaccactgcgagtcatctatagtgattggcgaaaaaaacggaggtgagcccgacgacgcagagctggttaggctaagtaaaagactcgtggaaaacgcagtattaaaggctgtgcagcagtatctcgaagagacgcagaacaaaaataagccaggcgaagggtcttcagtgaagacagaagcggctgaccagaacggcaacgataatgaaaataatcggaagtag

SEQ ID NO: 191061 - protein, 139 aa, Artificial Sequence [sequence omitted]

SEQ ID NO: 191062 - protein, 125 aa, Artificial Sequence
  derived and/or modified sequence
MSPKPRASGPPAKATEAGKRKSSSQPSPSDPKKKTTKVAKKGKAVRRGRRGKKGAATKMAAVTAPEAESGPAAPGPSDQPSQELPQHELPPEEPVSEGTQHDPLSQESELEEPLSQERPATPLSP

SEQ ID NO: 191063 - DNA, 561 bp, Artificial Sequence
  derived and/or modified sequence
atgagccccaagcccagagccagcggcccccccgccaaggccaccgaggccggcaagagaaagagcagcagccagcccagccccagcgaccccaagaagaagaccaccaaggtggccaagaagggcaaggccgtgagaagaggcagaagaggcaagaagggcgccgccaccaagatggccgccgtgaccgcccccgaggccgagagcgcccccgccgcccccggccccagcgaccagcccagccaggagctgccccagcacgagctgccccccgaggagcccgtgagcgagggcacccagcacgaccccctgagccaggaggccgagctggaggagcccctgagccaggagagcgaggtggaggagcccctgagccaggagagccaggtggaggagcccctgagccaggagagcgaggtggaggagcccctgagccaggagagccaggtggaggagcccctgagccaggagagcgagatggaggagcccctgagccaggagagccaggtggaggagccccccagccaggagagcgagatggaggagctgcccagcgtgtag

SEQ ID NO: 191064 - DNA, 621 bp, Artificial Sequence
  derived and/or modified sequence
atgagccccaagcccagagccagcggcccccccgccaaggccaccgaggccggcaagagaaagagcagcagccagcccagccccagcgaccccaagaagaagaccaccaaggtggccaagaagggcaaggccgtgagaagaggcagaagaggcaagaagggcgccgccaccaagatggccgccgtgaccgcccccgaggccgagagcgcccccgccgcccccggccccagcgaccagcccagccaggagctgccccagcacgagctgccccccgaggagcccgtgagcgagggcacccagcacgaccccctgagccaggaggccgagctggaggagcccctgagccaggagagcgaggtggaggagcccctgagccaggagagccaggtggaggagcccctgagccaggagagcgaggtggaggagcccctgagccaggagagccaggtggaggagcccctgagccaggagagcgaggtggaggagcccctgagccaggagagccaggtggaggagcccctgagccaggagagcgagatggaggagcccctgagccaggagagccaggtggaggagccccccagccaggagagcgagatggaggagctgcccagcgtgtag

SEQ ID NO: 191065 - DNA, 420 bp, Artificial Sequence
  derived and/or modified sequence
atgagccccaagcccagagccagcggcccccccgccaaggccaccgaggccggcaagagaaagagcagcagccagcccagccccagcgaccccaagaagaagaccaccaaggtggccaagaagggcaaggccgtgagaagaggcagaagaggcaagaagggcgccgccaccaagatggccgccgtgaccgcccccgaggccgagagcgcccccgccgcccccggccccagcgaccagcccagccaggagctgccccagcacgagctgccccccgaggagcccgtgagcgagggcacccagcacgaccccctgagccaggagagcgaggtggaggagcccctgagccaggagagcgaggtggaggagcccctgaccgtgtggatggccagcttcagccccgtgagcgagagcaccgactag

SEQ ID NO: 191066 - DNA, 561 bp, Artificial Sequence
  derived and/or modified sequence
atgagccccaagcccagagccagcggcccccccgccaaggccaccgaggccggcaagagaaagagcagcagccagcccagccccagcgaccccaagaagaagaccaccaaggtggccaagaagggcaaggccgtgagaagaggcagaagaggcaagaagggcgccgccaccaagatggccgccgtgaccgcccccgaggccgagagcggccccgccgcccccggccccagcgaccagcccagccaggagctgccccagcacgagctgccccccgaggagcccgtgagcgagggcacccagcacgaccccctgagccaggagagcgagctggaggagcccctgagccaggagagcgaggtggaggagcccctgagccaggagagccaggtggaggagcccctgagccaggagagcgaggtggaggagcccctgagccaggagagccaggtggaggagcccctgagccaggagagcgaggtggaggagcccctgagccaggagagccaggtggaggagcccctgagccaggagagcgagatggaggagctgcccagcgtgtag

SEQ ID NO: 191067 - DNA, 501 bp, Artificial Sequence
  derived and/or modified sequence
atgagccccaagcccagagccagcggcccccccgccaaggccaccgaggccggcaagagaaagagcagcagccagcccagccccagcgaccccaagaagaagaccaccaaggtggccaagaagggcaaggccgtgagaagaggcagaagaggcaagaagggcgccgccaccaagatggccgccgtgaccgcccccgaggccgagagcggccccgccgcccccggccccagcgaccagcccagccaggagctgccccagcacgagctgccccccgaggagcccgtgagcgagggcacccagcacgaccccctgagccaggagagcgagctggaggagcccctgagccaggagagcgaggtggaggagcccctgagccaggagagccaggtggaggagcccctgagccaggagagcgaggtggaggagcccctgagccaggagagccaggtggaggagcccctgagccaggagagcgagatggaggagctgcccagcgtgtag

SEQ ID NO: 191068 - DNA, 378 bp, Artificial Sequence
  derived and/or modified sequence
atgagccccaagcccagagccagcggcccccccgccaaggccaccgaggccggcaagagaaagagcagcagccagcccagccccagcgaccccaagaagaagaccaccaaggtggccaagaagggcaaggccgtgagaagaggcagaagaggcaagaagggcgccgccaccaagatggccgccgtgaccgcccccgaggccgagagcggccccgccgcccccggccccagcgaccagcccagccaggagctgccccagcacgagctgccccccgaggagcccgtgagcgagggcacccagcacgaccccctgagccaggagagcgagctggaggagcccctgagccaggagagacccgccacccccctgagcccctag

SEQ ID NO: 191069 - DNA, 561 bp, Artificial Sequence
  derived and/or modified sequence
atgagtcctaaacccagggcctccggtcccccagctaaggccaccgaggcaggtaagcggaagtctagcagccaacctagcccctccgatccaaaaaagaagactacgaaggttgcaaaaaaggggaaagctgtccggaggggtaggcgggggaagaagggcgctgccactaagatggcggctgtgactgccccagaggctgaatccgctcccgccgcccctggcccttccgaccagccttcccaggagctgccccagcacgagttgcccccagaagaaccggtttctgagggtactcagcacgatcctctgagtcaggaagccgagctggaggaaccactgagtcaagaatctgaagtggaggagcctctgtcacaggaaagccaggtggaagagccgttgtcacaagagtccgaagtggaagagccgctctcccaagagagtcaggtagaggagccacttagtcaggagtccgagatggaagagccactgtctcaagagagccaggttgaagagccaccttcccaagaatctgagatggaggaactcccgtccgtgtag

SEQ ID NO: 191070 - DNA, 621 bp, Artificial Sequence
  derived and/or modified sequence
atgagtccaaagccccgggcatcaggccctccagctaaagcaaccgaggcaggaaagagaaagagctccagtcagccctcacccagcgaccctaagaagaagacaaccaaggttgctaaaaagggaaaagccgtgcgccgcggacggcgaggcaagaaaggcgcggcaacaaaaatggcagccgttactgcccctgaagccgaaagtgccccagcagcccccggcccaagcgatcagccaagccaggagttaccccagcatgaactgccgccagaagagcctgtctctgagggaacccagcatgatcctttgagtcaagaagcggagttggaagagccgctttcacaggagtctgaggtggaggagccactgtctcaggagtcacaagtcgaagagcccctctcccaggagtcggaggtggaagagccactcagccaagagagtcaggttgaagagccactgtctcaagaatccgaagtggaagaacccctgagccaggaatcccaagtagaggaaccactgtcacaagagtccgaaatggaggaacccctgtcccaagaaagccaagtggaagaaccaccctcccaggagagcgaaatggaggagctgcctagtgtctag

SEQ ID NO: 191071 - DNA, 420 bp, Artificial Sequence
  derived and/or modified sequence
atgagcccaaagcccagggcaagtggtccccctgccaaagcaactgaggcaggaaagaggaagagctctagccaacccagcccaagtgacccaaagaaaaagaccacaaaagtggccaagaaaggaaaagccgtgaggaggggtaggagggggaagaaaggggctgcgaccaagatggcagctgttactgcccctgaagcggagtccgctccggcagcaccaggcccaagcgaccagcctagtcaggagcttccccaacacgagctcccccccgaagaacccgtgtccgaaggaactcagcacgatcccctaagtcaggagagcgaagtggaggaacccctcagtcaagagagtgaggttgaagaaccactgacagtttggatggcgagcttcagtcctgtttctgaatcgacagattag

SEQ ID NO: 191072 - DNA, 561 bp, Artificial Sequence
  derived and/or modified sequence
atgtccccaaaaccacgggcttccggcccccctgccaaggcgaccgaggcaggaaagcgcaaatcctcaagccagccctcccctagcgacccaaagaaaaagacaaccaaagtcgcaaagaaaggcaaggcagtgaggcgcggtcgaagaggcaagaagggggctgcaactaagatggccgcagttacagcaccggaggccgaatccggcccagccgctccgggaccctcggatcagccgtcccaggagctgcctcagcacgaactgcccccagaggagccagtttctgagggcacccagcacgatcccctatcacaggaatcagagctcgaggaaccgctgagtcaggaaagtgaagtcgaagagccactgtcacaggagagtcaggttgaggagcctctaagtcaggagagcgaggtcgaggagcccttaagccaggaatcacaggtcgaagaacccttgagccaggaatccgaggtggaagagccactaagccaagaatctcaagtggaggagcctttaagccaggagagtgagatggaagagctgccctcagtctag

SEQ ID NO: 191073 - DNA, 501 bp, Artificial Sequence
  derived and/or modified sequence
atgagcccaaagccgcgggcttccgggccccctgccaaagccactgaagccggcaagagaaagtcatcgtcacagccctctccaagcgatcccaaaaagaagactacgaaagtggcgaagaagggcaaggccgtcaggcggggcagacgggggaaaaagggagctgccactaaaatggctgctgtgaccgccccggaagctgaatcaggcccagcagctccgggaccaagcgatcaaccatcacaagagctgcctcagcatgagctcccccccgaggagcccgtctcagagggaacacagcatgatcctctctcacaggaatccgaactcgaggaacctctgtcacaggagagtgaagttgaggaaccattaagccaggagtcccaggtcgaagaaccactgtcgcaggagtcagaggttgaggagcccctgagtcaggagtcccaggtagaggagccattgtctcaagagtcagaaatggaggaattgccttcggtgtag

SEQ ID NO: 191074 - DNA, 378 bp, Artificial Sequence
  derived and/or modified sequence
atgtcccctaaacctagggccagcgggccccccgcaaaagcgactgaggccggaaaaaggaagagctcgagtcagccatctcccagtgatcctaagaagaaaaccactaaagtagccaagaagggcaaggccgtgcgccgaggtagacgtggcaagaagggggctgccacaaaaatggctgcagtgaccgctcctgaggctgaatctggcccagccgcccccgggccttctgaccagccttctcaagagctgccacaacatgaattgccccctgaagagcctgtcagcgaggggacccagcacgaccccctgtctcaggagtccgaactagaagaaccactgagccaggagaggcccgccactccactttcgccctag

SEQ ID NO: 191075 - DNA, 561 bp, Artificial Sequence
  derived and/or modified sequence
atgagccccaagccccgggccagcggccccccagccaaggccacagaagctgggaagaggaagagcagcagccagcccagccccagcgaccccaagaagaagaccaccaaggtggccaagaagggcaaggctgtgcggcggggcagaagaggcaagaagggagctgccaccaagatggctgctgtgacagcccctgaggccgagagcgccccagctgcccctggccccagcgaccagcccagccaggagctgccccagcacgagctgcccccagaggagcctgtgtctgagggcacccagcacgaccccctgagccaggaggccgagctggaggagcccctgagccaggagagcgaggtggaggagcccctgagccaggagagccaggtggaggagcccctgagccaggagagcgaggtggaggagcccctgagccaggagagccaggtggaggagcccctgagccaggagagcgagatggaggagcccctgagccaggagagccaggtggaggagccccccagccaggagagcgagatggaggagctgcccagcgtgtag

SEQ ID NO: 191076 - DNA, 621 bp, Artificial Sequence
  derived and/or modified sequence
atgagccccaagccccgggccagcggccccccagccaaggccacagaagctgggaagaggaagagcagcagccagcccagccccagcgaccccaagaagaagaccaccaaggtggccaagaagggcaaggctgtgcggcggggcagaagaggcaagaagggagctgccaccaagatggctgctgtgacagcccctgaggccgagagcgccccagctgcccctggccccagcgaccagcccagccaggagctgccccagcacgagctgcccccagaggagcctgtgtctgagggcacccagcacgaccccctgagccaggaggccgagctggaggagcccctgagccaggagagcgaggtggaggagcccctgagccaggagagccaggtggaggagcccctgagccaggagagcgaggtggaggagcccctgagccaggagagccaggtggaggagcccctgagccaggagagcgaggtggaggagcccctgagccaggagagccaggtggaggagcccctgagccaggagagcgagatggaggagcccctgagccaggagagccaggtggaggagccccccagccaggagagcgagatggaggagctgcccagcgtgtag

SEQ ID NO: 191077 - DNA, 420 bp, Artificial Sequence
  derived and/or modified sequence
atgagccccaagccccgggccagcggccccccagccaaggccacagaagctgggaagaggaagagcagcagccagcccagccccagcgaccccaagaagaagaccaccaaggtggccaagaagggcaaggctgtgcggcggggcagaagaggcaagaagggagctgccaccaagatggctgctgtgacagcccctgaggccgagagcgccccagctgcccctggccccagcgaccagcccagccaggagctgccccagcacgagctgcccccagaggagcctgtgtctgagggcacccagcacgaccccctgagccaggagagcgaggtggaggagcccctgagccaggagagcgaggtggaggagcccctgactgtgtggatggccagcttcagccctgtgtctgagagcacagactag

SEQ ID NO: 191078 - DNA, 561 bp, Artificial Sequence
  derived and/or modified sequence
atgagccccaagccccgggccagcggccccccagccaaggccacagaagctgggaagaggaagagcagcagccagcccagccccagcgaccccaagaagaagaccaccaaggtggccaagaagggcaaggctgtgcggcggggcagaagaggcaagaagggagctgccaccaagatggctgctgtgacagcccctgaggccgagagcggccctgctgcccctggccccagcgaccagcccagccaggagctgccccagcacgagctgcccccagaggagcctgtgtctgagggcacccagcacgaccccctgagccaggagagcgagctggaggagcccctgagccaggagagcgaggtggaggagcccctgagccaggagagccaggtggaggagcccctgagccaggagagcgaggtggaggagcccctgagccaggagagccaggtggaggagcccctgagccaggagagcgaggtggaggagcccctgagccaggagagccaggtggaggagcccctgagccaggagagcgagatggaggagctgcccagcgtgtag

SEQ ID NO: 191079 - DNA, 501 bp, Artificial Sequence
  derived and/or modified sequence
atgagccccaagccccgggccagcggccccccagccaaggccacagaagctgggaagaggaagagcagcagccagcccagccccagcgaccccaagaagaagaccaccaaggtggccaagaagggcaaggctgtgcggcggggcagaagaggcaagaagggagctgccaccaagatggctgctgtgacagcccctgaggccgagagcggccctgctgcccctggccccagcgaccagcccagccaggagctgccccagcacgagctgcccccagaggagcctgtgtctgagggcacccagcacgaccccctgagccaggagagcgagctggaggagcccctgagccaggagagcgaggtggaggagcccctgagccaggagagccaggtggaggagcccctgagccaggagagcgaggtggaggagcccctgagccaggagagccaggtggaggagcccctgagccaggagagcgagatggaggagctgcccagcgtgtag

SEQ ID NO: 191080 - DNA, 378 bp, Artificial Sequence
  derived and/or modified sequence
atgagccccaagccccgggccagcggccccccagccaaggccacagaagctgggaagaggaagagcagcagccagcccagccccagcgaccccaagaagaagaccaccaaggtggccaagaagggcaaggctgtgcggcggggcagaagaggcaagaagggagctgccaccaagatggctgctgtgacagcccctgaggccgagagcggccctgctgcccctggccccagcgaccagcccagccaggagctgccccagcacgagctgcccccagaggagcctgtgtctgagggcacccagcacgaccccctgagccaggagagcgagctggaggagcccctgagccaggagaggcctgccacccccctgagcccctag

SEQ ID NO: 191081 - DNA, 561 bp, Artificial Sequence
  derived and/or modified sequence
atgagccccaagccccgggccagcggcccccccgccaaggccaccgaagctgggaagaggaagagcagcagccagccatcccccagcgatcctaagaaaaaaactactaaggttgcgaagaagggtaaggcagtgaggcgtggaaggcgggggaaaaagggtgccgctacaaagatggcggcggtcactgcccccgaagcagaatctgcgcctgccgcgccagggccatccgaccagccctcccaggaacttcctcagcacgaactgccaccggaggagcccgtgagcgaaggaacccagcatgatcccctgagccaagaggctgagctcgaggaacccctgtctcaggagtctgaagtggaggagcctctcagccaggaaagtcaagtggaggagcctctgagtcaagagtcggaagtggaggagcccctcagtcaggaatcacaggttgaggagcccctctctcaagaatctgagatggaagagcccttgtcacaggaatcacaagttgaggaaccacctagtcaggaatctgagatggaagagttgccgtccgtgtag

SEQ ID NO: 191082 - DNA, 621 bp, Artificial Sequence
  derived and/or modified sequence
atgagccccaagccccgggccagcggcccccccgccaaggccaccgaggcgggcaagcgtaaatctagctctcagccatccccaagcgatccaaaaaagaaaactacgaaggtggctaaaaagggtaaagccgtgagacgcggtcggagaggcaagaagggtgccgccactaaaatggccgctgtgacagcccccgaagctgagtctgcccctgcagccccgggcccttcagaccaaccttctcaggaactacctcagcacgagctgccccctgaggagcctgtgtctgaaggcacccagcacgatcccctgagccaagaggcggaactggaggaacctctttcacaagagtcggaggttgaagaacctctgtcacaggaatcacaggttgaagagccgttgtcccaggagtctgaggtggaggagcccctaagtcaagagtcccaagtcgaagagcccctgtctcaggaaagtgaggtagaagagcctctcagccaggagtctcaagtagaggagcccctaagccaagagagtgagatggaagagcccctctcccaggagtcacaagtggaggagcccccgagccaggaatccgagatggaggagctgcccagcgtatag

SEQ ID NO: 191083 - DNA, 420 bp, Artificial Sequence
  derived and/or modified sequence
atgagccccaagccccgggccagcggcccccccgccaaggccaccgaggcagggaaacgcaagtctagtagtcaacccagtccctctgaccctaaaaagaaaaccaccaaagtcgcaaaaaagggtaaagccgtgagaaggggtcggaggggaaaaaagggagccgcaacgaagatggctgccgtgacggcaccagaagccgaaagtgcccccgccgcccccggaccctcggaccagcccagtcaagagctgccgcagcacgaactgcccccagaggagccagtatcagaaggtactcaacacgaccccctgtcccaggaaagcgaagtcgaggaacccctgtcacaagaatccgaggtggaagagccgctgacggtctggatggcttcattctccccagtgtcagaaagcactgactag

SEQ ID NO: 191084 - DNA, 561 bp, Artificial Sequence
  derived and/or modified sequence
atgagccccaagccccgggccagcggcccccccgccaaggccaccgaggctggcaaaagaaagagcagtagccaacctagcccatcggatcctaaaaagaaaacgaccaaagtcgccaagaaaggtaaggctgttagacgagggagaaggggcaaaaaaggcgccgctaccaagatggctgcagtaacagcgcccgaagccgaaagtgggcctgccgctcctggtcccagcgatcaaccctcgcaggaacttccacagcacgagctgccccccgaagaacccgtgtctgaaggaactcagcacgaccctctgagccaagagtctgaactggaagaacctctctctcaagagtctgaggtggaggagccccttagccaggaaagccaagtcgaagaacccctctcccaagagtccgaagttgaagagcccctctcccaggaaagccaagtggaagaaccactgtcacaagaaagcgaggtcgaggagccattgagccaggaatcacaggtagaagaacccctgtctcaggaatctgagatggaggaactccccagcgtttag

SEQ ID NO: 191085 - DNA, 501 bp, Artificial Sequence
  derived and/or modified sequence
atgagccccaagccccgggccagcggcccccccgccaaggccaccgaagcaggcaaacggaaatccagctcccaaccaagcccctcagaccctaaaaaaaagacgacaaaggttgctaagaaggggaaggctgtgagacgcggccgaagaggaaaaaaaggagctgctacgaagatggctgcagtgacagcccctgaagcagagagcggcccggccgcacccgggcctagtgatcagccaagccaagagctgccccaacacgagctgccccctgaagaacctgtttctgaggggactcaacacgaccccctcagccaagagtctgaacttgaggagccccttagccaagaaagtgaagtggaggagccactcagtcaggaatcgcaggttgaggaaccgttaagccaagagtctgaagtggaggagccgctttctcaagagtcccaggtggaagaacctctatctcaagagagtgagatggaggaactgccttcagtttag

SEQ ID NO: 191086 - DNA, 378 bp, Artificial Sequence
  derived and/or modified sequence
atgagccccaagccccgggccagcggcccccccgccaaggccaccgaagctgggaagcgaaagagctctagccagccctctcccagcgatccaaagaagaagactactaaggtggctaaaaaaggcaaggccgtgcgtagagggcgaagaggtaagaagggcgcagccaccaagatggccgccgtgacggccccagaagctgagtccggacccgccgccccgggaccctcagatcaacctagtcaggagctgcctcagcacgagttaccccctgaagaaccggtcagtgaagggacccagcacgacccccttagccaggagtccgagctcgaagagccattgagccaagagcgtccagccacccccctgagcccatag

SEQ ID NO: 191087 - DNA, 561 bp, Artificial Sequence
  derived and/or modified sequence
atgtcccctaagccaagagccagtggacccccagccaaggccaccgaggccggaaagcgcaagagtagctcccagcccagccccagtgatcctaagaaaaagaccaccaaagtggctaagaagggaaaagcagtgaggcgtggacggagaggtaagaaaggagcagcaaccaaaatggctgctgttaccgccccagaggccgagagcgcgcctgccgctcccggacccagcgaccaaccttcccaggagctgcctcagcatgagcttccgccagaagaaccggttagtgagggcacacagcacgatccgctgtcccaggaagcagaattggaggaaccattatcacaagagtctgaagtggaagagccactgtcccaggaatctcaagtagaagaacccctgtctcaggagagtgaagtggaagagcccttaagccaggaatcccaggttgaagagcctctgagtcaggagtcggaaatggaggaacccctgtcgcaggagagccaggtcgaggagcccccaagccaggagagtgaaatggaggaacttcccagcgtctag

SEQ ID NO: 191088 - DNA, 420 bp, Artificial Sequence
  derived and/or modified sequence
atgtctccgaaaccacgggcaagcgggcctccggctaaggcaactgaggcagggaaaaggaagagttcgtcacagcctagcccaagcgaccccaagaaaaaaacaacaaaggtagcaaagaaaggaaaggcggtgcggagggggaggaggggaaaaaaaggcgctgccacgaaaatggcagccgtgacagcacccgaagcggagtctgcccctgcggctccaggaccctcagaccagccctcccaggagctgccccagcatgagctcccacctgaagagcccgtaagtgaagggactcagcatgaccctcttagtcaggaatcagaggttgaagagcccctctcccaggagtccgaggtagaggagccgttgactgtctggatggctagtttttcccccgtgagcgagtccacggactag

SEQ ID NO: 191089 - DNA, 501 bp, Artificial Sequence
  derived and/or modified sequence
atgtccccgaagccccgtgcttctgggcctcctgccaaagccacagaggcaggcaagcgaaagtcatcctcccaacctagcccatcagaccccaagaagaagacaaccaaggtggccaaaaaagggaaggccgtcagaagaggccgtcggggtaaaaaaggagcagccacaaagatggcggcagttactgcccctgaggcggagagcggtccggctgctcccggaccaagtgatcagccctcccaagaactgccgcagcacgaactgcccccagaggaacccgtgtcggaggggacacagcacgatcctctctcccaggagtccgaactggaggaacctctgagtcaggaatcagaggttgaggaacctttgtcacaggagtctcaggtcgaagagcctctgtcgcaggaaagtgaggttgaggagcccctgtcacaggaaagtcaggttgaggagccactgtcacaggaatcagaaatggaagagctgcctagtgtttag

SEQ ID NO: 191090 - DNA, 378 bp, Artificial Sequence
  derived and/or modified sequence
atgagcccaaaaccaagagcatccggcccacctgccaaagcgactgaggccggaaagaggaagtcttcttcgcagccatcaccctcagatccaaagaaaaaaactaccaaagtggccaaaaagggcaaagcagttcgccgtgggaggcgcggaaaaaaaggtgccgcaacaaagatggcagcagtgaccgctccggaagccgagagcggccctgccgcacccggaccttcagatcagccctcacaggagcttcctcagcatgagctcccccctgaagagcctgtgtcggagggaacacagcatgatcctctctcgcaggagagcgaactcgaggaacccctctctcaggagcgccctgcaacacctctgagtccctag

SEQ ID NO: 191091 - DNA, 780 bp, Artificial Sequence
  derived and/or modified sequence
atgtggacactgggagaaggaagtgagatggaaaagttctttgattgcatccaagaagtgaatggtcctcaagggcgaccattggctgggtagtggagtgttgaccaatcacagctcaggggcgtgattgtctcgtcctgggatcgcgagaggggtatatacagggaggccaggcagcctggagttagccgaccgttgcgagacgttgagctgcggaagatgagtccaaagccgagagcctcgggacctccggccaaggccacggaggcaggaaagaggaagtcctcctctcagccgagccccagtgacccgaagaagaagactaccaaggtggccaagaagggaaaagcagttcgtagagggagacgcgggaagaaaggggctgcgacaaagatggcggccgtgacggcacctgaggcggagagcgcgccagcggcacccggccccagcgaccagcccagccaggagctccctcagcacgagctgccgccggaggagccagtgagcgaggggacccagcacgaccccctgagtcaggaggccgagctggaggaaccactgagtcaggagagcgaggtggaagaaccactgagtcaggagagccaggtggaggaaccactgagtcaggagagcgaggtggaggaaccactgagtcaggagagccaggtggaggaaccactgagtcaggagagcgagatggaagaaccactgagtcaggagagccaggtggaggaaccaccgagtcaggagagcgagatggaagaactaccgagtgtgtag

SEQ ID NO: 191092 - DNA, 967 bp, Artificial Sequence
  derived and/or modified sequence
atgtggacactgggagaaggaagtgagatggaaaagttctttgattgcatccaagaagtgaatggtcctcaagggcgaccattggctgggtagtggagtgttgaccaatcacagctcaggggcgtgattgtctcgtcctgggatcgcgagaggggtatatacagggaggccaggcagcctggagttagccgaccgttgcgagacgttgagctgcggaagatgagtccaaagccgagagcctcgggacctccggccaaggccacggaggcaggaaagaggaagtcctcctctcagccgagccccagtgacccgaagaagaagactaccaaggtggccaagaagggaaaagcagttcgtagagggagacgcgggaagaaaggggctgcgacaaagatggcggccgtgacggcacctgaggcggagagcgcgccagcggcacccggccccagcgaccagcccagccaggagctccctcagcacgagctgccgccggaggagccagtgagcgaggggacccagcacgaccccctgagtcaggaggccgagctggaggaaccactgagtcaggagagcgaggtggaagaaccactgagtcaggagagccaggtggaggaaccactgagtcaggagagcgaggtggaagaaccactgagtcaggagagccaggtggaggaaccactgagtcaggagagcgaggtggaggaaccactgagtcaggagagccaggtggaggaaccactgagtcaggagagcgagatggaagaaccactgagtcaggagagccaggtggaggaaccaccgagtcaggagagcgagatggaagaactaccgagtgtgtagacggccaagtactcccctatctccgagagcagcgactaagttcaggcccagccgccagacctcagagatctcaccagcggggtgcttgccattctgaagataataaaatgaatgtgttgcaaattga

SEQ ID NO: 191093 - DNA, 811 bp, Artificial Sequence
  derived and/or modified sequence
atgtggatgctgggagaagtatgtgagatggaaaagttgtttcatggcatccaagaagtgaatgatcctcaaggtgtagcagaggaatttgtaggagagagggatgattgacgtcttcgtatagccctccatccatcccagttagcatggagggattttagggctaccattggctgggtagtggagtgttgaccaatcacagctcaggggcgtgattgtctcgtcctgggatcgcgagaggggtatatacagggaggccaggcagcctggagttagtcgaccgttgcgagacgttgagctgcggaagatgagtccaaagccgagagcctcgggacctccggccaaggccacggaggcaggaaagaggaagtcctcctctcagccgagccccagtgacccgaagaagaagactaccaaggtggccaagaagggaaaagcagttcgtagagggagacgcgggaagaaaggggctgcgacaaagatggcggccgtgacggcacctgaggcggagagcgcgccagcggcacccggccccagcgaccagcccagccaggagctccctcagcacgagctgccgccggaggagccagtgagcgaggggacccagcacgaccccctgagtcaggagagcgaggtggaagaaccactgagtcaggagagcgaggtggaagaaccactgactgtgtggatggccagcttttcccctgtctccgagagcaccgactaagttcaggcccagccgccagacctcagagatctcaccagcggggtgcttgccattctgaagataataaaatgaatgtgttgcaaa

SEQ ID NO: 191094 - DNA, 995 bp, Artificial Sequence
  derived and/or modified sequence
atgtggatgctgggagaagtatgtgagatggaaaagttgtttcatggcatccaagaagtgaatgatcctcaaggtgtagcagaggaatctgtaggagagagggatgattgacgtcttcgtatagccctccatccatcccagttagcatggagggattttagggctaccattggctgggtagtggagtgttgaccaatcacagctcaggggcgtgattgtctcgtcctgggatcgcgagaggggtatatacagggaggccaggcagcctggagttagtcgaccgttgcgagacgttgagctgcggaagatgagtccaaagccgagagcctcgggacctccggccaaggccacggaggcaggaaagaggaagtcctcctctcagccgagccccagtgacccgaagaagaagactaccaaggtggccaagaagggaaaagcagttcgtagagggagacgcgggaagaaaggggctgcgacaaagatggcggccgtgacggcacctgaggcggagagcgggccagcggcacccggccccagcgaccagcccagccaggagctccctcagcacgagctgccgccggaggagccagtgagcgaggggacccagcacgaccccctgagtcaggagagcgagctggaggaaccactgagtcaggagagcgaggtggaagaaccactgagtcaggagagccaggtggaggaaccactgagtcaggagagcgaggtggaagaaccactgagtcaggagagccaggtggaggaaccactgagtcaggagagcgaggtggaggaaccactgagtcaggagagccaggtggaggaaccactgagtcaggagagcgagatggaagaactaccgagtgtgtagacggccagctactcccctatctccgagagcagcgactaagttcaggcccagccgccagacctcagagatctcaccagcggggtgcttgccattctgaagataataaaatgaatgtgttgcaaattga

SEQ ID NO: 191095 - DNA, 808 bp, Artificial Sequence
  derived and/or modified sequence
atgtggatgctgggagaagtatgtgagatggaaaagttgtttcatggcatccaagaagtgaatgatcctcaaggtgtagcagaggaatctgtaggagagagggatgattgacgtcttcgtatagccctccatccatcccagttagcatggagggattttagggctaccattggctgggtagtggagtgttgaccaatcacagctcaggggcgtgattgtctcgtcctgggatcgcgagaggggtatatacagggaggccaggcagcctggagttagtcgaccgttgcgagacgttgagctgcggaagatgagtccaaagccgagagcctcgggacctccggccaaggccacggaggcaggaaagaggaagtcctcctctcagccgagccccagtgacccgaagaagaagactaccaaggtggccaagaagggaaaagcagttcgtagagggagacgcgggaagaaaggggctgcgacaaagatggcggccgtgacggcacctgaggcggagagcgggccagcggcacccggccccagcgaccagcccagccaggagctccctcagcacgagctgccgccggaggagccagtgagcgaggggacccagcacgaccccctgagtcaggagagcgagctggaggaaccactgagtcaggagagcgaggtggaagaaccactgagtcaggagagccaggtggaggaaccactgagtcaggagagcgaggtggaggaaccactgagtcaggagagccaggtggaggaaccactgagtcaggagagcgagatggaagaactaccgagtgtgtag

SEQ ID NO: 191096 - DNA, 682 bp, Artificial Sequence
  derived and/or modified sequence
atgtggatgctgggagaagtatgtgagatggaaaagttgtttcatggcatccaagaagtgaatgatcctcaaggtgtagcagaggaatctgtaggagagagggatgattgacgtcttcgtatagccctccatccatcccagttagcatggagggattttagggctaccattggctgggtagtggagtgttgaccaatcacagctcaggggcgtgattgtctcgtcctgggatcgcgagaggggtatatacagggaggccaggcagcctggagttagtcgaccgttgcgagacgttgagctgcggaagatgagtccaaagccgagagcctcgggacctccggccaaggccacggaggcaggaaagaggaagtcctcctctcagccgagccccagtgacccgaagaagaagactaccaaggtggccaagaagggaaaagcagttcgtagagggagacgcgggaagaaaggggctgcgacaaagatggcggccgtgacggcacctgaggcggagagcgggccagcggcacccggccccagcgaccagcccagccaggagctccctcagcacgagctgccgccggaggagccagtgagcgaggggacccagcacgaccccctgagtcaggagagcgagctggaggaaccactgagtcaggaacggccagctactcccctatctccg

SEQ ID NO: 191097 - protein, 186 aa, Artificial Sequence
  derived and/or modified sequence
MSPKPRASGPPAKAKEAGKRKSSSQPSPSDPKKKTTKVAKKGKAVRRGRRGKKGAATKMAAVTAPEAESGPAAPGPSDQPSQELPQHELPPEEPVSEGTQHDPLSQESELEEPLSQESEVEEPLSQESQVEEPLSQESEVEEPLSQESQVEEPLSQESEMEEPLSQESQVEEPLSQESEMEELPSV

SEQ ID NO: 191098 - protein, 186 aa, Artificial Sequence
  derived and/or modified sequence
MSPKPRASGPPAKAKEAGKRKSSSQPSPSDPKKKTTKVAKKGKAVRRGRRGKKGAATKMAAVTAPEAESGPAAPGPSDQPSQELPQHELPPEEPVSEGTQHDPLSQESELEEPLSQESEVEEPLSQESQVEEPLSQESEVEEPLSQESQVEEPLSQESEVEEPLSQESEVEEPLSQESEMEELPSV

SEQ ID NO: 191099 - protein, 186 aa, Artificial Sequence
  derived and/or modified sequence
MSPKPRASGPPAKATEAGKRKSSSQPSPSDPKKKTTKVAKKGKAVRRGRRGKKGAATKMAAVTAPEAESGPAAPGPSDQPSQELPQHELPPEEPVSEGTQHDPLSQESELEEPLSQESEVEEPLSQESQVEEPLSQESEVEEPLSQESQVEEPLSQESEVEEPLSQESQVEEPLSQESEMEELPSV

SEQ ID NO: 191100 - protein, 369 aa, Artificial Sequence
  derived and/or modified sequence
MGPGARRQGRIVQGRPEMCFCPPPTPLPPLRILTLGTHTPTPCSSPGSAAGTYPTMGSQALPPGPMQTLIFFDMEATGLPFSQPKVTELCLLAVHRCALESPPTSQGPPPTVPPPPRVVDKLSLCVAPGKACSPAASEITGLSTAVLAAHGRQCFDDNLANLLLAFLRRQPQPWCLVAHNGDRYDFPLLQAELAMLGLTSALDGAFCVDSITALKALERASSPSEHGPRKSYSLGSIYTRLYGQSPPDSHTAEGDVLALLSICQWRPQALLRWVDAHARPFGTIRPMYGVTASARTKPRPSAVTTTAHLATTRNTSPSLGESRGTKDLPPVKDPGALSREGLLAPLGLLAILTLAVATLYGLSLATPGE

SEQ ID NO: 191101 - DNA, 1110 bp, Artificial Sequence
  derived and/or modified sequence
atgggccccggcgccagaagacagggcagaatcgtgcagggcagacccgagatgtgcttctgccccccccccacccccctgccccccctgagaatcctgaccctgggcacccacacccccaccccctgcagcagccccggcagcgccgccggcacctaccccaccatgggcagccaggccctgccccccggccccatgcagaccctgatcttcttcgacatggaggccaccggcctgcccttcagccagcccaaggtgaccgagctgtgcctgctggccgtgcacagatgcgccctggagagcccccccaccagccagggccccccccccaccgtgccccccccccccagagtggtggacaagctgagcctgtgcgtggcccccggcaaggcctgcagccccgccgccagcgagatcaccggcctgagcaccgccgtgctggccgcccacggcagacagtgcttcgacgacaacctggccaacctgctgctggccttcctgagaagacagccccagccctggtgcctggtggcccacaacggcgacagatacgacttccccctgctgcaggccgagctggccatgctgggcctgaccagcgccctggacggcgccttctgcgtggacagcatcaccgccctgaaggccctggagagagccagcagccccagcgagcacggccccagaaagagctacagcctgggcagcatctacaccagactgtacggccagagcccccccgacagccacaccgccgagggcgacgtgctggccctgctgagcatctgccagtggagaccccaggccctgctgagatgggtggacgcccacgccagacccttcggcaccatcagacccatgtacggcgtgaccgccagcgccagaaccaagcccagacccagcgccgtgaccaccaccgcccacctggccaccaccagaaacaccagccccagcctgggcgagagcagaggcaccaaggacctgccccccgtgaaggaccccggcgccctgagcagagagggcctgctggcccccctgggcctgctggccatcctgaccctggccgtggccaccctgtacggcctgagcctggccacccccggcgagtag

SEQ ID NO: 191102 - DNA, 1110 bp, Artificial Sequence
  derived and/or modified sequence
atgggtccaggagctcggcgacaaggtagaatagtacaaggaaggcccgagatgtgtttctgcccccctcccacacccctgcctccactaagaatcttgaccctaggcacccacacccccaccccgtgtagctcgcccgggtctgcggctggcacttaccccaccatggggagtcaggcgttgccgcccgggcctatgcagacgctcatatttttcgatatggaggctaccggtctgcctttcagccagccaaaagtgaccgaactgtgtctgctggcagttcatcgatgcgccctagagtcccctcccacttctcaaggtccaccaccgacagtgcctccgcctcccagagtagtcgacaagttatctctgtgcgtcgctccgggaaaagcctgtagccccgcagctagcgaaattactgggctgagcactgcggtcctggctgcgcacggcagacagtgctttgatgacaatctggctaatctgctgctcgctttccttcgccgccagcctcaaccttggtgcctagtcgcacataacggagatcgctatgacttccccctgttacaggccgaactcgcgatgttagggctcaccagtgctcttgacggcgcattctgtgtcgatagcattacggccctgaaggctcttgagagagcttcatccccttccgagcacggacccagaaaatcctacagcctgggatctatttacactcgcctgtacggacagtcaccacccgattcacataccgccgaaggagatgtattggcacttctaagtatttgccagtggcgcccccaggctcttctcaggtgggtggacgcgcatgctcgcccttttggcacaatccggcccatgtatggggtaaccgctagcgcacgcacaaagccacgtccttcagcagtgaccactaccgcccacctagctacaacgagaaacaccagccccagccttggcgaaagcaggggaaccaaagacctccctcccgtcaaggacccgggagcgctcagcagagaaggacttctggcaccgttaggcctcctagcaatcttgacactagcagttgctacgctttatggccttagcttggccactcccggtgaatag

SEQ ID NO: 191103 - DNA, 1110 bp, Artificial Sequence
  derived and/or modified sequence
atgggccctggggcccggcggcagggcagaattgtgcagggccggcctgagatgtgcttctgccccccacccacccccctgccccccctgcgcatcctgaccctgggcacccacacccccaccccctgcagcagccctggcagcgctgctggcacctaccccaccatgggcagccaggccctgcccccaggccccatgcagaccctcatcttctttgacatggaggccaccggcctgcccttcagccagcccaaggtgacagagctgtgcctgctggccgtgcaccgctgtgccctggagagcccccccaccagccagggccccccacccaccgtgcccccaccaccccgggtggtggacaagctgagcctgtgtgtggcccctgggaaggcctgcagccctgctgccagcgagatcaccggcctgagcacagctgtgctggccgcccacggccggcagtgctttgatgacaacctggccaacctgctgctggccttcctgcggcggcagccccagccctggtgcctggtggcccacaacggggacagatatgacttccccctgctgcaggccgagctggccatgctgggcctgaccagcgccctggatggagccttctgtgtggacagcatcacagccctgaaggccctggagcgggccagcagccccagcgagcacggccccaggaagagctacagcctgggcagcatctacacccggctgtatggccagagccccccagacagccacacagcagaaggagatgtgctggccctgctgagcatctgccagtggaggccccaggccctgctgcgctgggtggatgcccacgcccggcccttcggcaccatccggcccatgtatggagtgacagccagcgcccggaccaagccccggcccagcgctgtgaccaccacagcccacctggccaccaccaggaacaccagccccagcctgggggagagccggggcaccaaggacctgccccctgtgaaggaccccggggccctgagccgggagggcctgctggcccccctgggcctgctggccatcctgaccctggccgtggccaccctgtatggcctgagcctggccaccccaggagagtag

SEQ ID NO: 191104 - DNA, 1110 bp, Artificial Sequence
  derived and/or modified sequence
atgggccccggcgcccggcggcagggccggatcgtgcagggccggccagaaatgtgtttttgccccccaccaacgccgttgcctcctctgagaattctcacccttggaacccatactcccacaccttgcagcagcccgggcagcgccgcgggaacctacccaactatgggcagccaggccctgccccccggtccaatgcagaccctcatctttttcgatatggaagctactggccttccattctcccagcccaaagtgacagaactctgtctgctggccgtgcataggtgcgccttggagtcccctcccaccagccagggccccccaccaactgtgccaccaccgccgcgcgttgtggataaactgagcctgtgcgtggcgcctggcaaagcctgcagtccagcggcctcagaaataacaggactcagtacagcggttctggcagcccatggcaggcagtgctttgacgataacctggcaaatcttcttttagcttttctgcgtagacagcctcagccgtggtgcctggtggctcacaacggcgatcggtacgactttcccctcttgcaagccgagttggccatgctggggttaacctccgctctagatggagcgttctgtgtcgattccattactgcactcaaggctctggagcgcgctagcagtccttctgagcatggtccaagaaaaagttattctctgggatctatttatacgcgactctatggtcagtcgccacccgattcacatacggcagagggcgatgtactcgctctgttgtcaatctgccagtggagaccccaagccttgctaaggtgggtggatgcccatgcacgcccctttgggaccattcgaccaatgtacggcgtgactgcctcagccagaactaaaccccgaccatccgccgtcacaaccaccgcccacctggccacgaccaggaacactagcccctctctgggggagtcccggggcacaaaggatttaccccccgttaaagatcccggtgccctctcccgtgaaggcttgctggcccctctgggactcctcgccattctgacattggccgtcgctacactctatggactctctttagctacgcctggagagtag

SEQ ID NO: 191105 - DNA, 1110 bp, Artificial Sequence
  derived and/or modified sequence
atgggtcctggagccaggaggcagggtcgaatcgtgcagggtaggcctgagatgtgtttttgtccacccccaaccccacttccgcctctgaggattctcacattaggcacccacactcctacgccctgtagttctccaggctctgctgctgggacctaccctactatgggctcccaagctctgcccccaggacctatgcagactcttatctttttcgatatggaggccactggactgcctttttcccagcctaaggtgaccgagttgtgtctcctggcggtccaccggtgtgctttggagtcacccccaacaagccagggacctccacctactgtgccgcctcctccacgggtagtcgacaaactgagtttatgtgtagctcccggtaaggcttgctcgccagctgccagcgaaattactggcctgtcgactgctgtgctggccgctcacggccgtcaatgtttcgatgataatctcgctaatctgctgctggcctttctcagacggcagccgcaaccctggtgcctggtggcccacaacggagacaggtatgatttccccttgcttcaggctgagctcgcaatgcttggcttaacttccgccctggacggcgctttctgcgtcgacagtattactgcactgaaggcgctggaacgtgccagtagtcccagcgaacacggcccacgtaaaagttactcactggggagtatatacaccagactttatggtcagagcccaccagacagccatactgcagaaggcgatgtgctcgcactcctgtcaatctgtcagtggagacctcaggccctcctaagatgggttgatgcccatgctcgaccattcggcactatcaggcccatgtacggcgtgacagcttcagctaggacaaagccacgcccttctgctgtgactaccactgcccacctggctaccacccgtaacacatctccatctctgggcgagtcccggggaactaaagatctgccacccgtcaaggaccccggagctctctctagagaaggacttcttgctcccctggggctgctggccatcctgaccctggcagtggcgaccttatatggcctctcattggcaacaccaggagagtag

SEQ ID NO: 191106 - DNA, 1877 bp, Artificial Sequence
  derived and/or modified sequence
gctcatccgagggcttcctgatgtgacggactgtgaagaggcagccctggatgacctctgtgccgcggaaaccgatgtggaagaccccgaggtggagtgtggctgaggccctgagtgtccagccacatggtggcaccagcaccactcctttccttaccacatcaactgattaaagcagtgaccagcaggaactgcccagagaactggctggccttgtttcctgagtctgatctgtttggcggagtgggaggggtggagcaggacccggaccctgagtggctgggatccttcttcctgtccctggctgttgctgagcccgtccccatggtaactgatctgccttgaggaaggagccctgccctgcctgtggaattgtcctgagtcattgctttgggctggggccatgggaagaaaccattgtgtggcagggaaggaggtggctcttggcccaggcctaaaccaggaaagcctgggaaactgggacccacaggtgggcatgaaagggccgcagcaggggctcccagcagtgtgtaagaccgggagctggtctggcaccactgccctggtccttccagctgcctgtcactggtatgatggccccggtgcattgtgccaccagcaggccacagctgtggatcttggaaggcctctggggtcccccgggagcaggggagtgggtgtgggggggaacggatggtggtgagagggacagaccaggcaggctgacgagcagggcgggcctggctcacgtgggcctgtaggcgggcccacgccaagtttcacttcccgccactgctgccagcgagagccgcgggagagtgtgcagccgagtcactactgcctgcctgcctgcctgctacggctcagcagcaggtacgtacccaaccatgggctcgcaggccctgcccccggggcccatgcagaccctcatctttttcgacatggaggccactggcttgcccttctcccagcccaaggtcacggagctgtgcctgctggctgtccacagatgtgccctggagagcccccccacctctcaggggccacctcccacagttcctccaccaccgcgtgtggtagacaagctctccctgtgtgtggctccggggaaggcctgcagccctgcagccagcgagatcacaggtctgagcacagctgtgctggcagcgcatgggcgtcaatgttttgatgacaacctggccaacctgctcctagccttcctgcggcgccagccacagccctggtgcctggtggcacacaatggtgaccgctacgacttccccctgctccaagcagagctggctatgctgggcctcaccagtgctctggatggtgccttctgtgtggatagcatcactgcgctgaaggccctggagcgagcaagcagcccctcagaacacggcccaaggaagagctacagcctaggcagcatctacactcgcctgtatgggcagtcccctccagactcgcacacggctgagggtgatgtcctggccctgctcagcatctgtcagtggagaccacaggccctgctgcggtgggtggatgctcacgccaggcctttcggcaccatcaggcccatgtatggggtcacagcctctgctaggaccaagccaagaccatctgctgtcacaaccactgcacacctggccacaaccaggaacactagtcccagccttggagagagcaggggtaccaaggatcttcctccagtgaaggaccctggagccctatccagggaggggctgctggccccactgggtctgctggccatcctgaccttggcagtagccacactgtatggactatccctggccacacctggggagtaggccaagaaggaaaatctgacgaataaagacccccgctgccccata

SEQ ID NO: 191107 - DNA, 1813 bp, Artificial Sequence
  derived and/or modified sequence
gtcattgctttgggctggggccatgggaagaaaccattgtgtggcagggaaggaggtggctcttggcccaggcctaaaccaggaaagcctgggaaactgggacccacaggtgggcatgaaagggccgcagcaggggctcccagcagtgtgtaagaccgggagctggtctggcaccactgccctggtccttccagctgcctgtcactggtatgatggccccggtgcattgtgccaccagcaggccacagctgtggatcttggaaggcctctggggtcccccgggagcaggggagtgggtgtgggggggaacggatggtggtgagagggacagaccaggcaggctgacgagcagggcgggcctggctcacgtgggcctgtaggcgggcccacgccaagtttcacttcccgccactgctgccagcgagagccgcgggagagtgtgcagccgagtcactactgcctgcctgcctgcctgctacggtgagtgtggcccccacaatgggatggcgcagggcaggagggccatgggttcccccaccccagactaagggggcactaggggaggggccgagtcatgtgaagagggagaccctctcagacagtcgaatgtgctggtcccactaaggaaaccacctcaccctctccaacttcctgcctgaaaatgggccctggagctcgcagacagggcaggattgtgcagggaaggcctgagatgtgcttctgcccaccccctaccccactccctccccttcggatcttaacactgggcactcacacacccaccccatgctcctctccaggctcagcagcaggtacgtacccaaccatgggctcgcaggccctgcccccggggcccatgcagaccctcatctttttcgacatggaggccactggcttgcccttctcccagcccaaggtcacggagctgtgcctgctggctgtccacagatgtgccctggagagcccccccacctctcaggggccacctcccacagttcctccaccaccgcgtgtggtagacaagctctccctgtgtgtggctccggggaaggcctgcagccctgcagccagcgagatcacaggtctgagcacagctgtgctggcagcgcatgggcgtcaatgttttgatgacaacctggccaacctgctcctagccttcctgcggcgccagccacagccctggtgcctggtggcacacaatggtgaccgctacgacttccccctgctccaagcagagctggctatgctgggcctcaccagtgctctggatggtgccttctgtgtggatagcatcactgcgctgaaggccctggagcgagcaagcagcccctcagaacacggcccaaggaagagctacagcctaggcagcatctacactcgcctgtatgggcagtcccctccagactcgcacacggctgagggtgatgtcctggccctgctcagcatctgtcagtggagaccacaggccctgctgcggtgggtggatgctcacgccaggcctttcggcaccatcaggcccatgtatggggtcacagcctctgctaggaccaagccaagaccatctgctgtcacaaccactgcacacctggccacaaccaggaacactagtcccagccttggagagagcaggggtaccaaggatcttcctccagtgaaggaccctggagccctatccagggaggggctgctggccccactgggtctgctggccatcctgaccttggcagtagccacactgtatggactatccctggccacacctggggagtaggccaagaaggaaaatctgacgaataaagacccccgctgcccc

SEQ ID NO: 191108 - DNA, 1493 bp, Artificial Sequence
  derived and/or modified sequence
gtcattgctttgggctggggccatgggaagaaaccattgtgtggcagggaaggaggtggctcttggcccaggcctaaaccaggaaagcctgggaaactgggacccacaggtgggcatgaaagggccgcagcaggggctcccagcagtgtgtaagaccgggagctggtctggcaccactgccctggtccttccagctgcctgtcactggtatgatggccccggtgcattgtgccaccagcaggccacagctgtggatcttggaaggcctctggggtcccccgggagcaggggagtgggtgtgggggggaacggatggtggtgagagggacagaccaggcaggctgacgagcagggcgggcctggctcacgtgggcctgtaggcgggcccacgccaagtttcacttcccgccactgctgccagcgagagccgcgggagagtgtgcagccgagtcactactgcctgcctgcctgcctgctacggctcagcagcaggtacgtacccaaccatgggctcgcaggccctgcccccggggcccatgcagaccctcatctttttcgacatggaggccactggcttgcccttctcccagcccaaggtcacggagctgtgcctgctggctgtccacagatgtgccctggagagcccccccacctctcaggggccacctcccacagttcctccaccaccgcgtgtggtagacaagctctccctgtgtgtggctccggggaaggcctgcagccctgcagccagcgagatcacaggtctgagcacagctgtgctggcagcgcatgggcgtcaatgttttgatgacaacctggccaacctgctcctagccttcctgcggcgccagccacagccctggtgcctggtggcacacaatggtgaccgctacgacttccccctgctccaagcagagctggctatgctgggcctcaccagtgctctggatggtgccttctgtgtggatagcatcactgcgctgaaggccctggagcgagcaagcagcccctcagaacacggcccaaggaagagctacagcctaggcagcatctacactcgcctgtatgggcagtcccctccagactcgcacacggctgagggtgatgtcctggccctgctcagcatctgtcagtggagaccacaggccctgctgcggtgggtggatgctcacgccaggcctttcggcaccatcaggcccatgtatggggtcacagcctctgctaggaccaagccaagaccatctgctgtcacaaccactgcacacctggccacaaccaggaacactagtcccagccttggagagagcaggggtaccaaggatcttcctccagtgaaggaccctggagccctatccagggaggggctgctggccccactgggtctgctggccatcctgaccttggcagtagccacactgtatggactatccctggccacacctggggagtaggccaagaaggaaaatctgacgaataaagacccccgctgcccc

SEQ ID NO: 191109 - protein, 365 aa, Artificial Sequence
  derived and/or modified sequence
MLGQVVTLILLLLLKVYQGKGCQGSADHVVSISGVPLQLQPNSIQTKVDSIAWKKLLPSQNGFHHILKWENGSLPSNTSNDRFSFIVKNLSLLIKAAQQQDSGLYCLEVTSISGKVQTATFQVFVFDKVEKPRLQGQGKILDRGRCQVALSCLVSRDGNVSYAWYRGSKLIQTAGNLTYLDEEVDINGTHTYTCNVSNPVSWESHTLNLTQDCQNAHQEFRFWPFLVIIVILSALFLGTLACFCVWRRKRKEKQSETSPKEFLTIYEDVKDLKTRRNHEQEQTFPGGGSTIYSMIQSQSSAPTSQEPAYTLYSLIQPSRKSGSRKRNHSPSFNSTIYEVIGKSQPKAQNPARLSRKELENFDVYS

SEQ ID NO: 191110 - DNA, 1098 bp, Artificial Sequence
  derived and/or modified sequence
atgctggggcaggtggtcaccttgatcctgcttctactcttgaaagtgtaccagggcaagggatgtcagggatctgcggaccacgtggtgagtatatctggcgtgcccctgcaactccagcctaattcaattcagaccaaggtcgattcaattgcctggaagaagttgctgcccagtcagaacggctttcaccacattctgaagtgggagaacggctcgctgccatcaaacacctcaaacgatagattctcttttattgttaaaaacctgtcccttctgattaaggcggcccagcagcaggattccggcctgtattgcctggaggttacaagcatatcaggaaaggtgcagaccgccacttttcaagtgttcgtgttcgacaaagtggaaaagcccagacttcaagggcaaggtaaaatcctggacaggggccgctgtcaggtcgctctgagctgtctcgtttcacgtgacggaaacgtcagctatgcatggtacaggggttcgaaactgatccagaccgcgggaaaccttacctatttggacgaagaggttgatatcaacggaacacacacttacacttgtaacgtaagtaaccctgttagttgggaaagtcacacacttaatctcacgcaagattgccagaacgcacaccaggaatttcgattttggccctttctggtcataattgtaatcctgtctgcattattcctgggaactctggcgtgcttttgtgtatggcgccggaaaagaaaggaaaagcaaagcgaaacctcaccaaaggaattcctgaccatctatgaagacgtcaaggatcttaaaactcgacgtaaccatgagcaggagcagacgttccctggaggcggctctacaatctatagcatgatccaatctcagtcctcagctcctacctcccaagagccagcttataccctgtattccctgattcagccttctaggaagtccggcagccggaagaggaatcattcccccagctttaatagcacaatttatgaggtcatcggtaaaagtcagcccaaagcacagaacccagcaagactctcccgtaaggagctcgagaatttcgacgtctacagttag

SEQ ID NO: 191111 - DNA, 1098 bp, Artificial Sequence
  derived and/or modified sequence
atgctgggccaggtggtgaccctcatcctgctgctgctgctgaaggtgtaccagggcaagggctgccagggcagcgctgaccacgtggtgtccatctctggagtgcccctgcagctgcagcccaacagcatccagaccaaggtggacagcatcgcctggaagaagctgctgcccagccagaatggcttccaccacatcctgaagtgggagaatggcagcctgcccagcaacaccagcaatgaccgcttctccttcatcgtgaagaacctgagcctgctgatcaaggccgcccagcagcaggacagcggcctgtactgcctggaggtgaccagcatcagcggcaaggtgcagacagccaccttccaggtgtttgtgtttgacaaggtggagaagccccggctgcagggccagggcaagatcctggaccggggccgctgccaggtggccctgagctgcctggtgtccagagatggaaatgtgtcctatgcctggtaccggggcagcaagctgatccagacagctggcaacctgacctacctggatgaggaggtggacatcaatggcacccacacctacacctgcaatgtgagcaaccctgtgtcctgggagagccacaccctgaacctgacccaggactgccagaatgcccaccaggagttccgcttctggcccttcctggtgatcatcgtcatcctgagcgccctcttcctgggcaccctggcctgcttctgtgtgtggaggaggaagaggaaggagaagcagagcgagaccagccccaaggagttcctgaccatctatgaagatgtgaaggacctgaagaccaggaggaaccacgagcaggagcagaccttccctgggggcggcagcaccatctacagcatgatccagagccagagcagcgcccccaccagccaggagcccgcctacaccctgtacagcctcatccagcccagcaggaagagcggcagcaggaagaggaaccacagccccagcttcaacagcaccatctatgaagtcatcggcaagagccagcccaaggcccagaacccagcccggctgagcaggaaggagctggagaactttgatgtgtacagctag

SEQ ID NO: 191112 - DNA, 1098 bp, Artificial Sequence
  derived and/or modified sequence
atgctgggccaggtggtgaccctgatcctgctgctgctgctgaaggtttaccagggcaaaggatgccagggctctgcagaccacgtggtctccatctctggcgtgcccctgcaattgcagcccaacagtatacagactaaggtcgacagcatcgcatggaaaaagctgctgccatcgcagaatggcttccaccatattttgaaatgggagaatgggtcgctcccttccaacactagcaacgataggttcagcttcatcgtaaagaatctctcgctgttgatcaaagccgcacagcagcaggattcgggactctactgccttgaggtgacgtctatctccgggaaggtgcagactgctacatttcaagtgtttgttttcgacaaagtggagaagccccgcctccaaggacagggtaagattttagatcggggtcgatgccaggtggccctctcttgcttggtgagccgggacggaaacgtgagctatgcctggtacagaggaagcaaactgatccaaaccgccgggaacctgacatatttggatgaagaggtcgacatcaacgggacccatacttatacatgtaacgtttcaaatcccgtgtcctgggagtcgcatacactcaacctgacacaagattgccagaacgcccaccaggagtttagattttggccatttttggtcataatcgtgatactctccgcactgtttctcggcacactcgcgtgcttttgtgtttggagaagaaagcggaaggaaaaacaaagcgaaacctcaccgaaagaatttctcacaatctacgaagatgttaaggatctaaaaactcgccggaatcacgaacaggagcagacatttccaggcgggggcagcactatctatagcatgatccaatcccaaagctcggctccaacgtcacaggaaccagcatacacattgtactccttgattcagccatcaaggaagagtggcagtagaaaaagaaaccattccccatccttcaattcgaccatttatgaggtgatcggaaaatcacagccaaaggcccagaacccagcccggctctccagaaaggagttagaaaatttcgacgtgtatagttag

SEQ ID NO: 191113 - DNA, 1098 bp, Artificial Sequence
  derived and/or modified sequence
atgctgggtcaggtagtcaccctcatcctcttgcttctcttaaaagtctatcagggtaaggggtgccagggtagtgccgaccacgtggtctctatcagcggagtgcccctgcaactgcagcctaactccatccaaacaaaagtagatagcatcgcgtggaagaaactcctgccctctcagaatgggttccaccacatactcaaatgggagaatggctcgcttccctccaatacatctaacgaccgattttcttttattgtaaaaaatttatctcttctgattaaggccgcacaacagcaagactcgggcctctactgtttggaggtgacgtccatcagtggtaaggttcaaaccgctacctttcaagtgtttgtctttgataaggtcgagaagcccaggttacaaggacaaggcaaaattctggaccggggtaggtgtcaggttgctctgtcatgcttagtcagccgggacggcaacgttagctacgcttggtatcggggtagcaaactcattcagacggcgggtaacctaacatacctcgatgaggaagtggatattaatgggacacacacctacacgtgcaacgtgtcaaatccagttagctgggaaagccatacgttaaacctgacccaggattgtcagaacgcccaccaagagtttcgtttttggccatttctcgttattatcgtgatcctctccgctttatttcttggaacacttgcttgtttttgtgtctggcggaggaagaggaaggagaaacagagcgaaacaagtcctaaggagttcctgacaatttatgaggacgtaaaggacctaaagacccgcaggaaccatgagcaggagcagacttttcccggaggcggatccacaatctattctatgatccagtcacagagttccgctccaactagccaagagccggcttacacactgtattccctgatacaaccatcacgcaagtctggatctagaaaaaggaaccactctcctagctttaattctactatctatgaagtcatcgggaaatcgcagccgaaagcccagaatcccgcacggttaagccggaaggagctggagaacttcgacgtgtactcctag

SEQ ID NO: 191114 - DNA, 2463 bp, Artificial Sequence
  derived and/or modified sequence
ggccttgtcagctcacagcaggcgttaacagcctctaattgaggaaactgtggctggacaggttgcaaggcagttctgctccccatcgtcctcttgctgactggggactgctgagcccgtgcacggcagagagtctggtggggtggaggggctggcctggcccctctgtcctgtggaaatgctggggcaagtggtcaccctcatactcctcctgctcctcaaggtgtatcagggcaaaggatgccagggatcagctgaccatgtggttagcatctcgggagtgcctcttcagttacaaccaaacagcatacagacgaaggttgacagcattgcatggaagaagttgctgccctcacaaaatggatttcatcacatattgaagtgggagaatggctctttgccttccaatacttccaatgatagattcagttttatagtcaagaacttgagtcttctcatcaaggcagctcagcagcaggacagtggcctctactgcctggaggtcaccagtatatctggaaaagttcagacagccacgttccaggtttttgtatttgataaagttgagaaaccccgcctacaggggcaggggaagatcctggacagagggagatgccaagtggctctgtcttgcttggtctccagggatggcaatgtgtcctatgcttggtacagagggagcaagctgatccagacagcagggaacctcacctacctggacgaggaggttgacattaatggcactcacacatatacctgcaatgtcagcaatcctgttagctgggaaagccacaccctgaatctcactcaggactgtcagaatgcccatcaggaattcagattttggccgtttttggtgatcatcgtgattctaagcgcactgttccttggcacccttgcctgcttctgtgtgtggaggagaaagaggaaggagaagcagtcagagaccagtcccaaggaatttttgacaatttacgaagatgtcaaggatctgaaaaccaggagaaatcacgagcaggagcagacttttcctggaggggggagcaccatctactctatgatccagtcccagtcttctgctcccacgtcacaagaacctgcatatacattatattcattaattcagccttccaggaagtctggatccaggaagaggaaccacagcccttccttcaatagcactatctatgaagtgattggaaagagtcaacctaaagcccagaaccctgctcgattgagccgcaaagagctggagaactttgatgtttattcctagttgctgcagcaattctcacctttcttgcacatcagcatctgctttgggaattggcacagtggatgacggcacaggagtctctatagaacagttcctagtctggagaggatatggaaatttgttcttgttctatattttgttttgaaaatgatgtctaacaaccatgataagagcaaggctgttaaataatatcttccaatttacagatcagacatgaatgggtggaggggttaggttgttcacaaaaggccacattccaagtatttgtaatctagaaagtgttatgtaagtgatgttattagcatcgagattccctccacctgattttcaagctgtcacttgtttccttttctcccctctctgggttgactgcatttctagactctcgccggcccaggcccatcttccaaagcaagaggaaggaatgataatggtgactcaggggaagaagaaacagccctcctctgaaagcctggactgtccggctgtgaactggctggcaggttctgcacgtgggtgggggccagggcctgggctttactcaattgcagagaaaaaactttctccctgcatctcatacctttacctctggccagttggccaccagggggagtgggctgaagggagagtagatggtgcaaagcaagcccatctctaagtagaaaaatcacccagagcacatgctgacctgataactggggtgttgagaccagctttgtccatggtatgatgtttgatttatgaagacgcattgttagaaatccatttggcttcttcatagaagtggcttcccagaggaagaggcctctcagaaaccatgttctatttaagttctgagtcctgatgagtgttccccaggatgcacattgaagggagggctcaggcagctgagggctgagaatgaggcagttggaatctagacactatgctgggttccctgagtcgtcaggccagacatttcaacaaggctgtggggagcagggctgtgactctggctgagcccaggaaagcgacaagggtgaactgggagaggacttactcagagaccccaacaggtgatactgcacaaagcctggttcttcaattttcctaccctgtatctaacataggagtttcatataaaacggtgatatcatgcagatgcagtctgaattccttgcctgaattaaatttatgtatcctctcca

SEQ ID NO: 191115 - DNA, 1098 bp, Artificial Sequence
  derived and/or modified sequence
atgctgggccaggtggtgaccctgatcctgctgctgctgctgaaggtgtaccagggcaagggctgccagggcagcgccgaccacgtggtgagcatcagcggcgtgcccctgcagctgcagcccaacagcatccagaccaaggtggacagcatcgcctggaagaagctgctgcccagccagaacggcttccaccacatcctgaagtgggagaacggcagcctgcccagcaacaccagcaacgacagattcagcttcatcgtgaagaacctgagcctgctgatcaaggccgcccagcagcaggacagcggcctgtactgcctggaggtgaccagcatcagcggcaaggtgcagaccgccaccttccaggtgttcgtgttcgacaaggtggagaagcccagactgcagggccagggcaagatcctggacagaggcagatgccaggtggccctgagctgcctggtgagcagagacggcaacgtgagctacgcctggtacagaggcagcaagctgatccagaccgccggcaacctgacctacctggacgaggaggtggacatcaacggcacccacacctacacctgcaacgtgagcaaccccgtgagctgggagagccacaccctgaacctgacccaggactgccagaacgcccaccaggagttcagattctggcccttcctggtgatcatcgtgatcctgagcgccctgttcctgggcaccctggcctgcttctgcgtgtggagaagaaagagaaaggagaagcagagcgagaccagccccaaggagttcctgaccatctacgaggacgtgaaggacctgaagaccagaagaaaccacgagcaggagcagaccttccccggcggcggcagcaccatctacagcatgatccagagccagagcagcgcccccaccagccaggagcccgcctacaccctgtacagcctgatccagcccagcagaaagagcggcagcagaaagagaaaccacagccccagcttcaacagcaccatctacgaggtgatcggcaagagccagcccaaggcccagaaccccgccagactgagcagaaaggagctggagaacttcgacgtgtacagctag

SEQ ID NO: 191116 - protein, 313 aa, Artificial Sequence
  derived and/or modified sequence
MASFRKLTLSEKVPPNHPSRKKVNFLDMSLDDIIIYKELEGTNAEEEKNKRQNHSKKESPSRQQSKAHRHRHRRGYSRCRSNSEEGNHDKKPSQKPSGFKSGQHPLNGQPLIEQEKCSDNYEAQAEKNQGQSEGNQHQSEGNPDKSEESQGQPEENHHSERSRNHLERSLSQSDRSQGQLKRHHPQYERSHGQYKRSHGQSERSHGHSERSHGHSERSHGHSERSHGHSKRSRSQGDLVDTQSDLIATQRDLIATQKDLIATQRDLIATQRDLIVTQRDLVATERDLINQSGRSHGQSERHQRYSTGKNTITT

SEQ ID NO: 191117 - protein, 78 aa, Artificial Sequence
  derived and/or modified sequence
MASFRKLTLSEKVPPNHPSRKKVNFLDMSLDDIIIYKELEGTNAEEEKNKRQNHSKKESPSRQQSKAHRHRHRRGEVQ

SEQ ID NO: 191118 - DNA, 1701 bp, Artificial Sequence
  derived and/or modified sequence
agggaagatggcttcgtttcggaagctaacgctttctgaaaaagtgccgccaaatcatcccagtcggaaaaaggttaacttcctagatatgtctctagacgacattataatctataaagagttagaagggacaaatgctgaagaagaaaagaataaaagacagaaccatagtaaaaaggaatcgccttcaagacagcaatcaaaagctcatagacatcgccatcggagaggctactcaagatgcagaagcaactctgaggaaggaaatcatgataaaaaaccatcccaaaaaccttctggattcaagtctggacaacaccctttaaatgggcagcctttaattgagcaggagaagtgcagtgacaattatgaggcccaagcagagaagaatcaaggccagtcagaggggaaccagcatcaatcagaaggaaatccggacaaatcagaagaatcccagggccaaccagaagaaaatcatcattctgagcgatcccgaaaccacttagagagatctctttctcagtcagacagatctcaagggcagctaaagagacatcatccccaatatgagagatctcatggccaatacaagagatctcatggtcaatctgagagatctcatggccactcagagagatctcatggtcactcagagagatctcatggtcactcagagagatctcatggtcactcaaagagatctcgtagccagggagatcttgtggacactcagagtgatctcatagccactcagagagatctcatagccactcagaaagatctcatagccactcagagagatctcatagccactcagagagatctcatagtcactcagagagatctcgtggccactgagagagatctcataaatcagtcagggagatctcatggccaatcagaaagacatcagagatactcaacaggtaaaaatacaataactacttaatcatcagaacaatgtgttgaattctgtggaaatagaaaagcatatatctatattctaatggctaaatatgtatttgttgaaacatgtatattgggacaaagacataaatattagaatggaggtaatacatacatagtatcaatattgtttcaacttgatgtcctctaagctatcatccagttacccaagatgtcccattaagttgttcccggtaggtctgctttccctggaagagccgtatgtactcagcctttcctattgggccttccccacaattagaatattttgacttagtgtcctgtcccccttggacgttccaacttgacttagtgtccagtgccccttggacattccaacctggtaggtaagctaatctaacaactaactgccaaattgataatatataatctatgataatgaatatctcttttgtgtctccttcctaagccatcctcagagagtccttagcagacaaatggtagatgtatctttgggcagctgaacttttctgctttcctcaaatcagaccatatgagaggatatattctatgcatagatgtaatgctaaccttctgaatatattttgaatacatttatatattcactgttgccttataaaactgttagggtaggtctgtctaccctagcaaaagaaacacagaaatttaaatgtactgggagttatgttgttaaaaacacaagatatgttaactgcagtttgtttggttattcaataaaagttttagttttaa

SEQ ID NO: 191119 - DNA, 942 bp, Artificial Sequence
  derived and/or modified sequence
atggcttcgtttcgaaaattgaccttatctgagaaggttccccccaaccacccatctcgcaagaaggtgaacttcctcgatatgtcactggacgacataataatatataaggagctggaaggcaccaatgctgaagaggagaagaacaagaggcaaaaccactctaaaaaagagtcaccaagccgacagcaaagcaaagcccacagacaccgccatcgaaggggctatagccgttgtagaagcaacagcgaggaggggaaccatgacaaaaaaccctcccagaaaccaagcgggttcaaatccggtcagcacccgcttaacggccagcctctaatagaacaggagaaatgtagcgacaattacgaggcccaggctgaaaaaaatcaggggcagtccgaggggaatcagcatcagagtgaagggaacccggataaatccgaggagagccaaggacaaccagaggaaaaccaccacagcgagcggagccggaatcaccttgaacgatctctgtcacagtctgatcgttcccagggccagttaaagcggcaccatccgcagtacgaacgatcccacggacagtacaagcgctcgcacggacagagcgagaggagccacgggcatagcgagagatctcatgggcacagtgagagatctcacggccattccgagagatcccacggtcacagcaagcggagtcgcagccaaggggatctggttgacacacagagcgacctgatcgccacgcagcgggatttgattgccacccagaaggatcttatcgcgacgcagcgagacctcattgcaacccagagagatttaattgtcacccagcgcgatttggtggctacagagcgagacctgattaaccagtctggccggtcacacggtcagtcagaaaggcaccagagatactccacaggtaagaatactatcacgacctag

SEQ ID NO: 191120 - DNA, 237 bp, Artificial Sequence
  derived and/or modified sequence
atggccagtttccggaagttgaccttgtctgagaaagtgcctcccaatcaccccagccgcaaaaaggtgaacttcctggatatgtctctggatgacattatcatatataaagaactggagggcactaatgccgaagaggaaaagaacaagaggcagaatcactctaagaaagaatcaccaagtcgtcagcagagcaaagctcaccgtcaccggcacagacggggcgaggtgcagtag

SEQ ID NO: 191121 - DNA, 942 bp, Artificial Sequence
  derived and/or modified sequence
atggccagcttcaggaagctgaccctgtctgagaaggtgccccccaaccaccccagcaggaagaaggtgaacttcctggacatgagcctggatgacatcatcatctacaaggagctggagggcaccaatgctgaggaggagaagaacaagaggcagaaccacagcaagaaggagagccccagccggcagcagagcaaggcccaccgccaccgccacagaagaggctacagccgctgccgcagcaacagcgaggagggcaaccacgacaagaagcccagccagaagcccagcggcttcaagagcggccagcaccccctgaatggccagcccctcatcgagcaggagaagtgcagcgacaactatgaggcccaggccgagaagaaccagggccagagcgagggcaaccagcaccagagcgagggcaacccagacaagtctgaggagagccagggccagcctgaggagaaccaccacagcgagaggagcaggaaccacctggagaggagcctgagccagagcgacaggagccagggccagctgaagaggcaccacccccagtatgaaagaagccacggccagtacaagaggagccacggccagagcgagaggagccacggccacagcgagaggagccacggccacagcgagaggagccacggccacagcgagaggagccacggccacagcaagaggagccgcagccagggcgacctggtggacacccagagcgacctgattgccacccagagggacctgattgccacccagaaggacctgattgccacccagagggacctgattgccacccagagggacctgattgtgacccagagggacctggtggccacagagcgggacctgatcaaccagagcggccgcagccacggccagagcgagcggcaccagcgctacagcacaggcaagaacaccatcaccacctag

SEQ ID NO: 191122 - DNA, 237 bp, Artificial Sequence
  derived and/or modified sequence
atggccagcttcaggaagctgaccctgtctgagaaggtgccccccaaccaccccagcaggaagaaggtgaacttcctggacatgagcctggatgacatcatcatctacaaggagctggagggcaccaatgctgaggaggagaagaacaagaggcagaaccacagcaagaaggagagccccagccggcagcagagcaaggcccaccgccaccgccacagaagaggagaggtgcagtag

SEQ ID NO: 191123 - DNA, 942 bp, Artificial Sequence
  derived and/or modified sequence
atggccagcttccggaagctgaccctgagcgagaaggtgccccccaaccatccttcccgcaaaaaggtgaatttcctggacatgtctcttgatgacatcattatctataaggagttggaaggcactaatgcagaggaagaaaaaaacaagaggcagaaccacagtaagaaagagtccccatccaggcagcagtcaaaggctcacaggcatcgacataggaggggctattcccggtgcaggtctaatagtgaagaagggaaccacgataaaaagcccagccagaaaccctcggggttcaagagcgggcagcaccccttaaacggacagccactgattgaacaggagaaatgctccgacaactacgaagcgcaggctgaaaaaaaccaaggtcagagtgagggaaaccagcatcagagtgaggggaaccccgataagtcagaggaaagccaggggcagcctgaggaaaatcatcattcggagcgatctagaaatcacctcgaacggtccttatcccagagcgatcggtcacagggccagctgaagcggcaccaccctcagtatgaacggagccatgggcaatacaagcgttctcatggacaatctgagaggtcacacggacactcagagagatcacatggccacagcgagagaagccatgggcactccgagaggtctcacggtcactccaagcggagccgttcacagggggatctggtggatacccagagcgacctgatagccactcagagggatttaatcgctacacagaaagatctcattgcgacccagcgggatctcatagcgacgcagcgagaccttatagtgacacagagagatctggttgctaccgagcgtgatcttattaaccaatccgggcgctcacatgggcagtccgagcggcatcagagatattcgacggggaaaaataccatcaccacttag

SEQ ID NO: 191124 - DNA, 237 bp, Artificial Sequence
  derived and/or modified sequence
atggccagcttccggaagctgaccctgagcgagaaggtgccccccaatcacccttctcggaaaaaggtgaatttcctggatatgagtctggatgacattataatctataaggaactcgaaggaactaacgccgaagaggagaaaaataaaaggcaaaatcactccaagaaggagagtccctccaggcaacagtctaaggctcacaggcacaggcaccggaggggagaggtgcaatag

SEQ ID NO: 191125 - DNA, 942 bp, Artificial Sequence
  derived and/or modified sequence
atggcctcgtttcgcaaattaaccttatcagagaaagtgcccccaaatcatccatctcggaaaaaagtgaacttcctggatatgtctctggatgacattataatttacaaggaactcgaaggtacgaatgctgaggaagagaagaataagaggcagaatcatagcaaaaaagagtcccccagtagacaacagagtaaggcacatcggcaccgccataggcgtggttactccagatgccgtagtaatagcgaggagggcaaccacgataagaagccctctcagaagccctcgggcttcaagagcggccagcacccacttaatggacagccactaattgaacaagaaaaatgtagcgacaattatgaggctcaagcagaaaaaaaccagggacagtctgaaggtaaccaacaccagagcgaagggaacccagataagtcagaagaatcccagggacaaccagaagagaaccaccattcagagcgtagtagaaaccacctggaacgcagtctatcacaaagcgaccgatcccaggggcaacttaagagacaccaccctcagtacgagcgctcccacggccagtataaacggtcccacggccagtcagagagatcccatggacattccgagcgcagccacggacactccgagcggtctcacggccattccgagcggtcacatggacactcgaagcgctctcgtagtcaaggggacctggtagacacacagtccgacctgattgcaacacagagagatctgatcgcgacccaaaaggacctgattgccacgcagcgcgacctgatcgccacacagcgtgacttgattgtaacccagagggatctggtggccaccgagagggaccttatcaatcaaagtgggagatctcatggacagtctgagagacatcagagatatagcacaggcaagaataccatcaccacttag

SEQ ID NO: 191126 - DNA, 237 bp, Artificial Sequence
  derived and/or modified sequence
atggcatcttttcgcaaactgactctgtccgagaaagtgccgccaaatcatccatcccgaaaaaaggttaacttcttggacatgtcactcgacgatatcatcatttataaagagctcgaggggacaaatgcggaggaggagaaaaacaaaagacaaaatcacagcaagaaggagagtccgtctaggcagcagtctaaggctcatcgacacaggcacagaagaggcgaagtgcagtag

SEQ ID NO: 191127 - DNA, 942 bp, Artificial Sequence
  derived and/or modified sequence
atggccagcttcagaaagctgaccctgagcgagaaggtgccccccaaccaccccagcagaaagaaggtgaacttcctggacatgagcctggacgacatcatcatctacaaggagctggagggcaccaacgccgaggaggagaagaacaagagacagaaccacagcaagaaggagagccccagcagacagcagagcaaggcccacagacacagacacagaagaggctacagcagatgcagaagcaacagcgaggagggcaaccacgacaagaagcccagccagaagcccagcggcttcaagagcggccagcaccccctgaacggccagcccctgatcgagcaggagaagtgcagcgacaactacgaggcccaggccgagaagaaccagggccagagcgagggcaaccagcaccagagcgagggcaaccccgacaagagcgaggagagccagggccagcccgaggagaaccaccacagcgagagaagcagaaaccacctggagagaagcctgagccagagcgacagaagccagggccagctgaagagacaccacccccagtacgagagaagccacggccagtacaagagaagccacggccagagcgagagaagccacggccacagcgagagaagccacggccacagcgagagaagccacggccacagcgagagaagccacggccacagcaagagaagcagaagccagggcgacctggtggacacccagagcgacctgatcgccacccagagagacctgatcgccacccagaaggacctgatcgccacccagagagacctgatcgccacccagagagacctgatcgtgacccagagagacctggtggccaccgagagagacctgatcaaccagagcggcagaagccacggccagagcgagagacaccagagatacagcaccggcaagaacaccatcaccacctag

SEQ ID NO: 191128 - DNA, 237 bp, Artificial Sequence
  derived and/or modified sequence
atggccagcttcagaaagctgaccctgagcgagaaggtgccccccaaccaccccagcagaaagaaggtgaacttcctggacatgagcctggacgacatcatcatctacaaggagctggagggcaccaacgccgaggaggagaagaacaagagacagaaccacagcaagaaggagagccccagcagacagcagagcaaggcccacagacacagacacagaagaggcgaggtgcagtag

SEQ ID NO: 191129 - protein, 186 aa, Artificial Sequence
  derived and/or modified sequence
MSGISGCPFFLWGLLALLGLALVISLIFNISHYVEKQRQDKMYSYSSDHTRVDEYYIEDTPIYGNLDDMISEPMDENCYEQMKARPEKSVNKMQEATPSAQATNETQMCYASLDHSVKGKRRKPRKQNTHFSDKDGDEQLHAIDASVSKTTLVDSFSPESQAVEENIHDDPIRLFGLIRAKREPIN

SEQ ID NO: 191130 - DNA, 561 bp, Artificial Sequence
  derived and/or modified sequence
atgagcggcatcagcggctgccccttcttcctgtggggcctgctggccctgctgggcctggccctggtgatcagcctgatcttcaacatcagccactacgtggagaagcagagacaggacaagatgtacagctacagcagcgaccacaccagagtggacgagtactacatcgaggacacccccatctacggcaacctggacgacatgatcagcgagcccatggacgagaactgctacgagcagatgaaggccagacccgagaagagcgtgaacaagatgcaggaggccacccccagcgcccaggccaccaacgagacccagatgtgctacgccagcctggaccacagcgtgaagggcaagagaagaaagcccagaaagcagaacacccacttcagcgacaaggacggcgacgagcagctgcacgccatcgacgccagcgtgagcaagaccaccctggtggacagcttcagccccgagagccaggccgtggaggagaacatccacgacgaccccatcagactgttcggcctgatcagagccaagagagagcccatcaactag

SEQ ID NO: 191131 - DNA, 561 bp, Artificial Sequence
  derived and/or modified sequence
atgagcggcataagtggctgtccctttttcctttggggccttctcgcgctgctggggctggcactggttatttcattgatatttaacatctcccactacgtggagaagcagcgccaggacaaaatgtacagctactcttccgatcacacgagggttgacgaatactacatcgaggacactcctatttacggcaatttggacgacatgatctccgaaccaatggatgagaactgttacgaacagatgaaagcaaggcctgagaagtcggttaacaaaatgcaggaggcaaccccgagcgctcaggcaaccaacgagacacagatgtgctacgcttccctcgaccacagcgtaaaaggtaagcgaaggaaacctagaaagcagaacactcatttttcagacaaggatggcgacgaacagctgcatgccatcgacgcctcggttagcaagactacactggttgactccttcagtccagaaagccaggcagtcgaagagaacatccatgatgaccccatccgtttgttcggcttgattcgagccaaacgggagccaattaactag

SEQ ID NO: 191132 - DNA, 561 bp, Artificial Sequence
  derived and/or modified sequence
atgagcggcatcagcggctgccccttcttcctgtggggcctgctggccctgctgggcctggccctggtgatcagcctcatcttcaacatcagccactacgtggagaagcagaggcaggacaagatgtacagctacagcagtgaccacaccagggtggatgagtactacatcgaggacacccccatctacggcaacctggatgacatgatcagcgagcccatggatgagaactgctatgagcagatgaaggcccggcctgagaagtctgtgaacaagatgcaggaggccaccccatctgcccaggccaccaatgagacccagatgtgctacgccagcctggaccacagcgtgaagggcaagaggaggaagcccaggaagcagaacacccacttcagtgacaaggatggagatgagcagctgcacgccattgatgcctctgtgtccaagaccaccctggtggacagcttcagccctgagagccaggccgtggaggagaacatccatgatgaccccatccggctgtttggcctcatccgggccaagcgggagcccatcaactag

SEQ ID NO: 191133 - DNA, 561 bp, Artificial Sequence
  derived and/or modified sequence
atgagcggcatcagcggctgccccttcttcctgtggggcctgctggccctgctgggactggccctggttatttcgctcatcttcaacatttctcattatgtcgagaaacagagacaggataaaatgtacagttactccagtgaccatacaagggtggatgaatactacattgaagacacaccaatctatggtaacctggacgacatgataagtgagcccatggacgaaaactgttacgagcagatgaaagctaggccggagaagtccgtaaacaagatgcaggaagccacaccaagtgcacaggccacaaatgagacccagatgtgctacgctagcctggatcattctgtgaaagggaaaaggaggaagccgaggaagcaaaatacacacttctccgacaaggacggtgatgaacagttacatgcgatagacgcgagcgtatccaaaacaaccttagtggactcgttttcaccagagagccaggcagtggaagagaacattcatgatgatcctattcggctctttggactgattcgggccaaaagggagcccatcaattag

SEQ ID NO: 191134 - DNA, 561 bp, Artificial Sequence
  derived and/or modified sequence
atgtcgggaatctccgggtgcccattttttctgtggggtcttcttgcactgcttggtctggcgttagtgataagcctgatattcaacatttcacactatgttgaaaaacagcgccaagacaaaatgtactcctactccagtgaccacacccgggtggacgagtattacattgaagacacaccaatttacggcaatctggacgacatgatcagtgagcccatggacgagaactgttatgaacaaatgaaagcccgtcccgaaaagagtgtgaacaaaatgcaagaagccacgccttccgcccaggccacgaacgaaactcagatgtgttatgcaagtctcgaccactcagtgaaagggaagcggaggaagcccaggaaacagaacacacatttctccgacaaagatggagatgaacagttacatgctatcgatgccagcgtatccaaaactactctggtcgactccttctccccggagtcccaggccgtggaggaaaacatccacgacgaccccatacgactcttcggactgattagagcaaaaagggaacctattaactag

SEQ ID NO: 191135 - DNA, 1919 bp, Artificial Sequence
  derived and/or modified sequence
aagacaactccttcaccacatttcctgtttgtaactgaaacaaagtacacacaaaagattttaagaaacagaagagaaaagaatccgaggcacagataaagataagttttactgtcatgctgcttttaacataacagagcaacatcacctaggaaaaaagtttgtaggaggatttttaatccatatatttgtcttatggctagataaagatttctctgaaaaaaagaagcatgtcaggaatctctgggtgcccctttttcctctggggacttctagcattgttgggcttggctttggttatatcactgatcttcaatatttcccactatgtggaaaagcaacgacaagataaaatgtacagctactccagtgaccacaccagggttgatgagtattatattgaagacacaccaatttatggtaacttagatgatatgatttcagaaccaatggatgaaaattgctatgaacaaatgaaagcccgaccagagaaatctgtaaataagatgcaggaagccaccccatctgcacaggcaaccaatgaaacacagatgtgctacgcctcacttgatcacagcgttaaggggaagcgtagaaagcccaggaaacagaatactcatttctcagacaaggatggagatgagcaactacatgcaatagatgccagcgtttctaagaccaccttagtagacagtttctccccagaaagccaggcagtagaggaaaacattcatgatgatcccatcagactgtttggattgatccgtgctaagagagaacctataaactagctggaccatgatctagttcaatgatttggctcctattgaagatggcttctaagaaaacaagatgcacagaggacacagaaggacttggcagcagggtgatgacctgatcatttgttgatgggatggtggcttacctcttattcacagcttacacttatgcatgccaaatgtaaggccatgaaaatcagtatttcaaataacttaaaaaatgctttactactaaaatgtaaaaaattaatgtgctcacctcggcagcacatatactaaaaattaataagacccagcttgaaaattgagcctgataacaagattacaaattcacaatacctaatacttagggaaatataaaaatttaagcatgaatgtgttctggaacacgttagaagaaaaataaaagccaatgagtttttttttaattctcctttctcaccaatgggcaatagcccataattgaaataaatttctgattgaaaggtataggaaacattaaaatgcattactaagagaagtaatataattttcttacaaagtatttttcccaaagatagctttactatttcaaaaattgtcaaattaatgcatgctccttacaacaaacaaatatcaaaaagagtttaggaattctactagccagagatagtcacttggagaaactttctatatatccttctaaatatttttctgggcatgcttatgtatgtacatcagttgtttctttttattttgaaccaaaaatgtggtttcttttgtacacattacttaaactttctttccagtcaacaatatattgtggatttattttcactgttatatttaactatatataaatacgcatatattgtaattttaatgtctgcttagcaccccactgataaccaaatcacagtttatttaaataattttaatgacttttcaaaaacaatttattgatgcaaaaagcaaggttgagatgacaatgtttctttcaataattaaaaaatactgcttcactgtcttctctctgtttcatcagaaacacatactataatacttgtctctgtccttaagtgtgatacacgctatttttctgattgttaagactttccttattactggttctaatttgattataatatgccaaggtatggt

SEQ ID NO: 191136 - protein, 178 aa, Artificial Sequence
  derived and/or modified sequence
MPKAKGKTRRQKFGYSVNRKRLNRNARRKAAPRIECSHIRHAWDHAKSVRQNLAEMGLAVDPNRAVPLRKRKVKAMEVDIEERPKELVRKPYVLNDLEAEASLPEKKGNTLSRDLIDYVRYMVENHGEDYKAMARDEKNYYQDTPKQIRSKINVYKRFYPAEWQDFLDSLQKRKMEVE

SEQ ID NO: 191137 - DNA, 537 bp, Artificial Sequence
  derived and/or modified sequence
atgccaaaggctaaggggaagacacggaggcagaaatttggctacagtgtgaataggaagcggctgaacagaaacgccagaagaaaagcagcaccccgcatcgagtgctcacatatacggcacgcatgggaccacgcaaagtctgtcagacagaaccttgcagagatgggcctcgcggtggaccctaatcgggccgtgcccctccgaaaacgcaaggtgaaggctatggaggttgatatagaagagcggcctaaagaactggttcggaagccgtacgttttaaacgatctggaggccgaggcgtctctaccagagaaaaagggcaacaccctgagccgcgacctgattgactatgttcgctacatggtggagaaccatggagaagactacaaggcaatggccagagacgaaaaaaattactatcaggatacccctaagcagatcagaagtaaaattaacgtatataaacgcttttacccagcagagtggcaggactttctcgactctctgcagaaacgaaagatggaagttgagtag

SEQ ID NO: 191138 - DNA, 1256 bp, Artificial Sequence
  derived and/or modified sequence
acctatgggtaccaccgggttctcgcgggtcttgcgaacgaacttttccttgaaactctctggattcctgtaaacagtggggctcagcccctcaatgactggaggcttcgatggttcaaaggggacctccggaatcacagggccgggagtcgccatgtccgggccacagcagcaggagaaaatcgggactccgacctcagcctcccggtgaaggtcatgaaaggggcggggaaacgaataaattgagccttgtacgcaggcgcaaatgctcgttgcatcctgggagtcgtagtgctcagcacggtagtgctacaaaaggactacatttccccaaatgcccgcaaagccttgtgcacgccttccggaaggagtttgttacacgaggtctgagagacagaggcagcgtgtttgagctgctggtgcggtggtcagcgcgatgcccaaggccaagggcaaaacccggaggcagaagtttggttacagtgtcaaccgaaagcgtctgaaccggaatgctcgacggaaggcagcgccgcggatcgaatgctcccacatccgacatgcctgggaccacgctaaatcggtacggcagaacctggccgagatggggttggctgtggaccccaacagggcggtgcccctccgtaagagaaaggtgaaggccatggaggtggacatagaggagaggcctaaagagcttgtacggaagccctatgtgctgaatgacctggaggcagaagccagccttccagaaaagaaaggaaatactctgtctcgggacctcattgactatgtacgctacatggtagagaaccacggggaggactataaggccatggcccgtgatgagaagaattactatcaagataccccaaaacagattcggagtaagatcaacgtctataaacgcttttacccagcagagtggcaagacttcctcgattctttgcagaagaggaagatggaggtggagtgactggtttacatcacagctgccccaggctgaggcgtcccccggaccagtgaagctggagccagggtgtaaggcaaggaggtgctgtgtggctccagaggagctggccaggtcccatggaatcagaaggttacacacacgtgcacactccccgctctggggaaggaactgttctcagaggctccaatttatattcatctgggggttcacggaaaagccagaacctgctgttttcagggtgggtgatgtaaatatagtgtgtacataataaagcaaatatatttta

SEQ ID NO: 191139 - DNA, 537 bp, Artificial Sequence
  derived and/or modified sequence
atgcccaaggccaagggcaagacccggcggcagaagtttggctacagcgtgaacaggaagaggctgaacagaaatgcccggaggaaggccgcccccagaattgaatgtagccacatcagacatgcctgggaccacgccaagtctgtgcggcagaacctggccgagatgggcctggccgtggaccccaacagagctgtgcccctgaggaagaggaaggtgaaggccatggaggtggacatcgaggagcggcccaaggagctggtgaggaagccctacgtgctgaatgacctggaggccgaggccagcctgcctgagaagaagggcaacaccctgagccgggacctgattgattatgtgcgctacatggtggagaaccacggggaggactacaaggccatggccagagatgagaagaactactaccaggacacccccaagcagatccgcagcaagatcaacgtgtacaagcgcttctacccagctgagtggcaggacttcctggacagcctgcagaagaggaagatggaggtggagtag

SEQ ID NO: 191140 - DNA, 537 bp, Artificial Sequence
  derived and/or modified sequence
atgcccaaggccaagggcaagacccggcggcagaagttcggctactctgttaaccgtaaaaggttgaataggaatgcccgccgaaaagccgctccaagaatcgaatgcagccatatcagacatgcttgggaccatgcaaagtcagtgcgacaaaatctggctgagatgggcctggcagtcgatcctaaccgcgccgtgcccttaagaaagcgcaaggtgaaggccatggaggttgatatagaagaaaggccaaaggagcttgtcaggaagccttacgtgctcaatgacctggaggccgaggcctccctgccggagaagaaaggcaatactctgagcagggatctgatcgactacgtgagatatatggttgagaatcatggcgaagattataaggctatggccagggacgagaagaactattaccaggacactccaaagcagatcagaagtaagatcaatgtttacaaacgcttctacccagccgagtggcaggacttcctggattcactgcaaaaacgcaaaatggaggtggagtag

SEQ ID NO: 191141 - DNA, 537 bp, Artificial Sequence
  derived and/or modified sequence
atgcctaaggccaagggaaagacgcggcgtcagaagtttggctactccgtgaacagaaagagactcaataggaatgccagaaggaaggccgcacccagaatagaatgcagccatattcggcacgcctgggatcacgctaagtccgtcaggcaaaatttagccgagatgggcttagcagtggaccctaatcgtgcagtccctctccgaaaaaggaaggtgaaggccatggaagttgacattgaggaacgacccaaggagctcgttcggaagccgtatgtcctgaatgacctggaggccgaagcctcactccccgaaaaaaaaggaaacaccctgtccagagatctaatcgattacgtgcgttacatggtggagaatcacggcgaagactacaaggccatggccagagacgagaagaattactaccaggacactcctaagcagataaggagcaagattaacgtgtacaagcggttctatcctgctgagtggcaggacttccttgactctcttcagaagcgaaaaatggaggtggaatag

SEQ ID NO: 191142 - DNA, 537 bp, Artificial Sequence
  derived and/or modified sequence
atgcccaaggccaagggcaagaccagaagacagaagttcggctacagcgtgaacagaaagagactgaacagaaacgccagaagaaaggccgcccccagaatcgagtgcagccacatcagacacgcctgggaccacgccaagagcgtgagacagaacctggccgagatgggcctggccgtggaccccaacagagccgtgcccctgagaaagagaaaggtgaaggccatggaggtggacatcgaggagagacccaaggagctggtgagaaagccctacgtgctgaacgacctggaggccgaggccagcctgcccgagaagaagggcaacaccctgagcagagacctgatcgactacgtgagatacatggtggagaaccacggcgaggactacaaggccatggccagagacgagaagaactactaccaggacacccccaagcagatcagaagcaagatcaacgtgtacaagagattctaccccgccgagtggcaggacttcctggacagcctgcagaagagaaagatggaggtggagtag

SEQ ID NO: 191143 - protein, 76 aa, Artificial Sequence
  derived and/or modified sequence
MNSVGEACTDMKREYDQCFNRWFAEKFLKGDSSGDPCTDLFKRYQQCVQKAIKEKEIPIEGLEFMGHGKEKPENSS

SEQ ID NO: 191144 - DNA, 231 bp, Artificial Sequence
  derived and/or modified sequence
atgaacagcgtgggcgaggcctgcaccgacatgaagagagagtacgaccagtgcttcaacagatggttcgccgagaagttcctgaagggcgacagcagcggcgacccctgcaccgacctgttcaagagataccagcagtgcgtgcagaaggccatcaaggagaaggagatccccatcgagggcctggagttcatgggccacggcaaggagaagcccgagaacagcagctag

SEQ ID NO: 191145 - DNA, 231 bp, Artificial Sequence
  derived and/or modified sequence
atgaatagtgtcggcgaagcatgcaccgatatgaaaagagagtatgaccagtgtttcaatcgatggtttgctgaaaagtttctgaaaggcgatagtagtggagatccctgtaccgacctatttaaacgctaccaacaatgcgtgcagaaagctattaaggagaaagaaatcccaatcgagggcctggagtttatggggcatggcaaggaaaaacctgagaactcctcatag

SEQ ID NO: 191146 - DNA, 231 bp, Artificial Sequence
  derived and/or modified sequence
atgaacagcgtgggggaggcctgcacagacatgaagcgggagtatgaccagtgcttcaaccgctggtttgctgagaagttcctgaagggggacagcagcggggacccctgcacagacctcttcaagcgctaccagcagtgtgtgcagaaggccatcaaggagaaggagatccccatcgagggcctggagttcatgggccacggcaaggagaagccagagaacagcagctag

SEQ ID NO: 191147 - DNA, 231 bp, Artificial Sequence
  derived and/or modified sequence
atgaacagcgtgggcgaggcctgcaccgacatgaagcgggagtacgatcagtgtttcaatcgctggttcgcagagaaattcttaaagggggattcttccggagacccctgcacagacctcttcaaacgctaccaacagtgtgtccagaaggctatcaaggagaaggagattcccatcgaggggctggaattcatgggacatggcaaggagaagccagagaacagtagctag

SEQ ID NO: 191148 - DNA, 231 bp, Artificial Sequence
  derived and/or modified sequence
atgaactctgtgggggaggcctgtaccgacatgaagagggaatacgaccagtgctttaaccgctggtttgctgagaagttcctaaagggggattcatcaggggacccatgcacggatcttttcaagaggtaccagcagtgtgtccagaaggctataaaagaaaaagaaatcccaattgagggactcgagttcatgggccacgggaaggaaaagccagagaattcttcttag

SEQ ID NO: 191149 - DNA, 1182 bp, Artificial Sequence
  derived and/or modified sequence
atcagagtgcgccgtcgtcgccgccgccaccactgtcgccatgaacagtgtgggggaggcatgcacggacatgaagcgcgagtacgaccagtgcttcaatcgctggttcgccgagaaatttctcaagggggacagctccggggacccgtgcaccgacctcttcaagcgctaccagcagtgtgttcagaaagcaataaaggagaaagagattcctattgaaggactggagttcatgggccatggcaaagaaaagcctgaaaattcttcttgaccttgacagtcaccttgaaggatttcgcaagtccagaaattgaggactctggatttttgtcaactaactctgtgaacatagccatcagatttgatgaggaacttaggagagaggagttttatttcctccttcgatgttttcctctcagttgtaaaagatgaactctttgagatgatttctcacctgctgtggtatcttgcaggaactgtgtgctaaaattgaacaatttttttgagattatggttgcaatacttggcgtggaatcagctttacataaatataccttgtatgcaaacgatgataaactagtcaggatgagcagagctgcctgacctcttgatttctgctgcaaaagacatatacactgtactggggtcactatttatgaaagcaattggttaggacctctttttttcctctcagggaactaatgctctgaaaagggatctgggcacaacagtttcagtgagtgcttttgagcacacttttatttttatatagtaactaatggttaagattgatggtggcctggattagcaaagaggaagacagcttttaacacagttccctgccttcacaagaggtgtcagattaagatgtgaaagctgcaagaatgttgcagtgaacaccatttcagagctctcagtgtgcagttcaggaattaagatacttggaatagctgtggaggaagaacctaaattgcaaagatctgctattgccagctctcaacccaagtcagtgaattgtcaacctgcatatcctaaaaatgtcaaaatgctgcatctggttaaatgtcggggtaggggggaagctgaaggtgctcgcttcatttgccttgtttactcatcctgccctgtaatgtctgtaatcctgaagatggaataaattgtaacatttagtttctatcatta

SEQ ID NO: 191150 - protein, 197 aa, Artificial Sequence
  derived and/or modified sequence
MFGCLVAGRLVQTAAQQVAEDKFVFDLPDYESINHVVVFMLGTIPFPEGMGGSVYFSYPDSNGMPVWQLLGFVTNGKPSAIFKISGLKSGEGSQHPFGAMNIVRTPSVAQIGISVELLDSMAQQTPVGNAAVSSVDSFTQFTQKMLDNFYNFASSFAVSQAQMTPSPSEMFIPANVVLKWYENFQRRLAQNPLFWKT

SEQ ID NO: 191151 - DNA, 594 bp, Artificial Sequence
  derived and/or modified sequence
atgtttggttgcctggtggcaggtagacttgtccagaccgccgcccagcaagtggctgaggataagtttgtttttgacctgccagattacgagtctattaaccacgtggttgtattcatgttggggactattccattcccggagggaatgggtggatcagtctacttctcctaccctgactcaaacggaatgcccgtttggcaactactaggcttcgtgacaaatggcaaaccatccgccattttcaagattagcgggctgaaatccggagagggttcccagcaccctttcggcgccatgaacatcgtgagaacccccagcgtagcccaaatcggtatttctgtcgagctgctggattccatggcccagcagactccagtcgggaatgccgccgtcagctccgtggactcctttacccagttcacacaaaaaatgctggataatttctacaatttcgcttcctcttttgcagtgagccaggcacagatgacaccttctccgtccgagatgtttattcccgccaacgttgtcctcaaatggtatgagaatttccaacgccggctggcccagaatcccctattttggaaaacttag

SEQ ID NO: 191152 - DNA, 594 bp, Artificial Sequence
  derived and/or modified sequence
atgtttggctgcctggtggccggccgcctggtgcagacagctgcccagcaggtggccgaggacaagtttgtgtttgacctgcctgactatgagagcatcaaccacgtggtggtgttcatgctgggcaccatccccttccctgagggcatgggcggctctgtgtacttctcctacccagacagcaatggcatgcctgtgtggcagctgctgggctttgtgaccaacgggaagcccagcgccatcttcaagatcagcggcctgaagtctggagagggcagccagcacccctttggagccatgaacatcgtgaggaccccatctgtggcccagatcggcatctctgtggagctgctggacagcatggcccagcagacccctgtgggcaatgctgctgtgtcctctgtggacagcttcacccagttcacccagaagatgctggacaacttctacaactttgccagcagctttgctgtgtcccaggcccagatgacccccagccccagcgagatgttcatcccagccaacgtggtgctgaagtggtatgagaacttccagaggcggctggcccagaaccccctcttctggaagacctag

SEQ ID NO: 191153 - DNA, 594 bp, Artificial Sequence
  derived and/or modified sequence
atgttcggctgcctggtggccggccggctggtgcagaccgccgcccagcaggtagctgaagacaagttcgtttttgatctgcccgactacgaaagcattaaccacgttgtggtgttcatgctgggaaccattcctttccccgagggcatgggaggcagcgtttatttttcttaccctgacagtaacggtatgccagtctggcagctgctcggtttcgttactaatggcaagccatcggctatcttcaagatttctgggctgaaatccggtgaagggtctcagcaccctttcggagctatgaatattgtgcgtacaccaagcgtggcccagattggcatctccgtggagttgctagatagtatggcccagcagactcccgttggaaatgctgccgtctcctccgtggatagcttcacccagtttacccagaagatgcttgacaacttttacaattttgcttcctccttcgctgtgtcacaggcgcagatgacaccaagccccagcgagatgttcatcccggcgaacgtcgttcttaagtggtacgagaatttccagcgccggctagcgcagaatccattgttctggaaaacatag

SEQ ID NO: 191154 - DNA, 594 bp, Artificial Sequence
  derived and/or modified sequence
atgtttggctgcctagtagccggacgcctagtgcagacagctgcccagcaggtggcagaggacaagtttgtgtttgacctgcctgactatgagagcattaatcacgtggtggtcttcatgctcggcactatcccttttcctgaggggatggggggatccgtgtattttagctaccctgactctaacggaatgccagtctggcagctgctcgggttcgtgacaaatggcaaaccctccgctatcttcaagattagcggactgaagagtggagaagggtcccagcatcccttcggggctatgaatattgttagaactccatccgtagcccaaataggaatctctgtagaactcttggactcgatggctcagcagacccctgtgggcaatgcagctgttagcagcgtagactcatttacgcaattcacccagaagatgctcgataatttttacaacttcgcgagcagctttgccgtctcccaagcccagatgacaccaagcccatctgagatgtttattcctgcaaacgtggtgctgaaatggtatgagaatttccaacgtagactcgctcagaacccacttttctggaagacgtag

SEQ ID NO: 191155 - DNA, 1109 bp, Artificial Sequence
  derived and/or modified sequence
aagccccggaagtacttgttgcctgagcagtgggctgcttaggaagagaaggtcagagttcgcgggggcagaggcattcttgccgctggcccagtcactatgtagtggaggggcagacaccctcccgcaaattctggaaggttcttagtctcgactagggcagtagccccaggactcctagtcgccggcttcaggtcactgccggctgaacggagctgccgtcgccatgtttggctgcttggtggcggggaggctggtgcaaacagctgcacagcaagtggcagaggataaatttgtttttgacttacctgattatgaaagtatcaaccatgttgtggtttttatgctgggaacaatcccatttcctgagggaatgggaggatctgtctacttttcttatcctgattcaaatggaatgccagtatggcaactcctaggatttgtcacgaatgggaagccaagtgccatcttcaaaatttcaggtcttaaatctggagaaggaagccaacatccttttggagccatgaatattgtccgaactccatctgttgctcagattggaatttcagtggaattattagacagtatggctcagcagactcctgtaggtaatgctgctgtatcctcagttgactcattcactcagttcacacaaaagatgttggacaatttctacaattttgcttcatcatttgctgtctctcaggcccagatgacaccaagcccatctgaaatgttcattccggcaaatgtggttctgaaatggtatgaaaactttcaaagacgactagcacagaaccctctcttttggaaaacataatttgaataaaataatttttaatggattctgaaatttgtcatgttttgaagataactgactccatctaaaagtatgaggtcaaaggatcacgaaacctaagtttaaaaactgcttagagactgaagcttaattaaaaatctttattaaaaattaaaaacattgaaaaatgaaaatatgttcatcattaaagacttttttccccttaagcttaaaataccattcaaaggcaagacattttgttttggctatgattcattttttttacttaaaaataaaacctataccaaac

SEQ ID NO: 191156 - DNA, 594 bp, Artificial Sequence
  derived and/or modified sequence
atgttcggctgcctggtggccggcagactggtgcagaccgccgcccagcaggtggccgaggacaagttcgtgttcgacctgcccgactacgagagcatcaaccacgtggtggtgttcatgctgggcaccatccccttccccgagggcatgggcggcagcgtgtacttcagctaccccgacagcaacggcatgcccgtgtggcagctgctgggcttcgtgaccaacggcaagcccagcgccatcttcaagatcagcggcctgaagagcggcgagggcagccagcaccccttcggcgccatgaacatcgtgagaacccccagcgtggcccagatcggcatcagcgtggagctgctggacagcatggcccagcagacccccgtgggcaacgccgccgtgagcagcgtggacagcttcacccagttcacccagaagatgctggacaacttctacaacttcgccagcagcttcgccgtgagccaggcccagatgacccccagccccagcgagatgttcatccccgccaacgtggtgctgaagtggtacgagaacttccagagaagactggcccagaaccccctgttctggaagacctag

SEQ ID NO: 191157 - protein, 587 aa, Artificial Sequence
  derived and/or modified sequence
MHPLQCVLQVQRSLGWGPLASVSWLSLRMCRAHSSLSSTMCPSPERQEDGARKDFSSRLAAGPTFQHFLKSASAPQEKLSSEVEDPPPYLMMDELLGRQRKVYLETYGCQMNVNDTEIAWSILQKSGYLRTSNLQEADVILLVTCSIREKAEQTIWNRLHQLKALKTRRPRSRVPLRIGILGCMAERLKEEILNREKMVDILAGPDAYRDLPRLLAVAESGQQAANVLLSLDETYADVMPVQTSASATSAFVSIMRGCDNMCSYCIVPFTRGRERSRPIASILEEVKKLSEQGLKEVTLLGQNVNSFRDNSEVQFNSAVPTNLSRGFTTNYKTKQGGLRFAHLLDQVSRVDPEMRIRFTSPHPKDFPDEVLQLIHERDNICKQIHLPAQSGSSRVLEAMRRGYSREAYVELVHHIRESIPGVSLSSDFIAGFCGETEEDHVQTVSLLREVQYNMGFLFAYSMRQKTRAYHRLKDDVPEEVKLRRLEELITIFREEATKANQTSVGCTQLVLVEGLSKRSATDLCGRNDGNLKVIFPDAEMEDVNNPGLRVRAQPGDYVLVKITSASSQTLRGHVLCRTTLRDSSAYC

SEQ ID NO: 191158 - protein, 601 aa, Artificial Sequence
  derived and/or modified sequence
MHPLQCVLQVQRSLGWGPLASVSWLSLRMCRAHSSLSSTMCPSPERQEDGARKDFSSRLAAGPTFQHFLKSASAPQEKLSSEVEDPPPYLMMDELLGRQRKVYLETYGCQMNVNDTEIAWSILQKSGYLRTSNLQEADVILLVTCSIREKAEQTIWNRLHQLKALKTRRPRSRVPLRIGILGCMAERLKEEILNREKMVDILAGPDAYRDLPRLLAVAESGQQAANVLLSLDETYADVMPVQTSASATSAFVSIMRGCDNMCSYCIVPFTRGRERSRPIASILEEVKKLSEQVFLPPRPPKVLGLQGLKEVTLLGQNVNSFRDNSEVQFNSAVPTNLSRGFTTNYKTKQGGLRFAHLLDQVSRVDPEMRIRFTSPHPKDFPDEVLQLIHERDNICKQIHLPAQSGSSRVLEAMRRGYSREAYVELVHHIRESIPGVSLSSDFIAGFCGETEEDHVQTVSLLREVQYNMGFLFAYSMRQKTRAYHRLKDDVPEEVKLRRLEELITIFREEATKANQTSVGCTQLVLVEGLSKRSATDLCGRNDGNLKVIFPDAEMEDVNNPGLRVRAQPGDYVLVKITSASSQTLRGHVLCRTTLRDSSAYC

SEQ ID NO: 191159 - protein, 497 aa, Artificial Sequence
  derived and/or modified sequence
MMDELLGRQRKVYLETYGCQMNVNDTEIAWSILQKSGYLRTSNLQEADVILLVTCSIREKAEQTIWNRLHQLKALKTRRPRSRVPLRIGILGCMAERLKEEILNREKMVDILAGPDAYRDLPRLLAVAESGQQAANVLLSLDETYADVMPVQTSASATSAFVSIMRGCDNMCSYCIVPFTRGRERSRPIASILEEVKKLSEQGLKEVTLLGQNVNSFRDNSEVQFNSAVPTNLSRGFTTNYKTKQGGLRFAHLLDQVSRVDPEMRIRFTSPHPKDFPDEVLQLIHERDNICKQIHLPAQSGSSRVLEAMRRGYSREAYVELVHHIRESIPGVSLSSDFIAGFCGETEEDHVQTVSLLREVQYNMGFLFAYSMRQKTRAYHRLKDDVPEEVKLRRLEELITIFREEATKANQTSVGCTQLVLVEGLSKRSATDLCGRNDGNLKVIFPDAEMEDVNNPGLRVRAQPGDYVLVKITSASSQTLRGHVLCRTTLRDSSAYC

SEQ ID NO: 191160 - protein, 426 aa, Artificial Sequence
  derived and/or modified sequence
MHPLQCVLQVQRSLGWGPLASVSWLSLRMCRAHSSLSSTMCPSPERQEDGARKDFSSRLAAGPTFQHFLKSASAPQEKLSSEVEDPPPYLMMDELLGRQRKVYLETYGCQMNVNDTEIAWSILQKSGYLRTSNLQEADVILLVTCSIREKAEQTIWNRLHQLKALKTRRPRSRVPLRIGILGCMAERLKEEILNREKMVDILAGPDAYRDLPRLLAVAESGQQAANVLLSLDETYADVMPVQTSASATSAFVSIMRGCDNMCSYCIVPFTRGRERSRPIASILEEVKKLSEQGLKEVTLLGQNVNSFRDNSEVQFNSAVPTNLSRGFTTNYKTKQGGLRFAHLLDQVSRVDPEMRIRFTSPHPKDFPDEVLQLIHERDNICKQIHLPAQSGSSRVLEAMRRGYSREAYVELVHHIRESIPEDTGIS

SEQ ID NO: 191161 - DNA, 1764 bp, Artificial Sequence
  derived and/or modified sequence
atgcacccactgcagtgcgtgctacaggtgcagaggagcctaggctggggacccttagccagcgttagctggctctctctgaggatgtgtcgcgcccactcttctctttcctcgactatgtgcccaagccctgagcgccaggaggatggtgctagaaaggacttttcctcccgcctcgccgcagggccgacttttcagcacttcctgaagtccgccagtgccccccaggaaaagttgtccagcgaggtagaagacccacccccatacctgatgatggacgaactgctgggcaggcaacggaaggtctatctggaaacttatgggtgccaaatgaatgttaatgacaccgaaatcgcctggtccatcctgcaaaagtccggttacctgaggacctctaacctgcaagaggctgatgttatcctcttagtgacatgcagtatccgtgaaaaggctgaacaaaccatatggaaccgacttcaccagctgaaggcattgaaaacacgccgacccagaagcagagtgccactccgaatagggatcctcgggtgcatggcggagaggttaaaggaagagatcctcaatcgggaaaagatggtggatatccttgcaggcccagacgcataccgggatctcccaaggctgttggctgtggctgagagtggacagcaagctgccaacgtcctcttatccctcgatgaaacatacgcggacgtgatgccagtccaaacctctgcttccgccaccagcgccttcgtgtctatcatgcgtggctgcgacaatatgtgtagctactgcatagtaccatttactagaggacgagagcgctcaaggcccatcgcaagcatacttgaggaagtcaaaaagctcagtgagcagggcctgaaggaagtcaccctgttggggcagaacgtgaatagctttagggataacagcgaagtccagtttaactctgctgtcccgactaacctgagcagaggattcacgaccaactataaaactaagcaaggtgggctacgttttgctcacttgcttgaccaagtcagtagagtggaccccgagatgcgcattagatttacgtcaccccacccaaaggactttccagacgaagtgctgcaacttatccacgaacgggacaacatttgtaagcagatccacctccccgcccagtcaggcagcagccgcgtcttggaggcaatgcgtagagggtatagtcgtgaggcctacgtagagctagtgcatcatattcgtgagtcaatcccgggcgtgtcattgagtagtgatttcatagccggattctgcggagagaccgaggaagatcacgtccagacagtgagcttgcttagggaagtgcaatataacatgggatttctcttcgcatattcaatgcggcaaaagacaagggcctaccataggctcaaggatgatgtacctgaagaggtcaagctcaggaggctcgaggagttaatcaccatcttcagggaggaggctacaaaagcaaaccagaccagcgtaggctgtactcaattagtgttagtcgaaggattatctaagagatctgccactgacttgtgtggacggaatgacgggaaccttaaagtaatattccctgacgctgagatggaggacgtgaataatcccggactccgggttcgagcccaaccgggggattacgtcctggtcaaaatcaccagcgccagctctcaaaccctgaggggccatgtgctttgtcggacaaccctgcgggactcctctgcctactgctag

SEQ ID NO: 191162 - DNA, 1806 bp, Artificial Sequence
  derived and/or modified sequence
atgcatccactgcagtgcgtgctgcaagtgcagcgaagcttaggttggggacctttagcttccgtcagttggctgagtcttagaatgtgccgggcccatagcagcctcagctcaactatgtgcccttcgcctgaacggcaggaggatggggcccggaaggacttttcatcaaggctggccgcaggccccaccttccagcattttctgaaatctgcgtctgcacctcaggagaagctaagtagcgaagtcgaagacccccctccatacctcatgatggacgagctcctgggccgtcagcgaaaggtttatctggaaacctacggatgtcagatgaacgtaaatgacaccgaaatcgcatggagcattttgcagaaaagcgggtacttgagaaccagcaacctgcaggaagctgacgtcatccttttggtaacatgttccattagagaaaaggccgagcaaaccatatggaatcggctgcaccagcttaaagccctgaagaccaggcgacctcggtcaagggttccgctgcggatcggcatcctggggtgcatggccgagagattaaaagaggaaatcctgaaccgtgaaaaaatggtggatatcctggcaggtcctgatgcgtatcgcgatctgcccagacttctggctgtggcagagtccggccagcaagctgcgaatgtacttctctccctggatgagacgtatgccgatgtaatgccagtgcagacgtccgcatcagcaacatccgccttcgtgtcaatcatgcgggggtgcgataacatgtgttcctactgtattgttccctttacccgtggaagagaaagatctcgtcctattgcgagcattctagaggaggtcaagaagctgagcgagcaggtgtttctcccccctcggcccccaaaagtcttgggcctccaaggcctcaaagaggtcaccctccttggccagaacgttaactcttttcgtgataatagcgaggtgcagttcaactcagcagtacctaccaatctttcccgtggcttcaccaccaattataaaaccaagcagggggggctgcgatttgcccacctcctggaccaggtaagcagggtcgacccagagatgaggatcaggtttacatcacctcatccgaaagattttcctgatgaagtgctgcagctgattcacgaaagagacaacatctgtaaacagatacatcttccagcccagtcggggtctagccgtgtgttagaagccatgcgccggggctacagtagagaagcatatgttgaacttgttcaccatatccgtgagtccatcccaggagtttcactgagctctgattttatagccggtttctgtggagagaccgaggaagaccacgtgcagacggtctcacttcttcgagaggtgcagtacaacatgggcttcctcttcgcgtacagcatgagacaaaagaccagggcttatcatcggctgaaggacgatgtgccagaggaggtgaaattgaggagactagaggagctgatcacaatcttccgggaggaagccacaaaagccaatcagacgtccgttgggtgtacccagctcgtgcttgtggaaggactgagtaagcgatcagctactgatctctgcggtcggaatgatgggaacttgaaggtgatcttccccgacgctgaaatggaggacgtcaacaatcctggcctgagggtgcgggcgcaacctggggactatgtactcgtgaagattacctccgccagctctcagacccttagggggcacgttttgtgtcgaactaccctgcgcgattcttccgcctattgttag

SEQ ID NO: 191163 - DNA, 1494 bp, Artificial Sequence
  derived and/or modified sequence
atgatggatgagctgctgggccggcagcgcaaagtttacttggaaacgtacggctgccagatgaacgttaacgataccgaaattgcctggtcgatattacagaaatcagggtacttacgcacctcaaaccttcaggaggctgatgttattctgctagtgacgtgtagcattagagaaaaggctgaacagaccatctggaaccgcctgcaccaactcaaagccctgaagactagaagaccgcgaagccgggtgcccttacggatcgggatcctaggttgcatggcggaaagactgaaggaagagattctgaaccgtgagaagatggtggatatcctcgccggcccagatgcctaccgcgaccttccacgtctgctggctgtggccgaaagcggtcaacaggctgctaacgtgctgttgtctctggacgaaacctatgccgacgttatgcccgttcagacaagtgcctctgccacctctgcatttgtttccataatgcgaggctgcgataatatgtgctcatactgtattgtgccattcactaggggccgggaaaggagccggccaatcgcatctatcctggaggaggtcaaaaagctgagcgagcagggattgaaagaggttacactcttggggcagaacgtcaactccttccgcgacaacagtgaggttcaattcaattccgctgtgcctacaaacttatccagaggcttcactactaactataagactaaacaaggtgggctccgctttgctcatcttctggaccaggtaagcagagtggacccagagatgaggataagatttacaagcccgcaccctaaagacttcccagacgaggtgctgcaactcatacatgagcgggacaatatctgcaaacagattcatctgcccgcgcagtcaggaagcagtcgggttctcgaggccatgcgacggggttatagccgggaagcttacgtcgagcttgtccatcacatacgggagtctatccctggggtgagtcttagttcagatttcatcgccggcttctgcggcgagactgaggaggatcacgtgcagaccgtgtcactgctgcgcgaagtccagtacaacatgggattcctcttcgcctactcaatgagacagaaaaccagagcatatcatcgtctcaaggacgatgtgcctgaggaggtgaaactgagacggctggaggaattaatcactatctttcgggaggaggcgacgaaggccaaccagacttccgtgggatgcacacaactagtgctggtggaaggtctgagcaagaggtctgctaccgacctgtgcggtcgcaatgacgggaacctgaaagtgatcttccccgatgccgaaatggaggatgtgaacaatcctggccttagagtgcgcgcccaaccaggcgactatgtgctggtgaagattaccagcgcaagctctcagaccctcagagggcacgttctctgtaggacaacactgcgtgactccagcgcttattgctag

SEQ ID NO: 191164 - DNA, 1764 bp, Artificial Sequence
  derived and/or modified sequence
atgcaccccctgcagtgtgtgctgcaggtgcagaggagcctgggctggggccccctggcctctgtgtcctggctgagcctgaggatgtgccgggcccacagcagcctgagcagcaccatgtgccccagccctgagcggcaggaggatggagccaggaaggacttcagcagccggctggccgccggccccaccttccagcacttcctgaagagcgccagcgccccccaggagaagctgagcagcgaggtggaggaccccccaccctacctgatgatggatgagctgctgggccggcagaggaaggtgtacctggagacctacggctgccagatgaatgtgaatgacacagagatcgcctggagcatcctgcagaagagcggctacctgcggaccagcaacctgcaggaggctgatgtgatcctgctggtgacctgcagcatccgggagaaggccgagcagaccatctggaaccggctgcaccagctgaaggccctgaagacccggcggcccaggagccgggtgcccctgcgcatcggcatcctgggctgcatggccgagcggctgaaggaggagatcctgaaccgggagaagatggtggacatcctggccggcccagatgcctacagagacctgccccggctgctggccgtggccgagagcggccagcaggccgccaacgtgctgctgagcctggatgagacctatgcagatgtgatgcctgtgcagaccagcgccagcgccaccagcgcctttgtgtccatcatgaggggctgtgacaacatgtgcagctactgcatcgtgcccttcacccggggccgggagaggagccggcccatcgccagcatcctggaggaggtgaagaagctgtctgagcagggcctgaaggaggtgaccctgctgggccagaatgtgaacagcttccgggacaacagcgaggtgcagttcaacagcgctgtgcccaccaacctgagccggggcttcaccaccaactacaagaccaagcagggcggcctgcgctttgcccacctgctggaccaggtgtcccgggtggaccctgagatgaggatccgcttcaccagcccccaccccaaggacttcccagatgaggtgctgcagctgattcatgagcgggacaacatctgcaagcagatccacctgcctgcccagagcggcagcagccgggtgctggaggccatgaggcggggctacagccgggaggcctacgtggagctggtgcaccacatccgggagagcatccctggggtgtccctgagcagtgacttcatcgccggcttctgtggggagacagaggaggaccacgtgcagacagtgtccctgctgcgggaggtgcagtacaacatgggcttcctgtttgcctacagcatgaggcagaagacccgggcctaccaccggctgaaggatgatgtgcctgaggaggtgaagctgcggcggctggaggagctgatcaccatcttccgggaggaggccaccaaggccaaccagacctctgtgggctgcacccagctggtgctggtggagggcctgagcaagaggtctgccacagacctgtgtggcagaaatgatggcaacctgaaggtgatcttcccagatgctgagatggaggatgtgaacaaccctggcctgcgggtgcgggcccagcccggggactatgtgctggtgaagatcaccagcgccagcagccagaccctgcggggccacgtgctgtgcaggaccaccctgcgggacagcagcgcctactgctag

SEQ ID NO: 191165 - DNA, 1806 bp, Artificial Sequence
  derived and/or modified sequence
atgcaccccctgcagtgtgtgctgcaggtgcagaggagcctgggctggggccccctggcctctgtgtcctggctgagcctgaggatgtgccgggcccacagcagcctgagcagcaccatgtgccccagccctgagcggcaggaggatggagccaggaaggacttcagcagccggctggccgccggccccaccttccagcacttcctgaagagcgccagcgccccccaggagaagctgagcagcgaggtggaggaccccccaccctacctgatgatggatgagctgctgggccggcagaggaaggtgtacctggagacctacggctgccagatgaatgtgaatgacacagagatcgcctggagcatcctgcagaagagcggctacctgcggaccagcaacctgcaggaggctgatgtgatcctgctggtgacctgcagcatccgggagaaggccgagcagaccatctggaaccggctgcaccagctgaaggccctgaagacccggcggcccaggagccgggtgcccctgcgcatcggcatcctgggctgcatggccgagcggctgaaggaggagatcctgaaccgggagaagatggtggacatcctggccggcccagatgcctacagagacctgccccggctgctggccgtggccgagagcggccagcaggccgccaacgtgctgctgagcctggatgagacctatgcagatgtgatgcctgtgcagaccagcgccagcgccaccagcgcctttgtgtccatcatgaggggctgtgacaacatgtgcagctactgcatcgtgcccttcacccggggccgggagaggagccggcccatcgccagcatcctggaggaggtgaagaagctgtctgagcaggtgttcctgccccccaggcctcccaaggtgctgggcctgcagggcctgaaggaggtgaccctgctgggccagaatgtgaacagcttccgggacaacagcgaggtgcagttcaacagcgctgtgcccaccaacctgagccggggcttcaccaccaactacaagaccaagcagggcggcctgcgctttgcccacctgctggaccaggtgtcccgggtggaccctgagatgaggatccgcttcaccagcccccaccccaaggacttcccagatgaggtgctgcagctgattcatgagcgggacaacatctgcaagcagatccacctgcctgcccagagcggcagcagccgggtgctggaggccatgaggcggggctacagccgggaggcctacgtggagctggtgcaccacatccgggagagcatccctggggtgtccctgagcagtgacttcatcgccggcttctgtggggagacagaggaggaccacgtgcagacagtgtccctgctgcgggaggtgcagtacaacatgggcttcctgtttgcctacagcatgaggcagaagacccgggcctaccaccggctgaaggatgatgtgcctgaggaggtgaagctgcggcggctggaggagctgatcaccatcttccgggaggaggccaccaaggccaaccagacctctgtgggctgcacccagctggtgctggtggagggcctgagcaagaggtctgccacagacctgtgtggcagaaatgatggcaacctgaaggtgatcttcccagatgctgagatggaggatgtgaacaaccctggcctgcgggtgcgggcccagcccggggactatgtgctggtgaagatcaccagcgccagcagccagaccctgcggggccacgtgctgtgcaggaccaccctgcgggacagcagcgcctactgctag

SEQ ID NO: 191166 - DNA, 1494 bp, Artificial Sequence
  derived and/or modified sequence
atgatggatgagctgctgggccggcagaggaaggtgtacctggagacctacggctgccagatgaatgtgaatgacacagagatcgcctggagcatcctgcagaagagcggctacctgcggaccagcaacctgcaggaggctgatgtgatcctgctggtgacctgcagcatccgggagaaggccgagcagaccatctggaaccggctgcaccagctgaaggccctgaagacccggcggcccaggagccgggtgcccctgcgcatcggcatcctgggctgcatggccgagcggctgaaggaggagatcctgaaccgggagaagatggtggacatcctggccggcccagatgcctacagagacctgccccggctgctggccgtggccgagagcggccagcaggccgccaacgtgctgctgagcctggatgagacctatgcagatgtgatgcctgtgcagaccagcgccagcgccaccagcgcctttgtgtccatcatgaggggctgtgacaacatgtgcagctactgcatcgtgcccttcacccggggccgggagaggagccggcccatcgccagcatcctggaggaggtgaagaagctgtctgagcagggcctgaaggaggtgaccctgctgggccagaatgtgaacagcttccgggacaacagcgaggtgcagttcaacagcgctgtgcccaccaacctgagccggggcttcaccaccaactacaagaccaagcagggcggcctgcgctttgcccacctgctggaccaggtgtcccgggtggaccctgagatgaggatccgcttcaccagcccccaccccaaggacttcccagatgaggtgctgcagctgattcatgagcgggacaacatctgcaagcagatccacctgcctgcccagagcggcagcagccgggtgctggaggccatgaggcggggctacagccgggaggcctacgtggagctggtgcaccacatccgggagagcatccctggggtgtccctgagcagtgacttcatcgccggcttctgtggggagacagaggaggaccacgtgcagacagtgtccctgctgcgggaggtgcagtacaacatgggcttcctgtttgcctacagcatgaggcagaagacccgggcctaccaccggctgaaggatgatgtgcctgaggaggtgaagctgcggcggctggaggagctgatcaccatcttccgggaggaggccaccaaggccaaccagacctctgtgggctgcacccagctggtgctggtggagggcctgagcaagaggtctgccacagacctgtgtggcagaaatgatggcaacctgaaggtgatcttcccagatgctgagatggaggatgtgaacaaccctggcctgcgggtgcgggcccagcccggggactatgtgctggtgaagatcaccagcgccagcagccagaccctgcggggccacgtgctgtgcaggaccaccctgcgggacagcagcgcctactgctag

SEQ ID NO: 191167 - DNA, 1764 bp, Artificial Sequence
  derived and/or modified sequence
atgcaccccctgcagtgcgtgctgcaggtgcagcggagcctgggctggggccccttggcaagcgtctcatggctgtccctgcgcatgtgtcgagctcacagttcccttagctcaaccatgtgtcccagtcccgaacggcaggaagacggcgccaggaaggatttcagttcacgcctcgcagctggccctacattccagcacttcttgaagagcgctagcgccccccaggagaagttatcttcggaggtggaggacccacccccttaccttatgatggacgaactcttaggaagacagcgtaaagtgtacctggagacgtacgggtgccagatgaacgttaatgatacagaaatcgcgtggtccatcctgcagaaaagcggatatcttagaacaagcaatcttcaggaagcagatgtgatcttgttggtaacatgctctatccgggagaaggctgaacagacaatatggaatagacttcaccagctcaaagctttgaagacccgcaggcctagaagtcgggtgcccttgcgtattggaattttagggtgcatggccgagaggttgaaagaggaaatcctgaatagagagaaaatggtggacattctggcaggacccgatgcctacagagatctgcccagattactcgcagtcgccgagtccgggcagcaggcggccaatgtactcctttcactggacgagacatatgccgatgtcatgccagtgcagacctcagcgtcagctacctcagcatttgtaagtatcatgcggggctgcgataacatgtgctcctactgcatcgtgcccttcacacgcggtagagagaggtcaaggccgattgcatctattctggaggaggtgaagaagcttagcgagcagggcctcaaggaggtcacccttctgggccagaacgtgaacagctttcgagacaactcagaagtccagttcaacagcgctgtacccaccaatctttcacggggtttcaccacaaactataaaaccaagcagggcggccttcggtttgcccacctgctcgaccaggtctcaagggtggacccggagatgaggattagattcacctctccacaccccaaagactttcctgacgaagtcctgcagttgatccacgagagggataatatctgtaaacaaattcacctccccgcccagagtggcagctctcgggtccttgaggcaatgaggaggggatatagcagggaggcgtacgttgaactcgtacaccatatcagggagtcaatacctggcgtgtccctatctagtgactttatcgccggtttctgcggtgaaaccgaggaagatcacgtgcaaactgtctctctgctcagagaggtacagtataatatgggttttctgttcgcatattccatgcgtcagaagacaagggcctatcatcggctgaaggacgacgtccctgaggaggtcaaactgcgcaggcttgaggaattgattaccatcttcagggaagaagctaccaaggccaatcagacctccgtcggttgcacccagttagtactcgtggagggactctcaaaaagaagtgcgactgacctttgcggcagaaatgacggtaatctgaaggtcatctttcctgatgctgaaatggaagacgtgaacaaccctggactgcgtgtgcgggcgcaaccaggcgactacgtgttggtgaagatcacttctgcctctagtcagacactgagagggcacgtgctgtgcagaacaactctgcgcgattcctctgcctactgctag

SEQ ID NO: 191168 - DNA, 1806 bp, Artificial Sequence
  derived and/or modified sequence
atgcaccccctgcagtgcgtgctgcaggtgcagcggagcctgggctggggtcccctggcctccgtcagctggcttagcctgagaatgtgtcgagcgcattccagtctctctagcacaatgtgcccctccccagaacgccaggaggacggcgcgagaaaggacttctcgtcaaggctggcagcaggaccgacttttcagcacttcttaaaatctgcttcagccccacaggaaaaactcagctctgaggtggaagaccctccaccatatttaatgatggacgagttactgggccgccagcgtaaggtgtacttggagacgtacggatgccagatgaatgtcaatgacacagagatcgcttggtccattctacaaaaatctgggtacctgaggaccagcaatcttcaggaggccgatgtcatcttgctggtcacctgcagcatccgggagaaggctgaacagacaatctggaatcggctgcaccagctgaaggcacttaagacccggcgtcctcgaagcagggtccccctcagaattggcatactcgggtgcatggccgagagactgaaggaggaaatcctgaaccgcgagaagatggtggacatcctcgcaggcccagacgcctacagggacctcccgcgcctgctcgccgtggccgaatccgggcagcaggctgccaacgtacttctgtctctggacgagacctacgccgacgtgatgcccgtgcagacgtcagcttcagccacaagcgcctttgtgtccatcatgaggggatgcgataacatgtgttcctattgcattgtcccttttacacggggcagggaaaggtccagacctatcgccagcattttggaggaggtaaagaaacttagtgagcaggtgtttcttccacccagacccccaaaggtgttggggcttcagggcctgaaggaagtgactctgctgggacagaacgtaaacagcttccgagacaattctgaggttcagttcaactctgcggtgcccaccaatctgagtagaggatttaccaccaattacaagactaaacaaggcggccttaggttcgctcatcttctggatcaggtctccagggtggatccggagatgcggattaggttcacatcaccccatccaaaggactttcctgacgaggtactgcagctgatccacgagcgtgacaacatctgtaagcagatccatctgcctgcccagagcggctcttccagagtactggaggcgatgcggcgggggtattccagggaggcgtatgtggagctggtgcaccatatcagagagagcatcccgggtgtcagtctttcatctgactttattgctggcttctgtggtgagaccgaggaggatcatgtgcagacggtgtcgttgctgagggaagtgcaatataacatgggattcctgtttgcatatagtatgcggcagaagacacgcgcataccatagattgaaggacgatgtgcccgaggaagtaaaactgagacgcctcgaagagctgataaccattttcagggaggaggcaacaaaggcaaatcagacgtcagttggctgcacccagctggttctggtggagggtctgtcaaagcgctcagctaccgacctctgcgggaggaacgacgggaacctaaaagtgatctttcccgatgcagagatggaggacgtaaacaaccctggacttagggtgcgtgcccaacccggcgattacgtactcgttaaaataacatctgcctccagccagacccttaggggacatgttctttgtaggaccacactaagggactcgtccgcttactgttag

SEQ ID NO: 191169 - DNA, 1494 bp, Artificial Sequence
  derived and/or modified sequence
atgatggacgagctgctgggccggcagcggaaggtgtacctggagacctatgggtgtcagatgaacgtcaacgacactgaaatcgcatggagcattcttcaaaagtctggatacctcaggaccagtaatcttcaggaggctgacgtgattctgttggtgacctgtagcatcagggagaaggccgagcagacgatctggaatcgcctgcatcagctgaaagctctgaaaactcgaaggcctcggagccgggtgccattgcgtataggaatcttgggctgtatggcagagcggttgaaggaggaaattcttaatcgcgagaaaatggtcgacattctagctggccccgatgcctaccgggatctgcctaggttgctggccgtggctgagtcagggcagcaggctgctaatgtgctactgagcctcgacgagacttatgctgacgtaatgccagtacaaaccagtgccagcgcgacatctgcttttgtctcaatcatgagggggtgcgacaacatgtgctcctactgtatcgtccctttcacgcgcggcagggagcggtctcgcccgatcgcttccatcctcgaggaggtaaaaaagctctccgagcaggggcttaaagaggtcacccttttagggcagaatgtgaattcattccgggataactccgaagttcagttcaacagtgccgtgcctaccaacctcagccgtgggttcacaaccaattacaaaaccaaacaaggaggcctgcggtttgcccaccttctggatcaggtcagccgtgttgaccctgagatgcgcatcaggttcaccagcccccaccctaaggacttccctgatgaggtcctccagctgatacatgagcgggataacatttgtaaacagatccatctgccggctcagagtggatcttctcgggttctcgaggctatgcgtcgtggatactctcgggaggcgtacgtggagcttgtgcaccacatcagggagtcaatcccaggcgtgtccctcagctctgatttcatcgctggattttgtggcgaaacggaagaagaccacgttcagaccgtaagtcttttgcgagaggtccagtacaacatgggcttcctgttcgcttatagcatgcggcaaaagacccgtgcttaccaccgcctaaaggacgacgtaccagaagaagttaaactgcggcgcctggaggagctaatcacaatttttagagaagaggccacgaaggctaatcagacatcagttggctgcactcagctggtgctggttgagggactgagcaagcgaagtgcgactgatctctgtggtcgtaatgatggcaacttaaaggtgatttttccagatgccgagatggaagatgttaacaatccaggactgcgggttcgggctcaaccaggcgactacgtgctcgttaaaattaccagtgcatccagtcagacactccgggggcacgtgctgtgcaggaccacgctaagagattcctcagcctattgctag

SEQ ID NO: 191170 - DNA, 1764 bp, Artificial Sequence
  derived and/or modified sequence
atgcatcccttgcagtgcgtgctgcaagtccagcgatccctaggctggggtcccctggccagcgtgtcctggctgtcccttagaatgtgcagggcacactcatccctgagctccaccatgtgcccgagccctgagagacaggaagacggggcacggaaggatttctctagccgactagccgctggccctacatttcagcactttctgaagtctgcctccgctcctcaggaaaagcttagctcagaagtcgaagacccgccaccgtacctcatgatggacgaactactgggacgccagcgcaaggtgtacctagaaacttatggatgccagatgaatgttaatgatacagagatcgcctggtcgatactccagaaatcggggtaccttagaacaagcaatctgcaggaggcagacgtgattttgctggtgacctgctccatcagggaaaaggccgagcaaacaatttggaacaggcttcaccaactaaaagctctgaagacacgacggccacggtcacgcgttccgcttcggatcggtatcttgggttgcatggccgagcgcctgaaagaagagattttgaatagagaaaaaatggtggatattctagctggcccagatgcatatcgggacctcccccgactgctggccgtggccgagtctggacagcaggctgcaaatgtgctgttaagtctggatgagacttatgccgatgtgatgccagtgcaaacctccgcttccgccacgtccgccttcgtatccatcatgcgtggatgcgacaatatgtgctcatactgcattgtcccattcacaagggggagggaaaggtccagacctatcgccagcatcctggaggaggtaaagaagctctcagaacagggcttgaaggaggtaacgctgctcggacaaaatgtaaacagttttcgagataactcagaagtccagtttaattccgccgtgccaaccaacctgtcacgcggattcacaacaaattataagaccaagcagggtggtctgaggtttgcacacctgctggaccaggtgtcacgtgtggaccctgagatgcgaattagatttacatccccccatcctaaggattttccagacgaggttcttcaattgattcacgagcgcgacaatatttgtaagcagatccacttaccagcccagagcgggtcaagtagagtattagaagcaatgagaagagggtacagcagggaagcttatgtggagctggtgcaccatatacgcgaatccattccaggggtgtccctaagctcagacttcattgccggtttctgtggtgagacggaggaagatcatgttcagacagtgtctctgctgagggaggttcagtataatatggggttcctgttcgcttattcaatgaggcaaaagacaagggcttaccaccgcctcaaggacgatgtgcctgaagaggtgaaactccggagacttgaagaactcatcaccatttttagagaggaagcgactaaggccaaccagacttctgtcggctgcacacagctggtgctcgttgaaggcctctctaaaaggtccgctactgacttgtgcggaaggaatgatggaaatctgaaggtgatttttcccgatgccgagatggaagatgtgaacaaccctggcttacgcgtgcgcgcacaacccggtgactatgtgctggtgaagatcacctccgctagttcccagactttacggggtcacgtattgtgtcgtacaacactgcgtgactcgagtgcctactgctag

SEQ ID NO: 191171 - DNA, 1806 bp, Artificial Sequence
  derived and/or modified sequence
atgcacccactgcagtgcgtcctacaggtgcagaggagtctcgggtgggggcctctggcctccgtatcatggctgtctctacgtatgtgtagggctcatagcagtctctccagtaccatgtgtccgtccccggagcgccaggaggacggggctcgcaaagatttctcctccagacttgcagctggtccaaccttccagcattttctcaaaagcgcttctgctccccaagaaaagctttctagcgaagttgaggatccccctccttacctcatgatggatgagcttctgggcagacagagaaaagtgtatcttgaaacatacggctgtcagatgaatgtcaatgacactgagattgcgtggagcattctgcaaaaatccggatacctccggacaagcaatttacaggaggccgacgtgatccttctggtgacgtgttccattcgtgaaaaggccgagcagacgatctggaaccgcctccaccagttaaaagccttgaagacacgcagaccacggtctcgggtgcccctgaggatcggaatcctcggatgcatggcggagagactgaaggaagagattttaaaccgcgagaagatggttgatattctggcaggcccagatgcttaccgagatttaccgaggctgctggccgtggccgaaagcggacaacaggctgccaatgttcttctctctctggatgagacctacgccgacgtaatgcccgttcagactagtgccagtgccaccagcgccttcgtgagcattatgcgtggatgtgacaacatgtgttcctactgcatcgtgccatttaccagaggccgagaaaggagccgacctatcgcttctatacttgaagaggttaagaagctgtcagaacaggtgtttctaccacctcgcccaccaaaggtgctgggactgcagggactaaaggaggtgacattgttaggacagaacgttaactcctttcgtgacaattccgaagttcaattcaacagtgcagtcccaactaatttgagccggggttttactacaaattacaaaacaaagcagggagggctcagatttgcccacctgctcgatcaagtctctagagtagatccagagatgagaattcgattcaccagccctcatcctaaagacttccctgatgaggtgctccagttaatccacgaaagagataatatttgcaagcaaattcatctcccagcacaatccggttcctcaagggtgctcgaagcaatgagaaggggatacagccgtgaagcctacgtcgaactggtccaccacatccgggagtcaattcctggggtgagcctctcttctgacttcattgccggtttctgtggcgaaacagaagaagatcacgtgcagacagttagtctgctgagagaagtccagtataatatggggtttctgttcgcatattctatgcgccaaaagactcgagcctaccaccgcctgaaggacgacgtgcccgaggaggtgaagctccgccgtctagaggagctgataacaattttccgagaggaggccaccaaagccaaccagacttctgttggctgcacccagttggtgctagtagaggggctttctaagagatccgccactgacctatgcggccgtaatgacggcaatcttaaagtcatttttcccgacgccgagatggaagacgtgaataatcccggtctgcgtgtccgggctcagcctggcgattacgtacttgttaagatcacatccgcaagttctcagacgttaaggggacacgtgctttgccgaaccactctgcgagactctagcgcctattgttag

SEQ ID NO: 191172 - DNA, 1494 bp, Artificial Sequence
  derived and/or modified sequence
atgatggatgaactcctcggtcgccagagaaaggtgtatctggagacatacggctgtcagatgaatgtcaacgacactgagattgcctggtctattctacaaaaaagtggttaccttcgcacctcgaatctacaggaggctgacgtgatcctgttggtgacctgctccatcagagaaaaggccgaacagacgatctggaaccgcctgcatcagttaaaggccctgaagactcggcgtccccgaagccgggtccccctgcgcatcggaatcctgggatgcatggccgagcgattaaaggaagagatcctgaatcgcgagaagatggtagacatcctcgcaggccctgacgcctaccgcgatttgcccagactgttggccgtggcagagagcggtcaacaagccgcaaatgtcctgctgagtttggatgaaacttatgccgatgtcatgcctgtgcagacaagcgcctctgccacttctgccttcgtttctataatgcggggttgtgacaacatgtgtagttactgcattgtacccttcacgcgcggtagagaacgctctagacccatcgcaagtattctagaagaggtaaagaaactgtccgagcagggccttaaagaggtgactttgctggggcaaaacgtcaactcctttcgagataattcggaagtccagtttaactctgccgtcccaacaaacctgtcccgcggatttactacgaactacaagaccaagcagggaggcctgaggttcgcgcatctcttagaccaggtgtcacgggtggatccggagatgcgcattcggtttactagtccacatcccaaggattttccggatgaggttctacagctgatacacgagcgcgataatatttgtaagcagatccacttgcctgcccagtcaggtagctctcgggtattagaggcaatgcgacggggatactctcgcgaggcatacgttgaacttgtgcatcatataagagagtcaattcccggagtgtcgctaagctcggactttatcgcaggcttttgcggcgaaactgaggaagaccatgtgcaaacggtgtctctcctgagagaggttcagtacaatatgggatttctgttcgcatatagcatgcgacagaagactagagcctatcacagactgaaagacgacgtgccagaggaagtgaaattgagaagactcgaagaattgattacaatctttagggaggaagccactaaagctaatcagacttccgtaggttgtactcagttggtgcttgtggaggggctcagcaaaaggagcgctaccgatttatgcggacggaacgatggtaatctcaaggtaatttttccagatgctgagatggaagatgtgaataatcccggactgagggtaagagctcagccaggggactatgtacttgtcaaaatcacctcagcctcctcccaaacgctaagaggacatgtactatgcaggaccactctacgagacagtagtgcttactgctag

SEQ ID NO: 191173 - DNA, 2122 bp, Artificial Sequence
  derived and/or modified sequence
agcatgacccggcctgaagtagcggcggaacggaagtcgcttgtgtatgaacgcagcggcggacctgtgaggggatccgacttgccggcagaacttacgctgcgggaccccgggcactgttgctgctgcgggagactgtgggctgtttagtgccatgcaccctttacagtgtgtcctccaagtgcagaggtctctggggtggggaccattggcctctgtgtcttggctgtcgctgaggatgtgcagggcacacagcagtctctctagtaccatgtgtcccagtccagagaggcaggaggatggagctcggaaggatttcagctccaggctggctgctggaccgacttttcaacattttttaaaaagtgcctcagctcctcaggagaagctgtcttcagaagtggaagacccacctccctatctcatgatggatgaacttcttggaaggcagagaaaagtctacctcgagacctatggctgccagatgaatgtgaatgacacagagatagcctggtccatcttacagaagagtggctacctgcggaccagtaacctccaagaggcagatgtgattctccttgtcacatgctctatcagggagaaggctgagcagaccatctggaaccgtttacatcagcttaaagccttgaagacaaggcggccccgctcccgggttcctctgaggattggaattctaggctgcatggctgagaggttgaaggaggagattctcaacagagagaaaatggtagatattttggctggtcctgatgcctaccgggaccttccccggctgctggctgttgctgagtcgggccagcaagctgccaacgtgctgctctctctggacgagacctatgctgatgtcatgccagtccagacaagcgccagtgccacgtctgcctttgtgtcaatcatgcgaggctgtgacaacatgtgtagctactgcattgttcctttcacccggggcagggagaggagtcggcctattgcctccattctagaggaagtgaagaagctttctgagcaggggctgaaagaagtgacacttcttggtcagaatgttaatagttttcgggacaattcggaggtccagttcaacagtgcagtgcctaccaatctcagtcgtggctttaccaccaactataaaaccaagcaaggaggacttcgttttgctcatcttctggatcaggtctccagagtagatcctgaaatgaggatccgttttacctctccccaccccaaggattttcctgatgaggttctgcagctgattcatgagagagataacatctgtaaacagatccacctgccagcccagagtggaagcagccgtgtgttggaggccatgcggaggggatattcaagagaagcttatgtggagttagttcaccatattagagaatctattccaggtgtgagcctcagcagcgatttcattgctggcttttgtggtgagacggaggaagatcacgtccagacagtctctttgctccgggaagttcagtacaacatgggcttcctctttgcctacagcatgagacagaagacacgggcatatcataggctgaaggatgatgtcccggaagaggtaaaattaaggcgtttggaggaactcatcactatcttccgagaagaagcaacaaaagccaatcagacctctgtgggctgtacccagttggtgctagtggaagggctcagtaaacgctctgccactgacctgtgtggcaggaatgatggaaaccttaaggtgatcttccctgatgcagagatggaggatgtcaataaccctgggctcagggtcagagcccagcctggggactatgtgctggtgaagatcacctcagccagttctcagacacttaggggacatgttctctgcaggaccactctgagggactcttctgcatattgctgacctgagaggatggcctcagagctgacttgggcaatcctccccaacaggaaggggagacattgcctgccactgaggaaacaggtcatgaaggtggagataagctgcaaggggcgaagcaactttatgtcagtggaaaacgtgtctctttaaagctgctatgtgaacagcttttacagtcattaaatttacctaaactaaggttaa

SEQ ID NO: 191174 - DNA, 2164 bp, Artificial Sequence
  derived and/or modified sequence
agcatgacccggcctgaagtagcggcggaacggaagtcgcttgtgtatgaacgcagcggcggacctgtgaggggatccgacttgccggcagaacttacgctgcgggaccccgggcactgttgctgctgcgggagactgtgggctgtttagtgccatgcaccctttacagtgtgtcctccaagtgcagaggtctctggggtggggaccattggcctctgtgtcttggctgtcgctgaggatgtgcagggcacacagcagtctctctagtaccatgtgtcccagtccagagaggcaggaggatggagctcggaaggatttcagctccaggctggctgctggaccgacttttcaacattttttaaaaagtgcctcagctcctcaggagaagctgtcttcagaagtggaagacccacctccctatctcatgatggatgaacttcttggaaggcagagaaaagtctacctcgagacctatggctgccagatgaatgtgaatgacacagagatagcctggtccatcttacagaagagtggctacctgcggaccagtaacctccaagaggcagatgtgattctccttgtcacatgctctatcagggagaaggctgagcagaccatctggaaccgtttacatcagcttaaagccttgaagacaaggcggccccgctcccgggttcctctgaggattggaattctaggctgcatggctgagaggttgaaggaggagattctcaacagagagaaaatggtagatattttggctggtcctgatgcctaccgggaccttccccggctgctggctgttgctgagtcgggccagcaagctgccaacgtgctgctctctctggacgagacctatgctgatgtcatgccagtccagacaagcgccagtgccacgtctgcctttgtgtcaatcatgcgaggctgtgacaacatgtgtagctactgcattgttcctttcacccggggcagggagaggagtcggcctattgcctccattctagaggaagtgaagaagctttctgagcaggtgttcctcccacctcggcctcccaaagtgttgggattacaggggctgaaagaagtgacacttcttggtcagaatgttaatagttttcgggacaattcggaggtccagttcaacagtgcagtgcctaccaatctcagtcgtggctttaccaccaactataaaaccaagcaaggaggacttcgttttgctcatcttctggatcaggtctccagagtagatcctgaaatgaggatccgttttacctctccccaccccaaggattttcctgatgaggttctgcagctgattcatgagagagataacatctgtaaacagatccacctgccagcccagagtggaagcagccgtgtgttggaggccatgcggaggggatattcaagagaagcttatgtggagttagttcaccatattagagaatctattccaggtgtgagcctcagcagcgatttcattgctggcttttgtggtgagacggaggaagatcacgtccagacagtctctttgctccgggaagttcagtacaacatgggcttcctctttgcctacagcatgagacagaagacacgggcatatcataggctgaaggatgatgtcccggaagaggtaaaattaaggcgtttggaggaactcatcactatcttccgagaagaagcaacaaaagccaatcagacctctgtgggctgtacccagttggtgctagtggaagggctcagtaaacgctctgccactgacctgtgtggcaggaatgatggaaaccttaaggtgatcttccctgatgcagagatggaggatgtcaataaccctgggctcagggtcagagcccagcctggggactatgtgctggtgaagatcacctcagccagttctcagacacttaggggacatgttctctgcaggaccactctgagggactcttctgcatattgctgacctgagaggatggcctcagagctgacttgggcaatcctccccaacaggaaggggagacattgcctgccactgaggaaacaggtcatgaaggtggagataagctgcaaggggcgaagcaactttatgtcagtggaaaacgtgtctctttaaagctgctatgtgaacagcttttacagtcattaaatttacctaaactaaggttaa

SEQ ID NO: 191175 - DNA, 1764 bp, Artificial Sequence
  derived and/or modified sequence
atgcaccccctgcagtgcgtgctgcaggtgcagagaagcctgggctggggccccctggccagcgtgagctggctgagcctgagaatgtgcagagcccacagcagcctgagcagcaccatgtgccccagccccgagagacaggaggacggcgccagaaaggacttcagcagcagactggccgccggccccaccttccagcacttcctgaagagcgccagcgccccccaggagaagctgagcagcgaggtggaggacccccccccctacctgatgatggacgagctgctgggcagacagagaaaggtgtacctggagacctacggctgccagatgaacgtgaacgacaccgagatcgcctggagcatcctgcagaagagcggctacctgagaaccagcaacctgcaggaggccgacgtgatcctgctggtgacctgcagcatcagagagaaggccgagcagaccatctggaacagactgcaccagctgaaggccctgaagaccagaagacccagaagcagagtgcccctgagaatcggcatcctgggctgcatggccgagagactgaaggaggagatcctgaacagagagaagatggtggacatcctggccggccccgacgcctacagagacctgcccagactgctggccgtggccgagagcggccagcaggccgccaacgtgctgctgagcctggacgagacctacgccgacgtgatgcccgtgcagaccagcgccagcgccaccagcgccttcgtgagcatcatgagaggctgcgacaacatgtgcagctactgcatcgtgcccttcaccagaggcagagagagaagcagacccatcgccagcatcctggaggaggtgaagaagctgagcgagcagggcctgaaggaggtgaccctgctgggccagaacgtgaacagcttcagagacaacagcgaggtgcagttcaacagcgccgtgcccaccaacctgagcagaggcttcaccaccaactacaagaccaagcagggcggcctgagattcgcccacctgctggaccaggtgagcagagtggaccccgagatgagaatcagattcaccagcccccaccccaaggacttccccgacgaggtgctgcagctgatccacgagagagacaacatctgcaagcagatccacctgcccgcccagagcggcagcagcagagtgctggaggccatgagaagaggctacagcagagaggcctacgtggagctggtgcaccacatcagagagagcatccccggcgtgagcctgagcagcgacttcatcgccggcttctgcggcgagaccgaggaggaccacgtgcagaccgtgagcctgctgagagaggtgcagtacaacatgggcttcctgttcgcctacagcatgagacagaagaccagagcctaccacagactgaaggacgacgtgcccgaggaggtgaagctgagaagactggaggagctgatcaccatcttcagagaggaggccaccaaggccaaccagaccagcgtgggctgcacccagctggtgctggtggagggcctgagcaagagaagcgccaccgacctgtgcggcagaaacgacggcaacctgaaggtgatcttccccgacgccgagatggaggacgtgaacaaccccggcctgagagtgagagcccagcccggcgactacgtgctggtgaagatcaccagcgccagcagccagaccctgagaggccacgtgctgtgcagaaccaccctgagagacagcagcgcctactgctag

SEQ ID NO: 191176 - DNA, 1806 bp, Artificial Sequence
  derived and/or modified sequence
atgcaccccctgcagtgcgtgctgcaggtgcagagaagcctgggctggggccccctggccagcgtgagctggctgagcctgagaatgtgcagagcccacagcagcctgagcagcaccatgtgccccagccccgagagacaggaggacggcgccagaaaggacttcagcagcagactggccgccggccccaccttccagcacttcctgaagagcgccagcgccccccaggagaagctgagcagcgaggtggaggacccccccccctacctgatgatggacgagctgctgggcagacagagaaaggtgtacctggagacctacggctgccagatgaacgtgaacgacaccgagatcgcctggagcatcctgcagaagagcggctacctgagaaccagcaacctgcaggaggccgacgtgatcctgctggtgacctgcagcatcagagagaaggccgagcagaccatctggaacagactgcaccagctgaaggccctgaagaccagaagacccagaagcagagtgcccctgagaatcggcatcctgggctgcatggccgagagactgaaggaggagatcctgaacagagagaagatggtggacatcctggccggccccgacgcctacagagacctgcccagactgctggccgtggccgagagcggccagcaggccgccaacgtgctgctgagcctggacgagacctacgccgacgtgatgcccgtgcagaccagcgccagcgccaccagcgccttcgtgagcatcatgagaggctgcgacaacatgtgcagctactgcatcgtgcccttcaccagaggcagagagagaagcagacccatcgccagcatcctggaggaggtgaagaagctgagcgagcaggtgttcctgccccccagaccccccaaggtgctgggcctgcagggcctgaaggaggtgaccctgctgggccagaacgtgaacagcttcagagacaacagcgaggtgcagttcaacagcgccgtgcccaccaacctgagcagaggcttcaccaccaactacaagaccaagcagggcggcctgagattcgcccacctgctggaccaggtgagcagagtggaccccgagatgagaatcagattcaccagcccccaccccaaggacttccccgacgaggtgctgcagctgatccacgagagagacaacatctgcaagcagatccacctgcccgcccagagcggcagcagcagagtgctggaggccatgagaagaggctacagcagagaggcctacgtggagctggtgcaccacatcagagagagcatccccggcgtgagcctgagcagcgacttcatcgccggcttctgcggcgagaccgaggaggaccacgtgcagaccgtgagcctgctgagagaggtgcagtacaacatgggcttcctgttcgcctacagcatgagacagaagaccagagcctaccacagactgaaggacgacgtgcccgaggaggtgaagctgagaagactggaggagctgatcaccatcttcagagaggaggccaccaaggccaaccagaccagcgtgggctgcacccagctggtgctggtggagggcctgagcaagagaagcgccaccgacctgtgcggcagaaacgacggcaacctgaaggtgatcttccccgacgccgagatggaggacgtgaacaaccccggcctgagagtgagagcccagcccggcgactacgtgctggtgaagatcaccagcgccagcagccagaccctgagaggccacgtgctgtgcagaaccaccctgagagacagcagcgcctactgctag

SEQ ID NO: 191177 - DNA, 1494 bp, Artificial Sequence
  derived and/or modified sequence
atgatggacgagctgctgggcagacagagaaaggtgtacctggagacctacggctgccagatgaacgtgaacgacaccgagatcgcctggagcatcctgcagaagagcggctacctgagaaccagcaacctgcaggaggccgacgtgatcctgctggtgacctgcagcatcagagagaaggccgagcagaccatctggaacagactgcaccagctgaaggccctgaagaccagaagacccagaagcagagtgcccctgagaatcggcatcctgggctgcatggccgagagactgaaggaggagatcctgaacagagagaagatggtggacatcctggccggccccgacgcctacagagacctgcccagactgctggccgtggccgagagcggccagcaggccgccaacgtgctgctgagcctggacgagacctacgccgacgtgatgcccgtgcagaccagcgccagcgccaccagcgccttcgtgagcatcatgagaggctgcgacaacatgtgcagctactgcatcgtgcccttcaccagaggcagagagagaagcagacccatcgccagcatcctggaggaggtgaagaagctgagcgagcagggcctgaaggaggtgaccctgctgggccagaacgtgaacagcttcagagacaacagcgaggtgcagttcaacagcgccgtgcccaccaacctgagcagaggcttcaccaccaactacaagaccaagcagggcggcctgagattcgcccacctgctggaccaggtgagcagagtggaccccgagatgagaatcagattcaccagcccccaccccaaggacttccccgacgaggtgctgcagctgatccacgagagagacaacatctgcaagcagatccacctgcccgcccagagcggcagcagcagagtgctggaggccatgagaagaggctacagcagagaggcctacgtggagctggtgcaccacatcagagagagcatccccggcgtgagcctgagcagcgacttcatcgccggcttctgcggcgagaccgaggaggaccacgtgcagaccgtgagcctgctgagagaggtgcagtacaacatgggcttcctgttcgcctacagcatgagacagaagaccagagcctaccacagactgaaggacgacgtgcccgaggaggtgaagctgagaagactggaggagctgatcaccatcttcagagaggaggccaccaaggccaaccagaccagcgtgggctgcacccagctggtgctggtggagggcctgagcaagagaagcgccaccgacctgtgcggcagaaacgacggcaacctgaaggtgatcttccccgacgccgagatggaggacgtgaacaaccccggcctgagagtgagagcccagcccggcgactacgtgctggtgaagatcaccagcgccagcagccagaccctgagaggccacgtgctgtgcagaaccaccctgagagacagcagcgcctactgctag

SEQ ID NO: 191178 - protein, 219 aa, Artificial Sequence
  derived and/or modified sequence
MNRLFGKAKPKAPPPSLTDCIGTVDSRAESIDKKISRLDAELVKYKDQIKKMREGPAKNMVKQKALRVLKQKRMYEQQRDNLAQQSFNMEQANYTIQSLKDTKTTVDAMKLGVKEMKKAYKQVKIDQIEDLQDQLEDMMEDANEIQEALSRSYGTPELDEDDLEAELDALGDELLADEDSSYLDEAASAPAIPEGVPTDTKNKDGVLVDEFGLPQIPAS

SEQ ID NO: 191179 - DNA, 660 bp, Artificial Sequence
  derived and/or modified sequence
atgaaccgtctcttcggaaaagccaaacccaaagcccctcctccctcactgacagactgtattggaacagtggattcacgtgccgaaagtatagacaaaaaaatatctaggcttgatgcagaattggtcaaatataaagaccagattaagaaaatgcgggaaggcccagcaaaaaacatggtgaagcagaaggccctgagagtgctgaaacagaaaagaatgtatgaacaacaacgggacaaccttgctcaacaatctttcaacatggaacaagccaattataccatccaatcacttaaagataccaaaacaaccgtggatgccatgaaattaggcgtcaaagaaatgaaaaaagcatacaaacaggtgaaaatcgaccagattgaagatttgcaagatcaactggaggacatgatggaggacgcgaacgaaattcaggaagcactgtcccggagctacggaacacctgaactcgacgaagatgatctggaagccgagttggatgcattgggagacgaactgctggcggatgaagatagtagctacttggatgaagccgccagtgctcccgctatccctgaaggggtgcctactgacacaaagaacaaagatggtgtgctagtagatgagttcggattaccacagatacctgcctcttag

SEQ ID NO: 191180 - DNA, 660 bp, Artificial Sequence
  derived and/or modified sequence
atgaaccggctgtttgggaaggccaagcccaaggcccccccacccagcctgacagactgcattggaacagtggacagcagagctgagagcattgacaagaagatcagccggctggatgctgagctggtgaagtacaaggaccagatcaagaagatgagggagggccctgccaagaacatggtgaagcagaaggccctgcgggtgctgaagcagaagaggatgtatgagcagcagagggacaacctggcccagcagagcttcaacatggagcaggccaactacaccatccagagcctgaaggacaccaagaccaccgtggatgccatgaagctgggcgtgaaggagatgaagaaggcctacaagcaggtgaagattgaccagatcgaggacctgcaggaccagctggaggacatgatggaggatgccaatgagatccaggaggccctgagccgctcctatggcaccccagagctggatgaagatgacctggaggccgagctggatgccctgggagatgagctgctggctgatgaggacagcagctacctggatgaggccgccagcgccccagccatccctgagggcgtgcccacagacaccaagaacaaggatggagtgctggtggatgaatttggcctgccccagatcccagccagctag

SEQ ID NO: 191181 - DNA, 660 bp, Artificial Sequence
  derived and/or modified sequence
atgaaccggctgttcggcaaggccaagcccaaggccccccccccctctcttacagattgtatagggacagtggatagtagagctgagagcatcgacaagaagatttccaggcttgacgcggagctggtgaagtacaaggatcagatcaagaaaatgagggaggggcccgcaaaaaacatggtgaaacagaaagctctaagagtgctgaagcaaaagagaatgtatgaacagcaaagagataatctcgcccagcagagcttcaatatggaacaggcaaactacaccatccagtcccttaaagacactaaaaccactgtggatgccatgaaactgggagtgaaggagatgaaaaaagcgtacaaacaggtgaagatcgaccagattgaggacctccaggaccaactcgaagacatgatggaagacgccaatgaaatccaggaggccctgagccgatcgtatggaaccccagaactggacgaagacgacctcgaggccgagctcgacgcgctgggagatgaactactggctgacgaagacagctcctatctcgatgaagccgccagcgcaccagccatacctgagggggtgccaacggatacgaagaacaaggatggagttctggttgatgaattcggtcttccacagatcccagcctcttag

SEQ ID NO: 191182 - DNA, 660 bp, Artificial Sequence
  derived and/or modified sequence
atgaaccgtctgtttggtaaggctaagcctaaagcacctcccccaagcctgactgactgcatcgggaccgtcgattcaagggctgaatccatcgacaagaagatatcaaggctcgatgcggagttggttaaatataaggatcaaatcaaaaagatgagggagggaccagctaaaaacatggtaaagcagaaggctcttagagtgctgaaacagaagaggatgtatgagcaacagcgggacaacctggctcaacaatcttttaatatggaacaggcaaattacaccatccaatctcttaaagacactaagacgacagttgacgctatgaaattgggagtgaaagagatgaagaaggcctacaagcaggtgaaaatcgaccagatagaggacttacaggatcagctggaggatatgatggaggatgccaacgaaatccaggaggctctgtctcgaagctacggaacgcctgagctcgacgaagacgatttggaagctgaattggacgcccttggtgacgagcttttggccgatgaggattcaagctacttagacgaggctgcctccgcccctgccattcctgagggcgttccgaccgacaccaagaataaggacggagtattagtcgatgagtttggcctgcctcagatcccggcaagctag

SEQ ID NO: 191183 - DNA, 1465 bp, Artificial Sequence
  derived and/or modified sequence
aatccggaaaaagaatcgggaaacgccaggaggcatattgcgcttgcgcacggaggggccggaagtcgaggcgggagtgactctgcttccgtttctggttttgctctagtgtttgggtttcttcgcggctgctcaagatgaaccgactcttcgggaaagcgaaacccaaggctccgccgcccagcctgactgactgcattggcacggtggacagtagagcagaatccattgacaagaagatttctcgattggatgctgagctagtgaagtataaggatcagatcaagaagatgagagagggtcctgcaaagaatatggtcaagcagaaagccttgcgagttttaaagcaaaagaggatgtatgagcagcagcgggacaatcttgcccaacagtcattcaacatggaacaagccaattataccatccagtctttgaaggacaccaagaccacggttgatgctatgaaactgggagtaaaggaaatgaagaaggcatacaagcaagtgaagatcgaccagattgaggatttacaagaccagctagaggatatgatggaagatgcaaatgaaatccaagaagcactgagtcgcagttatggcaccccagaactggatgaagatgatttagaagcagagttggatgcactaggtgatgagcttctggctgatgaagacagttcttatttggatgaggcagcatctgcacctgcaattccagaaggtgttcccactgatacaaaaaacaaggatggagttctggtggatgaatttggattgccacagatccctgcttcatagatttgcatcattcaagcatatcttgtaaaacaaacacatattatgggactaggaaatatttatctttccaaatttgccataacagatttaggtttctttcctttctttgaaggaaagtttaattacattgctcttttattttttccattaagagactcattgcttgggaaatgctttcttcgtactaaaatttgattcctttttttcttatgaaaaacgaactcagtttaaaagtatttttagctcgtatgacttgttttcattcattaataataatttgaaataaaactaaggaaatggaatcttaaaagtctatgacagtgtaactctacagtctcaaaatgacctgataaattgataagacaaagatgagattattggggctgttcatattatgattcagaatcattttctattgtggtattataggttggttaaagtgatggcctttttgatgggttttgttgtgtcttgtgaacaagtcgttactgtgtccattattggaatggaattatcactactgtatcatgagtgggtattttgattctatggttccctcagtattacatcttgacttgtaatcaattatgaatatttcttgatatttaatgtataggacatttatttatactcaataaatatttttcaaaaggatataattttaataa

SEQ ID NO: 191184 - DNA, 660 bp, Artificial Sequence
  derived and/or modified sequence
atgaacagactgttcggcaaggccaagcccaaggcccccccccccagcctgaccgactgcatcggcaccgtggacagcagagccgagagcatcgacaagaagatcagcagactggacgccgagctggtgaagtacaaggaccagatcaagaagatgagagagggccccgccaagaacatggtgaagcagaaggccctgagagtgctgaagcagaagagaatgtacgagcagcagagagacaacctggcccagcagagcttcaacatggagcaggccaactacaccatccagagcctgaaggacaccaagaccaccgtggacgccatgaagctgggcgtgaaggagatgaagaaggcctacaagcaggtgaagatcgaccagatcgaggacctgcaggaccagctggaggacatgatggaggacgccaacgagatccaggaggccctgagcagaagctacggcacccccgagctggacgaggacgacctggaggccgagctggacgccctgggcgacgagctgctggccgacgaggacagcagctacctggacgaggccgccagcgcccccgccatccccgagggcgtgcccaccgacaccaagaacaaggacggcgtgctggtggacgagttcggcctgccccagatccccgccagctag

SEQ ID NO: 191185 - protein, 157 aa, Artificial Sequence
  derived and/or modified sequence
MSGSLGRAAAALLRWGRGAGGGGLWGPGVRAAGSGAGGGGSAEQLDALVKKDKVVVFLKGTPEQPQCGFSNAVVQILRLHGVRDYAAYNVLDDPELRQGIKDYSNWPTIPQVYLNGEFVGGCDILLQMHQNGDLVEELKKLGIHSALLDEKKDQDSK

SEQ ID NO: 191186 - DNA, 474 bp, Artificial Sequence
  derived and/or modified sequence
atgagtggaagtctggggcgggccgctgccgccctcttaagatggggtcgtggtgctggtggcggtggactctggggccccggggtccgcgccgccggtagcggtgctggggggggcggctcagcagaacagctcgacgctctggttaaaaaggacaaggttgtggtttttctgaaagggactccagagcagccccaatgcggcttctccaacgcagttgtgcagatattacggttgcacggggtgcgggactacgccgcttataatgtgctggatgatcccgagcttcggcagggtattaaagactattccaactggcctacaatcccacaggtgtatctgaacggagaattcgtgggaggctgcgacatcttgctccagatgcaccagaatggagatctggtggaggagctgaaaaagttgggaatccattcagcgctgttggacgaaaagaaagaccaggattccaaatag

SEQ ID NO: 191187 - DNA, 1564 bp, Artificial Sequence
  derived and/or modified sequence
cgcattgccatggcaattcaaccgccgctgacaccggaaccggaaacttcatcaggaggtgaccccttcccggcgttccgcggaacgggcgagtcccgcgcctctcccagttgtctcggcgtagtccagctggcctcattggctcacaggaggaaagtcgtcttccctcttgttttgcctctcgttgccctgcaagcgtgaccctgatggacatccagtctctccaattaactaacaaagcggttgccgacgaccaatagtaaggcagtaggatgaggctccggcataaggcccacctcctacctgccgggcgggacgagcaacatgattggtggaatcgagtaattactgatcagtattgtccaatcacggagggcagtttagagccggcccaatgagggcctccagggggcgggtcggactgccgcgggccggggagcgctctgggtggccagctgtgggcccgggccgtcgtgggctccggcttgcgtgcggagatgagcgggtccctcggccgagctgcggcggctctgctccgctgggggcgcggcgcgggcggcggtggcctttggggtccgggcgtgcgggcggcgggctcgggcgcgggcggcggcggctcggcggagcagttggacgcgctggtgaagaaggacaaggtggtggtcttcctcaaggggacgccggagcagccccagtgcggcttcagcaacgccgtggtgcagatcctgcggctgcacggcgtccgcgattacgcggcctacaacgtgctggacgacccggagctccgacaaggcattaaagactattccaactggcccaccatcccgcaagtgtacctcaatggcgagtttgtagggggctgtgacattcttctgcagatgcaccagaatggggacttggtggaagaactgaaaaagctggggatccactccgcccttttagatgaaaagaaagaccaagactccaagtgagggcggccaagtcctcgctgagcagagagggagccgttcatgtcagagactcactgccagaaaagccttacccattttggttttcactattgagaccgcaactgcttgcactgatcattttggttcgtgagcagttggtgattttagttggtctggtgttcgggctaagaatattttattgtggacttaattacaaccactgcactgtaatgattcaatgctgtattatgatattgctgtaaacaaaattcattcttatattgtcacttattctttgcctgattcagaagttaaataggagctttggaatcattattcatgacccctctgcaaatgtgtcagtctccaaagagagtatctccccccaaattttgtgtagcttcttttgttatggaaaatggtgaacaaaaaaagaaactgtgataactggggcgttgttttttaaaataaactccagcacagggatgctgtgcatgcctgagttgattccgaagtgcatatgtctgtaaggatttggagtgcctgcagtgttttatgtgtgggaagtaagggtgagtctcatattcttctattaaatttgccacaagaattgc

SEQ ID NO: 191188 - DNA, 474 bp, Artificial Sequence
  derived and/or modified sequence
atgagcggcagcctgggccgggctgctgctgccctgctgcgctggggcagaggagctgggggcggcggcctgtggggccctggggtgcgggccgccggcagcggggccggcggcggcggcagcgctgagcagctggatgccctggtgaagaaggacaaggtggtggtgttcctgaagggcaccccagagcagccccagtgtggcttcagcaatgctgtggtgcagatcctgcggctgcacggcgtgcgggactatgctgcctacaacgtgctggatgatcctgagctgcggcagggcatcaaggactacagcaactggcccaccatcccccaggtgtacctgaatggagaatttgtgggcggctgtgacatcctgctgcagatgcaccagaatggagacctggtggaggagctgaagaagctgggcatccacagcgccctgctggatgagaagaaggaccaggacagcaagtag

SEQ ID NO: 191189 - DNA, 474 bp, Artificial Sequence
  derived and/or modified sequence
atgagcggcagcctgggccgggccgccgccgccctgctgcggtgggggagaggagccgggggaggcggcctctgggggcccggtgtgcgagcagcaggaagtggcgcgggcggcggagggtccgcagagcagctggacgcccttgtgaagaaagataaagtggtcgtttttcttaagggcactcctgaacagccgcaatgtggcttttcgaatgccgtggtgcagatcttgaggctgcacggagtaagagattacgccgcgtataatgttctggatgatcctgagctacgccaaggaataaaagactactccaattggcctactatcccccaggtatacctgaacggggagttcgtgggggggtgcgatatccttctccagatgcaccagaatggagacctcgttgaggagttaaagaaactgggcattcattctgctctcttggacgagaagaaggaccaggatagcaaatag

SEQ ID NO: 191190 - DNA, 474 bp, Artificial Sequence
  derived and/or modified sequence
atgtctggttcacttggacgggctgcagctgcattgctgcgttggggccgaggcgcaggaggaggaggcctctggggcccaggtgtgagggcagccggatcgggcgcaggcggtggcggatcggccgagcaactggatgctctcgttaaaaaggacaaagtcgtggtgttcctgaaagggacgccagagcagccacagtgtggcttcagcaatgccgtggtgcaaattcttcggctccatggagtgcgtgattacgcagcctataacgtgctggatgatcccgagttacggcagggcatcaaagattattccaattggccaacgataccccaggtctatttgaacggtgagttcgtaggcggatgcgacatcctgctccaaatgcatcaaaacggggatctggtggaggagttgaagaagcttggaattcacagcgcacttttagatgagaaaaaagaccaggattcaaagtag

SEQ ID NO: 191191 - DNA, 474 bp, Artificial Sequence
  derived and/or modified sequence
atgagcggcagcctgggcagagccgccgccgccctgctgagatggggcagaggcgccggcggcggcggcctgtggggccccggcgtgagagccgccggcagcggcgccggcggcggcggcagcgccgagcagctggacgccctggtgaagaaggacaaggtggtggtgttcctgaagggcacccccgagcagccccagtgcggcttcagcaacgccgtggtgcagatcctgagactgcacggcgtgagagactacgccgcctacaacgtgctggacgaccccgagctgagacagggcatcaaggactacagcaactggcccaccatcccccaggtgtacctgaacggcgagttcgtgggcggctgcgacatcctgctgcagatgcaccagaacggcgacctggtggaggagctgaagaagctgggcatccacagcgccctgctggacgagaagaaggaccaggacagcaagtag

SEQ ID NO: 191192 - protein, 432 aa, Artificial Sequence
  derived and/or modified sequence
MISAAQLLDELMGRDRNLAPDEKRSNVRWDHESVCKYYLCGFCPAELFTNTRSDLGPCEKIHDENLRKQYEKSSRFMKVGYERDFLRYLQSLLAEVERRIRRGHARLALSQNQQSSGAAGPTGKNEEKIQVLTDKIDVLLQQIEELGSEGKVEEAQGMMKLVEQLKEERELLRSTTSTIESFAAQEKQMEVCEVCGAFLIVGDAQSRVDDHLMGKQHMGYAKIKATVEELKEKLRKRTEEPDRDERLKKEKQEREEREKEREREREERERKRRREEEEREKERARDRERRKRSRSRSRHSSRTSDRRCSRSRDHKRSRSRERRRSRSRDRRRSRSHDRSERKHRSRSRDRRRSKSRDRKSYKHRSKSRDREQDRKSKEKEKRGSDDKKSSVKSGSREKQSEDTNTESKESDTKNEVNGTSEDIKSEGDTQSN

SEQ ID NO: 191193 - protein, 366 aa, Artificial Sequence
  derived and/or modified sequence
MAELQQLQEFEIPTGREALRGNHSALLRVADYCEDNYVQATDKRKALEETMAFTTQALASVAYQVGNLAGHTLRMLDLQGAALRQVEARVSTLGQMVNMHMEKVARREIGTLATVQRLPPGQKVIAPENLPPLTPYCRRPLNFGCLDDIGHGIKDLSTQLSRTGTLSRKSIKAPATPASATLGRPPRIPEPVHLPVVPDGRLSAASSAFSLASAGSAEGVGGAPTPKGQAAPPAPPLPSSLDPPPPPAAVEVFQRPPTLEELSPPPPDEELPLPLDLPPPPPLDGDELGLPPPPPGFGPDEPSWVPASYLEKVVTLYPYTSQKDNELSFSEGTVICVTRRYSDGWCEGVSSEGTGFFPGNYVEPSC

SEQ ID NO: 191194 - DNA, 2109 bp, Artificial Sequence
  derived and/or modified sequence
tcctatccaccctccactcccctgtcccttggtgactcatccctgagcttcccaaggaagcccccaccctctgccctttcctcccgccttccatgagtggaaaatccacctccgccccctatagcaggccagcccccttcctccccagtctccgaccccatcccccagccgaccagtttcctctccaggaccagggagcaatcacagctgccccgaccttggcttcctctgctgggtgggattgggggctgggcccccaaatgggcccctggcttcccccttcctctgggcaggggacagagagacacaggctcggggagcaggactgacttcctcttgtcccggaatgagcatgcctgccctttgcaagcaggtttgggtctcacgcagaggaaaccaaaagcaataagagggagggaaggcagagcaaccaatcaagggcagggtgagactcaaaacgagcgggctccctggggagccagacagaggctgggggtgatggcggagctacagcagctgcaggagtttgagatccccactggccgggaggctctgaggggcaaccacagtgccctgctgcgggtcgctgactactgcgaggacaactatgtgcaggccacagacaagcggaaggcgctggaggagaccatggccttcactacccaggcactggccagcgtggcctaccaggtgggcaacctggccgggcacactctgcgcatgttggacctgcagggggccgccctgcggcaggtggaagcccgtgtaagcacgctgggccagatggtgaacatgcatatggagaaggtggcccgaagggagatcggcaccttagccactgtccagcggctgccccccggccagaaggtcatcgccccagagaacctaccccctctcacgccctactgcaggagacccctcaactttggctgcctggacgacattggccatgggatcaaggacctcagcacgcagctgtcaagaacaggcaccctgtctcgaaagagcatcaaggcccctgccacacccgcctccgccaccttggggagaccaccccggattcccgagccagtgcacctgccggtggtgcccgacggcagactctccgccgcctcctctgcgttttccctggcctcggccggcagcgccgaaggtgtcggtggggcccccacgcccaaggggcaggcagcacctccagccccacctctccccagctccttggacccacctcctccaccagcagccgtcgaggtgttccagcggcctcccacgctggaggagttgtccccacccccaccggacgaagagctgcccctgccactggacctgcctcctcctccacccctggatggagatgaattggggctgcctccacccccaccaggatttgggcctgatgagcccagctgggtgcctgcctcatacttggagaaagtggtgacactgtacccatacaccagccagaaggacaatgagctctccttctctgagggcactgtcatctgtgtcactcgccgctactccgatggctggtgcgagggcgtcagctcagaggggactggattcttccctgggaactatgtggagcccagctgctgacagcccagggctctctgggcagctgatgtctgcactgagtgggtttcatgagccccaagccaaaaccagctccagtcacagctggactgggtctgcccacctcttgggctgtgagctgtgttctgtccttcctcccatcggagggagaaggggtcctggggagagagaatttatccagaggcctgctgcagatggggaagagctggaaaccaagaagtttgtcaacagaggacccctactccatgcaggacagggtctcctgctgcaagtcccaactttgaataaaacagatgatgtcctgtgactgccccacagagataaggggccaggagggattgaaaggcatcccagttctaaggctgctgctaattacagcccccaacctccaacccaccagctgacctagaagcagcatcttcccatttcctcagtacccacaaagtgcagcccacattggaccccagacacccctctgcagccattgactgcaacttgttcttttgcccattg

SEQ ID NO: 191195 - DNA, 1101 bp, Artificial Sequence
  derived and/or modified sequence
atggccgagctgcagcagctgcaggagttcgagatccccaccggcagagaggccctgagaggcaaccacagcgccctgctgagagtggccgactactgcgaggacaactacgtgcaggccaccgacaagagaaaggccctggaggagaccatggccttcaccacccaggccctggccagcgtggcctaccaggtgggcaacctggccggccacaccctgagaatgctggacctgcagggcgccgccctgagacaggtggaggccagagtgagcaccctgggccagatggtgaacatgcacatggagaaggtggccagaagagagatcggcaccctggccaccgtgcagagactgccccccggccagaaggtgatcgcccccgagaacctgccccccctgaccccctactgcagaagacccctgaacttcggctgcctggacgacatcggccacggcatcaaggacctgagcacccagctgagcagaaccggcaccctgagcagaaagagcatcaaggcccccgccacccccgccagcgccaccctgggcagaccccccagaatccccgagcccgtgcacctgcccgtggtgcccgacggcagactgagcgccgccagcagcgccttcagcctggccagcgccggcagcgccgagggcgtgggcggcgcccccacccccaagggccaggccgccccccccgccccccccctgcccagcagcctggaccccccccccccccccgccgccgtggaggtgttccagagaccccccaccctggaggagctgagcccccccccccccgacgaggagctgcccctgcccctggacctgcccccccccccccccctggacggcgacgagctgggcctgcccccccccccccccggcttcggccccgacgagcccagctgggtgcccgccagctacctggagaaggtggtgaccctgtacccctacaccagccagaaggacaacgagctgagcttcagcgagggcaccgtgatctgcgtgaccagaagatacagcgacggctggtgcgagggcgtgagcagcgagggcaccggcttcttccccggcaactacgtggagcccagctgctag

SEQ ID NO: 191196 - DNA, 1101 bp, Artificial Sequence
  derived and/or modified sequence
atggcggaattgcagcagctccaagagtttgaaatacccactggtcgagaggctctgcgaggtaaccatagcgccctgttaagagtggccgactactgtgaagataactatgtgcaagcaactgataagcgcaaagcactggaggaaacaatggcctttaccactcaggctcttgcgagcgtcgcctatcaagttggcaatctggcagggcacacgctccgaatgttagatttgcaaggcgccgccctacgacaggtcgaggcacgcgtgtcgacactcggacagatggttaatatgcacatggagaaagtggcaaggcgggagattggtaccctggcaacagtgcagcggctaccgcctgggcagaaggtgattgccccagagaatctaccccctctgacgccttactgtcgccggcccctaaatttcggatgtctcgatgacatcgggcacggaattaaggatttatccacacagctgagcagaaccggtaccctgtcgaggaaaagcatcaaagctcccgcaacccccgcatctgccacgttgggtcggcctcccagaattccagaaccggtacatctcccagtggtgccagacggcagactgtctgcggcgtcttctgctttctctctcgcatccgcaggctctgctgaaggagttggaggtgctccaaccccaaaaggccaggctgctccccctgctccgccactgccgtccagcctggatccaccaccaccacccgcagccgtggaggtcttccagagaccccccacactcgaggaattaagtccgcctcctccagacgaagagcttcccctaccgctggacctgcccccaccaccacctctggacggtgatgagttgggcctcccaccacctccacccggattcgggcccgatgagccgagctgggtgcctgcctcttatttggaaaaggtggtaactctatatccctacacttcgcagaaggataatgaactcagcttctcagagggcacagtaatttgtgtcacgcgtaggtattctgatggatggtgcgagggtgtctccagcgagggaaccggattctttccaggcaactacgtggagccctcttgctag

SEQ ID NO: 191197 - DNA, 1101 bp, Artificial Sequence
  derived and/or modified sequence
atggccgagctgcagcagctgcaggagtttgagatccccaccggccgggaggccctgcggggcaaccacagcgccctgctgcgggtggccgactactgtgaggacaactacgtgcaggccacagacaagaggaaggccctggaggagaccatggccttcaccacccaggccctggcctctgtggcctaccaggtgggcaacctggccggccacaccctgaggatgctggacctgcagggcgccgccctgcggcaggtggaggcccgggtgtccaccctgggccagatggtgaacatgcacatggagaaggtggcccggcgggagatcggcaccctggccaccgtgcagaggctgcccccaggccagaaggtgattgcccctgagaacctgccccccctgaccccctactgccggcggcccctgaactttggctgcctggatgacattggacatggcatcaaggacctgagcacccagctgagcaggacaggcaccctgagcaggaagagcatcaaggccccagccaccccagccagcgccaccctgggccggcccccacgcatccctgagcctgtgcacctgcctgtggtgcctgatggccgcctgtctgctgccagcagcgccttcagcctggccagcgctggcagcgctgagggcgtgggcggggcccccacccccaagggccaggccgcccccccagccccacccctgcccagcagcctggaccccccacctcctcctgctgctgtggaggtgttccagaggcctcccaccctggaggagctgagccccccacctccagatgaggagctgcccctgcccctggacctgcccccacctccacccctggatggagatgagctgggcctgcccccacctcctcctggctttggaccagatgagcccagctgggtgcctgccagctacctggagaaggtggtgaccctgtacccctacaccagccagaaggacaatgagctgtccttcagcgagggcaccgtcatctgtgtgacccggcgctacagtgatggctggtgtgagggcgtgtcctctgagggcaccggcttcttccctggcaactacgtggagcccagctgctag

SEQ ID NO: 191198 - DNA, 1101 bp, Artificial Sequence
  derived and/or modified sequence
atggccgagctgcagcagctgcaggagttcgagatccccaccggcagagaagctttgaggggcaaccacagcgccctgctgcgcgtcgcggactattgtgaggacaattatgtccaggccaccgataaacggaaggccctggaggagacaatggctttcacgacccaggcattggcgagcgtagcgtatcaagtcggcaatctagctgggcacacccttcggatgctcgatctgcagggcgcagctttgcggcaggtggaggccagagtctctaccctcggacaaatggtcaatatgcatatggaaaaggtggccaggcgtgagattgggacacttgcaaccgttcagcgcctcccccctggccagaaggtgatagctccggagaatcttccgccactcacaccatactgtcgaagaccactgaacttcggctgcctggacgacattggccacggaatcaaggaccttagcacccagctatctcgtaccggaaccctgagtcgaaagtctatcaaggcgcctgctacgcctgcttctgccacactcggaagacccccaagaattccagagcccgttcacctgcccgtggtgcctgacggaaggctctctgccgcaagctccgctttttcactggcatccgccggtagtgccgagggagttgggggcgcacccacccccaaaggacaagcggctcctcccgccccaccattgcctagcagcctggacccgcctccgcctcctgccgctgtcgaagtgtttcagcgcccgcccaccctggaggagctttcccccccacctccagacgaggagctgcctctccctctggacttgcctcccccgccccccctcgatggcgatgaattgggtctgcccccaccacctcctggtttcggccctgatgagccaagctgggtgcccgctagctatttggaaaaggtggtgacactctacccatatactagccaaaaggacaacgagctgagcttctccgaagggaccgtgatttgcgtgacacgcaggtatagtgatggatggtgcgaaggcgtgtcatcggaaggcaccggctttttcccgggtaactatgttgagccaagttgttag

SEQ ID NO: 191199 - DNA, 1101 bp, Artificial Sequence
  derived and/or modified sequence
atggcagaactccagcagctccaagaattcgagattcctactgggagagaggcccttaggggtaatcattctgccttactcagagtggcagattattgtgaggataactatgttcaagcgaccgacaaacgtaaggccctcgaagaaacgatggctttcacaactcaggccctggcgtctgtggcttaccaagtgggcaatctcgccggacataccctcagaatgcttgacttgcagggcgcagccctgagacaggtcgaagcccgagtatctactctgggtcaaatggtgaacatgcatatggagaaggtggcccgaagggaaattggtaccttggctactgtacaaaggctgcccccaggccagaaggtgattgcacccgaaaatctccccccacttacaccatattgtaggcgtccattaaactttgggtgtctcgacgacattggtcatgggatcaaagacctttccacccaactgtcaagaacaggcactctgagccggaagtccatcaaggctcctgcgacgcccgcttcagccacacttggaaggcctccgaggatccctgagccagtgcatctccccgtggtaccagatggtagactttctgcagcctcaagcgcgttttctcttgctagtgccggatccgcagagggagtaggcggtgcccctacccccaagggacaagcggctccacccgctcctcctctgccaagcagtttagatccacctcccccaccagctgcagtcgaagtgttccaaaggccaccaacactcgaggagctgagtccacccccacctgacgaagagttgcctttgcccctggacctgccaccgccacctccattagacggggatgagctagggttgccaccaccgcctccaggatttggacccgacgaacctagctgggtgccagcgtcctacttggagaaagtggtcaccctttacccatatacttcccaaaaagataacgagctcagtttctcagaaggcaccgtgatctgtgttacacgacggtattcagacggatggtgcgaaggggtgtcatcggaggggacaggcttcttccccggtaattacgtagaaccctcctgttag

SEQ ID NO: 191200 - protein, 208 aa, Artificial Sequence
  derived and/or modified sequence
MQRPEWPRPHPGEGAAAAGRGPAPPARAGEPSGLRLQEPSLYTIKAVFILDNDGRRLLAKYYDDTFPSMKEQMVFEKNVFNKTSRTESEIAFFGGMTIVYKNSIDLFLYVVGSSYENELMLMSVLTCLFESLNHMLRKNVEKRWLLENMDGAFLVLDEIVDGGVILESDPQQVIQKVNFRADDGGLTEQSVAQVLQSAKEQIKWSLLK

SEQ ID NO: 191201 - DNA, 627 bp, Artificial Sequence
  derived and/or modified sequence
atgcagagacccgagtggcccagaccccaccccggcgagggcgccgccgccgccggcagaggccccgccccccccgccagagccggcgagcccagcggcctgagactgcaggagcccagcctgtacaccatcaaggccgtgttcatcctggacaacgacggcagaagactgctggccaagtactacgacgacaccttccccagcatgaaggagcagatggtgttcgagaagaacgtgttcaacaagaccagcagaaccgagagcgagatcgccttcttcggcggcatgaccatcgtgtacaagaacagcatcgacctgttcctgtacgtggtgggcagcagctacgagaacgagctgatgctgatgagcgtgctgacctgcctgttcgagagcctgaaccacatgctgagaaagaacgtggagaagagatggctgctggagaacatggacggcgccttcctggtgctggacgagatcgtggacggcggcgtgatcctggagagcgacccccagcaggtgatccagaaggtgaacttcagagccgacgacggcggcctgaccgagcagagcgtggcccaggtgctgcagagcgccaaggagcagatcaagtggagcctgctgaagtag

SEQ ID NO: 191202 - DNA, 886 bp, Artificial Sequence
  derived and/or modified sequence
atgcagcggcccgagtggccacgtccgcacccgggggagggggccgcggcggcaggccgggggccggcgccgcctgctcgagccggggagccctcggggctgcggttgcaggaaccttccctctacaccatcaaggctgttttcatcctagataatgacgggcgccggctgctggccaagtattatgatgacacattcccctccatgaaggagcagatggttttcgagaaaaatgtcttcaacaagaccagccggactgagagtgagattgcattttttgggggtatgaccatcgtctacaagaacagcattgacctcttcctatacgtggtgggctcatcctacgagaatgagctgatgctcatgtctgttctcacctgcctgtttgagtctctgaaccacatgttaaggaagaacgtggagaagcgctggttgctggagaacatggacggagccttcttggtgctggacgagattgtggatggcggtgtgattctggagagtgacccccagcaagtgatccagaaggtgaattttagggcagatgatggcggcttgactgaacagagtgtggcccaggttcttcagtctgccaaggaacaaattaaatggtcgttattgaaatgaaggctgtggattcaaggctccctgccccccagatcatttccccaatcctggcaaaagcccaaagatcccagggtcaggagagacccctctgtatccccaggtccctcccagaactgactcctaaggtctccagccagggcttctgagatgcaaaggtttggcctcaggagagtcaccttttctcacggccctggccttaactcatatcttaggcattcctggccccagggccctaataaacctgcttttgtcttctgcc

SEQ ID NO: 191203 - DNA, 627 bp, Artificial Sequence
  derived and/or modified sequence
atgcagcgacccgagtggccgcgaccccacccgggcgaaggagcagccgccgctggacggggacctgccccccccgcccgagctggggaaccatctggcctccggctacaggagccatccttatatactataaaagccgtgtttattcttgacaatgatggacgccgactgctcgccaaatactacgacgacactttcccttcaatgaaggagcaaatggtgttcgagaaaaacgtcttcaacaagactagtagaactgaatctgagatcgcgttttttggtgggatgacaatcgtatataagaattcaatcgacctgttcctttatgtcgtgggatcaagttatgaaaacgaactgatgttgatgtccgtgctgacatgccttttcgagagtctaaaccacatgctacgcaaaaatgtcgaaaagaggtggctgctggaaaacatggacggtgccttcttagtgcttgatgagatcgtggacggcggggtaatcttagaaagcgaccctcagcaggttattcaaaaggtgaatttccgcgcagacgacggaggcttaacagaacagtctgttgcccaagtgcttcagtcagcaaaggagcagataaagtggtccctcctcaagtag

SEQ ID NO: 191204 - DNA, 627 bp, Artificial Sequence
  derived and/or modified sequence
atgcagaggcctgagtggccccggccccaccctggagagggcgctgctgctgctggccggggccctgcccccccagcccgggccggggagcccagcggcctgcggctgcaggagcccagcctgtacaccatcaaggctgtgttcatcctggacaatgatggaagaaggctgctggccaagtactatgatgacaccttccccagcatgaaggagcagatggtgtttgagaagaatgtgttcaacaagaccagcaggacagagagcgagatcgccttctttggaggcatgaccatcgtgtacaagaacagcattgacctcttcctgtatgtggtgggcagcagctatgaaaatgagctgatgctgatgtctgtgctgacctgcctgtttgagagcctgaaccacatgctgaggaagaatgtggagaagcgctggctgctggagaacatggatggagccttcctggtgctggatgaaattgtggatggaggagtcatcctggagagtgacccccagcaggtgatccagaaggtgaacttccgggcagatgatggcggcctgacagagcagagcgtggcccaggtgctgcagagcgccaaggagcagatcaagtggagcctgctgaagtag

SEQ ID NO: 191205 - DNA, 627 bp, Artificial Sequence
  derived and/or modified sequence
atgcagcggcccgagtggccccggccccaccccggcgagggcgccgccgctgccgggcggggccccgctcctccggcccgagccggggagccttcgggtctgaggctgcaggagccttctttatatactataaaagctgtgtttattctggataacgacggaagaaggttactggccaaatactatgacgacactttcccttcaatgaaggagcagatggtattcgaaaaaaatgtttttaacaaaacatcacggacagagagtgagatcgctttcttcgggggtatgaccatcgtttataagaatagcattgatcttttcctatacgtggtggggtcctcatacgaaaatgaactcatgctcatgtccgtgctcacatgcctctttgaatcactcaaccatatgcttagaaagaacgttgaaaaaagatggctgctggaaaacatggatggggcctttctggtgctggatgagatagtcgacgggggcgtgatactggagagtgacccgcagcaagtcattcaaaaggtgaacttccgagccgatgatggggggctgacagaacaatcagtggcgcaggtgctgcagtcagcaaaggagcagatcaaatggagcctgctcaagtag

SEQ ID NO: 191206 - DNA, 627 bp, Artificial Sequence
  derived and/or modified sequence
atgcagagacctgaatggccgaggccgcaccccggagaaggcgctgccgcagcaggcaggggccctgcgccacctgccagggccggtgagccttccggcctgaggctgcaggaaccctctttgtacaccatcaaagctgttttcatactggacaacgacgggagacgccttcttgccaagtactatgacgacacattcccttcaatgaaagaacaaatggtgttcgagaaaaatgtgttcaataagactagtcgcaccgaatcagaaatcgcattctttggtggtatgacaatcgtgtacaaaaattctatagatctgttcctttacgtagtgggctcaagctatgagaacgaactgatgctgatgagtgtgttgacctgtcttttcgaatccctaaatcatatgctcaggaaaaacgtagagaagcggtggttgctcgaaaacatggatggcgcttttcttgtgctcgatgaaatagtcgatgggggagtcattctcgagagcgatccccagcaagtgatacaaaaagtgaactttcgggcagatgacggaggcctgacagagcaatcagtagcccaggtgcttcagtctgccaaagagcagataaaatggtctcttctgaaatag

SEQ ID NO: 191207 - DNA, 627 bp, Artificial Sequence
  derived and/or modified sequence
atgcagcgacccgagtggccaaggccccaccccggtgagggtgcagccgctgccggcaggggtcctgctcccccagcaagggccggtgagccatccgggttacgacttcaagaaccaagcctgtataccattaaagcagtctttatactggacaacgatgggaggcgtttactggcaaagtattatgacgacactttcccatcaatgaaagaacaaatggtgtttgaaaagaatgttttcaataagacatcccggaccgagtcagaaatagctttttttggtgggatgaccatagtttataaaaactccatagatctctttctctacgttgttggatccagttacgagaacgagcttatgctcatgtctgtgttgacatgtctcttcgagagtcttaaccacatgcttcgaaaaaatgttgaaaaaagatggcttcttgaaaatatggacggggccttcttggtgttggatgagatcgttgatggcggtgtgattcttgaaagcgatccccagcaggtgatacaaaaggtgaactttagagcagatgatggcggcctcacagagcagagtgttgctcaggtcctgcagagcgcaaaggagcagatcaaatggagcctcctcaaatag

SEQ ID NO: 191208 - DNA, 627 bp, Artificial Sequence
  derived and/or modified sequence
atgcaaagacctgagtggccacgaccacacccaggtgagggagccgcagctgcagggagagggccagcaccacccgctcgagctggcgagcccagtggcttacggttacaagaaccatccctttacacgattaaagcagtgtttatactggataatgatgggagacgcctgttagccaagtattacgatgacacattccccagcatgaaagagcagatggtcttcgagaagaacgtgtttaacaagacttcacgaaccgaatcagaaatcgccttctttgggggcatgacaattgtgtacaagaatagtatcgatctctttctttacgtcgtgggctcttcctacgagaacgagttaatgttaatgtccgttctgacttgccttttcgaatctttaaatcatatgttgagaaaaaacgtcgaaaaaagatggctgctcgagaatatggacggcgcttttctggtgttggacgaaattgtggacggcggggtgattctagaaagtgatccgcaacaggtgatccagaaggtcaattttcgtgccgatgatggagggctgactgaacagtccgttgctcaggtgttgcagagcgctaaagagcaaattaagtggagtcttttaaaatag

SEQ ID NO: 191209 - protein, 1219 aa, Artificial Sequence
  derived and/or modified sequence
MPKIVLNGVTVDFPFQPYKCQQEYMTKVLECLQQKVNGILESPTGTGKTLCLLCTTLAWREHLRDGISARKIAERAQGELFPDRALSSWGNAAAAAGDPIACYTDIPKIIYASRTHSQLTQVINELRNTSYRPKVCVLGSREQLCIHPEVKKQESNHLQIHLCRKKVASRSCHFYNNVEEKSLEQELASPILDIEDLVKSGSKHRVCPYYLSRNLKQQADIIFMPYNYLLDAKSRRAHNIDLKGTVVIFDEAHNVEKMCEESASFDLTPHDLASGLDVIDQVLEEQTKAAQQGEPHPEFSADSPSPGLNMELEDIAKLKMILLRLEGAIDAVELPGDDSGVTKPGSYIFELFAEAQITFQTKGCILDSLDQIIQHLAGRAGVFTNTAGLQKLADIIQIVFSVDPSEGSPGSPAGLGALQSYKVHIHPDAGHRRTAQRSDAWSTTAARKRGKVLSYWCFSPGHSMHELVRQGVRSLILTSGTLAPVSSFALEMQIPFPVCLENPHIIDKHQIWVGVVPRGPDGAQLSSAFDRRFSEECLSSLGKALGNIARVVPYGLLIFFPSYPVMEKSLEFWRARDLARKMEALKPLFVEPRSKGSFSETISAYYARVAAPGSTGATFLAVCRGKASEGLDFSDTNGRGVIVTGLPYPPRMDPRVVLKMQFLDEMKGQGGAGGQFLSGQEWYRQQASRAVNQAIGRVIRHRQDYGAVFLCDHRFAFADARAQLPSWVRPHVRVYDNFGHVIRDVAQFFRVAERTMPAPAPRATAPSVRGEDAVSEAKSPGPFFSTRKAKSLDLHVPSLKQRSSGSPAAGDPESSLCVEYEQEPVPARQRPRGLLAALEHSEQRAGSPGEEQAHSCSTLSLLSEKRPAEEPRGGRKKIRLVSHPEEPVAGAQTDRAKLFMVAVKQELSQANFATFTQALQDYKGSDDFAALAACLGPLFAEDPKKHNLLQGFYQFVRPHHKQQFEEVCIQLTGRGCGYRPEHSIPRRQRAQPVLDPTGRTAPDPKLTVSTAAAQQLDPQEHLNQGRPHLSPRPPPTGDPGSQPQWGSGVPRAGKQGQHAVSAYLADARRALGSAGCSQLLAALTAYKQDDDLDKVLAVLAALTTAKPEDFPLLHRFSMFVRPHHKQRFSQTCTDLTGRPYPGMEPPGPQEERLAVPPVLTHRAPQPGPSRSEKTGKTQSKISSFLRQRPAGTVGAGGEDAGPSQSSGPPHGPAASEWGL

SEQ ID NO: 191210 - DNA, 3660 bp, Artificial Sequence
  derived and/or modified sequence
atgcccaagatcgtgctgaacggcgtgaccgtggacttccccttccagccctacaagtgccagcaggagtacatgaccaaggtgctggagtgcctgcagcagaaggtgaacggcatcctggagagccccaccggcaccggcaagaccctgtgcctgctgtgcaccaccctggcctggagagagcacctgagagacggcatcagcgccagaaagatcgccgagagagcccagggcgagctgttccccgacagagccctgagcagctggggcaacgccgccgccgccgccggcgaccccatcgcctgctacaccgacatccccaagatcatctacgccagcagaacccacagccagctgacccaggtgatcaacgagctgagaaacaccagctacagacccaaggtgtgcgtgctgggcagcagagagcagctgtgcatccaccccgaggtgaagaagcaggagagcaaccacctgcagatccacctgtgcagaaagaaggtggccagcagaagctgccacttctacaacaacgtggaggagaagagcctggagcaggagctggccagccccatcctggacatcgaggacctggtgaagagcggcagcaagcacagagtgtgcccctactacctgagcagaaacctgaagcagcaggccgacatcatcttcatgccctacaactacctgctggacgccaagagcagaagagcccacaacatcgacctgaagggcaccgtggtgatcttcgacgaggcccacaacgtggagaagatgtgcgaggagagcgccagcttcgacctgaccccccacgacctggccagcggcctggacgtgatcgaccaggtgctggaggagcagaccaaggccgcccagcagggcgagccccaccccgagttcagcgccgacagccccagccccggcctgaacatggagctggaggacatcgccaagctgaagatgatcctgctgagactggagggcgccatcgacgccgtggagctgcccggcgacgacagcggcgtgaccaagcccggcagctacatcttcgagctgttcgccgaggcccagatcaccttccagaccaagggctgcatcctggacagcctggaccagatcatccagcacctggccggcagagccggcgtgttcaccaacaccgccggcctgcagaagctggccgacatcatccagatcgtgttcagcgtggaccccagcgagggcagccccggcagccccgccggcctgggcgccctgcagagctacaaggtgcacatccaccccgacgccggccacagaagaaccgcccagagaagcgacgcctggagcaccaccgccgccagaaagagaggcaaggtgctgagctactggtgcttcagccccggccacagcatgcacgagctggtgagacagggcgtgagaagcctgatcctgaccagcggcaccctggcccccgtgagcagcttcgccctggagatgcagatccccttccccgtgtgcctggagaacccccacatcatcgacaagcaccagatctgggtgggcgtggtgcccagaggccccgacggcgcccagctgagcagcgccttcgacagaagattcagcgaggagtgcctgagcagcctgggcaaggccctgggcaacatcgccagagtggtgccctacggcctgctgatcttcttccccagctaccccgtgatggagaagagcctggagttctggagagccagagacctggccagaaagatggaggccctgaagcccctgttcgtggagcccagaagcaagggcagcttcagcgagaccatcagcgcctactacgccagagtggccgcccccggcagcaccggcgccaccttcctggccgtgtgcagaggcaaggccagcgagggcctggacttcagcgacaccaacggcagaggcgtgatcgtgaccggcctgccctacccccccagaatggaccccagagtggtgctgaagatgcagttcctggacgagatgaagggccagggcggcgccggcggccagttcctgagcggccaggagtggtacagacagcaggccagcagagccgtgaaccaggccatcggcagagtgatcagacacagacaggactacggcgccgtgttcctgtgcgaccacagattcgccttcgccgacgccagagcccagctgcccagctgggtgagaccccacgtgagagtgtacgacaacttcggccacgtgatcagagacgtggcccagttcttcagagtggccgagagaaccatgcccgcccccgcccccagagccaccgcccccagcgtgagaggcgaggacgccgtgagcgaggccaagagccccggccccttcttcagcaccagaaaggccaagagcctggacctgcacgtgcccagcctgaagcagagaagcagcggcagccccgccgccggcgaccccgagagcagcctgtgcgtggagtacgagcaggagcccgtgcccgccagacagagacccagaggcctgctggccgccctggagcacagcgagcagagagccggcagccccggcgaggagcaggcccacagctgcagcaccctgagcctgctgagcgagaagagacccgccgaggagcccagaggcggcagaaagaagatcagactggtgagccaccccgaggagcccgtggccggcgcccagaccgacagagccaagctgttcatggtggccgtgaagcaggagctgagccaggccaacttcgccaccttcacccaggccctgcaggactacaagggcagcgacgacttcgccgccctggccgcctgcctgggccccctgttcgccgaggaccccaagaagcacaacctgctgcagggcttctaccagttcgtgagaccccaccacaagcagcagttcgaggaggtgtgcatccagctgaccggcagaggctgcggctacagacccgagcacagcatccccagaagacagagagcccagcccgtgctggaccccaccggcagaaccgcccccgaccccaagctgaccgtgagcaccgccgccgcccagcagctggacccccaggagcacctgaaccagggcagaccccacctgagccccagacccccccccaccggcgaccccggcagccagccccagtggggcagcggcgtgcccagagccggcaagcagggccagcacgccgtgagcgcctacctggccgacgccagaagagccctgggcagcgccggctgcagccagctgctggccgccctgaccgcctacaagcaggacgacgacctggacaaggtgctggccgtgctggccgccctgaccaccgccaagcccgaggacttccccctgctgcacagattcagcatgttcgtgagaccccaccacaagcagagattcagccagacctgcaccgacctgaccggcagaccctaccccggcatggagccccccggcccccaggaggagagactggccgtgccccccgtgctgacccacagagccccccagcccggccccagcagaagcgagaagaccggcaagacccagagcaagatcagcagcttcctgagacagagacccgccggcaccgtgggcgccggcggcgaggacgccggccccagccagagcagcggccccccccacggccccgccgccagcgagtggggcctgtag

SEQ ID NO: 191211 - DNA, 3660 bp, Artificial Sequence
  derived and/or modified sequence
atgcctaagattgtgctgaatggggtgactgtggatttcccttttcaaccatataagtgccaacaggaatacatgaccaaagtgctcgagtgtctccaacagaaagtgaatggcatattggagtcacctaccggtactggtaaaactctgtgtctactgtgcaccacactggcctggcgcgaacacctcagagacgggatttcggcacggaaaatcgcagaaagggctcagggggagctgtttcctgaccgcgccctgtcctcctggggaaatgctgccgccgcggccggggaccccatcgcctgttatacagatattcctaagatcatctacgcttcccgaacccactcccagttgacacaggtgataaatgaactccgtaatacaagttacaggcctaaggtgtgcgtattaggctctcgggaacagctctgcatccatcctgaagttaaaaaacaggaaagcaaccatctgcagattcatctctgtcgcaagaaggtggcgtccagatcttgccatttttacaataacgtggaggaaaaaagcctggaacaggagttggctagcccaattctggacattgaagatctggttaagtctgggagtaagcatagagtttgtccatactatttatcgagaaacttaaaacaacaagccgatattatcttcatgccttataattatttgctggatgcgaagtcccggagagcccataacatcgatctgaaaggaacggtggtgattttcgatgaagcacacaatgtggaaaaaatgtgtgaggaatccgcctcttttgatttaactccgcatgacctggccagtggcttggacgttatagaccaggtccttgaggaacagacaaaagctgcccaacaaggagaaccgcaccctgagtttagcgctgactctcccagtcctggacttaacatggagctggaagacatcgctaagttgaagatgatcttactccgcttggagggggccatcgacgcagtagagcttcccggggatgatagcggagtaaccaagccagggtcctacatatttgagttgttcgcagaggcccaaattacgtttcagactaaggggtgcatcttggactcattagaccagatcattcaacatttagccggtcgagctggagtgttcactaacactgctggcctgcagaagctcgctgatattatccagatagtgttctctgttgacccaagtgaagggtctcctggatcccccgccgggctgggagcactgcagagctacaaagtgcacatccatcctgacgcgggacaccgccgtacagcacagagatcagatgcttggagcactacagcagctaggaaaaggggcaaagtgctttcttactggtgtttctcaccgggccatagtatgcacgagcttgtgcgccagggcgtgagaagcctcatcttaactagcggcacactcgcgcctgtgagctcttttgcactggagatgcagataccttttcctgtgtgtttggaaaacccacacatcatcgataagcatcagatctgggtcggcgtggtgcccagagggccggacggcgcacaattaagctctgcattcgaccgcaggttttccgaagagtgcctctcgtctctcggaaaagccctggggaacatagccagagtggtcccatacggactgctgatttttttcccctcttaccctgtcatggagaaatcgcttgagttttggcgggctcgcgacttagctcgcaagatggaggcgctgaaacccctgtttgtagaaccacggtcaaaggggtccttttcagagactatctctgcatattacgcccgtgtcgctgctcccggctctacgggagcaacgtttctggccgtgtgtagggggaaggcttcagagggcttggacttctcagacacaaacggccgaggagtgatagtcaccgggctgccttatcctcccagaatggatccacgcgtggtgctaaagatgcagttcttggacgaaatgaaagggcaaggaggtgccggcggacagtttctttctgggcaagagtggtaccggcagcaggcctcccgggccgtgaaccaggccattggaagagtgatcagacaccgtcaagattacggggccgtcttcttgtgcgatcatcgcttcgcattcgcagacgcaagagcacagctgcctagttgggtgagacctcacgtaagagtgtatgacaatttcggtcatgtaatccgcgacgtcgctcagtttttcagggtggcggagaggaccatgcctgcgccggctccacgcgcgaccgcgccttcggtccgtggggaagacgctgtcagtgaagcaaaaagcccaggcccctttttcagtacccgaaaagccaaatctctggatctgcacgtaccctctctcaaacagaggagctccggcagtcccgctgccggggatcccgaatcttctctgtgtgtggaatatgaacaggagccagtccccgcacgacagaggccgaggggacttttggccgcactcgagcattccgagcaaagggccggtagccccggtgaggaacaggctcactcttgtagtaccctttctcttctaagtgagaagaggccagccgaagagccgcgcgggggcagaaagaaaatcagattggtgagccaccccgaagaaccggtggctggagcccagacagacagggccaagttgttcatggttgcggttaagcaggagctttctcaagccaatttcgccacctttacacaagcactccaggattacaaggggtcagatgactttgctgcactggctgcctgtctgggccctctgttcgctgaagatccaaagaagcacaatctgctgcagggcttctatcaattcgtacgcccacaccataagcagcaattcgaggaggtgtgcattcagctgactggcaggggctgtggttaccggcctgagcacagtatccccaggaggcagagagcccagccagtgctggaccccaccggccgcacagcccctgacccaaagctgacagtgagcaccgcagctgctcagcagctcgacccccaagagcacctgaaccagggaagaccacatctgtcaccacgccctcctcccactggcgatccgggttcccagccccagtggggttcaggagtgcctcgggctgggaaacaaggccaacatgcagtgagtgcttatttggcagacgcacggcgggcacttggatccgccggatgctcacagctgttggcagctctgacagcctacaagcaggacgatgacctggacaaagtgttggccgtgcttgccgccctgactaccgccaaacccgaggattttcccttgctgcaccggttctctatgttcgtgcgccctcaccacaagcagagattcagccaaacctgcacggatctaaccggcagaccctatccaggcatggaacccccaggtccacaggaagaacggctggccgtcccaccagtgttgacgcaccgtgcgcctcagccggggccttctaggagcgagaaaaccgggaagacacagtcgaagatcagttcatttctcaggcagaggcctgcaggtaccgtgggggctggcggcgaagacgcaggcccatcacagtcctcgggcccccctcacggccctgccgcctctgagtggggtttgtag

SEQ ID NO: 191212 - DNA, 3660 bp, Artificial Sequence
  derived and/or modified sequence
atgcccaagatcgtgctgaatggagtgacagtggacttccccttccagccctacaagtgccagcaggagtacatgaccaaggtgctggagtgcctgcagcagaaggtgaatggcatcctggagagccccaccggcaccgggaagaccctgtgcctgctgtgcaccaccctggcctggagggagcacctgagagatggcatcagcgccaggaagattgctgagcgggcccagggcgagctgttcccagaccgggccctgagctcctggggcaatgctgctgctgctgctggggaccccatcgcctgctacacagacatccccaagatcatctatgccagcaggacccacagccagctgacccaggtgatcaatgagctgaggaacaccagctaccggcccaaggtgtgtgtgctgggcagccgggagcagctgtgcatccaccctgaggtgaagaagcaggagagcaaccacctgcagatccacctgtgcaggaagaaggtggccagccgcagctgccacttctacaacaacgtggaggagaagagcctggagcaggagctggccagccccatcctggacatcgaggacctggtgaagagcggcagcaagcaccgggtgtgcccctactacctgagcaggaacctgaagcagcaggccgacatcatcttcatgccctacaactacctgctggatgccaagagcagaagagcccacaacatcgacctgaagggcaccgtggtgatctttgatgaggcccacaacgtggagaagatgtgtgaggagagcgccagctttgacctgacccctcatgacctggccagcggcctggatgtgattgaccaggtgctggaggagcagaccaaggccgcccagcagggcgagccccaccctgagttctctgctgacagccccagccctggcctgaacatggagctggaggacatcgccaagctgaagatgatcctgctgcggctggagggcgccattgatgctgtggagctgcctggagatgattctggagtgaccaagccaggcagctacatctttgagctgtttgctgaggcccagatcaccttccagaccaagggctgcatcctggacagcctggaccagatcatccagcacctggccggccgggccggggtcttcaccaacacagctggcctgcagaagctggccgacatcatccagatcgtgttttctgtggaccccagcgagggcagccctggcagccctgctggcctgggcgccctgcagagctacaaggtgcacatccacccagatgctggccacagaagaacagcccagaggagtgatgcctggagcaccacagctgccaggaagaggggcaaggtgctgagctactggtgcttcagccctggccacagcatgcatgagctggtgcggcagggcgtgcgcagcctcatcctgaccagcggcaccctggcccctgtgtcctcctttgccctggagatgcagatccccttccctgtgtgcctggagaacccccacatcatcgacaagcaccagatctgggtgggcgtggtgccccggggcccagatggagcccagctgagcagcgcctttgaccggcgcttcagcgaggagtgcctgagcagcctgggcaaggccctgggcaacatcgcccgggtggtgccctacggcctgctgatcttcttccccagctaccctgtgatggagaagagcctggagttctggagggcccgggacctggccaggaagatggaggccctgaagcccctgtttgtggagcccaggagcaagggcagcttcagcgagaccatcagcgcctactatgcccgggtggccgcccctggcagcactggagccaccttcctggccgtgtgccggggcaaggccagcgagggcctggacttcagtgacaccaacggccggggcgtcatcgtgacaggcctgccctacccacccaggatggacccccgggtggtgctgaagatgcagttcctggatgagatgaagggccagggcggggccggcggccagttcctgagcggccaggagtggtaccggcagcaggccagcagagctgtgaaccaggccatcggccgggtcatccgccaccggcaggactatggagctgtgttcctgtgtgaccacagatttgcctttgctgatgcccgggcccagctgcccagctgggtgcggccccacgtgcgggtgtatgacaactttggccacgtgatcagagatgtggcccagttcttccgggtggccgagaggaccatgcctgccccagccccccgggccacagcccccagcgtgagaggagaagatgctgtgtctgaggccaagagccctggccccttcttcagcaccaggaaggccaagagcctggacctgcacgtgcccagcctgaagcagaggagcagcggcagccctgctgctggggaccctgagagcagcctgtgtgtggagtatgagcaggagcctgtgcctgcccggcagaggccccggggcctgctggccgccctggagcacagcgagcagagagctggcagccctggagaggagcaggcccacagctgcagcaccctgagcctgctgtctgagaagaggcctgctgaggagccccggggcggcaggaagaagatccggctggtgagccaccctgaggagcctgtggccggggcccagacagaccgggccaagctgttcatggtggccgtgaagcaggagctgagccaggccaactttgccaccttcacccaggccctgcaggactacaagggcagtgatgactttgctgccctggccgcctgcctgggccccctgtttgctgaggaccccaagaagcacaacctgctgcagggcttctaccagtttgtgcggccccaccacaagcagcagtttgaggaggtgtgcatccagctgaccggccggggctgcggctacagacctgagcacagcatcccccggcggcagagggcccagcctgtgctggaccccactggaagaacagccccagaccccaagctgactgtgtccacagctgctgcccagcagctggacccccaggagcacctgaaccagggccggccccacctgagcccccggcccccacccaccggggaccccggcagccagccccagtggggcagcggcgtgccccgggccggcaagcagggccagcacgctgtgtctgcctacctggctgatgcccggcgggccctgggcagcgctggctgcagccagctgctggccgccctgacagcctacaagcaggatgatgacctggacaaggtgctggccgtgctggccgccctgaccacagccaagccagaggacttccccctgctgcaccgcttctccatgtttgtgcggccccaccacaagcagcgcttcagccagacctgcacagacctgaccggccggccctacccaggcatggagcccccaggcccccaggaggagcggctggccgtgccccctgtgctgacccaccgggccccccagcccggccccagccgctctgagaagacaggcaagacccagagcaagatcagcagcttcctgcggcagaggcctgctggcaccgtgggcgccggcggggaggatgctggccccagccagagcagcggccccccccacggccctgctgccagcgagtggggcctgtag

SEQ ID NO: 191213 - DNA, 3660 bp, Artificial Sequence
  derived and/or modified sequence
atgcccaagatcgtgctgaacggcgtgaccgtggacttccccttccaaccatataagtgtcagcaggaatatatgacaaaggtattggagtgtctacaacagaaagtgaatggcattttagaaagtccaaccggtaccggcaaaacactctgtcttttgtgtacgaccctggcatggagagagcacttaagagatgggatctcagctaggaaaatcgccgagagagcacagggagagctcttcccagaccgagccctgtccagctggggtaacgctgcagcggctgcaggtgatcccatcgcatgttatacagatataccaaagattatttatgcgtctcggacgcattctcaacttacgcaggttatcaacgaactgagaaatacctcatatagacctaaggtatgcgtgctgggatcccgtgaacagctgtgcattcacccggaagtcaagaaacaggagtccaatcatctgcaaattcatttatgtcgcaaaaaagttgcctcaaggagctgtcatttctacaacaatgtggaggaaaaaagtctagagcaggaactggcttcaccgattctcgatattgaggatcttgttaagtcaggctctaagcaccgagtctgcccatattatctgagtcggaacctgaaacaacaggctgacataatttttatgccttataattatttgctggacgccaagtcacgacgggctcacaatatcgatctaaaaggaaccgtcgtgatttttgacgaggcccataacgtggaaaagatgtgcgaggagtctgcctctttcgatttgacaccacatgatctcgcctctggactagatgtgattgatcaggtgttggaagagcagactaaggctgcccagcaaggggagccacacccggaatttagtgcagactccccctctccaggccttaacatggagctggaggacatcgccaagctgaaaatgattctgctgcggctcgaaggggctattgacgccgtcgagctgcccggcgacgatagcggtgtgaccaagcctggatcgtacatctttgagctgtttgctgaggctcagattaccttccagacaaaggggtgcatcctggactcattggaccagattatccagcacctggccggtcgtgctggggtcttcacgaacactgccggcctgcaaaagcttgccgacattattcagatcgtgttctctgtggaccccagtgagggatccccaggatcccccgcaggactgggcgccctccagtcctataaggtgcacatccaccccgatgcgggccacagaagaaccgctcagaggtccgatgcctggtctactaccgctgctagaaaacggggcaaggtcttgagttactggtgtttctctccaggacattctatgcacgagctggttagacagggagtacgttctctcatccttacctccggcaccctcgcccctgtctcttccttcgcgctggagatgcagattccatttcccgtctgtctggaaaacccacacatcatagacaagcaccagatctgggtgggagtggtacctcgcggccctgacggggcccagctgtcaagcgctttcgaccgcaggtttagcgaggaatgtctgtcctcgctcgggaaagcccttgggaacattgcaagagtggttccctacgggctgctgattttttttccgagctacccagtaatggaaaagtccctcgagttctggcgtgccagggacctggcacggaagatggaagccttaaaacctcttttcgtcgaaccacgctccaagggaagcttctcagaaactatttcggcctattacgcaagggtggcagcccctggctcaaccggagctacttttcttgcagtttgtcgcggcaaggcctccgaagggctggacttctccgatactaatggaagaggtgtgattgtcactgggctgccctaccccccgagaatggaccccagagtagtgttgaagatgcagttcctggacgaaatgaaaggtcaagggggggcgggcggacagttcctcagcggccaggagtggtatagacagcaggctagccgtgctgtaaatcaggctataggtagagtcatcagacaccggcaggactatggtgcagtgtttctctgcgaccaccggttcgcattcgcagacgctagggctcagctgcctagctgggtgagacctcatgtgagagtgtacgacaattttggtcacgttatcagagatgtcgcccaattttttcgcgtggctgagcgaacaatgccagccccagcgcctagagcaactgcaccctctgtccggggggaggatgccgtgagtgaagccaagtctccaggcccattcttcagcacccgcaaggcaaagtcactcgatctgcacgtcccctcactaaaacagcgcagtagcggatcccccgcagccggagaccccgaaagttctctgtgcgtagagtatgaacaagaacccgtgccagccaggcagcgcccccggggactgcttgccgcactcgagcacagcgagcagagggctggcagccccggggaggaacaggcacacagttgctccaccctctctctgctgagcgaaaaaaggcccgcagaggaaccccgtgggggtagaaagaaaatcaggctggtgtctcatcccgaagagcctgtcgccggagcacagactgatcgggcgaagctctttatggtggcagtgaaacaggaactgagtcaggctaatttcgccaccttcacccaggccctacaggattacaagggctccgacgatttcgccgcactggcagcatgtctggggcctctcttcgcagaggatccgaagaagcataatctgctgcagggattctatcagttcgtccgacctcaccacaaacaacagtttgaagaggtatgtatccagctaaccggcaggggctgcggatatagaccagagcattccattccaaggcggcaacgcgctcagcccgtgcttgaccctacgggacggaccgctcccgatcctaagctgaccgtcagcactgccgcggcccaacagctggacccccaggagcacctcaaccagggtaggccacatttgtcgccccgtccccctcccaccggagacccaggatcccagccgcagtggggaagcggagttcccagagctggtaagcagggtcaacacgcagtgtccgcttatttagcggacgctcgtcgagctttgggctctgcaggctgctcacagctgttagctgctctgaccgcttacaagcaggatgatgacttggataaagtgctggcagtcctagccgccctgaccaccgctaaacccgaagacttccctctgttgcataggttttccatgttcgtcaggccccaccataagcagagattctctcagacatgtaccgacctcaccgggcggccatacccagggatggaaccccctggaccccaggaagagagactggccgtcccaccagttctgactcatcgagccccacagcccggccccagcagaagtgaaaagacaggcaagacccaaagtaaaatctcttccttcctgcgccagcggccagccgggactgtcggcgccggaggcgaagacgccggaccatctcaatcttcaggccccccgcacggccccgccgcaagcgaatggggcctgtag

SEQ ID NO: 191214 - DNA, 3660 bp, Artificial Sequence
  derived and/or modified sequence
atgccgaaaatcgttctcaacggcgtcaccgtggactttccttttcagccatataaatgccaacaagagtatatgaccaaagtcctagaatgcctgcagcaaaaagtgaacggcattctggaatctccaactggaacgggtaagaccctttgtctcctatgcacaacgctggcttggagggaacatcttcgtgacgggatctcagctcgcaagattgctgagagagcacagggggagctcttcccagaccgggctctgagtagttgggggaatgctgccgctgctgccggtgaccccatcgcgtgttataccgacatacctaagataatctatgccagtcgcacacatagccagctgacccaagtgattaacgagctgcgtaataccagctacaggccgaaggtgtgtgtactcgggtcacgcgaacaactctgtattcatccagaagtcaaaaaacaggaatccaatcacttgcagatccatctttgtcgcaaaaaggtggcatctaggagctgccacttctacaataatgttgaggaaaaatctctcgagcaggagctggcatctccaatcctggatatcgaggacctcgttaagagcggttccaagcatcgtgtgtgtccatactacctaagtcgcaacctgaagcagcaggccgacattattttcatgccttacaactatttactcgacgctaaaagccgaagggcccacaatatagacctgaaggggacagtggtcatcttcgatgaggcccataatgtcgaaaagatgtgcgaagagtcagccagctttgatttaaccccgcacgatcttgcttccggactggatgtgatcgaccaagtccttgaggaacagaccaaggccgctcagcagggcgagccacacccagaattctctgcggacagccccagccctggtttaaacatggaacttgaggatattgcgaagcttaaaatgatccttttgagactggaaggcgcaatcgacgctgtggagctccccggagatgacagtggagtgactaagccaggcagttatatttttgagctcttcgccgaagctcaaatcacattccaaacgaagggatgtatcttggattctctcgaccaaatcattcaacatctcgcaggtcgagctggtgttttcaccaacacagccggattacaaaagctggccgatattatccagatcgtgtttagtgtggacccatccgagggctctcctggatcgcctgccggactcggtgccttgcaatcctataaggtgcatatccatccagacgccggacacagacgcactgcccagcgctccgacgcatggagcaccacggccgctaggaagcggggaaaggttctaagttattggtgcttttcccccggacacagtatgcatgagcttgtgaggcagggcgtgcggtctttgatcctcacaagcgggactcttgcaccagtgtcatcatttgcactggagatgcagattccctttccagtctgcttagaaaatcctcacatcattgacaagcaccaaatctgggtgggtgtggtccctagggggccagatggagcccagttgtcatcagcatttgaccgtcggttcagcgaggagtgtctgagttcattggggaaggctctgggaaatattgcaagagttgtgccttacggtctattaatattcttcccgagttaccctgtgatggagaagtccctggagttctggcgggcacgggacttggctagaaaaatggaagccctaaagccactgttcgtggaaccacgatcaaagggcagcttcagtgagaccatctccgcttactatgctagagtggccgcacctggcagcaccggcgcaacattcctggcagtttgtaggggcaaggcaagcgagggccttgacttctcggacacaaacggacggggagtaattgtgacggggctgccatatcctccacggatggatccacgggtcgtactgaagatgcagttcttagacgagatgaaaggacagggaggcgctggtggacagttcctgtcaggtcaggagtggtaccgacagcaggcttcaagggctgtgaaccaggcaatcggaagagtcatccgacaccgccaggattacggtgctgtgttcctctgtgatcacagattcgcattcgccgatgcccgtgcacagctgccgtcatgggtgagacctcacgttagagtctacgataatttcggccacgttattcgcgatgttgcccagttttttagggtagccgaacgtaccatgccagcccctgccccacgagccaccgcaccgagtgtccggggtgaagatgccgtcagcgaggcaaagagcccaggaccttttttctcaacccggaaagccaaatcattggacttacacgttccatcactgaaacaacgatcaagcggcagcccggctgccggagaccctgagtcttctctctgtgtggagtatgagcaggagccagttcctgcacgccaacggcctcgcggactcttagccgctctagagcactccgagcaacgggctggctcccctggcgaggagcaagctcacagctgttcaacattgtcactgctaagcgagaagcgacccgctgaggagcccagagggggacggaagaagattcgtctggtgtcacaccctgaagagccagttgctggcgctcagacagaccgtgccaaattgttcatggtggccgtgaaacaagaattgtcgcaggctaattttgccacgtttacccaggccctgcaggattataaggggtccgatgacttcgcagcactcgcggcttgtctcggtcccctgttcgccgaggaccctaagaagcacaatctgttgcaagggttttaccagtttgtaagacctcaccataaacagcaatttgaggaggtgtgcatacaactgacaggtcgcggttgcgggtaccggccagaacactccattccgagacggcagcgcgcacaaccagttctggaccccacaggcagaacagctcctgatcctaaacttactgtcagcaccgcggcagctcagcagctcgaccctcaggaacaccttaaccagggtcggccacacctgtcccctaggcctcccccaaccggggatccaggttctcagccccagtggggctcaggagtgccacgcgcaggcaagcagggccagcacgcagtgtccgcttacctggctgacgccaggcgcgcactcggttccgctggatgcagtcaattgctggcagctttgaccgcatacaaacaggacgatgacctggacaaagtgctggctgtgctcgccgctctcactacagccaagcctgaagattttcccctgctgcatagatttagcatgtttgttcgaccacaccataaacagagattcagccagacttgtactgatctgactggccgaccataccccggaatggaaccccctgggccacaagaggagcggttggccgtgccgcctgtgctcactcatcgggcaccacagccaggtccttcacgaagtgagaagaccgggaagactcagtccaagatcagctcttttctgagacaacgtcccgctggaacagtgggggctggtggggaggacgcagggccttcacagagctccggccctccacatgggccagccgctagtgagtggggcctgtag

SEQ ID NO: 191215 - DNA, 4955 bp, Artificial Sequence
  derived and/or modified sequence
agtcagccctgctgccagccagtgccgggtgctggggactcagggaggcccgccgggaccactgcgggacagtgagccgagcagaagctggaacgcaggagaggaaggagagggggcggtcagggctctcaggagccgggtcctgggcaaggcgcagccgttttcaaattttcaggaaagcggtcggctcacactcgagcagtaaaaagatgcctctggggaggaggcccgtgcagctctccgggcaatggtggtggctcggcctagagaggcggtagtggaacgcagaccctggtgggggaatgacatcaagggaggagacgggcgggaccccagatttctgcctgtgggcgatggaagtgaggttcactggccagcggagccggacacagaacgcgcaaaacgccgtgtaggcctggaggagccgaagagcaggcggaccccctccgcgggggaacagtttccgccgggagcacaaagcaacggaccggaagtggggggcggaagtgcagtgggctcagcgccgactgcgcgcctctgcccgcgaaaactctgagctggctgacagctggggacgggtggcggccctcgactggagtcggttgagttcctgagggaccccggttctggaaggttcgccgcggagacaagtgagcagtctgtgccatagggattctcgaagagaacagcgttgtgtcccagtgcacatgctcgcatcgcttaccaggagtgcccgagaccctaagatgttcggagtggttttttcgcacagacccgaatagcctgcccctcagccacgctctgtgcccttctgagaacaggctgatatgcccaagatagtcctgaatggtgtgaccgtagacttccctttccagccctacaaatgccaacaggagtacatgaccaaggtcctggaatgtctgcagcagaaggtgaatggcatcctggagagccctacgggtacagggaagacgctgtgcctgctgtgcaccacgctggcctggcgagaacacctccgagacggcatctctgcccgcaagattgccgagagggcgcaaggagagcttttcccggatcgggccttgtcatcctggggcaacgctgctgctgctgctggagaccccatagcttgctacacggacatcccaaagattatttacgcctccaggacccactcgcaactcacacaggtcatcaacgagcttcggaacacctcctaccggcctaaggtgtgtgtgctgggctcccgggagcagctgtgcatccatcctgaggtgaagaaacaagagagtaaccatctacagatccacttgtgccgtaagaaggtggcaagtcgctcctgtcatttctacaacaacgtagaagaaaaaagcctggagcaggagctggccagccccatcctggacattgaggacttggtcaagagcggaagcaagcacagggtgtgcccttactacctgtcccggaacctgaagcagcaagccgacatcatattcatgccgtacaattacttgttggatgccaagagccgcagagcacacaacattgacctgaaggggacagtcgtgatctttgacgaagctcacaacgtggagaagatgtgtgaagaatcggcatcctttgacctgactccccatgacctggcttcaggactggacgtcatagaccaggtgctggaggagcagaccaaggcagcgcagcagggtgagccccacccggagttcagcgcggactcccccagcccagggctgaacatggagctggaagacattgcaaagctgaagatgatcctgctgcgcctggagggggccatcgatgctgttgagctgcctggagacgacagcggtgtcaccaagccagggagctacatctttgagctgtttgctgaagcccagatcacgtttcagaccaagggctgcatcctggactcgctggaccagatcatccagcacctggcaggacgtgctggagtgttcaccaacacggccggactgcagaagctggcggacattatccagattgtgttcagtgtggacccctccgagggcagccctggttccccagcagggctgggggccttacagtcctataaggtgcacatccatcctgatgctggtcaccggaggacggctcagcggtctgatgcctggagcaccactgcagccagaaagcgagggaaggtgctgagctactggtgcttcagtcccggccacagcatgcacgagctggtccgccagggcgtccgctccctcatccttaccagcggcacgctggccccggtgtcctcctttgctctggagatgcagatccctttcccagtctgcctggagaacccacacatcatcgacaagcaccagatctgggtgggggtcgtccccagaggccccgatggagcccagttgagctccgcgtttgacagacggttttccgaggagtgcttatcctccctggggaaggctctgggcaacatcgcccgcgtggtgccctatgggctcctgatcttcttcccttcctatcctgtcatggagaagagcctggagttctggcgggcccgcgacttggccaggaagatggaggcgctgaagccgctgtttgtggagcccaggagcaaaggcagcttctccgagaccatcagtgcttactatgcaagggttgccgcccctgggtccaccggcgccaccttcctggcggtctgccggggcaaggccagcgaggggctggacttctcagacacgaatggccgtggtgtgattgtcacgggcctcccgtaccccccacgcatggacccccgggttgtcctcaagatgcagttcctggatgagatgaagggccagggtggggctgggggccagttcctctctgggcaggagtggtaccggcagcaggcgtccagggctgtgaaccaggccatcgggcgagtgatccggcaccgccaggactacggagctgtcttcctctgtgaccacaggttcgcctttgccgacgcaagagcccaactgccctcctgggtgcgtccccacgtcagggtgtatgacaactttggccatgtcatccgagacgtggcccagttcttccgtgttgccgagcgaactatgccagcgccggccccccgggctacagcacccagtgtgcgtggagaagatgctgtcagcgaggccaagtcgcctggccccttcttctccaccaggaaagctaagagtctggacctgcatgtccccagcctgaagcagaggtcctcagggtcaccagctgccggggaccccgagagtagcctgtgtgtggagtatgagcaggagccagttcctgcccggcagaggcccagggggctgctggccgccctggagcacagcgaacagcgggcggggagccctggcgaggagcaggcccacagctgctccaccctgtccctcctgtctgagaagaggccggcagaagaaccgcgaggagggaggaagaagatccggctggtcagccacccggaggagcccgtggctggtgcacagacggacagggccaagctcttcatggtggccgtgaagcaggagttgagccaagccaactttgccaccttcacccaggccctgcaggactacaagggttccgatgacttcgccgccctggccgcctgtctcggccccctctttgctgaggaccccaagaagcacaacctgctccaaggcttctaccagtttgtgcggccccaccataagcagcagtttgaggaggtctgtatccagctgacaggacgaggctgtggctatcggcctgagcacagcattccccgaaggcagcgggcacagccggtcctggaccccactggaagaacggcgccggatcccaagctgaccgtgtccacggctgcagcccagcagctggacccccaagagcacctgaaccagggcaggccccacctgtcgcccaggccacccccaacaggagaccctggcagccaaccacagtgggggtctggagtgcccagagcagggaagcagggccagcacgccgtgagcgcctacctggctgatgcccgcagggccctggggtccgcgggctgtagccaactcttggcagcgctgacagcctataagcaagacgacgacctcgacaaggtgctggctgtgttggccgccctgaccactgcaaagccagaggacttccccctgctgcacaggttcagcatgtttgtgcgtccacaccacaagcagcgcttctcacagacgtgcacagacctgaccggccggccctacccgggcatggagccaccgggaccccaggaggagaggcttgccgtgcctcctgtgcttacccacagggctccccaaccaggcccctcacggtccgagaagaccgggaagacccagagcaagatctcgtccttccttagacagaggccagcagggactgtgggggcgggcggtgaggatgcaggtcccagccagtcctcaggacctccccacgggcctgcagcatctgagtggggcctctaggatgtgcccagcctgccacaccgcctccaggaagcagagcgtcatgcaggtcttctggccagagccccagtgagtgcccacggaggcccccagcacacccaacgtggcttgatcacctgcctgtccagctctggtgggccaagaacccacccaacagaataggccagcccatgccagccggcttggcccgctgcaggcctcaggcaggcggggcccatggttggtccctgcggtgggaccggatctgggcctgcctctgagaagccctgagctaccttggggtctggggtgggtttctgggaaagtgcttccccagaacttccctggctcctggcctgtgagtggtgccacaggggcaccccagctgagcccctcaccgggaaggaggagacccccgtgggcacgtgtccacttttaatcaggggacagggctctctaataaagctgctggcagtgcccaggacggtg

SEQ ID NO: 191216 - protein, 543 aa, Artificial Sequence
  derived and/or modified sequence
MTKHPPNRRGISFEVGAQLEARDRLKNWYPAHIEDIDYEEGKVLIHFKRWNHRYDEWFCWDSPYLRPLEKIQLRKEGLHEEDGSSEFQINEQVLACWSDCRFYPAKVTAVNKDGTYTVKFYDGVVQTVKHIHVKAFSKDQNIVGNARPKETDHKSLSSSPDKREKFKEQRKATVNVKKDKEDKPLKTEKRPKQPDKEGKLICSEKGKVSEKSLPKNEKEDKENISENDREYSGDAQVDKKPENDIVKSPQENLREPKRKRGRPPSIAPTAVDSNSQTLQPITLELRRRKISKGCEVPLKRPRLDKNSSQEKSKNYSENTDKDLSRRRSSRLSTNGTHEILDPDLVVSDLVDTDPLQDTLSSTKESEEGQLKSALEAGQVSSALTCHSFGDGSGAAGLELNCPSMGENTMKTEPTSPLVELQEISTVEVTNTFKKTDDFGSSNAPAVDLDHKFRCKVVDCLKFFRKAKLLHYHMKYFHGMEKSLEPEESPGKRHVQTRGPSASDKPSQETLTRKRVSASSPTTKDKEKNKEKKFKEFVRVKPKK

SEQ ID NO: 191217 - protein, 549 aa, Artificial Sequence
  derived and/or modified sequence
MTKHPPNRRGISFEVGAQLEARDRLKNWYPAHIEDIDYEEGKVLIHFKRWNHRYDEWFCWDSPYLRPLEKIQLRKEGLHEEDGSSEFQINEQVLACWSDCRFYPAKVTAVNKDGTYTVKFYDGVVQTVKHIHVKAFSKDQNIVGNARPKETDHKSLSSSPDKREKFKEQRKATVNVKKDKEDKPLKTEKRPKQPDKEGKLICSEKGKVSEKSLPKNEKEDKENISENDREYSGDAQVDKKPENDIVKSPQENLREPKRKRGRPPSIAPTAVDSNSQTLQPITLELRRRKISKGCEVPLKRPRLDKNSSQEKSKNYSENTDKDLSRRRSSRLSTNGTHEILDPDLVVSDLVDTDPLQDTLSSTKESEEGQLKSALEAGQVSSALTCHSFGDGSGAAGLELNCPSMGENTMKTEPTSPLVELQEISTVEVTNTFKKTDDFGSSNAPAVDLDHKFRCKVVDCLKFFRKAKLLHYHMKYFHGMEKSLEPEESPGKRHVQTRGPSASDKPSQETLTRKRVSASSPTTKDKEKNKEKKFKEFVRVKPKKKKKKKK

SEQ ID NO: 191218 - protein, 1012 aa, Artificial Sequence
  derived and/or modified sequence
MTKHPPNRRGISFEVGAQLEARDRLKNWYPAHIEDIDYEEGKVLIHFKRWNHRYDEWFCWDSPYLRPLEKIQLRKEGLHEEDGSSEFQINEQVLACWSDCRFYPAKVTAVNKDGTYTVKFYDGVVQTVKHIHVKAFSKDQNIVGNARPKETDHKSLSSSPDKREKFKEQRKATVNVKKDKEDKPLKTEKRPKQPDKEGKLICSEKGKVSEKSLPKNEKEDKENISENDREYSGDAQVDKKPENDIVKSPQENLREPKRKRGRPPSIAPTAVDSNSQTLQPITLELRRRKISKGCEVPLKRPRLDKNSSQEKSKNYSENTDKDLSRRRSSRLSTNGTHEILDPDLVVSDLVDTDPLQDTLSSTKESEEGQLKSALEAGQVSSALTCHSFGDGSGAAGLELNCPSMGENTMKTEPTSPLVELQEISTVEVTNTFKKTDDFGSSNAPAVDLDHKFRCKVVDCLKFFRKAKLLHYHMKYFHGMEKSLEPEESPGKRHVQTRGPSASDKPSQETLTRKRVSASSPTTKDKEKNKEKKFKEFVRVKPKKKKKKKKKTKPECPCSEEISDTSQEPSPPKAFAVTRCGSSHKPGVHMSPQLHGPESGHHKGKVKALEEDNLSESSSESFLWSDDEYGQDVDVTTNPDEELDGDDRYDFEVVRCICEVQEENDFMIQCEECQCWQHGVCMGLLEENVPEKYTCYVCQDPPGQRPGFKYWYDKEWLSRGHMHGLAFLEENYSHQNAKKIVATHQLLGDVQRVIEVLHGLQLKMSILQSREHPDLPLWCQPWKQHSGEGRSHFRNIPVTDTRSKEEAPSYRTLNGAVEKPRPLALPLPRSVEESYITSEHCYQKPRAYYPAVEQKLVVETRGSALDDAVNPLHENGDDSLSPRLGWPLDQDRSKGDSDPKPGSPKVKEYVSKKALPEEAPARKLLDRGGEGLLSSQHQWQFNLLTHVESLQDEVTHRMDSIEKELDVLESWLDYTGELEPPEPLARLPQLKHCIKQLLMDLGKVQQIALCCST

SEQ ID NO: 191219 - protein, 272 aa, Artificial Sequence
  derived and/or modified sequence
MTKHPPNRRGISFEVGAQLEARDRLKNWYPAHIEDIDYEEGKVLIHFKRWNHRYDEWFCWDSPYLRPLEKIQLRKEGLHEEDGSSEFQINEQVLACWSDCRFYPAKVTAVNKDGTYTVKFYDGVVQTVKHIHVKAFSKDQNIVGNARPKETDHKSLSSSPDKREKFKEQRKATVNVKKDKEDKPLKTEKRPKQPDKEGKLICSEKGKVSEKSLPKNEKEDKENISENDREYSGDAQKTRQTPFHSSYCCGFKLSNFATNNIGTEKKENIKRM

SEQ ID NO: 191220 - DNA, 1632 bp, Artificial Sequence
  derived and/or modified sequence
atgactaagcacccccctaataggcgaggcattagttttgaagtaggagcccagctcgaagcccgagacagactgaagaactggtacccagctcacatcgaagatattgattatgaagaaggtaaggttcttatccactttaaaaggtggaaccaccggtacgatgagtggttctgctgggattccccctacctgcggccacttgaaaaaatccaactcagaaaggagggcctgcacgaagaagatggctcctctgagtttcaaattaatgagcaggtacttgcctgttggtccgactgtcggttctatccagctaaggttacagccgtgaacaaagatggaacatatactgtgaaattctacgatggagtggtccaaacggtcaagcatattcatgttaaggccttcagcaaggaccagaacattgtcgggaatgcccggcccaaggagactgaccacaagtctctgagcagcagtcccgacaagagagagaaattcaaggagcagcgcaaggccacagtgaatgtgaagaaagataaggaagacaagccactcaagaccgagaagcggcctaagcagccagataaggaaggcaagctcatttgctctgaaaaaggaaaggtgtccgaaaaaagcttacctaagaatgagaaggaagataaggagaacatttccgagaacgatagagagtatagtggagatgcacaggttgataaaaaacccgaaaatgatatcgtgaaatctccgcaggaaaacctgcgtgagcctaaaaggaagcgcggccgacccccatcgattgcccctactgccgtggatagtaattcacagacattgcagccgatcacgttggagctccgacggagaaaaatttcaaaaggatgcgaagtgcctctgaagcgcccacggctcgacaaaaatagcagccaggaaaaaagcaagaactacagtgagaacacggacaaagacctttcacgacgacgatcaagcagattgtcaacgaacggaactcacgaaattctggaccccgatctggtcgtgtcggatctagtggataccgatcctctgcaagatacgcttagttcaacaaaggaaagtgaggagggtcagctgaagtcagccctggaggccggacaagtttcttctgccctgacctgccacagcttcggggatggctccggtgctgcaggcttggagcttaattgccctagtatgggcgaaaatactatgaagacagaacccacatcccccctagtggagctgcaggagattagtacagtggaggtgaccaatacgttcaagaaaacagacgattttggaagcagtaacgcgcctgccgtagatctggaccacaagttcaggtgcaaggtggtcgactgcttgaaattcttcaggaaggccaaactgctgcattaccatatgaaatactttcacggaatggagaaaagcctcgagcctgaggaaagtccaggcaaacgacatgtgcagacacgcgggcccagcgcctccgacaaaccgagtcaggaaacactcacaagaaaaagagtgtctgcgtcaagcccaacaactaaagataaggagaagaataaggagaagaaatttaaggagtttgtccgggtgaaacctaagaagtag

SEQ ID NO: 191221 - DNA, 1650 bp, Artificial Sequence
  derived and/or modified sequence
atgaccaagcacccacccaacagacgaggtatatcctttgaagttggagcgcaactggaggccagagatagactgaagaattggtacccggctcatatcgaagatattgattacgaagagggaaaggtcctgattcactttaagagatggaaccatagatatgatgaatggttctgttgggacagcccttacctgaggccgctggaaaaaatccagctgaggaaggagggcctgcatgaggaggatggatcaagcgaatttcagattaacgagcaggtcctagcctgctggtccgactgccgattctaccccgcgaaggtgacggccgttaataaggatggcacctacaccgttaagttctatgacggtgtagtgcagacagtgaagcatatacatgtcaaggcgttctccaaggatcaaaacattgtgggcaatgcacggccgaaggagactgaccataagtctctgtcaagctcccccgacaagagggagaagttcaaggaacagcgcaaagccacagtgaacgtgaagaaggacaaagaagacaagccgttgaagacagagaaaagacccaagcagcccgacaaggaaggaaagctcatttgctctgagaaggggaaagtcagcgaaaagagtttgccaaagaatgagaaagaagataaagagaacatatctgaaaacgaccgagagtacagcggcgacgcccaggtagacaaaaaacccgaaaacgatatcgttaagagcccgcaagaaaacctgagggagcccaagcggaaaagagggagaccgccatctattgcccccactgctgtcgacagcaatagccagaccctgcagccaatcacactagagctcagacggaggaaaatcagtaaaggctgtgaagtgcccttaaagcgccctcgcttagacaagaacagttcccaggaaaaatccaagaattattcagagaacacagacaaggacctctcccgccggcggagcagtaggctatccaccaatgggacccacgagatccttgatcctgaccttgttgtttcagacttggtagatactgaccccctccaggataccttgagctcaactaaagagagcgaggaaggccagttaaaatccgcccttgaagccggccaggtctcgtctgccctgacttgtcactcatttggtgacggcagcggagccgcaggcctcgagctgaactgtccctcaatgggggaaaacacaatgaagacggagcctacctcacccctggtggagctacaagagatcagcaccgtggaagtgactaatacattcaagaagacagatgattttggttctagtaacgcaccagccgttgacctcgatcacaaattccggtgcaaagtggtggactgccttaagttctttaggaaggccaagttgttgcactaccatatgaagtattttcacggaatggaaaagagtttggaaccagaagaaagtccagggaaacgacatgtgcagaccagagggcccagtgcctccgacaagcctagccaggaaactctcacgaggaagcgcgtatcagcctctagcccaacgacaaaggataaagagaaaaacaaagaaaaaaagtttaaagagttcgtgcgcgtgaagcctaagaagaagaagaagaagaaaaaatag

SEQ ID NO: 191222 - DNA, 3039 bp, Artificial Sequence
  derived and/or modified sequence
atgacgaagcaccctcccaatagacgggggatttcattcgaggttggcgctcagctggaagctcgggatagacttaagaactggtaccccgcccacatcgaagacatcgattacgaagagggtaaagtactgatccatttcaagcgttggaaccaccgctatgatgagtggttttgttgggatagtccatatcttagacctttagaaaagatacagctgagaaaagaggggctccatgaggaagacggttctagcgaatttcagatcaacgaacaggtgctcgcctgctggagcgactgccggttctaccccgcaaaggtcaccgccgtgaacaaagatggcacctacacagtgaagttctatgatggggttgttcagacagtaaagcacatccacgtaaaggcatttagcaaagaccagaacatcgtgggcaatgcccgacccaaggagacggaccacaagagcctgtcaagctctcctgacaaacgcgagaaattcaaggagcagcggaaggccaccgtaaatgtcaagaaagataaagaagacaagcctctgaagacagagaaaaggccaaagcagccagataaggaaggtaaactgatctgctcggagaagggaaaggtgtccgagaagagccttccgaagaacgaaaaggaagacaaggagaatattagtgagaacgaccgagaatatagcggcgacgcccaggtcgacaaaaaacctgaaaatgacattgtcaagtcgccccaggaaaaccttcgggagcctaaacgcaaaaggggtagaccgccttccatcgctccgacagccgtcgatagcaatagccagacactccaacccattacactggaattacgcaggaggaaaatctccaaaggctgtgaagtgccccttaagcgcccccgcttggataagaactcaagtcaggaaaagtcaaagaactactccgaaaatacagacaaagatctctctaggcggaggagcagccggttaagcaccaacggcacccacgagatccttgaccccgacttggtggtatcagatctggtggacaccgacccattacaggacaccttgtcctcgactaaagagtccgaggagggccaactgaagtcagctctggaggcaggacaagtgtcctcagctctgacgtgccacagctttggagatggctcaggtgccgcggggctggagctcaactgtccttctatgggtgaaaatacaatgaaaactgagccaacatccccactagtagagctccaggagatatctaccgtagaggtcactaatacattcaagaaaacagatgatttcggcagcagcaatgctcccgccgtcgacttagaccataaattccggtgcaaggtggtcgattgcctcaagtttttccggaaagcgaagcttcttcactaccatatgaaatacttccatgggatggaaaaatcccttgagccagaagagagccctgggaagaggcacgtgcagacccggggaccttcagcttccgataaacccagtcaggagactctgacccgaaagcgggtgtctgcgagcagccccaccacaaaagataaggagaaaaacaaagaaaagaagtttaaggagttcgtgcgcgttaaacctaagaaaaagaagaaaaagaaaaagaagactaaacccgagtgtccctgttccgaggaaatctccgatacctctcaggagccctctcctccaaaggcctttgcggtcactcgctgtgggtcctcacacaagcctggagtgcatatgagtccgcagctgcacgggccagaatcaggacatcacaagggaaaggtcaaggctctggaagaagataatctcagcgaatcctcaagtgaaagtttcctctggtctgacgacgaatacggtcaggacgtcgatgtaaccaccaaccctgacgaggagctagatggcgatgacaggtacgatttcgaagtggtccgttgcatttgcgaagttcaggaagaaaatgacttcatgatacagtgtgaggagtgtcagtgttggcagcatggtgtctgtatgggactgctggaagagaacgtgccggagaagtacacatgctacgtgtgccaagacccacccggtcaacgcccagggttcaagtactggtacgataaagaatggctgtcacggggccatatgcatggtctagcttttcttgaagaaaattacagtcatcagaatgccaaaaagatcgtggccactcaccagctgctgggcgatgtccagcgggtgatagaggtcttacacggcctccaattgaagatgagcatactccagtcccgcgaacaccccgatttacctctatggtgccagccttggaaacagcactctggagaaggccgttcacattttagaaatatcccggtgaccgacacgaggtcaaaagaggaggccccttcatataggacgctcaacggggccgttgagaaacctcggcccttagcattgcccctaccaaggagcgttgaagagtcatatatcacatctgaacattgctaccaaaagccccgggcatattacccagcagttgagcagaagttggtggtagagaccagaggctctgcactggacgacgcggtaaaccccctccacgagaacggcgacgatagtctcagcccacggctgggctggccactggatcaagacaggtccaagggggacagtgacccaaaaccagggtctcccaaggtaaaggagtatgtctctaagaaagctctgcctgaagaagcacctgccagaaaactgctggaccgcggaggcgaaggtctgctgagtagtcagcaccagtggcagttcaacctgctgacacatgtcgagtcacttcaagacgaggttacacaccggatggacagtatagagaaggaactggacgttttggaatcttggttagactatactggagagctggaacctcccgagccactggcgcgacttccccagctgaaacactgcatcaagcaattgttgatggacctgggaaaggttcagcagattgccctatgttgctccacatag

SEQ ID NO: 191223 - DNA, 1997 bp, Artificial Sequence
  derived and/or modified sequence
agagtccttctgtcggttggtcctggagcggcgcagccggagtggggccgtgaggctggaatgcagtgacatcatctcagagctgactgcaacctctgcctcctggattcaagcaattctcctgcctcagcctcccgagtagctaggattacaggcggatgccaccatgcccggctaatttttgtatttttggaagagatgggttttcaccatattcgccaagctagtcttgaactcctgacctcaagtgatccactctcctcggcctcccaaagtgctaggattacaggccactgtgcctggccaagaggtcacttttcatgtccaggctgcatggagaataaaggcagccccgttgatgactgaaaatgacaaagcatccacctaacagacgaggaatcagctttgaagtgggagcccagttggaagcccgggaccgtttaaaaaactggtatccagctcacatagaagacattgactacgaggaaggaaaagtactcatccatttcaagcgttggaaccatcgttatgatgagtggttctgctgggacagtccttatttacgccctttagagaaaatacagctgaggaaagagggcttgcatgaagaggatggatcttctgaatttcaaataaatgagcaggtccttgcttgctggtctgattgtcgtttttacccggccaaagtcactgctgttaacaaggatggtacttacactgtgaaattttatgatggagtagttcagactgtcaaacatattcatgtcaaagctttttccaaagatcagaatattgtgggtaatgctaggcctaaagaaacagatcacaaaagtctttcatcatctcctgataaacgagagaagtttaaagaacagagaaaagcaacagtgaatgtgaagaaagacaaagaagataaacccttaaagacagaaaagcgacccaagcagcctgataaagaaggaaagttaatctgttctgaaaaggggaaagtgtcagagaaaagtcttcccaagaacgagaaggaagacaaggaaaacatttccgaaaatgacagagagtattctggagatgcccaagtggataagaaacctgaaaatgacattgtgaagagtccacaagaaaacttgagggaacccaaaagaaaacgaggcagacccccttccatagctcctactgctgtggattcaaactctcaaactttgcaaccaataacattggaactgagaagaaggaaaatatcaaaaggatgtgaagtcccattaaaacgtcctcggcttgacaaaaattcatcccaggaaaagtcaaaaaactactcggaaaacactgacaaagacttatcgaggagacgttcctccaggctgtccactaatgggacccatgagatcctagatcctgacttggttgtatcagatttggttgatacggatcctttgcaagacacgttgtctagtaccaaggaatctgaagaaggtcagttgaagtctgctttggaagctggccaggtctcatctgcactgacttgccactcctttggggatggatccggggctgcaggcttggagttgaactgcccatcaatgggagaaaacacgatgaaaacagaaccgacttctccccttgtggaattacaagagatttcgactgtggaagtaacaaatacttttaagaaaacagatgattttgggtcatctaatgcaccagctgtcgacctagaccataagtttagatgcaaagttgtggactgtttaaaatttttccgcaaagccaaactgttgcactatcacatgaagtatttccatggaatggagaagtcactggagccagaagagagcccgggaaagaggcatgtccaaaccaggggcccttcagcttcagacaagcccagccaggagaccctgaccaggaagcgggtctctgccagttccccaactacaaaagacaaggaaaagaataaagagaagaaattcaaggagtttgtgagagtgaagccaaagaag

SEQ ID NO: 191224 - DNA, 1814 bp, Artificial Sequence
  derived and/or modified sequence
agagtccttctgtcggttggtcctggagcggcgcagccggagtggggccgtgagcacgagtacacgagacaggattgagaaaggagagattcaaattgtgacttcagattcaaaggcaattaaaggaattaaacgagaataaaggcagccccgttgatgactgaaaatgacaaagcatccacctaacagacgaggaatcagctttgaagtgggagcccagttggaagcccgggaccgtttaaaaaactggtatccagctcacatagaagacattgactacgaggaaggaaaagtactcatccatttcaagcgttggaaccatcgttatgatgagtggttctgctgggacagtccttatttacgccctttagagaaaatacagctgaggaaagagggcttgcatgaagaggatggatcttctgaatttcaaataaatgagcaggtccttgcttgctggtctgattgtcgtttttacccggccaaagtcactgctgttaacaaggatggtacttacactgtgaaattttatgatggagtagttcagactgtcaaacatattcatgtcaaagctttttccaaagatcagaatattgtgggtaatgctaggcctaaagaaacagatcacaaaagtctttcatcatctcctgataaacgagagaagtttaaagaacagagaaaagcaacagtgaatgtgaagaaagacaaagaagataaacccttaaagacagaaaagcgacccaagcagcctgataaagaaggaaagttaatctgttctgaaaaggggaaagtgtcagagaaaagtcttcccaagaacgagaaggaagacaaggaaaacatttccgaaaatgacagagagtattctggagatgcccaagtggataagaaacctgaaaatgacattgtgaagagtccacaagaaaacttgagggaacccaaaagaaaacgaggcagacccccttccatagctcctactgctgtggattcaaactctcaaactttgcaaccaataacattggaactgagaagaaggaaaatatcaaaaggatgtgaagtcccattaaaacgtcctcggcttgacaaaaattcatcccaggaaaagtcaaaaaactactcggaaaacactgacaaagacttatcgaggagacgttcctccaggctgtccactaatgggacccatgagatcctagatcctgacttggttgtatcagatttggttgatacggatcctttgcaagacacgttgtctagtaccaaggaatctgaagaaggtcagttgaagtctgctttggaagctggccaggtctcatctgcactgacttgccactcctttggggatggatccggggctgcaggcttggagttgaactgcccatcaatgggagaaaacacgatgaaaacagaaccgacttctccccttgtggaattacaagagatttcgactgtggaagtaacaaatacttttaagaaaacagatgattttgggtcatctaatgcaccagctgtcgacctagaccataagtttagatgcaaagttgtggactgtttaaaatttttccgcaaagccaaactgttgcactatcacatgaagtatttccatggaatggagaagtcactggagccagaagagagcccgggaaagaggcatgtccaaaccaggggcccttcagcttcagacaagcccagccaggagaccctgaccaggaagcgggtctctgccagttccccaactacaaaagacaaggaaaagaataaagagaagaaattcaaggagtttgtgagagtgaagccaaagaagaaaaagaaaaagaaaaaga

SEQ ID NO: 191225 - DNA, 5922 bp, Artificial Sequence
  derived and/or modified sequence
atacgctgggcgcgtcccgggggtcacgtggtgcagagcacgcagagtccttctgtcggttggtcctggagcggcgcagccggagtggggccgtgaggagaataaaggcagccccgttgatgactgaaaatgacaaagcatccacctaacagacgaggaatcagctttgaagtgggagcccagttggaagcccgggaccgtttaaaaaactggtatccagctcacatagaagacattgactacgaggaaggaaaagtactcatccatttcaagcgttggaaccatcgttatgatgagtggttctgctgggacagtccttatttacgccctttagagaaaatacagctgaggaaagagggcttgcatgaagaggatggatcttctgaatttcaaataaatgagcaggtccttgcttgctggtctgattgtcgtttttacccggccaaagtcactgctgttaacaaggatggtacttacactgtgaaattttatgatggagtagttcagactgtcaaacatattcatgtcaaagctttttccaaagatcagaatattgtgggtaatgctaggcctaaagaaacagatcacaaaagtctttcatcatctcctgataaacgagagaagtttaaagaacagagaaaagcaacagtgaatgtgaagaaagacaaagaagataaacccttaaagacagaaaagcgacccaagcagcctgataaagaaggaaagttaatctgttctgaaaaggggaaagtgtcagagaaaagtcttcccaagaacgagaaggaagacaaggaaaacatttccgaaaatgacagagagtattctggagatgcccaagtggataagaaacctgaaaatgacattgtgaagagtccacaagaaaacttgagggaacccaaaagaaaacgaggcagacccccttccatagctcctactgctgtggattcaaactctcaaactttgcaaccaataacattggaactgagaagaaggaaaatatcaaaaggatgtgaagtcccattaaaacgtcctcggcttgacaaaaattcatcccaggaaaagtcaaaaaactactcggaaaacactgacaaagacttatcgaggagacgttcctccaggctgtccactaatgggacccatgagatcctagatcctgacttggttgtatcagatttggttgatacggatcctttgcaagacacgttgtctagtaccaaggaatctgaagaaggtcagttgaagtctgctttggaagctggccaggtctcatctgcactgacttgccactcctttggggatggatccggggctgcaggcttggagttgaactgcccatcaatgggagaaaacacgatgaaaacagaaccgacttctccccttgtggaattacaagagatttcgactgtggaagtaacaaatacttttaagaaaacagatgattttgggtcatctaatgcaccagctgtcgacctagaccataagtttagatgcaaagttgtggactgtttaaaatttttccgcaaagccaaactgttgcactatcacatgaagtatttccatggaatggagaagtcactggagccagaagagagcccgggaaagaggcatgtccaaaccaggggcccttcagcttcagacaagcccagccaggagaccctgaccaggaagcgggtctctgccagttccccaactacaaaagacaaggaaaagaataaagagaagaaattcaaggagtttgtgagagtgaagccaaagaagaaaaagaaaaagaaaaagaaaaccaaacctgaatgcccctgcagtgaggagatcagtgacacctcccaggaaccttctccacccaaggcatttgctgttaccaggtgtgggtcctcacacaagccaggggtccatatgagcccgcagcttcatggcccagaatctggacaccacaaagggaaagtgaaagcattggaggaggataatttgagtgagtcctcttctgagagctttctctggagtgatgatgagtatggccaagatgtggatgtgaccaccaacccagatgaggaacttgatggggatgaccgctatgacttcgaggtggtccgctgcatctgtgaggtccaggaggaaaatgacttcatgattcagtgtgaagagtgccagtgctggcagcatggggtctgcatgggattactggaagaaaatgtgcccgagaaatacacctgttatgtttgccaagaccctccaggtcagaggcctggcttcaagtactggtatgacaaggagtggctgagcaggggacatatgcatggcctggcatttctagaagagaactactcccatcagaatgccaagaagatcgtggccacccaccagcttcttggtgatgtgcagagagtgattgaggttctgcatggcctgcagctcaagatgagcatcttgcaaagccgggagcatcctgatctgccgctgtggtgccagccttggaaacagcactcaggggaggggagatctcatttcagaaacatccctgtcactgacaccaggagcaaggaggaagctccaagctatagaactttgaacggggcagtggagaagcccaggcccctggccctgcccctgccgcgttctgtggaggaatcctatatcaccagtgagcattgctaccagaagccccgcgcctattaccctgccgtggagcagaagctggtggtggagacgaggggctctgccctcgacgatgcggtcaaccccctccatgagaacggcgatgattccctttccccgcgcctgggctggcctctagaccaagacaggagcaagggggacagtgaccccaaacccggctccccaaaggtgaaggaatatgtctccaaaaaggccctaccagaagaagcccctgctcggaagctgctggacagaggtggagaggggctgctgagctcccagcaccagtggcagtttaacctgctgacccatgtggaatctcttcaggatgaagttacgcacaggatggactccattgagaaggagttggatgtgttggagagctggctggactacactggggaactggagccccctgagccgctggccaggcttccgcagctcaagcattgtatcaagcagctgctgatggacctgggcaaggtgcagcagatcgccctctgctgctcaacatgaaactgggcacccaaaactcatgggggcacaatcctggggcacctgcaggaggagcttcgcatatttaaataaataaacctagcatgctgaatgcacgtgacaccgactgacttcagggatctgggccaggagtgtggtggacattggacaaagaggccattttggctgcgggaggacactctgatctcgaagcctgccataaaggtagcaaatagactcttgggattcccctcttctgtgcacatcgttgaatgaagagagtctttttgcacaaacttcacttgaaattgtgccactgatgataaacggaatgagagccaaaaaagtttagttggagacagttgtaaattcaatttggagtttatttaattgacttttctatcacgttggggcacatgccaactccctggtttcttcctggcatggtgtttgggcagcaggcatcattttccttttctagcttcataggaatattgtgagctcaccatgctgtggaggttgggaaagagcagagtcttggctgccctgctttctccttaggactcttcacttttctcaccacatctcttgcatgacttcatggtactggggacaagtttgtatgccttcaccccagagctggctgggttatggcttttgtagcagagcccatacagcctatggaagaactagaatctcactcacagtaataagaatctaggaggaattccaaaccgaagcaggcagggtctggaacccaaaggacagcattttctacccacttcttaatattgacagcttccccgttctatttaatgtccaaaaatgtttcccaaaatttcaaactctttcactgtaaagatttgttacaaagaatgtggtttggggaattaccttattttatattgttgtaaacaaacttcaaattctacatgtgcgacttttctccttcctgaagggtgtttagtagtcagcgttttcagaattgttttgttactatactttaacattttacatttcctgtttgtattattttgtgagagcaaggtgatcatgctgcttaaggtccaggtacaacctatttgtaccttttgagacaatatttgtgttacttttgcaggttacggttccacatgtaattgctatattttgttttgtttttccttactaggcaaagttaaaatgttccatgctttgaggagtgacccatttcactactttgttttcttatcactaaaggcaaaaatcaaagcacagttgtccattaacacttataagttaattatgggtttatgagtctgtaatgttatatgctgcaaacatttactatgtaaacgtgaagtagccaataatatctcaatagtagtaacagtatctttagcgacctttggaatagttaagcacaggtcattgtggacatgaattcaggcctctgtactaaaatctatttcagggaatgttctgtctagtgatttgctcaccatttgatatataatgaattataggacaagtataagctgatctgctatagctgtccatcagagagaatacacgtggctataacatctataacaaaacgacgattcctctacaagaggctgtttctcactgctaacgttggtgtttctggcgtgggaagaaatgcacaggcgtgcatggcatgcacgttcagacagctgcattgtaagagttctgtcatgcagtctgaaaagggaagaaacaggatggctttctgtagccacacctgtgaggcgtgatgattgttgtattattagattactgatttttcttttctgaaaatacatttgagttttaatcacatctgtggaagctgtaacttttaaggtagtcaatttcatgtcttgttcaacgatgtaagcagaaactgaattgccctaattttgccaactggccattattgggattattgtttaaatttttggtaaaggaagtaatctcctttcattcattgtgacttttgttcttagggaagcagagaagactccccaagttcttataacctcattgtgcttccctaatttaaagccatgttgaggggctccattcccaattcctgggtcaaggtgaattaaccctatgttggagcactggaaaccgttatttgcaaacattgctgttaccatttagaaatatgtgcactatcagctgggtgcagtggctcacgtctgtaatcccagcactttgggaggccgaggcaggtggatcacctgaggtcaggagttcgagaccagcctggccaacagggtgaaaccccgtctctactaaaagtacaaaaattagctgggcgtggtggcggacgcctgtaatctcagctacttgggaggctgaagcaggagaggtgctggaacctgggaggcggaggttgaagtgagccgagattgcgctattgcactccagctcgggcgacaactgcaagactccatctcaaaaaaataaaaataaaagaaaagaaagaaatatgtgcactacctaagttttgtctttagaaaaactatccacctataaaaaattaccttgacaaaaatagttccggtttgactaatcattttgtttctttaagtggtaagtgtatgcaaggtggatccttgatgagccaacattgcactgtggatacatatctatgtttacgcgctattagaacagaaggcgctgtatatagaaatgttgctttgaagcaatatttgcaaaacacgcagacttctgtatctgtatttggaaaaaataaaacaggttcttgttgctatgtttcagtta

SEQ ID NO: 191226 - DNA, 5824 bp, Artificial Sequence
  derived and/or modified sequence
gggggtcacgtggtgcagagcacgcagagtccttctgtcggttggtcctggagcggcgcagccggagtggggccgtgaggagaataaaggcagccccgttgatgactgaaaatgacaaagcatccacctaacagacgaggaatcagctttgaagtgggagcccagttggaagcccgggaccgtttaaaaaactggtatccagctcacatagaagacattgactacgaggaaggaaaagtactcatccatttcaagcgttggaaccatcgttatgatgagtggttctgctgggacagtccttatttacgccctttagagaaaatacagctgaggaaagagggcttgcatgaagaggatggatcttctgaatttcaaataaatgagcaggtccttgcttgctggtctgattgtcgtttttacccggccaaagtcactgctgttaacaaggatggtacttacactgtgaaattttatgatggagtagttcagactgtcaaacatattcatgtcaaagctttttccaaagatcagaatattgtgggtaatgctaggcctaaagaaacagatcacaaaagtctttcatcatctcctgataaacgagagaagtttaaagaacagagaaaagcaacagtgaatgtgaagaaagacaaagaagataaacccttaaagacagaaaagcgacccaagcagcctgataaagaaggaaagttaatctgttctgaaaaggggaaagtgtcagagaaaagtcttcccaagaacgagaaggaagacaaggaaaacatttccgaaaatgacagagagtattctggagatgcccaaaaaacgaggcagacccccttccatagctcctactgctgtggattcaaactctcaaactttgcaaccaataacattggaactgagaagaaggaaaatatcaaaaggatgtgaagtcccattaaaacgtcctcggcttgacaaaaattcatcccaggaaaagtcaaaaaactactcggaaaacactgacaaagacttatcgaggagacgttcctccaggctgtccactaatgggacccatgagatcctagatcctgacttggttgtatcagatttggttgatacggatcctttgcaagacacgttgtctagtaccaaggaatctgaagaaggtcagttgaagtctgctttggaagctggccaggtctcatctgcactgacttgccactcctttggggatggatccggggctgcaggcttggagttgaactgcccatcaatgggagaaaacacgatgaaaacagaaccgacttctccccttgtggaattacaagagatttcgactgtggaagtaacaaatacttttaagaaaacagatgattttgggtcatctaatgcaccagctgtcgacctagaccataagtttagatgcaaagttgtggactgtttaaaatttttccgcaaagccaaactgttgcactatcacatgaagtatttccatggaatggagaagtcactggagccagaagagagcccgggaaagaggcatgtccaaaccaggggcccttcagcttcagacaagcccagccaggagaccctgaccaggaagcgggtctctgccagttccccaactacaaaagacaaggaaaagaataaagagaagaaattcaaggagtttgtgagagtgaagccaaagaagaaaaagaaaaagaaaaagaaaaccaaacctgaatgcccctgcagtgaggagatcagtgacacctcccaggaaccttctccacccaaggcatttgctgttaccaggtgtgggtcctcacacaagccaggggtccatatgagcccgcagcttcatggcccagaatctggacaccacaaagggaaagtgaaagcattggaggaggataatttgagtgagtcctcttctgagagctttctctggagtgatgatgagtatggccaagatgtggatgtgaccaccaacccagatgaggaacttgatggggatgaccgctatgacttcgaggtggtccgctgcatctgtgaggtccaggaggaaaatgacttcatgattcagtgtgaagagtgccagtgctggcagcatggggtctgcatgggattactggaagaaaatgtgcccgagaaatacacctgttatgtttgccaagaccctccaggtcagaggcctggcttcaagtactggtatgacaaggagtggctgagcaggggacatatgcatggcctggcatttctagaagagaactactcccatcagaatgccaagaagatcgtggccacccaccagcttcttggtgatgtgcagagagtgattgaggttctgcatggcctgcagctcaagatgagcatcttgcaaagccgggagcatcctgatctgccgctgtggtgccagccttggaaacagcactcaggggaggggagatctcatttcagaaacatccctgtcactgacaccaggagcaaggaggaagctccaagctatagaactttgaacggggcagtggagaagcccaggcccctggccctgcccctgccgcgttctgtggaggaatcctatatcaccagtgagcattgctaccagaagccccgcgcctattaccctgccgtggagcagaagctggtggtggagacgaggggctctgccctcgacgatgcggtcaaccccctccatgagaacggcgatgattccctttccccgcgcctgggctggcctctagaccaagacaggagcaagggggacagtgaccccaaacccggctccccaaaggtgaaggaatatgtctccaaaaaggccctaccagaagaagcccctgctcggaagctgctggacagaggtggagaggggctgctgagctcccagcaccagtggcagtttaacctgctgacccatgtggaatctcttcaggatgaagttacgcacaggatggactccattgagaaggagttggatgtgttggagagctggctggactacactggggaactggagccccctgagccgctggccaggcttccgcagctcaagcattgtatcaagcagctgctgatggacctgggcaaggtgcagcagatcgccctctgctgctcaacatgaaactgggcacccaaaactcatgggggcacaatcctggggcacctgcaggaggagcttcgcatatttaaataaataaacctagcatgctgaatgcacgtgacaccgactgacttcagggatctgggccaggagtgtggtggacattggacaaagaggccattttggctgcgggaggacactctgatctcgaagcctgccataaaggtagcaaatagactcttgggattcccctcttctgtgcacatcgttgaatgaagagagtctttttgcacaaacttcacttgaaattgtgccactgatgataaacggaatgagagccaaaaaagtttagttggagacagttgtaaattcaatttggagtttatttaattgacttttctatcacgttggggcacatgccaactccctggtttcttcctggcatggtgtttgggcagcaggcatcattttccttttctagcttcataggaatattgtgagctcaccatgctgtggaggttgggaaagagcagagtcttggctgccctgctttctccttaggactcttcacttttctcaccacatctcttgcatgacttcatggtactggggacaagtttgtatgccttcaccccagagctggctgggttatggcttttgtagcagagcccatacagcctatggaagaactagaatctcactcacagtaataagaatctaggaggaattccaaaccgaagcaggcagggtctggaacccaaaggacagcattttctacccacttcttaatattgacagcttccccgttctatttaatgtccaaaaatgtttcccaaaatttcaaactctttcactgtaaagatttgttacaaagaatgtggtttggggaattaccttattttatattgttgtaaacaaacttcaaattctacatgtgcgacttttctccttcctgaagggtgtttagtagtcagcgttttcagaattgttttgttactatactttaacattttacatttcctgtttgtattattttgtgagagcaaggtgatcatgctgcttaaggtccaggtacaacctatttgtaccttttgagacaatatttgtgttacttttgcaggttacggttccacatgtaattgctatattttgttttgtttttccttactaggcaaagttaaaatgttccatgctttgaggagtgacccatttcactactttgttttcttatcactaaaggcaaaaatcaaagcacagttgtccattaacacttataagttaattatgggtttatgagtctgtaatgttatatgctgcaaacatttactatgtaaacgtgaagtagccaataatatctcaatagtagtaacagtatctttagcgacctttggaatagttaagcacaggtcattgtggacatgaattcaggcctctgtactaaaatctatttcagggaatgttctgtctagtgatttgctcaccatttgatatataatgaattataggacaagtataagctgatctgctatagctgtccatcagagagaatacacgtggctataacatctataacaaaacgacgattcctctacaagaggctgtttctcactgctaacgttggtgtttctggcgtgggaagaaatgcacaggcgtgcatggcatgcacgttcagacagctgcattgtaagagttctgtcatgcagtctgaaaagggaagaaacaggatggctttctgtagccacacctgtgaggcgtgatgattgttgtattattagattactgatttttcttttctgaaaatacatttgagttttaatcacatctgtggaagctgtaacttttaaggtagtcaatttcatgtcttgttcaacgatgtaagcagaaactgaattgccctaattttgccaactggccattattgggattattgtttaaatttttggtaaaggaagtaatctcctttcattcattgtgacttttgttcttagggaagcagagaagactccccaagttcttataacctcattgtgcttccctaatttaaagccatgttgaggggctccattcccaattcctgggtcaaggtgaattaaccctatgttggagcactggaaaccgttatttgcaaacattgctgttaccatttagaaatatgtgcactatcagctgggtgcagtggctcacgtctgtaatcccagcactttgggaggccgaggcaggtggatcacctgaggtcaggagttcgagaccagcctggccaacagggtgaaaccccgtctctactaaaagtacaaaaattagctgggcgtggtggcggacgcctgtaatctcagctacttgggaggctgaagcaggagaggtgctggaacctgggaggcggaggttgaagtgagccgagattgcgctattgcactccagctcgggcgacaactgcaagactccatctcaaaaaaataaaaataaaagaaaagaaagaaatatgtgcactacctaagttttgtctttagaaaaactatccacctataaaaaattaccttgacaaaaatagttccggtttgactaatcattttgtttctttaagtggtaagtgtatgcaaggtggatccttgatgagccaacattgcactgtggatacatatctatgtttacgcgctattagaacagaaggcgctgtatatagaaatgttgctttgaagcaatatttgcaaaacacgcagacttctgtatctgtatttggaaaaaataaaacaggttcttgtt

SEQ ID NO: 191227 - DNA, 1632 bp, Artificial Sequence
  derived and/or modified sequence
atgaccaagcacccccccaacagaagaggcatcagctttgaggtgggcgcccagctggaggcccgggaccggctgaagaactggtacccagcccacatcgaggacatcgactatgaggagggcaaggtgctgatccacttcaagcgctggaaccacagatatgatgagtggttctgctgggacagcccctacctgcggcccctggagaagatccagctgaggaaggagggcctgcatgaagaagatggcagcagcgagttccagatcaatgagcaggtgctggcctgctggagcgactgccgcttctacccagccaaggtgacagctgtgaacaaggatggcacctacacagtgaagttctatgatggagtggtgcagacagtgaagcacatccacgtgaaggccttcagcaaggaccagaacatcgtgggcaatgcccggcccaaggagacagaccacaagagcctgagcagcagcccagacaagcgggagaagttcaaggagcagaggaaggccaccgtgaatgtgaagaaggacaaggaggacaagcccctgaagacagagaagaggcccaagcagcctgacaaggagggcaagctgatctgcagcgagaagggcaaggtgtctgagaagagcctgcccaagaatgagaaggaggacaaggagaacatcagtgaaaatgaccgggagtacagcggagatgcccaggtggacaagaagccagaaaatgacatcgtgaagagcccccaggagaacctgcgggagcccaagaggaagaggggccggcccccatccatcgcccccacagctgtggacagcaacagccagaccctgcagcccatcaccctggagctgcggcggaggaagatcagcaagggctgtgaggtgcccctgaagaggccccggctggacaagaacagcagccaggagaagagcaagaactacagtgaaaatacagacaaggacctgagcagaagaagaagcagccggctgagcaccaacggcacccatgagatcctggaccctgacctggtggtgtctgacctggtggacacagaccccctgcaggacaccctgagcagcaccaaggagagcgaggagggccagctgaagagcgccctggaggccggccaggtgtcctctgccctgacctgccacagctttggagatggcagcggggctgctggcctggagctgaactgccccagcatgggagagaacaccatgaagacagagcccaccagccccctggtggagctgcaggagatcagcacagtggaggtgaccaacaccttcaagaagacagatgactttggcagcagcaatgccccagctgtggacctggaccacaagttccgctgcaaggtggtggactgcctgaagttcttcaggaaggccaagctgctgcactaccacatgaagtacttccacggcatggagaagagcctggagcctgaggagagccctgggaagagacatgtgcagacccggggccccagcgccagtgacaagcccagccaggagaccctgaccaggaagagggtgtctgccagcagccccaccaccaaggacaaggagaagaacaaggagaagaagttcaaggagtttgtgcgggtgaagcccaagaagtag

SEQ ID NO: 191228 - DNA, 1650 bp, Artificial Sequence
  derived and/or modified sequence
atgaccaagcacccccccaacagaagaggcatcagctttgaggtgggcgcccagctggaggcccgggaccggctgaagaactggtacccagcccacatcgaggacatcgactatgaggagggcaaggtgctgatccacttcaagcgctggaaccacagatatgatgagtggttctgctgggacagcccctacctgcggcccctggagaagatccagctgaggaaggagggcctgcatgaagaagatggcagcagcgagttccagatcaatgagcaggtgctggcctgctggagcgactgccgcttctacccagccaaggtgacagctgtgaacaaggatggcacctacacagtgaagttctatgatggagtggtgcagacagtgaagcacatccacgtgaaggccttcagcaaggaccagaacatcgtgggcaatgcccggcccaaggagacagaccacaagagcctgagcagcagcccagacaagcgggagaagttcaaggagcagaggaaggccaccgtgaatgtgaagaaggacaaggaggacaagcccctgaagacagagaagaggcccaagcagcctgacaaggagggcaagctgatctgcagcgagaagggcaaggtgtctgagaagagcctgcccaagaatgagaaggaggacaaggagaacatcagtgaaaatgaccgggagtacagcggagatgcccaggtggacaagaagccagaaaatgacatcgtgaagagcccccaggagaacctgcgggagcccaagaggaagaggggccggcccccatccatcgcccccacagctgtggacagcaacagccagaccctgcagcccatcaccctggagctgcggcggaggaagatcagcaagggctgtgaggtgcccctgaagaggccccggctggacaagaacagcagccaggagaagagcaagaactacagtgaaaatacagacaaggacctgagcagaagaagaagcagccggctgagcaccaacggcacccatgagatcctggaccctgacctggtggtgtctgacctggtggacacagaccccctgcaggacaccctgagcagcaccaaggagagcgaggagggccagctgaagagcgccctggaggccggccaggtgtcctctgccctgacctgccacagctttggagatggcagcggggctgctggcctggagctgaactgccccagcatgggagagaacaccatgaagacagagcccaccagccccctggtggagctgcaggagatcagcacagtggaggtgaccaacaccttcaagaagacagatgactttggcagcagcaatgccccagctgtggacctggaccacaagttccgctgcaaggtggtggactgcctgaagttcttcaggaaggccaagctgctgcactaccacatgaagtacttccacggcatggagaagagcctggagcctgaggagagccctgggaagagacatgtgcagacccggggccccagcgccagtgacaagcccagccaggagaccctgaccaggaagagggtgtctgccagcagccccaccaccaaggacaaggagaagaacaaggagaagaagttcaaggagtttgtgcgggtgaagcccaagaagaagaagaagaagaagaagtag

SEQ ID NO: 191229 - DNA, 3039 bp, Artificial Sequence
  derived and/or modified sequence
atgaccaagcacccccccaacagaagaggcatcagctttgaggtgggcgcccagctggaggcccgggaccggctgaagaactggtacccagcccacatcgaggacatcgactatgaggagggcaaggtgctgatccacttcaagcgctggaaccacagatatgatgagtggttctgctgggacagcccctacctgcggcccctggagaagatccagctgaggaaggagggcctgcatgaagaagatggcagcagcgagttccagatcaatgagcaggtgctggcctgctggagcgactgccgcttctacccagccaaggtgacagctgtgaacaaggatggcacctacacagtgaagttctatgatggagtggtgcagacagtgaagcacatccacgtgaaggccttcagcaaggaccagaacatcgtgggcaatgcccggcccaaggagacagaccacaagagcctgagcagcagcccagacaagcgggagaagttcaaggagcagaggaaggccaccgtgaatgtgaagaaggacaaggaggacaagcccctgaagacagagaagaggcccaagcagcctgacaaggagggcaagctgatctgcagcgagaagggcaaggtgtctgagaagagcctgcccaagaatgagaaggaggacaaggagaacatcagtgaaaatgaccgggagtacagcggagatgcccaggtggacaagaagccagaaaatgacatcgtgaagagcccccaggagaacctgcgggagcccaagaggaagaggggccggcccccatccatcgcccccacagctgtggacagcaacagccagaccctgcagcccatcaccctggagctgcggcggaggaagatcagcaagggctgtgaggtgcccctgaagaggccccggctggacaagaacagcagccaggagaagagcaagaactacagtgaaaatacagacaaggacctgagcagaagaagaagcagccggctgagcaccaacggcacccatgagatcctggaccctgacctggtggtgtctgacctggtggacacagaccccctgcaggacaccctgagcagcaccaaggagagcgaggagggccagctgaagagcgccctggaggccggccaggtgtcctctgccctgacctgccacagctttggagatggcagcggggctgctggcctggagctgaactgccccagcatgggagagaacaccatgaagacagagcccaccagccccctggtggagctgcaggagatcagcacagtggaggtgaccaacaccttcaagaagacagatgactttggcagcagcaatgccccagctgtggacctggaccacaagttccgctgcaaggtggtggactgcctgaagttcttcaggaaggccaagctgctgcactaccacatgaagtacttccacggcatggagaagagcctggagcctgaggagagccctgggaagagacatgtgcagacccggggccccagcgccagtgacaagcccagccaggagaccctgaccaggaagagggtgtctgccagcagccccaccaccaaggacaaggagaagaacaaggagaagaagttcaaggagtttgtgcgggtgaagcccaagaagaagaagaagaagaagaagaagaccaagccagagtgcccctgcagcgaggagatcagtgacaccagccaggagcccagcccccccaaggcctttgctgtgacccgctgtggcagcagccacaagccaggagtgcacatgagcccccagctgcacggccctgagagcggccaccacaagggcaaggtgaaggccctggaggaggacaacctgtctgagagcagcagcgagagcttcctgtggagcgatgatgaatatggccaggatgtggatgtgaccaccaacccagatgaggagctggatggagatgacagatatgactttgaggtggtgcgctgcatctgtgaggtgcaggaggagaatgacttcatgatccagtgtgaggagtgccagtgctggcagcacggcgtgtgcatgggcctgctggaggagaatgtgcctgagaagtacacctgctacgtgtgccaggaccccccaggccagaggcctggcttcaagtactggtatgacaaggagtggctgagccggggccacatgcacggcctggccttcctggaggagaactacagccaccagaatgccaagaagatcgtggccacccaccagctgctgggagatgtgcagagggtgattgaggtgctgcacggcctgcagctgaagatgagcatcctgcagagccgggagcacccagacctgcccctgtggtgccagccctggaagcagcacagcggggagggccgcagccacttcaggaacatccctgtgacagacaccaggagcaaggaggaggcccccagctaccgcaccctgaatggagctgtggagaagccccggcccctggccctgcccctgcccaggtctgtggaggagagctacatcaccagcgagcactgctaccagaagccccgggcctactacccagctgtggagcagaagctggtggtggagacccggggcagcgccctggatgatgctgtgaaccccctgcatgaaaatggagatgacagcctgagcccccggctgggctggcccctggaccaggacaggagcaaaggagacagcgaccccaagccaggcagccccaaggtgaaggagtatgtgtccaagaaggccctgcctgaggaggccccagccaggaagctgctggacagaggaggagagggcctgctgagcagccagcaccagtggcagttcaacctgctgacccacgtggagagcctgcaggatgaggtgacccacaggatggacagcattgagaaggagctggatgtgctggagagctggctggactacaccggggagctggagcccccagagcccctggcccggctgccccagctgaagcactgcatcaagcagctgctgatggacctgggcaaggtgcagcagatcgccctgtgctgcagcacctag

SEQ ID NO: 191230 - DNA, 1632 bp, Artificial Sequence
  derived and/or modified sequence
atgaccaagcacccccccaaccggcggggcatcagcttcgaggtgggagcccagttagaggcacgtgatcgcctcaaaaactggtaccccgctcacattgaggatattgattatgaggaaggcaaagtactgattcatttcaagaggtggaaccacagatacgacgaatggttttgctgggacagcccgtaccttagaccgctggaaaagatacagttgcgcaaggagggcctccatgaagaagacggaagctctgagtttcagatcaacgaacaggtactggcctgttggtccgactgtagattttaccctgcgaaggtcacggctgtcaacaaggacggcacgtataccgtcaagttctacgatggcgtcgtgcagacggtaaagcatattcacgtgaaagccttctcaaaagaccaaaacattgtcggtaacgctcgtcccaaggaaactgaccataagtctctgagtagctctcccgacaagcgggagaagtttaaggagcaaagaaaagcaaccgtcaacgtaaagaaagacaaggaggataaacccctgaagacagagaaaaggcctaagcaacccgacaaggagggaaaactcatatgctctgagaaaggaaaggtgtcagagaagagcctcccaaaaaatgagaaagaagataaggaaaatatctctgaaaacgatagggaatactctggggatgcccaggtggacaagaagcctgaaaacgatatcgttaaatcgccccaagaaaatctgcgagagccaaagcgcaagcgaggccgcccaccgagcatcgcgcctacggcagtcgactccaattcacagactctgcagccgataacactggagcttcggagacgcaagataagcaaaggctgcgaggtcccactgaaacggccaaggttagataagaactccagccaggaaaagagtaaaaactattcagagaacactgacaaagacctctcccgaaggcgcagctcccgactatctactaacggaactcatgagatccttgaccctgacctagtggtgagcgaccttgtggacactgatcccctgcaggataccctctcaagtactaaggagagcgaagagggccagctaaagtcggcgttggaagctggacaggtgtcctcagctctgacttgccacagctttggggacggctcaggcgcagcagggctggaactgaattgcccaagcatgggtgaaaatactatgaagacggagccaacgtctcctctggtggagctacaagagatcagcactgttgaggtcacaaacacgtttaagaaaactgacgacttcggcagttcaaacgcccccgctgttgatctggatcacaagtttaggtgtaaggtggtggattgcttgaagttttttcgcaaggctaaactgctacactaccatatgaagtactttcatggtatggagaaatctctcgaaccggaagagtccccaggtaagaggcacgtccagaccaggggacccagcgcctcagacaagccatcgcaagaaacgctgactcggaaaagagtatccgcctcttccccaaccaccaaagataaggagaagaacaaagaaaaaaaattcaaagaattcgttcgtgtaaaacccaagaaatag

SEQ ID NO: 191231 - DNA, 1650 bp, Artificial Sequence
  derived and/or modified sequence
atgaccaagcacccccccaaccggcggggcatcagcttcgaggtgggagctcagctcgaggcgcgcgatcgcctgaaaaactggtatcccgcccatattgaagatatcgactacgaagagggaaaggtgttgattcactttaaacggtggaatcatcgctatgacgagtggttttgttgggactctccataccttaggcccctggaaaagattcaacttcgtaaggaaggactgcacgaggaagacggcagcagcgagtttcagattaacgagcaggttctggcctgctggagcgattgccggttttaccctgcaaaggtcactgctgtgaacaaagacggcacttacactgtgaaattttatgatggcgtcgttcagactgtaaagcatattcacgtcaaggccttctctaaggatcagaatatcgttggcaacgcaaggcctaaagagaccgatcataaaagcctgagttcctctcctgacaaacgggaaaagtttaaagaacagcgaaaagcaaccgtcaatgtgaaaaaggataaggaggacaaacctctgaaaaccgagaagcgccctaagcagccagacaaagaaggcaagctgatctgtagcgagaagggcaaggtctctgaaaagtccctgcctaagaacgagaaggaagataaggagaatatttccgaaaacgacagagaatattctggggacgcgcaggtggataagaagcccgaaaatgacattgttaagagcccccaagagaatctccgtgagccaaagaggaagcgagggcgaccaccaagcattgcccccaccgcagtggattcaaattctcagaccctccagccaattacactcgagcttaggagaaggaaaatttcaaaaggctgcgaagttccccttaagaggccgcgcctggataaaaattcgtcccaggaaaagtcgaagaattacagtgaaaacacggataaggacctgtccagacgcagatcctctcgactgagcacaaatggaactcatgaaatcctcgatccggatctcgtggtatctgatctcgtcgatacagatcctctgcaggatactctaagtagcacaaaggagtctgaggaaggtcagctgaaatccgccctcgaggcgggacaggtgagctctgcattgacctgccacagttttggagacggctctggtgccgctggtttagagcttaattgccccagtatgggcgaaaacacgatgaagacagaacccacatcacctctagtagagctgcaggaaatctccaccgtagaggtcaccaacaccttcaaaaaaaccgatgattttggttcctccaatgctccggctgtcgacttagatcataagttcaggtgcaaggtagtggactgtttgaagtttttccggaaggccaagctactgcactaccacatgaagtacttccacggcatggaaaaaagtcttgaacctgaagagtctccgggtaaaaggcatgtgcagacacgaggccctagcgcatcggataagccgagtcaggagacactcacacgtaagcgggtgtcggcctcaagtccaacgaccaaggataaggagaaaaacaaagaaaagaagttcaaggagttcgtacgggtgaagccaaagaagaaaaagaagaagaagaagtag

SEQ ID NO: 191232 - DNA, 3039 bp, Artificial Sequence
  derived and/or modified sequence
atgaccaagcacccccccaaccggcggggcatcagcttcgaggtgggagcacagctggaggcacgagataggttgaaaaactggtacccagcccatattgaagacatagactatgaagaaggaaaggttcttatccacttcaagcggtggaaccatagatatgatgagtggttttgttgggattcaccatacctgaggcctctggagaaaatacagttacggaaagaaggtctacacgaggaggatgggagcagcgaattccagattaacgaacaagtcctcgcttgttggtcagactgccgattctatcccgctaaagtcaccgcagtcaataaggatggcacttataccgtgaagttctacgatggtgtcgtgcagacggtaaagcatatccacgtgaaggcttttagcaaggaccaaaatatcgtgggaaatgcgcgtcccaaagaaaccgaccacaagtcgctttctagcagtcctgataagcgagagaagttcaaggagcagcggaaggcaaccgtgaacgttaaaaaagacaaggaggacaaaccacttaaaactgagaaacgcccaaagcagcccgacaaggagggcaagctgatttgcagtgagaagggaaaggtgtcggaaaagtctttgccaaagaacgagaaagaagacaaagagaatatttccgagaatgatagggagtattccggagatgcccaggtggacaaaaaaccggagaacgacattgttaagagccctcaggaaaatttacgggagccgaagaggaaacggggtagacctccttcgatcgcgcctacggccgttgactcgaacagccagacacttcagcctataacattggaattgcggcggcgcaagatttcaaagggatgcgaggttcctttaaaacgtccgagactggataaaaactcgagccaggaaaaatcgaagaactacagtgagaatacagataaggacctttcacgacgccgatcttccagactgtcaaccaatggaacccacgagatcttggacccagatctggtggtgagcgacctggtggacacagatccactgcaagatactctgtccagtactaaggaatcagaggagggacagcttaaatctgcactggaagccggccaggtgtcctcagccttgacctgtcactcgttcggagatggatccggagctgccgggttggaactgaactgcccatctatgggagagaatacgatgaagaccgagcctaccagccccttggtggagctccaagaaatcagcactgttgaagtgacaaataccttcaagaagaccgatgactttggcagttcaaacgcccccgctgtggatctggatcataaattccgctgtaaagttgtagactgcctcaagttcttccgtaaagccaagctgctacattatcacatgaagtatttccacgggatggagaaatcactggagcccgaagagtctccaggaaaaagacatgtccagacacgcgggcccagtgcttccgataaaccctcccaggaaacactcactcgtaaacgagtttctgcctccagccccaccacaaaagataaagagaagaacaaggagaagaaattcaaggagtttgttagagtgaaaccaaagaagaaaaagaagaagaaaaaaaagaccaaacctgagtgcccatgcagtgaggagatcagtgacacaagccaggaaccttctccacccaaggcatttgccgttacccgatgtggatcctcacataagcccggcgttcatatgtccccgcaactacacggtcctgagagcggtcatcacaagggtaaagtgaaggccctggaggaagataacctgtccgaaagctccagcgagagtttcctgtggtccgacgatgagtacggacaggacgtggacgttaccaccaacccagatgaagaactggacggcgacgataggtacgatttcgaagtggtgcggtgtatctgcgaagtgcaggaagagaatgacttcatgatacagtgcgaagagtgccagtgttggcagcacggtgtgtgcatggggttgctggaggagaacgtcccagaaaagtatacatgctatgtgtgccaggacccccccggccagcggccgggatttaagtattggtacgataaggagtggttaagtagaggccacatgcatgggcttgcttttttagaagagaactatagccaccagaacgcaaaaaagatcgttgccactcaccagctactcggcgacgtgcagcgggttattgaagtcctacatggactgcaactgaaaatgtccattttgcagagtagagaacaccctgacttgcccctatggtgccagccttggaagcaacactcaggcgagggaagatctcactttagaaatatcccagttactgatacgcggtctaaggaggaggcaccatcctataggaccctaaatggagctgtagagaagcccagacctctagccttgccactgccacggtcggtggaagagagctatatcacctcggaacattgctaccaaaaacccagagcttactatcctgctgtggaacaaaaactggtggtggaaacacgggggtccgctctcgacgacgccgtcaatccactgcacgagaacggtgacgactccttgtccccaaggctgggttggcctctggaccaggatcgaagcaaaggtgatagcgatcccaagcctggtagccctaaagtgaaggagtacgttagcaagaaggccttgccggaagaggcccccgcccgaaaattgctagatcgtggaggagaaggcttactgtcctcccagcaccagtggcagtttaacctgctgactcacgtcgagtctctgcaagatgaggttacccacagaatggactctattgaaaaagagctcgacgttctcgaatcctggctggactacacaggcgagcttgaacctcctgaacccctagcacgcctcccgcagctcaagcactgtattaaacagctcttgatggatctggggaaagtgcagcagattgcgctatgttgttcgacgtag

SEQ ID NO: 191233 - DNA, 1632 bp, Artificial Sequence
  derived and/or modified sequence
atgactaagcaccctcccaaccgcaggggcatctcctttgaggtgggcgctcagctggaagcaagggacagattaaaaaattggtatccggctcacattgaggatattgattatgaggaaggcaaggtcttaatccactttaagcggtggaatcaccgatacgatgagtggttctgctgggattccccttacctgagacccttggagaagatccagctgcgcaaagagggactccatgaggaagacggtagctccgagtttcaaatcaacgagcaagtgctggcttgctggtcggattgcaggttctaccctgcaaaggtgaccgcagttaataaagacggtacatacacagtgaagttttacgacggtgtagtgcaaactgtcaagcacattcacgtcaaggccttcagcaaagaccagaatattgtggggaacgctcgccctaaggaaacggatcataagtctttaagctcgtctcccgataagcgcgaaaaattcaaggagcagcgtaaggcaactgtcaacgttaagaaagataaggaggacaagcctttgaaaactgagaagaggccgaaacaacccgacaaggaaggaaaactgatttgcagcgagaaagggaaggtgtcggaaaaatcacttcctaagaatgagaaggaggataaggagaatattagcgagaacgatcgtgagtattcaggtgacgctcaagtggacaagaaacccgaaaatgacatagtgaagtcaccgcaggagaacctgagggagcctaagaggaagcgcggaaggcccccttccatcgctccaactgcagtagattctaactcacaaacactgcaacccatcactctggagttgaggaggaggaagattagcaaaggctgtgaagttcccttaaaacggccacggctcgacaagaatagttcacaagaaaagtccaagaattactctgagaatacagacaaagacctatctagacgaaggtcctcacgcttgagcaccaacggaacgcacgaaatcttggaccccgatttagttgttagtgaccttgtggacactgatccactccaggacacactcagcagtacaaaggaatctgaggagggacagctgaaatcggctctcgaggccggacaggttagcagcgccctcacatgtcactctttcggcgacggtagtggggctgctggcctggagttgaactgtccttctatgggagagaatactatgaaaaccgaaccaacctccccgctcgttgagctacaggagatttctactgtagaggttactaatacattcaagaaaactgacgatttcggttcttctaatgcccctgccgtggacctggatcataaattcagatgtaaagtggtggattgccttaagttctttcgaaaagccaaacttctccattaccatatgaaatatttccacggcatggaaaagtcactcgaacccgaggagtcccctggaaagagacatgtgcagacccgtggcccttccgccagtgacaagccatctcaggagactttgactagaaaaagggttagtgcctccagcccaaccacaaaggataaggaaaagaacaaagaaaagaagtttaaggaatttgtccgggtgaaaccaaaaaaatag

SEQ ID NO: 191234 - DNA, 1650 bp, Artificial Sequence
  derived and/or modified sequence
atgacgaaacacccgccaaaccgaagaggtataagctttgaggtcggcgcacaactggaagcaagagaccggctgaaaaactggtaccccgctcatattgaggatattgactatgaagaggggaaagttctgattcatttcaagagatggaaccatcggtacgatgagtggttttgctgggattcaccatatttgaggcctctggagaagatacagttgagaaaagaggggctgcacgaggaggatgggagcagcgagtttcagattaacgagcaggttctggcgtgctggtcagattgccgtttctaccctgcgaaagtgacagctgttaacaaagacgggacgtatacggttaagttttatgatggagtggtccagacggttaagcatatacatgtgaaagctttttcaaaagatcagaacatcgtcggcaacgcaagaccgaaagaaaccgatcacaagtctctctccagctcacccgacaagagggaaaaattcaaagaacagcggaaggcgacggtcaacgtcaagaaagacaaggaagacaagccactaaagaccgagaaaaggccaaagcagcctgataaagaaggtaagctgatatgctcggaaaaaggcaaggtatcagaaaagagcctccctaaaaatgaaaaggaggataaagagaacatttccgagaatgaccgggagtactctggagacgcgcaggtggacaaaaagcccgaaaatgacattgtgaaatcaccacaggaaaacttgcgagaacccaaacggaagagaggcagacctccctctatcgcacctacggcagttgatagcaacagtcaaacactgcagcccattaccctggagctgcgcaggagaaagatatccaaaggatgtgaggttcctttgaaacgacccaggctcgataaaaacagtagtcaggagaagagtaagaattactcggagaacaccgacaaggacctgtctcggaggcgctcatctagattatccaccaacggaacccacgaaattctggatccagatttggttgtcagtgatctcgtagataccgatccattgcaggacaccctctcctcgaccaaagaaagcgaggagggtcagctgaagtccgctttagaggccggacaagtctccagcgccctgacatgtcactcgttcggagacggttccggcgctgctggcctagagctgaactgtccctctatgggcgagaatactatgaagaccgaacccaccagccccctggtagaactacaggagattagcaccgttgaagttaccaataccttcaaaaagaccgacgatttcggttcaagcaacgctccagctgtcgatctggatcataaatttcgctgtaaagttgtcgactgcctgaagttttttagaaaggccaaactactccactaccatatgaagtacttccacggtatggaaaagtcactggaacctgaagagtcgcctgggaagcggcacgttcaaacccgcggaccctcggccagcgacaaaccatcacaggagacactgactaggaagcgtgtgtccgcttcttcgcctacaacaaaggataaagaaaaaaataaggagaaaaaattcaaagagttcgtccgagtcaagcccaagaagaaaaagaaaaagaagaagtag

SEQ ID NO: 191235 - DNA, 3039 bp, Artificial Sequence
  derived and/or modified sequence
atgactaagcacccaccaaaccgccgtggcatttccttcgaagtaggggctcaactggaagctagagacaggcttaagaattggtatcctgcccatatagaggacattgactacgaggaggggaaggtactcatacactttaagcggtggaatcaccggtatgacgagtggttttgttgggacagtccctatttgagacccctcgagaagatccagcttcgcaaagaggggctgcacgaggaagacgggtcttccgagttccaaatcaatgagcaggtgcttgcatgttggtccgactgtaggttctacccggcaaaggtaacggctgtcaacaaggatggaacttataccgtcaagttttatgatggcgtggttcagacagtgaagcacatacatgtgaaagcctttagtaaggaccagaatatcgtcggcaatgctcgcccaaaggaaacagatcacaagtccctcagctcaagtcctgacaagagagaaaaattcaaggagcagcgaaaggccactgtgaatgtgaaaaaagataaggaggacaagcccctcaaaaccgagaagagaccaaaacagcctgacaaggagggaaagttgatctgctccgaaaagggcaaggtgagcgaaaagagtctccctaagaacgaaaaggaggataaagagaacatctctgaaaatgacagggaatacagcggggatgcgcaggttgacaagaaaccggaaaatgacattgtgaaatccccccaggaaaacctgcgtgagcctaaacgcaaacggggtcgtcctcctagtattgctcctactgccgtggatagcaacagccaaaccctacagcctataacactggaattgaggcgccgtaagatctcaaaaggctgcgaagttcccttaaagaggcccaggcttgacaaaaacagttcccaggagaagtccaagaactactcagaaaatacggacaaagatttgagcagaaggaggagctccagactttctacaaatggaacacatgagatcctggaccctgatctggtcgtgtcagatcttgtagacaccgaccccttacaggacactctctcctcaacaaaggaaagtgaggaaggacaactgaaatctgccctcgaagcaggacaggtcagctccgccctgacatgtcattccttcggcgacggaagcggcgcagctggtctggagctcaactgcccaagcatgggagagaacaccatgaagaccgagccaacaagcccactcgtggagctgcaggaaatttctaccgtggaagtgactaacaccttcaaaaagaccgatgattttggcagctcaaatgctccagctgtggatttggatcacaagtttaggtgcaaggtggtggattgtctgaaatttttccgtaaggccaaattgctgcactaccatatgaagtacttccacggcatggagaaaagcttggagccagaggaatcccctggcaagcgccatgtccaaaccaggggcccttccgcttctgacaagcccagccaggagactcttacgcgaaaacgtgtgtcagcctccagtcctaccaccaaggacaaggagaagaacaaggagaaaaagtttaaggagtttgtcagagtcaaacccaagaaaaaaaaaaagaaaaagaagaagacgaagcccgagtgcccatgctctgaggagatttccgacacaagtcaagagccaagcccgcctaaggccttcgcagtgaccagatgtggcagttctcacaaacctggcgttcatatgtccccccagctgcacggccctgagagcggccatcacaaaggaaaggtgaaagctctggaggaagacaacttgagcgaatcctcctcggagagcttcttatggagcgatgatgaatatggccaggacgtggacgtgaccacaaatccagacgaggaactggatggcgatgaccgctatgactttgaagtggtgcggtgcatctgtgaagttcaggaggaaaacgacttcatgattcagtgcgaggagtgccagtgctggcaacacggcgtctgtatgggtctccttgaggagaacgtcccagagaagtatacttgctatgtgtgtcaagacccgcctgggcagcgacctggcttcaagtattggtacgacaaagagtggttatccaggggtcatatgcacggtctggcattcctggaggaaaattattcccatcagaacgctaagaagatcgtggcaacacaccagctcctgggggacgtgcaaagagtcattgaggtgctacacgggctgcagttgaagatgtccatcttgcagtctcgagagcacccggaccttccgctctggtgccagccatggaagcagcattctggggaggggagaagtcacttcaggaatatccccgtcacggatactcgaagcaaggaagaagcgccatcttatcggacccttaacggcgctgtcgagaagcctaggcctctggctctccctctccctaggtccgtggaagagtcatacattacgtcagaacactgttaccagaagcccagggcctactatcccgcagtcgagcaaaagttagtcgttgaaacacgagggtcagccctcgacgacgccgtgaacccattgcatgagaatggcgatgatagcctttccccacggctggggtggcccttggaccaggaccgcagcaagggagattccgaccccaagcctgggagccctaaagtgaaggaatacgtgtcaaagaaagctttgcctgaggaggcacccgcacggaagctgctagatcgtggtggagaggggctcttgagcagccagcaccagtggcagttcaatctcctgacccatgtggagagcctgcaggacgaagtgacccaccgtatggactccatcgaaaaagaattagacgtgctggagagttggctggattataccggtgagctagagccccctgaaccgctggcgcgactcccccagctgaaacactgcattaagcagctgctgatggacttaggtaaagttcagcagatagcattatgctgttcaacatag

SEQ ID NO: 191236 - DNA, 1632 bp, Artificial Sequence
  derived and/or modified sequence
atgaccaagcacccccccaacagaagaggcatcagcttcgaggtgggcgcccagctggaggccagagacagactgaagaactggtaccccgcccacatcgaggacatcgactacgaggagggcaaggtgctgatccacttcaagagatggaaccacagatacgacgagtggttctgctgggacagcccctacctgagacccctggagaagatccagctgagaaaggagggcctgcacgaggaggacggcagcagcgagttccagatcaacgagcaggtgctggcctgctggagcgactgcagattctaccccgccaaggtgaccgccgtgaacaaggacggcacctacaccgtgaagttctacgacggcgtggtgcagaccgtgaagcacatccacgtgaaggccttcagcaaggaccagaacatcgtgggcaacgccagacccaaggagaccgaccacaagagcctgagcagcagccccgacaagagagagaagttcaaggagcagagaaaggccaccgtgaacgtgaagaaggacaaggaggacaagcccctgaagaccgagaagagacccaagcagcccgacaaggagggcaagctgatctgcagcgagaagggcaaggtgagcgagaagagcctgcccaagaacgagaaggaggacaaggagaacatcagcgagaacgacagagagtacagcggcgacgcccaggtggacaagaagcccgagaacgacatcgtgaagagcccccaggagaacctgagagagcccaagagaaagagaggcagaccccccagcatcgcccccaccgccgtggacagcaacagccagaccctgcagcccatcaccctggagctgagaagaagaaagatcagcaagggctgcgaggtgcccctgaagagacccagactggacaagaacagcagccaggagaagagcaagaactacagcgagaacaccgacaaggacctgagcagaagaagaagcagcagactgagcaccaacggcacccacgagatcctggaccccgacctggtggtgagcgacctggtggacaccgaccccctgcaggacaccctgagcagcaccaaggagagcgaggagggccagctgaagagcgccctggaggccggccaggtgagcagcgccctgacctgccacagcttcggcgacggcagcggcgccgccggcctggagctgaactgccccagcatgggcgagaacaccatgaagaccgagcccaccagccccctggtggagctgcaggagatcagcaccgtggaggtgaccaacaccttcaagaagaccgacgacttcggcagcagcaacgcccccgccgtggacctggaccacaagttcagatgcaaggtggtggactgcctgaagttcttcagaaaggccaagctgctgcactaccacatgaagtacttccacggcatggagaagagcctggagcccgaggagagccccggcaagagacacgtgcagaccagaggccccagcgccagcgacaagcccagccaggagaccctgaccagaaagagagtgagcgccagcagccccaccaccaaggacaaggagaagaacaaggagaagaagttcaaggagttcgtgagagtgaagcccaagaagtag

SEQ ID NO: 191237 - DNA, 1650 bp, Artificial Sequence
  derived and/or modified sequence
atgaccaagcacccccccaacagaagaggcatcagcttcgaggtgggcgcccagctggaggccagagacagactgaagaactggtaccccgcccacatcgaggacatcgactacgaggagggcaaggtgctgatccacttcaagagatggaaccacagatacgacgagtggttctgctgggacagcccctacctgagacccctggagaagatccagctgagaaaggagggcctgcacgaggaggacggcagcagcgagttccagatcaacgagcaggtgctggcctgctggagcgactgcagattctaccccgccaaggtgaccgccgtgaacaaggacggcacctacaccgtgaagttctacgacggcgtggtgcagaccgtgaagcacatccacgtgaaggccttcagcaaggaccagaacatcgtgggcaacgccagacccaaggagaccgaccacaagagcctgagcagcagccccgacaagagagagaagttcaaggagcagagaaaggccaccgtgaacgtgaagaaggacaaggaggacaagcccctgaagaccgagaagagacccaagcagcccgacaaggagggcaagctgatctgcagcgagaagggcaaggtgagcgagaagagcctgcccaagaacgagaaggaggacaaggagaacatcagcgagaacgacagagagtacagcggcgacgcccaggtggacaagaagcccgagaacgacatcgtgaagagcccccaggagaacctgagagagcccaagagaaagagaggcagaccccccagcatcgcccccaccgccgtggacagcaacagccagaccctgcagcccatcaccctggagctgagaagaagaaagatcagcaagggctgcgaggtgcccctgaagagacccagactggacaagaacagcagccaggagaagagcaagaactacagcgagaacaccgacaaggacctgagcagaagaagaagcagcagactgagcaccaacggcacccacgagatcctggaccccgacctggtggtgagcgacctggtggacaccgaccccctgcaggacaccctgagcagcaccaaggagagcgaggagggccagctgaagagcgccctggaggccggccaggtgagcagcgccctgacctgccacagcttcggcgacggcagcggcgccgccggcctggagctgaactgccccagcatgggcgagaacaccatgaagaccgagcccaccagccccctggtggagctgcaggagatcagcaccgtggaggtgaccaacaccttcaagaagaccgacgacttcggcagcagcaacgcccccgccgtggacctggaccacaagttcagatgcaaggtggtggactgcctgaagttcttcagaaaggccaagctgctgcactaccacatgaagtacttccacggcatggagaagagcctggagcccgaggagagccccggcaagagacacgtgcagaccagaggccccagcgccagcgacaagcccagccaggagaccctgaccagaaagagagtgagcgccagcagccccaccaccaaggacaaggagaagaacaaggagaagaagttcaaggagttcgtgagagtgaagcccaagaagaagaagaagaagaagaagtag

SEQ ID NO: 191238 - DNA, 3039 bp, Artificial Sequence
  derived and/or modified sequence
atgaccaagcacccccccaacagaagaggcatcagcttcgaggtgggcgcccagctggaggccagagacagactgaagaactggtaccccgcccacatcgaggacatcgactacgaggagggcaaggtgctgatccacttcaagagatggaaccacagatacgacgagtggttctgctgggacagcccctacctgagacccctggagaagatccagctgagaaaggagggcctgcacgaggaggacggcagcagcgagttccagatcaacgagcaggtgctggcctgctggagcgactgcagattctaccccgccaaggtgaccgccgtgaacaaggacggcacctacaccgtgaagttctacgacggcgtggtgcagaccgtgaagcacatccacgtgaaggccttcagcaaggaccagaacatcgtgggcaacgccagacccaaggagaccgaccacaagagcctgagcagcagccccgacaagagagagaagttcaaggagcagagaaaggccaccgtgaacgtgaagaaggacaaggaggacaagcccctgaagaccgagaagagacccaagcagcccgacaaggagggcaagctgatctgcagcgagaagggcaaggtgagcgagaagagcctgcccaagaacgagaaggaggacaaggagaacatcagcgagaacgacagagagtacagcggcgacgcccaggtggacaagaagcccgagaacgacatcgtgaagagcccccaggagaacctgagagagcccaagagaaagagaggcagaccccccagcatcgcccccaccgccgtggacagcaacagccagaccctgcagcccatcaccctggagctgagaagaagaaagatcagcaagggctgcgaggtgcccctgaagagacccagactggacaagaacagcagccaggagaagagcaagaactacagcgagaacaccgacaaggacctgagcagaagaagaagcagcagactgagcaccaacggcacccacgagatcctggaccccgacctggtggtgagcgacctggtggacaccgaccccctgcaggacaccctgagcagcaccaaggagagcgaggagggccagctgaagagcgccctggaggccggccaggtgagcagcgccctgacctgccacagcttcggcgacggcagcggcgccgccggcctggagctgaactgccccagcatgggcgagaacaccatgaagaccgagcccaccagccccctggtggagctgcaggagatcagcaccgtggaggtgaccaacaccttcaagaagaccgacgacttcggcagcagcaacgcccccgccgtggacctggaccacaagttcagatgcaaggtggtggactgcctgaagttcttcagaaaggccaagctgctgcactaccacatgaagtacttccacggcatggagaagagcctggagcccgaggagagccccggcaagagacacgtgcagaccagaggccccagcgccagcgacaagcccagccaggagaccctgaccagaaagagagtgagcgccagcagccccaccaccaaggacaaggagaagaacaaggagaagaagttcaaggagttcgtgagagtgaagcccaagaagaagaagaagaagaagaagaagaccaagcccgagtgcccctgcagcgaggagatcagcgacaccagccaggagcccagcccccccaaggccttcgccgtgaccagatgcggcagcagccacaagcccggcgtgcacatgagcccccagctgcacggccccgagagcggccaccacaagggcaaggtgaaggccctggaggaggacaacctgagcgagagcagcagcgagagcttcctgtggagcgacgacgagtacggccaggacgtggacgtgaccaccaaccccgacgaggagctggacggcgacgacagatacgacttcgaggtggtgagatgcatctgcgaggtgcaggaggagaacgacttcatgatccagtgcgaggagtgccagtgctggcagcacggcgtgtgcatgggcctgctggaggagaacgtgcccgagaagtacacctgctacgtgtgccaggacccccccggccagagacccggcttcaagtactggtacgacaaggagtggctgagcagaggccacatgcacggcctggccttcctggaggagaactacagccaccagaacgccaagaagatcgtggccacccaccagctgctgggcgacgtgcagagagtgatcgaggtgctgcacggcctgcagctgaagatgagcatcctgcagagcagagagcaccccgacctgcccctgtggtgccagccctggaagcagcacagcggcgagggcagaagccacttcagaaacatccccgtgaccgacaccagaagcaaggaggaggcccccagctacagaaccctgaacggcgccgtggagaagcccagacccctggccctgcccctgcccagaagcgtggaggagagctacatcaccagcgagcactgctaccagaagcccagagcctactaccccgccgtggagcagaagctggtggtggagaccagaggcagcgccctggacgacgccgtgaaccccctgcacgagaacggcgacgacagcctgagccccagactgggctggcccctggaccaggacagaagcaagggcgacagcgaccccaagcccggcagccccaaggtgaaggagtacgtgagcaagaaggccctgcccgaggaggcccccgccagaaagctgctggacagaggcggcgagggcctgctgagcagccagcaccagtggcagttcaacctgctgacccacgtggagagcctgcaggacgaggtgacccacagaatggacagcatcgagaaggagctggacgtgctggagagctggctggactacaccggcgagctggagccccccgagcccctggccagactgccccagctgaagcactgcatcaagcagctgctgatggacctgggcaaggtgcagcagatcgccctgtgctgcagcacctag

SEQ ID NO: 191239 - protein, 451 aa, Artificial Sequence
  derived and/or modified sequence
MPREIITLQLGQCGNQIGFEFWKQLCAEHGISPEGIVEEFATEGTDRKDVFFYQADDEHYIPRAVLLDLEPRVIHSILNSPYAKLYNPENIYLSEHGGGAGNNWASGFSQGEKIHEDIFDIIDREADGSDSLEGFVLCHSIAGGTGSGLGSYLLERLNDRYPKKLVQTYSVFPYQDEMSDVVVQPYNSLLTLKRLTQNADCVVVLDNTALNRIATDRLHIQNPSFSQINQLVSTIMSASTTTLRYPGYMNNDLIGLIASLIPTPRLHFLMTGYTPLTTDQSVASVRKTTVLDVMRRLLQPKNVMVSTGRDRQTNHCYIAILNIIQGEVDPTQVHKSLQRIRERKLANFIPWGPASIQVALSRKSPYLPSAHRVSGLMMANHTSISSLFESSCQQFDKLRKRDAFLEQFRKEDMFKDNFDEMDRSREVVQELIDEYHAATQPDYISWGTQEQ

SEQ ID NO: 191240 - DNA, 1356 bp, Artificial Sequence
  derived and/or modified sequence
atgcccagagagatcatcaccctgcagctgggccagtgcggcaaccagatcggcttcgagttctggaagcagctgtgcgccgagcacggcatcagccccgagggcatcgtggaggagttcgccaccgagggcaccgacagaaaggacgtgttcttctaccaggccgacgacgagcactacatccccagagccgtgctgctggacctggagcccagagtgatccacagcatcctgaacagcccctacgccaagctgtacaaccccgagaacatctacctgagcgagcacggcggcggcgccggcaacaactgggccagcggcttcagccagggcgagaagatccacgaggacatcttcgacatcatcgacagagaggccgacggcagcgacagcctggagggcttcgtgctgtgccacagcatcgccggcggcaccggcagcggcctgggcagctacctgctggagagactgaacgacagataccccaagaagctggtgcagacctacagcgtgttcccctaccaggacgagatgagcgacgtggtggtgcagccctacaacagcctgctgaccctgaagagactgacccagaacgccgactgcgtggtggtgctggacaacaccgccctgaacagaatcgccaccgacagactgcacatccagaaccccagcttcagccagatcaaccagctggtgagcaccatcatgagcgccagcaccaccaccctgagataccccggctacatgaacaacgacctgatcggcctgatcgccagcctgatccccacccccagactgcacttcctgatgaccggctacacccccctgaccaccgaccagagcgtggccagcgtgagaaagaccaccgtgctggacgtgatgagaagactgctgcagcccaagaacgtgatggtgagcaccggcagagacagacagaccaaccactgctacatcgccatcctgaacatcatccagggcgaggtggaccccacccaggtgcacaagagcctgcagagaatcagagagagaaagctggccaacttcatcccctggggccccgccagcatccaggtggccctgagcagaaagagcccctacctgcccagcgcccacagagtgagcggcctgatgatggccaaccacaccagcatcagcagcctgttcgagagcagctgccagcagttcgacaagctgagaaagagagacgccttcctggagcagttcagaaaggaggacatgttcaaggacaacttcgacgagatggacagaagcagagaggtggtgcaggagctgatcgacgagtaccacgccgccacccagcccgactacatcagctggggcacccaggagcagtag

SEQ ID NO: 191241 - DNA, 1356 bp, Artificial Sequence
  derived and/or modified sequence
atgcctcgtgaaattatcaccctgcagttggggcagtgcggaaatcagattgggtttgagttctggaagcagctctgtgccgaacacgggattagccccgaaggaatagtggaggaatttgctacagagggcaccgatcgtaaagacgtgttcttttaccaggcggacgatgaacattatatcccaagagctgtactgctggatttggagccgcgtgtcatccatagcatcctcaacagcccatacgctaaactgtataaccctgaaaatatctacctctctgagcatggaggtggagccggcaacaattgggcttctggcttctcacagggtgagaaaatccatgaggacatcttcgacatcatcgacagggaggctgacggaagtgatagcctcgaaggcttcgtcctctgtcacagcatagccggaggcaccggctcgggattgggctcttacctcctggaaagacttaacgatcgttatcctaagaaacttgtgcagacatactccgtctttccttaccaagacgagatgagcgacgtggtcgttcagccctacaactctttacttactctgaaacggcttacacagaacgcagactgtgtggttgttctggacaataccgccctaaatagaatcgcaaccgataggctgcacatccaaaatccctcgttctctcaaataaaccagttggtaagcaccattatgtctgccagcaccaccaccttgagatacccagggtacatgaacaatgatttgattggcttaatcgctagtcttattccaacaccacggctccattttttgatgaccggatacacacctctgaccacggaccagtcagtcgcttcggttcggaagaccacagtacttgacgtgatgcgtaggctcctgcagcccaagaatgttatggtgagcaccggcagggaccggcaaacaaaccactgttacattgccatcttgaatattatccaaggagaggtggatcctactcaagtccacaagtccttacaacggattcgagaacggaagctggccaacttcatcccctggggaccagcatcaatccaggtggcactttctagaaagtctccctatctcccctccgcacaccgagttagcggcctaatgatggccaatcacacttcaattagtagtctgttcgagtctagctgccagcaatttgataagttgcgcaaaagagacgcattcctggagcaattccggaaggaagatatgtttaaggacaactttgacgaaatggatagatctcgcgaagtagtgcaggaactcattgacgagtaccacgccgccactcaaccagactatattagttgggggacacaggagcagtag

SEQ ID NO: 191242 - DNA, 1356 bp, Artificial Sequence
  derived and/or modified sequence
atgccccgggagatcatcaccctgcagctgggccagtgtggcaaccagattggatttgagttctggaagcagctgtgtgccgagcacggcatcagccctgagggcatcgtggaggagtttgccacagagggcacagacaggaaggatgtgttcttctaccaggctgatgatgagcactacatccccagggctgtgctgctggacctggagcccagggtcatccacagcatcctgaacagcccctatgccaagctgtacaaccctgagaacatctacctgtctgagcacggcggcggggccggcaacaactgggccagcggcttcagccagggcgagaagatccacgaggacatctttgacatcatcgaccgggaggctgatggcagtgacagcctggagggctttgtgctgtgccacagcattgctgggggcactggaagtggcctgggcagctacctgctggagcggctgaatgaccgctaccccaagaagctggtgcagacctacagcgtcttcccctaccaggatgagatgtctgatgtggtggtgcagccctacaacagcctgctgaccctgaagaggctgacccagaatgctgactgtgtggtggtgctggacaacacagccctgaacagaattgccacagaccggctgcacatccagaaccccagcttcagccagatcaaccagctggtgtccaccatcatgtctgccagcaccaccaccctgcgctacccaggctacatgaacaatgacctgattggcctgattgccagcctcatccccaccccccggctgcacttcctgatgacaggctacacccccctgaccacagaccagagcgtggcctctgtgaggaagaccaccgtgctggatgtgatgaggcggctgctgcagcccaagaatgtgatggtgtccacaggccgggaccggcagaccaaccactgctacatcgccatcctgaacatcatccagggcgaggtggaccccacccaggtgcacaagagcctgcagaggatccgggagaggaagctggccaacttcatcccctggggccctgccagcatccaggtggccctgagcaggaagagcccctacctgcccagcgcccaccgggtgtctggcctgatgatggccaaccacaccagcatcagcagcctgtttgagagcagctgccagcagtttgacaagctgaggaagagagatgccttcctggagcagttcagaaaagaagacatgttcaaggacaactttgatgagatggacaggagccgggaggtggtgcaggagctgattgatgagtaccacgccgccacccagcctgactacatctcctggggcacccaggagcagtag

SEQ ID NO: 191243 - DNA, 1356 bp, Artificial Sequence
  derived and/or modified sequence
atgccccgggagatcatcaccctgcagctgggccagtgcggcaaccagattggtttcgaattttggaagcagctgtgtgctgaacatggtatttcgcctgaggggatcgtcgaagagttcgctaccgaaggcacagaccggaaggatgtgttcttttatcaggccgacgacgaacactatatacccagagcagttctgctcgacctggagccccgcgtcatccatagcatactcaatagcccgtacgctaaactgtataaccccgaaaatatttacctctcagaacatgggggcggggccggaaacaactgggcatctggattttcccaaggagagaagattcacgaggacattttcgacatcattgaccgcgaggcagatggctcagatagcctggagggctttgtactgtgccactccattgcaggtggtacagggtccggcctgggctcctacctcctggagcggctgaatgataggtatcccaagaagttagtgcagacttactccgtcttcccttatcaagacgagatgtctgatgtcgttgtgcagccttacaatagcctcctcacgcttaaacgactgacacagaacgccgattgcgtggttgtcctggataatactgcacttaacaggattgccacagaccgactgcatatccaaaatcctagtttctcacagattaatcagttagtcagcacaattatgtccgcaagtacaaccaccctgaggtacccaggatatatgaacaatgacttaatcggcctgattgcatccctgattcctacgcctagactgcactttcttatgacagggtataccccgctaacgaccgaccagagtgtggcctccgtgcggaaaacaacagtgctggacgtcatgagaagactgttgcagcccaagaacgttatggtgagcacaggacgagatagacagactaatcattgttacattgccattctaaacatcattcagggggaggtcgaccccacccaggtccacaagagtctccaacgcatccgagaacggaaactggcaaacttcatcccttggggccctgcctctatacaggtggccctctccagaaagtccccatatctgccatcggcacacagagtgtccggtctgatgatggccaaccacacctctatatcatccctcttcgaatcttcgtgtcaacagttcgataaactgcgtaagcgcgacgcctttctggaacagttccgcaaggaagatatgttcaaggacaacttcgacgaaatggataggtcccgcgaggtggtccaggagttgatagacgagtaccatgccgccacccagcccgactacatctcttggggcacacaggaacagtag

SEQ ID NO: 191244 - DNA, 1356 bp, Artificial Sequence
  derived and/or modified sequence
atgcctcgggagatcatcaccctccagcttggccagtgcgggaaccagatcggttttgaattttggaaacagttgtgcgccgaacacgggatatcccccgaggggatagtggaggagttcgccaccgagggtacagacaggaaagacgttttcttttaccaggccgatgatgagcattatatcccgagagccgttctgctagacttagaacctcgggtgattcacagtatccttaatagtccatatgccaagttgtacaatccagagaacatctatttgagcgaacacgggggaggcgctggcaacaactgggcgagcggcttcagccaaggcgagaaaatccacgaggatatattcgatataatcgaccgagaggctgacgggtccgacagtttggaagggtttgtcttgtgccattccatcgccggaggtaccgggtccgggctgggaagttacctgctggaacgtctgaacgacaggtaccctaagaagctcgtacagacttattctgtgttcccttatcaagacgaaatgagcgatgtcgtcgtacagccttataactcactactgaccttgaagcgtctaacccagaatgctgattgtgtggtagtgctcgacaataccgccctgaacagaatagcaacagatcggctgcatatccaaaacccgagttttagccagattaaccagttagtctccactatcatgtcagcctccacaactactctcaggtaccccggatacatgaacaatgacctgatcggtctcatcgccagcttgattccgacccctaggcttcacttcctgatgactggatatactcccttgacaacagaccagagcgtggcttcagtgcgaaaaacgacggtgctggatgtgatgcggagattgctgcagccgaagaacgtcatggtctcaactggaagagacagacagacaaatcactgttatattgctattctcaatatcatccagggtgaagtggaccctacccaggtacacaaaagcctccagagaatcagggagcgaaagctcgctaacttcattccttggggccctgcatcaatacaggtcgcactctccaggaagtctccataccttccctccgcacatcgcgtttctgggctaatgatggccaaccacacgagtatctcctcgctgttcgagtcttcttgtcaacaattcgacaagttacgcaagcgcgacgcctttttggagcaattcaggaaagaagacatgttcaaagacaatttcgacgaaatggacagatcccgggaagtcgtccaagaactgattgacgaataccacgctgccactcagccagactacatctcctggggaactcaggagcaatag

SEQ ID NO: 191245 - DNA, 1815 bp, Artificial Sequence
  derived and/or modified sequence
aggagcgggcgtggcctgactctgcgcctgtgcggaattccagctgcgactgctgagggagaaaatgatgcccaggttgggctccccggcccaccggccgaggagaggcctgcgctgcacacgcgcagaccgagcatccgcgtcaagaggcgaagagagcgcgcgctccccacgtcctgcgctcctggctgccgggcattcgtctcagccgtgactctcgccaggccggggctggcgcgcccacgtctgaagagcgatgccccgggagatcatcaccctgcagctgggccagtgcggcaaccagattgggttcgagttctggaaacagctgtgcgccgagcatggtatcagccccgagggcatcgtggaggaattcgccaccgagggcactgaccgcaaggacgtctttttctaccaggcagacgatgagcactacatcccccgggccgtgctgctggacttggaaccccgggtgatccactccatcctcaactccccctatgccaagctctacaacccagagaacatctacctgtcggaacatggaggaggagctggcaacaactgggccagcggattctcccagggtgagaaaattcatgaagacatctttgacatcatagaccgagaagcagatggaagtgacagtttggagggcttcgtgctgtgtcactccatcgctgggggtacgggttctggcctgggctcctacctcctggagcgactgaatgacaggtaccccaagaagctagtgcagacttattcagtgtttccctaccaggacgagatgagcgacgtagtggttcagccctacaattcactcctgacactcaagaggctgacgcagaacgcagattgtgtggtggtgctggacaacacagccctgaaccggattgccacagaccgcctgcacatccagaacccgtccttctcccagatcaaccagctggtgtccaccatcatgtcggccagcaccaccaccctgcgctaccccggctacatgaacaatgacctcatcggcctcatcgcctcgctcattcccaccccacggctccacttcctcatgaccggctacaccccgctcactacagaccagtcagtggccagcgtgaggaagaccacggtcctggatgtcatgaggcggctgctgcagcccaagaacgtgatggtgtccacaggccgagaccgccagaccaaccactgctacatcgccatcctcaacatcatccagggagaggtggaccccacccaggtccacaagagcctgcagaggatccgggaacggaagttggccaacttcatcccgtggggccccgccagcatccaggtggccctgtcgaggaagtctccctacctgccctcggcccaccgggtcagcgggctcatgatggccaaccacaccagcatctcctcgctctttgaaagttcctgccagcagtttgacaagctgcggaagcgggatgccttcctcgagcagttccgtaaggaggacatgttcaaggacaactttgatgagatggacaggtctagggaggttgttcaggagctcattgatgagtaccatgcggccacccagccagactacatttcctggggcacccaggagcagtgatttccctccccactactccttctccttctagatggtaaccacagcctcgaccatgcctgctccctctgacccagcttcacctcatggacaacccttcttggttcatctccagcccgtgagctggtcctgcttcctcccttccatgccctaacttttaatatgcttgttcagctctaataaagtaataaagcttggttgtcagt

SEQ ID NO: 191246 - protein, 1036 aa, Artificial Sequence
  derived and/or modified sequence
MYLVAGDRGLAGCGHLLVSLLGLLLLLARSGTRALVCLPCDESKCEEPRNCPGSIVQGVCGCCYTCASQRNESCGGTFGIYGTCDRGLRCVIRPPLNGDSLTEYEAGVCEDENWTDDQLLGFKPCNENLIAGCNIINGKCECNTIRTCSNPFEFPSQDMCLSALKRIEEEKPDCSKARCEVQFSPRCPEDSVLIEGYAPPGECCPLPSRCVCNPAGCLRKVCQPGNLNILVSKASGKPGECCDLYECKPVFGVDCRTVECPPVQQTACPPDSYETQVRLTADGCCTLPTRCECLSGLCGFPVCEVGSTPRIVSRGDGTPGKCCDVFECVNDTKPACVFNNVEYYDGDMFRMDNCRFCRCQGGVAICFTAQCGEINCERYYVPEGECCPVCEDPVYPFNNPAGCYANGLILAHGDRWREDDCTFCQCVNGERHCVATVCGQTCTNPVKVPGECCPVCEEPTIITVDPPACGELSNCTLTGKDCINGFKRDHNGCRTCQCINTEELCSERKQGCTLNCPFGFLTDAQNCEICECRPRPKKCRPIICDKYCPLGLLKNKHGCDICRCKKCPELSCSKICPLGFQQDSHGCLICKCREASASAGPPILSGTCLTVDGHHHKNEESWHDGCRECYCLNGREMCALITCPVPACGNPTIHPGQCCPSCADDFVVQKPELSTPSICHAPGGEYFVEGETWNIDSCTQCTCHSGRVLCETEVCPPLLCQNPSRTQDSCCPQCTDQPFRPSLSRNNSVPNYCKNDEGDIFLAAESWKPDVCTSCICIDSVISCFSESCPSVSCERPVLRKGQCCPYCIEDTIPKKVVCHFSGKAYADEERWDLDSCTHCYCLQGQTLCSTVSCPPLPCVEPINVEGSCCPMCPEMYVPEPTNIPIEKTNHRGEVDLEVPLWPTPSENDIVHLPRDMGHLQVDYRDNRLHPSEDSSLDSIASVVVPIIICLSIIIAFLFINQKKQWIPLLCWYRTPTKPSSLNNQLVSVDCKKGTRVQVDSSQRMLRIAEPDARFSGFYSMQKQNHLQADNFYQTV

SEQ ID NO: 191247 - DNA, 3111 bp, Artificial Sequence
  derived and/or modified sequence
atgtacctcgtggcaggggatcggggtttagccgggtgcggacatttgttggtcagcctcctgggtttgctgctactactggcccgtagcgggacacgcgctcttgtttgcctgccttgtgatgagagcaagtgtgaggaacctcgcaattgcccaggttccatagtacagggcgtgtgcggctgttgctatacatgcgcctcgcagcggaatgagtcatgcggagggacattcggtatctacggcacctgcgacaggggattacgctgcgttattcgcccaccgctgaacggagactcgctcacagaatatgaagccggggtgtgtgaagacgaaaactggacagacgaccagctacttggattcaaaccctgtaatgaaaatctaatcgctgggtgtaacatcattaacggtaaatgtgaatgcaatacaattcgaacctgctctaatccgtttgagtttcctagccaggatatgtgtctcagcgccctgaaacgaattgaggaggaaaaacccgactgtagcaaagcacggtgtgaggtgcagttcagccctcgatgtcctgaggattcagtgctgatcgaaggctatgcacccccaggggagtgctgcccattgccatcaaggtgcgtgtgtaacccagcaggctgccttagaaaagtgtgccagcctggcaacctgaacatcttggtgtccaaggcgagcgggaagccaggggagtgttgcgacctatatgagtgtaagccagtgttcggagtggattgccggacagttgagtgtcccccagtccagcaaaccgcttgcccccccgacagttacgaaactcaagtccggttgactgctgacggttgctgcacactgcccactagatgtgaatgcctatcagggctgtgtgggttccctgtgtgtgaagttggctccactccccggattgtgtcgaggggtgacggtactccgggtaaatgctgtgacgtcttcgagtgcgtaaacgacacaaagcccgcgtgcgtgttcaacaatgtggaatattatgatggcgacatgtttcggatggataattgccggttttgccgatgccaggggggcgtcgcaatatgctttaccgcacaatgcggtgaaataaactgcgaacgttactacgtgcctgagggcgaatgttgccccgtgtgtgaggaccccgtgtaccctttcaataatccagctgggtgttatgccaacggtctcatactggcgcacggcgacagatggcgcgaggatgactgcactttctgtcagtgtgttaacggggagcgacactgcgtcgccacagtatgcggccagacatgtacaaacccagtgaaggtccccggcgaatgttgtccagtgtgcgaggaacctacaataattaccgtggatccaccggcctgtggagaattatctaattgtactctgactggaaaggattgcattaacggattcaaacgtgaccacaatggctgtcgaacttgccagtgcattaacacagaggagctgtgcagtgaacgtaagcagggctgcactctgaattgtcccttcggattcctcaccgatgcacagaactgcgagatttgtgaatgcaggcctagacccaagaagtgccgacctattatctgcgacaaatattgcccattaggactacttaagaacaagcacggatgcgatatctgtagatgcaagaaatgtcccgaattgtcatgctccaaaatttgtccgctgggttttcaacaggattcccatggctgcctgatctgtaagtgccgagaagcttcagcctcagctggccccccgatattgtcagggacctgtttgacagtagacggacatcaccataaaaatgaggagtcctggcacgatggatgccgagagtgttattgtctcaacggacgggagatgtgtgctctgataacgtgtcccgtccccgcctgtggaaatcctaccatccaccccggtcagtgctgtccctcttgtgcagatgactttgtcgtccagaaacccgagctgtctactcccagcatttgccacgctcccggtggcgaatactttgtcgaaggcgagacttggaacattgactcttgtacccagtgtacctgccatagtggcagagtgttgtgcgagaccgaagtttgcccccccctactctgccagaatccaagtcgcactcaagatagttgttgtccgcagtgtacggaccaaccttttagaccttctctttctaggaacaattcagtacctaattactgtaagaatgacgagggcgatatatttcttgcagctgaaagctggaagccagatgtctgtacgagctgcatttgcatcgattcagtgattagctgtttctccgaaagttgcccatctgtgagctgtgagcgtcctgtgcttcgcaaaggacagtgttgcccttactgcatcgaggatacgattccgaagaaggtcgtgtgccattttagcggaaaagcctatgcggatgaagagcgctgggacctggactcctgcacccattgttattgtctccagggccagaccttgtgctctactgtgtcatgtccacccctgccttgcgtggagcccatcaacgttgagggctcttgttgcccgatgtgccccgagatgtacgtgcctgaaccgactaacattccgatcgaaaagaccaaccacaggggcgaggttgacctggaggtccccttgtggccgactcccagcgagaatgacatcgtgcacctgcctagggatatgggacacctacaagtggactacagggacaacaggctgcacccttcagaagatagctccctggacagcattgcctcagtggtcgtccccatcatcatttgcttgtctatcataatcgctttccttttcatcaaccagaaaaagcaatggatccccctgctgtgttggtacaggactcctacaaaaccgtcgtctctcaataaccagttagtctctgtggattgcaagaaaggcaccagggtccaggtggactccagccagcgtatgctccgcattgctgagcccgacgcccggtttagcggattctatagcatgcagaaacagaatcatttgcaggccgataacttctaccagactgtgtag

SEQ ID NO: 191248 - DNA, 3111 bp, Artificial Sequence
  derived and/or modified sequence
atgtacctggtggccggggaccggggcctggccggctgcggccacctgctggtgtccctgctgggcctgctgctgctgctggcccggagcggcacccgggccctggtgtgcctgccctgtgatgagagcaaatgtgaggagcccaggaactgccccggcagcatcgtgcagggcgtgtgtggctgctgctacacctgtgccagccagagaaatgaaagctgtggcggcaccttcggcatctacggcacctgtgaccggggcctgcgctgcgtcatccggccccccctgaatggagacagcctgacagaatatgaggccggcgtgtgtgaagatgagaactggacagatgaccagctgctgggcttcaagccctgcaatgaaaacctgattgctggctgcaacatcatcaatggaaaatgtgagtgcaacaccatccgcacctgcagcaacccctttgagttccccagccaggacatgtgcctgagcgccctgaagagaattgaggaggagaagccagactgcagcaaggcccgctgtgaggtgcagttcagcccccgctgcccagaagattctgtgctgattgagggctacgcccctcctggagagtgctgccccctgcccagccgctgtgtgtgcaacccagctggctgcctgaggaaggtgtgccagcccggcaacctgaacatcctggtgtccaaggccagcggcaagccaggagagtgctgtgacctgtatgagtgcaagcctgtgtttggagtggactgcaggacagtggagtgcccccctgtgcagcagacagcctgccccccagacagctatgagacccaggtgcggctgacagcagatggctgctgcaccctgcccacccgctgtgagtgcctgagcggcctgtgtggcttccctgtgtgtgaggtgggcagcaccccaagaattgtgtccagaggagatggcaccccaggcaagtgctgtgatgtgtttgaatgtgtgaatgacaccaagccagcctgtgtgttcaacaacgtggagtactatgatggagacatgttcaggatggacaactgccgcttctgccgctgccagggcggcgtggccatctgcttcaccgcccagtgtggggagatcaactgtgagcgctactacgtgcctgaaggagagtgctgccctgtgtgtgaagatcctgtgtaccccttcaacaacccagctggctgctacgccaacggcctcatcctggcccacggggaccgctggagagaagatgactgcaccttctgccagtgtgtgaatggagagcggcactgtgtggccaccgtgtgtggccagacctgcaccaaccctgtgaaggtgcctggagagtgctgccctgtgtgtgaggagcccaccatcatcaccgtggaccccccagcctgtggggagctgagcaactgcaccctgaccgggaaggactgcatcaatggcttcaagagggaccacaacggctgcaggacctgccagtgcatcaacacagaggagctgtgcagcgagaggaagcagggctgcaccctgaactgccccttcggcttcctgacagatgcccagaactgtgagatctgtgaatgtcggccccggcccaagaagtgccggcccatcatctgtgacaagtactgccccctgggcctgctgaagaacaagcacggctgtgacatctgccgctgcaagaagtgcccagagctgagctgcagcaagatctgccccctgggcttccagcaggacagccacggctgcctgatctgcaagtgccgggaggccagcgccagcgctggcccccccatcctgagcggcacctgcctgactgtggatggccaccaccacaagaatgaggagagctggcatgatggctgccgggagtgctactgcctgaatggccgggagatgtgtgccctgatcacctgccctgtgcctgcctgtggcaaccccaccatccaccctggccagtgctgccccagctgtgctgatgactttgtggtgcagaagccagagctgagcacccccagcatctgccacgcccctggaggagagtactttgtggagggggagacctggaacatcgacagctgcacccagtgcacctgccacagcggccgggtgctgtgtgaaacagaggtgtgcccccccctgctgtgccagaaccccagcaggacccaggacagctgctgcccccagtgcacagaccagcccttccggcccagcctgagcaggaacaacagcgtgcccaactactgcaagaatgatgaaggagacatcttcctggccgctgagagctggaagccagatgtgtgcaccagctgcatctgcatcgacagcgtcatcagctgcttcagcgagagctgccccagcgtgtcctgtgagaggcctgtgctgaggaagggccagtgctgcccctactgcatcgaggacaccatccccaagaaggtggtgtgccacttcagcggcaaggcctatgcagatgaggagcgctgggacctggacagctgcacccactgctactgcctgcagggccagaccctgtgcagcacagtgtcctgcccccccctgccctgtgtggagcccatcaacgtggagggcagctgctgccccatgtgcccagagatgtatgtgcctgagcccaccaacatccccatcgagaagaccaaccacagaggagaggtggacctggaggtgcccctgtggcccacccccagtgaaaatgacatcgtgcacctgccccgggacatgggccacctgcaggtggactacagagacaaccggctgcaccccagcgaggacagcagcctggacagcatcgcctctgtggtggtgcccatcatcatctgcctgagcatcatcatcgccttcctgttcatcaaccagaagaagcagtggatccccctgctgtgctggtaccgcacccccaccaagcccagcagcctgaacaaccagctggtgtctgtggactgcaagaagggcaccagggtgcaggtggacagcagccagaggatgctgagaattgctgagccagatgcccgcttcagcggcttctacagcatgcagaagcagaaccacctgcaggccgacaacttctaccagacagtgtag

SEQ ID NO: 191249 - DNA, 3111 bp, Artificial Sequence
  derived and/or modified sequence
atgtacctggtggccggcgaccggggcctggccggctgcggccacctgctggtctctcttctggggctgctgctgctgctggctagatctgggacgcgtgcacttgtgtgcttgccatgtgacgaaagtaaatgcgaagaaccccgcaactgcccaggctcaattgtgcagggtgtttgtgggtgctgctacacctgcgcctctcagcgcaacgaatcttgtggggggacatttggcatctacggaacttgtgaccgcggactccggtgcgttattcggcctccacttaatggggattccctcaccgagtatgaagccggcgtgtgtgaagacgagaattggacggacgatcagctgcttggctttaagccctgtaacgagaacctgatcgctggttgtaacattatcaatgggaagtgcgaatgcaatactattaggacctgctccaatcccttcgaatttccctcccaggacatgtgcctgagtgccctgaaaaggattgaagaagaaaagccagattgttccaaagcgcggtgtgaggttcagttttccccacggtgccctgaggacagcgttttgatcgaggggtatgctccaccaggagaatgctgtccacttccaagccgctgtgtgtgcaaccctgccggctgtcttaggaaggtttgtcagcctggaaatctgaatattctcgtaagtaaggctagtggaaagccaggggaatgctgtgacctgtatgaatgtaaacccgttttcggagtagactgtcggacagtggagtgccctcccgtccaacagaccgcctgtccaccagactcatatgagacccaagtgcgcttgacggctgatggctgttgcacactgcccacacgttgtgaatgccttagcggactttgcggctttccagtgtgtgaggtgggctcaacacctcgtatcgtctctagaggggatgggacgccgggaaaatgttgcgatgtattcgaatgcgtgaatgacaccaagccggcgtgtgtttttaataatgtcgagtattacgatggagacatgttccgtatggataattgcaggttttgccgatgtcaaggtggtgttgccatctgcttcaccgctcagtgtggagagattaactgcgagcgatattatgtgcctgagggggagtgttgccccgtgtgcgaagaccctgtttacccctttaataacccagcaggctgctacgccaacgggctgatccttgcccatggagatcgttggcgcgaggatgattgcaccttttgtcagtgtgtaaacggcgaacgacactgcgtcgcaaccgtatgcggccagacttgcacaaatccggtaaaagtcccaggggagtgttgccctgtctgtgaggagccgaccatcattacggttgacccacccgcgtgtggggagctgtctaactgcacgctgacaggtaaagactgtataaatggctttaaacgagatcacaacgggtgtagaacttgccagtgcattaatacagaagagctgtgttctgagagaaaacagggctgtactctgaattgcccattcggattcttgacggacgcccagaactgcgagatttgtgagtgccgccccagacctaagaagtgtagacccatcatttgcgataaatactgtccattggggctgttaaaaaataagcacggatgcgacatctgcagatgcaagaagtgtccagaactctcctgtagcaaaatttgccctctgggcttccagcaggacagccacggttgccttatctgcaagtgtagggaggcaagcgcctcagctggacctcccatcctctcaggcacttgcctcacggtggatggtcaccatcataagaatgaggaaagctggcatgacgggtgccgggagtgctattgcttgaatggacgggaaatgtgtgccctgattacatgccctgtgccagcctgcgggaacccaactatccatcctggtcaatgttgtccgagctgcgctgacgacttcgtcgtgcaaaagcctgagctcagtaccccaagcatatgtcacgctccggggggtgagtacttcgttgagggagagacctggaacatagatagctgcacacagtgcacatgccattcagggcgcgttctgtgcgagacagaagtctgtccgcccctcctgtgtcagaacccctccagaactcaagactcttgttgcccacagtgcactgatcagccctttagaccgagcctcagtcgaaacaatagtgtgcccaactattgtaaaaacgatgaaggcgatatctttttagctgcagagtcatggaaacccgacgtgtgcacctcatgtatatgcattgactccgtcattagctgcttttccgagtcttgtccctcagtgtcctgcgaaaggcctgttctgaggaagggacagtgttgtccctactgtattgaggataccattccaaagaaagtggtgtgccatttttccggaaaagcatacgctgatgaggaaagatgggatctggattcatgtactcattgttactgcctgcaggggcagaccctgtgctctactgtgagttgcccacccttgccatgtgtagaacctattaatgtggaaggttcatgttgccccatgtgccccgaaatgtatgtgcctgaacctactaacattcctattgaaaaaacaaaccataggggcgaggtagatctcgaggtccctctgtggccaactccttcggaaaacgacattgtgcacctgcctagggacatgggccatctgcaggtcgattatagggataatcggctgcaccccagcgaggatagttcattggactcaattgcatctgttgtcgtccccatcattatctgtctgagtataatcatcgccttcttgtttatcaaccagaagaagcagtggatcccactgctgtgctggtatcgcactcccactaagccgagtagcctgaataatcagctggtgagtgtggactgcaagaagggtaccagggtgcaggtcgattcctcacagcgtatgctacgcatagccgagccggatgccaggtttagcggcttctattctatgcagaagcagaaccacctgcaggccgataatttctatcaaaccgtctag
